United States Patent Application Publication US 2024/0398993 A1 - sequence listing, part 16

SEQ ID NO: 58218 - protein, 73 aa, Homo sapiens
MKAESPGKHEFSVDMTCGGCAEAVSRVLNKLGGVKYDIDLPNKKVCIESEHSMDTLLATLKKTGKTVSYLGLE

SEQ ID NO: 58219 - protein, 98 aa, Homo sapiens
  MOD_RES (1)..(1): Any amino acid
XVFQLLPSFPTLTRSKSHESQLGNRIDDVSSMRFACLLPHLETSQGQLTEPSSEARSKLEDQARRGEPHHATGLAWPAPVLMDIDQGDAYIINHCAPL

SEQ ID NO: 58220 - protein, 129 aa, Homo sapiens
MPITLTVSTSSLNLMAADCKQIIANHHMQSISFASGGDPDTAEYVAYVAKDPVNQRACHILECPEGLAQDVISTIGQAFELRFKQYLRNPPKLVTPHDRMAGFDGSAWDEEEEEPPDHQYYNDFPGKEP

SEQ ID NO: 58221 - protein, 136 aa, Homo sapiens
MTDFTRGKGPLKNTSDVISAAKKIAEAGSRMDKLGRTIADHVDSAMSLIQAAKNLMNAVVQTVKASYVASTKYQKSQGMASLNLPAVSWKMKAPEKKPLVKREKQDETQTKIKRASQKKHVNPVQALSEFKAMDSI

SEQ ID NO: 58222 - protein, 62 aa, Homo sapiens
MELHILEHRVRVLSVARPGLWLYTHPLIKLLFLPRRSRCAPGFGSADRGWGLCSRSGPGSED

SEQ ID NO: 58223 - protein, 86 aa, Homo sapiens
MQLFLLLCLVLLSPQGASLHRHHPREMKKRVEDLHVGATVAPSSRRDFTFDLYRALASAAPSQSIFFSPVSISMSLAMLSLGAGSS

SEQ ID NO: 58224 - protein, 402 aa, Homo sapiens
MKWLGESKNMVVNGRRNGGKLSNDHQQNQSKLQHTGKDTLKAGKNAVERRSNRCNGNSGFEGQSRYVPSSGMSAKELCENDDLATSLVLDPYLGFQTHKMNTSAFPSRSSRHFSKSDSFSHNNPVRFRPIKGRQEELKEVIERFKKDEHLEKAFKCLTSGEWARHYFLNKNKMQEKLFKEHVFIYLRMFATDSGFEILPCNRYSSEQNGAKIVATKEWKRNDKIELLVGCIAELSEIEENMLLRHGENDFSVMYSTRKNCAQLWLGPAAFINHDCRPNCKFVSTGRDTACVKALRDIEPGEEISCYYGDGFFGENNEFCECYTCERRGTGAFKSRVGLPAPAPVINSKYGLRETDKRLNRLKKLGDSSKNSDSQSVSSNTDADTTQEKNNAKNPEEKGRCFP

SEQ ID NO: 58225 - protein, 219 aa, Homo sapiens
MAGSADSYTSRPSDSDVSLEEDREAIRQEREQQAAIQLERAKSKPVAFAVKTNVSYCGALDEDVPVPSTAISFDAKDFLHIKEKYNNDWWIGRLVKEGCEIGFIPSPLRLENIRIQQEQKRGRFHGGKSSGNSSSSLGEMVSGTFRATPTSTAKQKQKVTEHIPPYDVVPSMRPVVLVGPSLKGYERKYKVKLKESLSWQDLCNWLFLMQTPSITQHNL

SEQ ID NO: 58226 - protein, 312 aa, Homo sapiens
MGCVFCKKLEPVATAKEDAGLEGDFRSYGAADHYGPDPTKARPASSFAHIPNYSNFSSQAINPGFLDSGTIRGVSGIGVTLFIALYDYEARTEDDLTFTKGEKFHILNNTEGDWWEARSLSSGKTGCIPSNYVAPVDSIQAEEWYFGKIGRKDAERQLLSPGNPQGAFLIRESETTKGAYSLSIRDWDQTRGDHVKHYKIRKLDMGGYYITTRVQFNSVQELVQHYMEVNDGLCNLLIAPCTIMKPQTLGLAKDAWEISRSSITLERRLGTGCFGDVWLGTWNGSTKVAVKTLKPGTMSPKAFLEEAQVMKL

SEQ ID NO: 58227 - protein, 355 aa, Homo sapiens
MRHSKRTYCPDWDDKDWDYGKWRSSSSHKRRKRSHSSAQENKRCKYNHSKMCDSHYLESRSINEKDYHSRRYIDEYRNDYTQGCEPGHRQRDHESRYQNHSSKSSGRSGRSSYKSKHRIHHSTSHRRSHGKSHRRKRTRSVEDDEEGHLICQSGDVLSARYEIVDTLGEGAFGKVVECIDHKAGGRHVAVKIVKNVDRYCEAARSEIQVLEHLNTTDPNSTFRCVQMLEWFEHHGHICIVFELLGLSTYDFIKENGFLPFRLDHIRKMAYQICKSVNFLHSNKLTHTDLKPENILFVQSDYTEAYNPKIKRDERTLINPDIKVVDFGSATYDDEHHSTLVSTRHYRAPEVILDTR

SEQ ID NO: 58228 - protein, 105 aa, Homo sapiens
MEATRRRQHLGATGGPGAQLGASFLQARHGSVSADEAARTAPFHLDLWFYFTLQNWVLDFGRPIAMLVFPLEWFPLNKPSVGDYFHMAYNVITPFLLLKRLLYCL

SEQ ID NO: 58229 - protein, 31 aa, Homo sapiens
MRPGWSHLPLCPTLQDAVLGHFLSHLGRRHL

SEQ ID NO: 58230 - protein, 130 aa, Homo sapiens
MEEFVGLREGSSGNPVTLQELWGPCPRIRRGIRGGLEWLKQKLFRLGEDWYFLMTLGVLMALVSCAMDLAVESVVRAHQWLYREIGDSHLLRYLSWTVYPVALVSFSSGFSQSITPSSGVPAIQEADAGG

SEQ ID NO: 58231 - protein, 124 aa, Homo sapiens
MGNVLQSSSDAIYLARHVGLRVGIPKETPALTINRLCGSGFQSIVNGCQEICVKEAEVVLCGGTESMSQAPYCVRNVRFGTKLGSDIKLEDSLWVSLTDQHVQLPMAMTAENLAVKHKISREEC

SEQ ID NO: 58232 - protein, 3827 aa, Homo sapiens
MEDEERQKKLEAGKAKLAQFRQRKAQSDGQSPSKKQKKKRKTSSSKHDVSAHHDLNIDQSQCNEMYINSSQRVESTVIPESTIMRTLHSGEITSHEQGFSVELESEISTTADDCSSEVNGCSFVMRTGKPTNLLREEEFGVDDSYSEQGAQDSPTHLEMMESELAGKQHEIEELNRELEEMRVTYGTEGLQQLQEFEAAIKQRDGIITQLTANLQQARREKDETMREFLELTEQSQKLQIQFQQLQASETLRNSTHSSTAADLLQAKQQILTHQQQLEEQDHLLEDYQKKKEDFTMQISFLQEKIKVYEMEQDKKVENSNKEEIQEKETIIEELNTKIIEEEKKTLELKDKLTTADKLLGELQEQIVQKNQEIKNMKLELTNSKQKERQSSEEIKQLMGTVEELQKRNHKDSQFETDIVQRMEQETQRKLEQLRAELDEMYGQQIVQMKQELIRQHMAQMEEMKTRHKGEMENALRSYSNITVNEDQIKLMNVAINELNIKLQDTNSQKEKLKEELGLILEEKCALQRQLEDLVEELSFSREQIQRARQTIAEQESKLNEAHKSLSTVEDLKAEIVSASESRKELELKHEAEVTNYKIKLEMLEKEKNAVLDRMAESQEAELERLRTQLLFSHEEELSKLKEDLEIEHRINIEKLKDNLGIHYKQQIDGLQNEMSQKIETMQFEKDNLITKQNQLILEISKLKDLQQSLVNSKSEEMTLQINELQKEIEILRQEEKEKGTLEQEVQELQLKTELLEKQMKEKENDLQEKFAQLEAENSILKDEKKTLEDMLKIHTPVSQEERLIFLDSIKSKSKDSVWEKEIEILIEENEDLKQQCIQLNEEIEKQRNTFSFAEKNFEVNYQELQEEYACLLKVKDDLEDSKNKQELEYKSKLKALNEELHLQRINPTTVKMKSSVFDEDKTFVAETLEMGEVVEKDTTELMEKLEVTKREKLELSQRLSDLSEQLKQKHGEISFLNEEVKSLKQEKEQVSLRCRELEIIINHNRAENVQSCDTQVSSLLDGVVTMTSRGAEGSVSKVNKSFGEESKIMVEDKVSFENMTVGEESKQEQLILDHLPSVTKESSLRATQPSENDKLQKELNVLKSEQNDLRLQMEAQRICLSLVYSTHVDQVREYMENEKDKALCSLKEELIFAQEEKIKELQKIHQLELQTMKTQETGDEGKPLHLLIGKLQKAVSEECSYFLQTLCSVLGEYYTPALKCEVNAEDKENSGDYISENEDPELQDYRYEVQDFQENMHTLLNKVTEEYNKLLVLQTRLSKIWGQQTDGMKLEFGEENLPKEETEFLSIHSQMTNLEDIDVNHKSKLSSLQDLEKTKLEEQVQELESLISSLQQQLKETEQNYEAEIHCLQKRLQAVSESTVPPSLPVDSVVITESDAQRTMYPGSCVKKNIDGTIEFSGEFGVKEETNIVKLLEKQYQEQLEEEVAKVIVSMSIAFAQQTELSRISGGKENTASSKQAHAVCQQEQHYFNEMKLSQDQIGFQTFETVDVKFKEEFKPLSKELGEHGKEILLSNSDPHDIPESKDCVLTISEEMFSKDKTFIVRQSIHDEISVSSMDASRQLMLNEEQLEDMRQELVRQYQEHQQATELLRQAHMRQMERQREDQEQLQEEIKRLNRQLAQRSSIDNENLVSERERVLLEELEALKQLSLAGREKLCCELRNSSTQTQNGNENQGEVEEQTFKEKELDRKPEDVPPEILSNERYALQKANNRLLKILLEVVKTTAAVEETIGRHVLGILDRSSKSQSSASLIWRSEAEASVKSCVHEEHTRVTDESIPSYSGSDMPRNDINMWSKVTEEGTELSQRLVRSGFAGTEIDPENEELMLNISSRLQAAVEKLLEAISETSSQLEHAKVTQTELMRESFRQKQEATESLKCQEELRERLHEESRAREQLAVELSKAEGVIDGYADEKTLFERQIQEKTDIIDRLEQELLCASNRLQELEAEQQQIQEERELLSRQKEAMKAEAGPVEQQLLQETEKLMKEKLEVQCQAEKVRDDLQKQVKALEIDVEEQVSRFIELEQEKNTELMDLRQQNQALEKQLEKMRKFLDEQAIDREHERDVFQQEIQKLEQQLKVVPRFQPISEHQTREVEQLANHLKEKTDKCSELLLSKEQLQRDIQERNEEIEKLEFRVRELEQALLVEDRKHFGAVEAKPELSLEVQLQAERDAIDRKEKEITNLEEQLEQFREELENKNEEVQQLHMQLEIQKKESTTRLQELEQENKLFKDDMEKLGLAIKESDAMSTQDQHVLFGKFAQIIQEKEVEIDQLNEQVTKLQQQLKITTDNKVIEEKNELIRDLETQIECLMSDQECVKRNREEEIEQLNEVIEKLQQELANIGQKTSMNAHSLSEEADSLKHQLDVVIAEKLALEQQVETANEEMTFMKNVLKETNFKMNQLTQELFSLKRERESVEKIQSIPENSVNVAIDHLSKDKPELEVVLTEDALKSLENQTYFKSFEENGKGSIINLETRLLQLESTVSAKDLELTQCYKQIKDMQEQGQFETEMLQKKIVNLQKIVEEKVAAALVSQIQLEAVQEYAKFCQDNQTISSEPERTNIQNLNQLREDELGSDISALTLRISELESQVVEMHTSLILEKEQVEIAEKNVLEKEKKLLELQKLLEGNEKKQREKEKKRSPQDVEVLKTTTELFHSNEESGFFNELEALRAESVATKAELASYKEKAEKLQEELLVKETNMTSLQKDLSQVRDHLAEAKEKLSILEKEDETEVQESKKACMFEPLPIKLSKSIASQTDGTLKISSSNQTPQILVKNAGIQINLQSECSSEEVTEIISQFTEKIEKMQELHAAEILDMESRHISETETLKREHYVAVQLLKEECGTLKAVIQCLRSKEGSSIPELAHSDAYQTREICSSDSGSDWGQGIYLTHSQGFDIASEGRGEESESATDSFPKKIKGLLRAVHNEGMQVLSLTESPYSDGEDHSIQQVSEPWLEERKAYINTISSLKDLITKMQLQREAEVYDSSQSHESFSDWRGELLLALQQVFLEERSVLLAAFRTELTALGTTDAVGLLNCLEQRIQEQGVEYQAAMECLQKADRRSLLSEIQALHAQMNGRKITLKREQESEKPSQELLEYNIQQKQSQMLEMQVELSSMKDRATELQEQLSSEKMVVAELKSELAQTKLELETTLKAQHKHLKELEAFRLEVKDKTDEVHLLNDTLASEQKKSRELQWALEKEKAKLGRSEERDKEELEDLKFSLESQKQRNLQLNLLLEQQKQLLNESQQKIESQRMLYDAQLSEEQGRNLELQVLLESEKVRIREMSSTLDRERELHAQLQSSDGTGQSRPPLPSEDLLKELQKQLEEKHSRIVELLNETEKYKLDSLQTRQQMEKDRQVHRKTLQTEQEANTEGQKKMHELQSKVEDLQRQLEEKRQQVYKLDLEGQRLQGIMQEFQKQELEREEKRESRRILYQNLNEPTTWSLTSDRTRNWVLQQKIEGETKESNYAKLIEMNGGGTGCNHELEMIRQKLQCVASKLQVLPQKASERLQFETADDEDFIWVQENIDEIILQLQKLTGQQGEEPSLVSPSTSCGSLTERLLRQNAELTGHISQLTEEKNDLRNMVMKLEEQIRWYRQTGAGRDNSSRFSLNGGANIEAIIASEKEVWNREKLTLQKSLKRAEAEVYKLKAELRNDSLLQTLSPDSEHVTLKRIYGKYLRAESFRKALIYQKKYLLLLLGGFQECEDATLALLARMGGQPAFTDLEVITNRPKGFTRFRSAVRVSIAISRYPGTPADFNPGSLACSQLQNYDPDRALTDYITRLEALQRRLGTIQSGSTTQFHAGMRR

SEQ ID NO: 58233 - protein, 107 aa, Homo sapiens
GTYLQGLETEATYDAATQEFVIHSPTLTATKWWPGDLGRSATHALVQAQLICSGARRGMHAFIVPIRSLQDHTPLPGVLISISFKESSLGTSDPRWTLIKQTMASCS

SEQ ID NO: 58234 - protein, 54 aa, Homo sapiens
MNLVDLWLTRSLSMCLLLQSFVLMILCFHSASMCPKGCLCSSSGGLNVTCSNAN

SEQ ID NO: 58235 - protein, 61 aa, Homo sapiens
MDVLAEANGTFALNLLKTLGKDNSKNVFFSPMSMSCALAMVYMGAKGNTAAQMAQILSFNK

SEQ ID NO: 58236 - protein, 155 aa, Homo sapiens
MQDGQIDADELQRCLTQSGIAGGYKPFNLETCRLMVSMLDRDMSGTMGFNEFKELWAVLNGWRQHFISFDTDRSGTVDPQELQKALTTMGFRLSPQAVNSIAKRYSTNGKITFDDYIACCVKLRALTDSFRRRDTAQQGVVNFPYDDFIQCVMSV

SEQ ID NO: 58237 - protein, 555 aa, Homo sapiens
MELEKSGALLESGTYEDNYYGTPKPPAEPAPLLLNVTDQILPGATPSAEGKRKRNKSVSNMEKASIEPPEEEEEERPVVNGNGVVVTPESSEHEDKSAGASGEMPSQPYPAPVYSQPEELKEQMDDTKPTKPEDNEEPDPLPDNWEMAYTEKGEVYFIDHNTKTTSWLDPRLAKKAKPPEECKENELPYGWEKIDDPIYGTYYVDHINRRTQFENPVLEAKRKLQQHNMPHTELGTKPLQAPGFREKPLFTRDASQLKGTFLSTTLKKSNMGFGFTIIGGDEPDEFLQVKSVIPDGPAAQDGKMETGDVIVYINEVCVLGHTHADVVKLFQSVPIGQSVNLVLCRGYPLPFDPEDPANSMVPPLAIMERPPPVMVNGRHNYETYLEYISRTSQSVPDITDRPPHSLHSMPTDGQLDGTYPPPVHDDNVSMASSGATQAELMTLTIVKGAQGFGFTIADSPTGQRVKQILDIQGCPGLCEGDLIVEINQQNVQNLSHTEVVDILKDCPIGSETSLIIHRGGKTNTGSAIKYVGKIVGSFNNIVKMQISLELNEIIL

SEQ ID NO: 58238 - protein, 266 aa, Homo sapiens
  MOD_RES (1)..(1): Any amino acid
XVRAGVTTDVSYLLAGFGIVLSEDKQEVVELVKHHLWALEVCYISALVLSCLLTFLVLMRSLVTHRAPGAADHLLPGNHGPGLPGAHACAPWQEPPALPFPGVLVNMAAHWVFLETHDGHPQLTNRRVLYAATFLLFPLNVLVGAMVATWRVLLSALYNAIHLGQMDLSLLPPRAATLDPGYYTYRNFLKIEVSQSHPAMTAFCSLLLQAQSLLPRTMAAPQDSLRPGEEDEGMQLLQTKDSMAKGARPGASRGRARWGLAYTLLH

SEQ ID NO: 58239 - protein, 1144 aa, Homo sapiens
MAVPARTCGASRPGPARTARPWPGCGPHPGPGTRRPTSGPPRPLWLLLPLLPLLAAPGASAYSFPQQHTMQHWARRLEQEVDGVMRIFGGVQQLREIYKDNRNLFEVQENEPQKLVEKVAGDIESLLDRKVQALKRLADAAENFQKAHRWQDNIKEEDIVYYDAKADAELDDPESEDVERGSKASTLRLDFIEDPNFKNKVNYSYAAVQIPTDIYKGSTVILNELNWTEALENVFMENRRQDPTLLWQVFGSATGVTRYYPATPWRAPKKIDLYDVRRRPWYIQGASSPKDMVIIVDVSGSVSGLTLKLMKTSVCEMLDTLSDDDYVNVASFNEKAQPVSCFTHLVQANVRNKKVFKEAVQGMVAKGTTGYKAGFEYAFDQLQNSNITRANCNKMIMMFTDGGEDRVQDVFEKYNWPNRTVRVFTFSVGQHNYDVTPLQWMACANKGYYFEIPSIGAIRINTQEYLDVLGRPMVLAGKEAKQVQWTNVYEDALGLGLVVTGTLPVFNLTQDGPGEKKNQLILGVMGIDVALNDIKRLTPNYTLGANGYVFAIDLNGYVLLHPNLKPQTTNFREPVTLDFLDAELEDENKEEIRRSMIDGNKGHKQIRTLVKSLDERYIDEVTRNYTWVPIRSTNYSLGLVLPPYSTFYLQANLSDQILQVKYFEFLLPSSFESEGHVFIAPREYCKDLNASDNNTEFLKNFIELMEKVTPDSKQCNNFLLHNLILDTGITQQLVERVWRDQDLNTYSLLAVFAATDGGITRVFPNKAAEDWTENPEPFNASFYRRSLDNHGYVFKPPHQDALLRPLELENDTVGILVSTAVELSLGRRTLRPAVVGVKLDLEAWAEKFKVLASNRTHQDQPQKQCGPNSHCEMDCEVNNEDLLCVLIDDGGFLVLSNQNHQWDQVGRFFSEVDANLMLALYNNSFYTRKESYDYQAACAPQPPGNLGAAPRGVFVPTVADFLNLAWWTSAAAWSLFQQLLYGLIYHSWFQADPAEAEGSPETRESSCVMKQTQYYFGSVNASYNAIIDCGNCSRLFHAQRLTNTNLLFVVAEKPLCSQCEAGRLLQKETHSDGPEQCELVQRPRYRRGPHICFDYNATEDTSDCGRGASFPPSLGVLVSLQLLLLLGLPPRPQPQVLVHASRRL

SEQ ID NO: 58240 - protein, 1543 aa, Homo sapiens
MGRNQRKAPQRLERPGRPASGEQESGSASADGAPSRERRSDRGQADRAKPAAEPATAGGQGTPGGRRKPTAEGNGGCRRPGAGLSPKAQERQSNAQRQGRGPRGGRGGRLEEGSLSGGEELGGRRRRKRKDKGPSARRGRRTPRSLNGDTSGGDGGSSCPDSETREAQESGSQRGTARELRPTPEPTDMGSEGTKTGPESALEPSSDGLDSDWPHADTRGREGSSGTGPLGASEHSGGDSDSSPLGTGPGRGSRAAMASRTFEDSSRAPRDTGPAKDASDNRAQRGAEPETMQASTARAPRHQVGKAVGQVPAAAGEGEAGAAAGAGPEDPAPLAALLVVRRLLARPPPGAASQAVGPRRAGLKERLLSVARALGLLRWLRRRLRLRRRPPEGEGQGTGPRASEGWGRRKPDEGRGHGRGSKGRGRGKADEGRGHERGDEGRGRGKADEGRGHERGYEGRGCGKADEGRGHERGDEGRDHQRGYEGWGREPGLRHRLALRLAGLAGLGGMPRASPGGRSPQVPTSPVPGDPFDQEDETPDPKFAVVFPRIHRAGRASSSRSSEEASADAPTGEGRGWPRAGVGGHSEGCRTSGEGVSGLRRGSLLAPTAPDGPSLDESGSSSEAELETLNDEPPVRWAQGSGPHEGPRLGAAVLLPRLSLETRLQQEGDPGLRGSLRELWEPEDEDEAVLERDLELSLRPGLEAPPFPGAKGRSLGDGLEDMEDLARLRHIFAIVASAYDLAQNTGQDPCILLCGHSGSGKTEAAKKIMQFLSSLEQDQTGNRECQVEDMLPILSSFGHAKTILNANASRFGQVFCLYLQQGVIVGASVSHYLLETSRVVFQAQAERSFHVFYKLLAGLDSIERERLSLQGPETYYYLNQGQACRLQGKEDAQDFEGLLKALQGLGLCPEELNAVWAVLAAILQLGNICFSSSERESQEVAAVSSWAEIHTAARLLRVPPECLEGAVTRRVTETPYGQVSRSLPVESAFDARDALAKALYSRLFHRLLRRTNARLAPPGEGGSIGTVTVVDAYGFEALRVNGLEQLCNNLASERLQLFSSQMLLAQEEPPRESCLDLLVDQPHSLLSILDAQTWLSQATDHTFLQKSHYHHGDHPSYAKPRLPLPVFTVRHYAGTVTYQVHKFLNRNRDQLDPAVVEMLGQSQLQLVGSLFQEAEPQSRGGRGRPTLASRFQQALEDLIARLGRSHVYFIQCLTPNPGKLPGLFDVGHVTEQLHQAAILEAVGTRSANFPVRVPFEAFLASFQALGSEGQEDLSDREKCGAVLSQVLGAESPLYHLGATKVLLQEQGWQRLEELRDQQRSQALVDLHRSFHTCISRQRVLPRMQARMRGFQARSAGVGARAEVGGPVFTHSSNSCWLTVCLIYPWARCWKRYLRRRAALGQLNTILLVAQPLLQRRQRLQELGRLEIPAELAVMLKTAESHRDALAGSITECLPPEVPARPSLTLPADIDLFPFSSFVAIGFQARAATGEAPNPAGWRQPSACPGHQQSDAAAPGGRIPGVLAEADHGRIPGAAGAVPARAAE

SEQ ID NO: 58241 - protein, 127 aa, Homo sapiens
MIHTNLKKKFSCCVLVFLLFAVICVWKEKKKGSYYDSFKLQTKEFQVLKSLGKLAMGSDSQSVSSSSTQDPHRGRQTLGSLRGLAKAKPEASFQVWNKDSSSKNLIPRLQKIWKNYLSMNKYKVSYK

SEQ ID NO: 58242 - protein, 187 aa, Homo sapiens
  MOD_RES (1)..(1): Any amino acid
XYGKQPKLWLCEYCLKYMKYEKSYRFHLGQCQWRQPPGKEIYRKSNISVYEVDGKDHKIYCQNLCLLAKLFLDHKTLYFDVEPFVFYILTEVDRQGAHIVGYFSKEKESPDGNNVACILTLPPYQRRGYGKFLIAFSYELSKLESTVGSPEKPLSDLGKLSYRSYWSWVLLEILRDFRGTLSIKDLR

SEQ ID NO: 58243 - protein, 364 aa, Homo sapiens
KKLEIDINKITVKTNESIRKKSKYESEIKYLTIMKLKNDKHLKNIYKEAYRIGTLFHLTKHKTDEMEDKIAEVRRKFKGREEFLKKLTQGEVAAGMVLQKKLYSIYEVQALERKELIKNRAICAMSLAELQEPLLQLEDEAERIRSLDKEHSVMLNNIIDQKDLIRRKVGKVKKKLRKKGKKTLDALIETESKRSAIFKDLEATKSKTMIFYAKINELNEELKAKEEEKKSFDQTLEILKNKFITMRFKREHAQTVFDHYMQEKKDCEERIFEEDQRFRVLLAVRQKTLQDTQLCQLQRRMHTLWQEHFKLVVLFSQMRLANFQTDSQESIQKILAVQEESSNLMQHILGFFQTLTDGTCENDG

SEQ ID NO: 58244 - protein, 16 aa, Homo sapiens
MNQPESANDPEPLCAV

SEQ ID NO: 58245 - protein, 263 aa, Homo sapiens
DAMLLVAERLEGPFNIESVMDPIDVKISEAIMNMQENSMQVSAKVFQGCGQPKPAPALRSARSAPENFNTRFRPYNPEERPTTAAGTSLDRLVTDIKEKLKLSKKVWSALPYTICKDESVTAGTSNEEECWNGHSKARYLPEIMNDGLTNQINNPEVDVDITRPDTFIRQQIMALRVMTNKLKNAYNGNDVNFQDTSDESSGSGSGSGCMDDVCPTEFEFVTTEAPAVDPDRREVDSSAAQRGHSLLSWSLTCIVLALQRLCR

SEQ ID NO: 58246 - protein, 137 aa, Homo sapiens
METVVIVAIGVLATIFLASFAALVLVCRQRYCRPRDLLQRYDSKPIVDLIGAMETQSEPSELELDDVVITNPHIEAILENEDWIEDASGLMSHCIAILKICHTLTEKLVAMTMGSGAKMKTSASVSDIIVVAKRISP

SEQ ID NO: 58247 - protein, 109 aa, Homo sapiens
MAGALVRKAADYVRSKDFRDYLMRTHFWGPVANWGLPIAAINDMKKSPEIISGRMTFALCCYSLTFMRFAYKVQPRNWLLFACHATNEVAQLIQGGRLIKHEMTKTASA

SEQ ID NO: 58248 - protein, 154 aa, Homo sapiens
MKVLLCDLLLLSLFSSVFSSCQRDCLTCQEKLHPALDSFDLEVCILECEEKVFPSPLWTPCTKVMARSSWQLSPAAPEHVAAALYQPRASEMQHLRRMPRVRSLFQEQEEPEPGMEEAGEMEQKQLQKRFGGFTGARKSARKLANQKRFSEFMR

SEQ ID NO: 58249 - protein, 1442 aa, Homo sapiens
MPFKIQWFFKAVADGLSLEKELEAALHRDDVEFISDLIACLLQGCYQRRDITPQTFHSYLEDIINYRWELEEGKPNPLREASFQDLPLRTRVEILHRLCDYRLDADDVFDLLKGLDADSLRVEPLGEDNSGALYWYFYGTRMYKEDPVQGKSNGELSLSRESEGQKNVSSIPGKTGKRRGRPPKRKKLQEEILLSEKQEENSLASEPQTRHGSQGPGQGTWWLLCQTEEEWRQVTESFRERTSLRERQLYKLLSEDFLPEICNMIAQKGKRPQRTKAELHPRWMSDHLSIKPVKQEETPVLTRIEKQKRKEEEEERQILLAVQKKEQEQMLKEERKRELEEKVKAVEDRAKRRKLREERAWLLAQGKELPPELSHLDPNSPMREEKKTKDLFELDDDFTAMYKVLDVVKAHKDSWPFLEPVDESYAPNYYQIIKAPMDISSMEKKLNGGLYCTKEEFVNDMKTMFRNCRKYNGESSEYTKMSDNLERCFHRAMMKHFPGEDGDTDEEFWIREDEKREKRRSRAGRSGGSHVWTRSRDPEGSSRKQQPMENGGKSLPPTRRAPSSGDDQSSSSTQPPREVGTSNGRGFSHPLHCGGTPSQAPFLNQMRPAVPGTFGPLRGSDPATLYGSSGVPEPHPGEPVQQRQPFTMQPPVGINSLRGPRLGTPEEKQMCGGLTHLSNMGPHPGSLQLGQISGPSQDGSMYAPAQFQPGFIPPRHGGAPARPPDFPESSEIPPSHMYRSYKYLNRVHSAVWNGNHGATNQGPLGPDEKPHLGPGPSHQPRTLGHVMDSRVMRPPVPPNQWTEQSGFLPHGVPSSGYMRPPCKSAGHRLQPPPVPAPSSLFGAPAQALRGVQGGDSMMDSPEMIAMQQLSSRVCPPGVPYHPHQPAHPRLPGPFPQVAHPMSVTVSAPKPALGNPGRAPENSEAQEPENDQAEPLPGLEEKPPGVGTSEGVYLTQLPHPTPPLQTDCTRQSSPQERETVGPELKSSSSESADNCKAMKGKNPWPSDSSYPGPAAQGCVRDLSTVADRGALSENGVIGEASPCGSEGKGLGSSGSEKLLCPRGRTLQETMPCTGQNAATPPSTDPGLTGGTVSQFPPLYMPGLEYPNSAAHYHISPGLQGVGPVMGGKSPASHPQHFPPRGFQSNHPHSGGFPRYRPPQGMRYSYHPPPQPSYHHYQRTPYYACPQSFSDWQRPLHPQGSPSGPPASQPPPPRSLFSDKNAMASLQGCETLNAALTSPTRMDAVAAKVPNDGQNPGPEEEKLDESMERPESPKEFLDLDNHNAATKRQSSLSASEYLYGTPPPLSSGMGFGSSAFPPHSVMLQTGPPYTPQRPASHFQPRAYSSPVAALPPHHPGATQPNGLSQEGPIYRCQEEGLGHFQAVMMEQIGTRSGIRGPFQEMYRPSGMQMHPVQSQASFPKTPTAATSQEEVPPHKPPTLPLDQS

SEQ ID NO: 58250 - protein, 339 aa, Homo sapiens
MAALDSLSLFTSLGLSEQKARETLKNSALSAQLREAATQAQQTLGSTIDKATGILLYGLASRLRDTRRLSFLVSYIASKKIHTEPQLSGWWCQGLTFQEARLSLEFHEIRTLSVHFLEQRCHKLTGSFFSAALEYVRSHPLDPIDTVDFERECGVGVIVTPEQIEEAVEAAINRHRPQLLVERYHFNMGLLMGEARAVLKWADGKMIKNEVDMQVLHLLGPKLEADLEKKFKVAKARLEETDRRTAKDVVENGETADQTLSLMEQLRGEALKFHKPGENYKTPGYVVTPHTMNLLKQHLEITGGQVRTRFPPEPNGILHIGHAKAINFNFGYAKANNGI

SEQ ID NO: 58251 - protein, 56 aa, Homo sapiens
MPGEEEERAFLVAREELASALRRDSGQAFSLEQLRPLLASSLPLAARYLQLDAARL

SEQ ID NO: 58252 - protein, 124 aa, Homo sapiens
  MOD_RES (1)..(1): Any amino acid
XKCKEREEKIILVSSANEIDVRPCPLNPNEHKGTITWYKDDSKTPVSTEQASRIHQHKEKLWFVPAKVEDSGHYYCVETEDLCALIWSFLKMKIMSYLNYSGIRIANLYFLTIYTLVESKIGSS

SEQ ID NO: 58253 - protein, 100 aa, Homo sapiens
MEGPLSVFGDRSTGETIRSQNVMAAASIANIVKSSLGPVGLDKMLVDDIGDVTITNDGATILKLLEVEHPAAKVLCELADLQDKEVGDGTTSVGSSALYQ

SEQ ID NO: 58254 - protein, 52 aa, Homo sapiens
MKPVSRRTLDWIYSVLLLAIVLISWGCIIYASMVSARRQLRKKYPDKIFGTN

SEQ ID NO: 58255 - protein, 1313 aa, Homo sapiens
MRNLKLFRTLEFRDIQGPGNPQCFSLRTEQGTVLIGSEHGLIEVDPVSREVKNEVSLVAEGFLPEDGSGRIVGVQDLLDQESVCVATASGDVILCSLSTQQLECVGSVASGISVMSWSPDQELVLLATGQQTLIMMTKDFEPILEQQIHQDDFGESKFITVGWGRKETQFHGSEGRQAAFQMQMHESALPWDDHRPQVTWRGDGQFFAVSVVCPETGSLIASTQDKPNQQDIVFFEKNGLLHGHFTLPFLKDEVKVNDLLWNADSSVLAVWLEDLQREESSIPKTCVQLWTVGNYHWYLKQSLSFSTCGKSKIVSLMWDPVTPYRLHVLCQGWHYLAYDWHWTTDRSVGDNSSDLSNVAVIDGNRVLVTVFRQTVVPPPMCTYQLLFPHPVNQVTFLAHPQKSNDLAVLDASNQISVYKCGDCPSADPTVKLGAVGGSGFKVCLRTPHLEKRYKIQFENNEDQDVNPLKLGLLTWIEEDVFLAVSHSEFSPRSVIHHLTAASSEMDEEHGQLNVSSSAAVDGVIISLCCNSKTKSVVLQLADGQIFKYLWESPSLAIKPWKNSGGFPVRFPYPCTQTELAMIGEEECVLGLTDRCRFFINDIEVASNITSFAVYDEFLLLTTHSHTCQCFCLRDASFKTLQAGLSSNHVSHGEVLRKVERGSRIVTVVPQDTKLVLQMPRGNLEVVHHRALVLAQIRKWLDKLMFKEAFECMRKLRINLNLIYDHNPKVFLGNVETFIKQIDSVNHINLFFTELKEEDVTKTMYPAPVTSSVYLSRDPDGNKIDLVCDAMRAVMESINPHKYCLSILTSHVKKTTPELEIVLQKVHELQGNAPSDPDAVSAEEALKYLLHLVDVNELYDHSLGTYDFDLVLMVAEKSQKDPKEYLPFLNTLKKMETNYQRFTIDKYLKRYEKAIGHLSKCGPEYFPECLNLIKDKNLYNEALKLYSPSSQQYQDISIAYGEHLMQEHMYEPAGLMFARCGAHEKALSAFLTCGNWKQALCVAAQLNFTKDQLVGLGRTLAGKLVEQRKHIDAAMVLEECAQDYEEAVLLLLEGAAWEEALRLVYKYNRLDIIETNVKPSILEGEGSILDRIPHLEEAQKNYMAFLDSQTATFSRHKKRLLVVRELKEQAQQAGLDDEVPHGQESDLFSETSSVVSGSEMSGKYSHSNSRISARSSKNRRKAERKKHSLKEGSPLEDLALLEALSEVVQNTENLKDEVYHILKVLFLFEFDEQGRELQKAFEDTLQLMERSLPEIWTLTYQQNSATPVLGPNSTANSIMASYQQQKTSVPVLDAELFIPPKINRRTQWKLSLLD

SEQ ID NO: 58256 - protein, 467 aa, Homo sapiens
TVYSALGLRDACRSLPQSIQLFRDIAQEFSDDLHHIASLIGKVVDFEGSLAENRFTVLPNIDPEIDEKKRRLMGLPSFLTEVARKELENLDSRIPSCSVIYIPLIGFLLSIPRLPSMVEASDFEINGLDFMFLSEEKLHYRSARTKELDALLGDLHCEIRDQETLLMYQLQCQVLARAAVLTRVLDLASRLDVLLALASAARDYGYSRPRYSPQVLGVRIQNGRHPLMELCARTFVPNSTECGGDKGRVKVITGPNSSGKSIYLKQVGLITFMALVGSFVPAEEAEIGAVDAIFTRIHSCESISLGLSTFMIDLNQQVAKAVNNATAQSLVLIDEFGKGTNTVDGLALLAAVLRHWLARGPTCPHIFVATNFLSLVQLQLLPQGPLVQYLTMETCEDGNDLVFFYQVSDLIRSGKPIKPVKDLLKKNQMENCQTLVDKFMKLDLEDPNLDLNVFMSQEVLPAATSIL

SEQ ID NO: 58257 - protein, 698 aa, Homo sapiens
MAEPQAESEPLLGGARGGGGDWPAGLTTYRSIQVGPGAAARWDLCIDQAVVFIEDAIQYRSINHRVDASSMWLYRRYYSNVCQRTLSFTIFLILFLAFIETPSSLTSTADVRYRAAPWEPPCGLTESVEVLCLLVFAADLSVKGYLFGWAHFQKNLWLLGYLVVLVVSLVDWTVSLSLVCHEPLRIRRLLRPFFLLQNSSMMKKTLKCIRWSLPEMASVGLLLAIHLCLFTMFGMLLFAGGKQDDGQDRERLTYFQNLPESLTSLLVLLTTANNPDVMIPAYSKNRAYAIFFIVFTVIGSLFLMNLLTAIIYSQFRGYLMKSLQTSLFRRRLGTRAAFEVLSSMVGEGGAFPQAVGVKPQNLLQVLQKVQLDSSHKQAMMEKVRSYGSVLLSAEEFQKLFNELDRSVVKEHPPRPEYQSPFLQSAQFLFGHYYFDYLGNLIALANLVSICVFLVLDADVLPAERDDFILGILNCVFIVYYLLEMLLKVFALGLRGYLSYPSNVFDGLLTVVLLVLEISTLAVYRLPHPGWRPEMVGLLSLWDMTRMLNMLIVFRFLRIIPSMKLMAVVASTVLGLVQNMRAFGGILVVVYYVFAIIGINLFRGVIVALPGNSSLAPANGSAPCGSFEQLEYWANNFDDFAAALVTLWNLMVVNNWQVFLDAYRRYSGPDPGGSHVESPEQHQLLTMLLTVVDRLSMPR

SEQ ID NO: 58258 - protein, 177 aa, Homo sapiens
MMQPQQPYTGQIYQPTQAYTPASPQPFYGNNFEDEPPLLEELGINFDHIWQKTLTVLHPLKVADGSIMNETDLAGPMVFCLAFGATLLLAGKIQFGYVYGISAIGCLGMFCLLNLMSMTGVSFGCVASVLGYCLLPMILLSSFAVIFSLQGMVGIILTAGIIGWCSFSASKIFISAL

SEQ ID NO: 58259 - protein, 480 aa, Homo sapiens
MFRLNSLSALAELAVGSRWYHGGSQPIQIRRRLMMVAFLGASAVTASTGLLWKRAHAESPPCVDNLKSDIGDKGKNKDEGDVCNHEKKTADLAPHPEEKKKKRSGFRDRKVMEYENRIRAYSTPDKIFRYFATLKVISEPGEAEVFMTPEDFVRSITPNEKQPEHLGLDQYIIKRFDGKDFWQKISQEREKFADEGSIFYTLGECGLISFSDYIFLTTVLSTPQRNFEIAFKMFDLNGDGEVDMEEFEQVQSIIRSQTSMGMRHRDRPTTGNTLKSGLCSALTTYFFGADLKGKLTIKNFLEFQRKLQHDVLKLEFERHDPVDGRITERQFGGMLLAYSGVQSKKLTAMQRQLKKHFKEGKGLTFQEVENFFTFLKNINDVDTALSFYHMAGASLDKVTMQQVARTVAKVELSDHVCDVVFALFDCDGNGELSNKEFVSIMKQRLMRGLEKPKDMGFTRLMQAMWKCAQETAWDFALPKQ

SEQ ID NO: 58260 - protein, 95 aa, Homo sapiens
MWAFSELPMPLLINLIVSLLGFVATVTLIPAFRGHFIAARLCGQDLNKTSRQQIPESQGVISGAVFLIILFCFIPFPFLNCFVKEQCKAFPHHEA

SEQ ID NO: 58261 - protein, 400 aa, Homo sapiens
MRMAVGSVKMQPPCESPALAAAAAVVAADGPLRRSPSAREPEREQPPASLRPRLRDLPALLRSGLTLRRKRSAAGGRTLSRRISNPYLEHTPSQIYGENSSCAGRALRNIIIVQAADLIKDRVNLKGFYRRSCVGSELVDWLLEHCPFVQCRSMAIGVWQLLLDMGIMLSVDQHLYFQDTYVFYQFSSDECSYLYCEFEREEEWQNGVKLLLQLVPLIPARGGICELSHQKIEDSEESSDEILVRLTSAVQRELAAVIALKARKSAIEQDEENNDKHVAVTEAESVPDSQAGVMCKLQERDEIGRIELVQKLAKENYQFLQTDKKEQEKSEHQDDEVTTVQVKEQDQSVLVLKKVQCCGPAPTAGSAESHWSVLADCRALSSQMDSVPSERTGMARSFSI

SEQ ID NO: 58262 - protein, 218 aa, Homo sapiens
  MOD_RES (1)..(1): Any amino acid
XGVALRSTQSTLQAGLAADAWAAPIAMQIYKKHLDPRPGPCPPELGLGLGQLACCCLHRRAKRRPPMTQVYERLEKLQAVVAGVPGHSEAASCIPPSPQENSYVSSTGRAHSGAAPWQPLAAPSGASAQAAEQLQRGPNQPVESDESLGGLSAALRSWHLTPSCPLDPAPLREAGCPQGDTAGESSWGSGPGSRPTAVEGLGLEQDRQGPEESDEFQS

SEQ ID NO: 58263 - protein, 124 aa, Homo sapiens
  MOD_RES (1)..(1): Any amino acid
XCLVDGLTDASSAFKVPRPGPDTLQFTVDVFHFANDSRNMIYITCHLKVTLAEQDPDELNKACSFSKPSNRQQKSKLLLFHLSWFPVEGLADICQCCNKGDCGTPSHSRRQPRVVSQWSTSASL

SEQ ID NO: 58264 - protein, 83 aa, Homo sapiens
MSHLPGLELRREAPPLLGPLLSPFPLPAGSWHRQMLRSSLRFPITNSAGVSETADSRRVPVAPSCSRDTPAAGDRRVSTRPGR

SEQ ID NO: 58265 - protein, 192 aa, Homo sapiens
MKSLSLLLAVALDPAGALQAAFRRYPRGAPAPHCEMSRFVPLPASAKWASGLTPAQNCPRALDGAWLMVSISSPVLSLSSLLRPQPEPQQEPVLITMATVVLTVLTHTPAPRVRLGQDALLDLSFAYMPPTSEAASSLAPGPPPFGLEWRRQHLGKGHLLLAATPGLNGQMPAAQEGAVAFAAWDDDEPWGP

SEQ ID NO: 58266 - protein, 765 aa, Homo sapiens
MKLMYEHNLQRTACNMTYGSFGGVKGRDLICIQSMDGMLMVFEQESYAFGRFLPGFLLPGPLAYSSRTDSFLTVSSCQQVESYKYQVLAFATDADKRQETEQQKLGSGKRLVVDWTLNIGEQALDICIVSFNQSASSVFVLGERNFFCLKDNGQIRFMKKLDWSPSCFLPYCSVSEGTINTLIGNHNNMLHIYQDVTLKWATQLPHIPVAVRVGCLHDLKGVIVTLSDDGHLQCSYLGTDPSLFQAPNVQSRELNYDELDVEMKELQKIIKDVNKSQGVWPMTEREDDLNVSVVVSPNFDSVSQATDVEVGTDLVPSVTVKVTLQNRVILQKAKLSVYVQPPLELTCDQFTFEFMTPDLTRTVSFSVYLKRSYTPSELEGNAVVSYSRPTDRNPDGIPRVIQCKFRLPLKLICLPGQPSKTASHKITIDTNKSPVSLLSLFPGFASQSDDDQVNVMGFHFLGGARITVLASKTSQRYRIQSEQFEDLWLITNELILRLQEYFEKQGVKDFACSFSGSIPLQEYFELIDHHFELRINGEKLEELLSERAVQFRAIQRRLLARFKDKTPAPLQHLDTLLDGTYKQVIALADAVEENQGNLFQSFTRLKSATHLVILLIALWQKLSADQVAILEAAFLPLQEDTQELGWEETVDAAISHLLKTCLSKSSKEQALNLNSQLNIPKDTSQLKKHITLLCDRLSKGGRLCLSTDAAAPQTMVMPGGCTTIPESDLEERSVEQDSTELFTNHRHLTAETPRPEVSPLQGVSE

SEQ ID NO: 58267 - protein, 143 aa, Homo sapiens
NMLKVVALHLKKHGLTYATIDGSVNPKQRMDLVEAFNHSRGPQVMLISLLAGGVGLNLTGGNHLFLLDMHWNPSLEDQACDRIYRVGQQKDVVIHRFVCEGTVEEKILQLQEKKKDLAKQVLSGSGESVTKLTLADLRVLFGI

SEQ ID NO: 58268 - protein, 414 aa, Homo sapiens
MEKDKHSHFYNQKSDFRIEHSMLEELENKLIHSRKTERAKIQQQLAKIHNNVKKLQHQLKDVKPTPDFVEKLREMMEEIENAINTFKEEQRLIYEELIKEEKTTNNELSAISRKIDTWALGNSETEKAFRAISSKVPVDKVTPSTLPEEVLDFEKFLQQTGGRQGAWDDYDHQNFVKVRNKHKGKPTFMEEVLEHLPGKTQDEVQQHEKWYQKFLALEERKKESIQIWKTKKQQKREEIFKLKEKADNTPVLFHNKQEDNQKQKEEQRKKQKLAVEAWKKQKSIEMSMKCASQLKEEEEKEKKHQKERQRQFKLKLLLESYTQQKKEQEEFLRLEKEIREKAEKAEKRKNAADEISRFQERVENNVSRDPSRLYKPTKGWEERTKKIGPTGSGPLLHIPHRAIPTWRQGIQRRV

SEQ ID NO: 58269 - protein, 161 aa, Homo sapiens
MLLKSPENSLLQFQFKYGVPTPTNVTIESYNMNPIVYWEYQIMPQVPVFTVEVKNYGVKNSEWIDACINISHHYCNISDHVGDPSNSLWVRVKARVGQKESAYAKSEEFAVCRDGKIGPPKLDIRKEEKQIMIDIFHPSVFVNGDEQEVDYDPETTCYIRV

SEQ ID NO: 58270 - protein, 102 aa, Homo sapiens
MSQQDAVAALSERLLVAAYKGQTENVVQLINKGARVAVTKHGRTPLHLAANKGHLPVVQILLKAGCDLDVQDDGDQTALHRATVVGNTEIIAALIHEGCALD

SEQ ID NO: 58271 - protein, 290 aa, Homo sapiens
MGYSRAVEIGPDQDLDVVEITENSQELRMRNSSGPCLSGSLVSLHCLACGKSLKTPRVVGVEEASVDSWPWQVSIQYDKQHVCGGSILDPHWVLTAAHCFRKHTDVFNWKVRAGSDKLGSFPSLAVAKIIIIEFNPMYPKDNDIALMKLQFPLTFSGTVRPICLPFFDEELTPATPLWIIGWGFTKQNGGKMSDILLQASVQVIDSTRCNADDAYQGEVTEKMMCAGIPEGGVDTCQGDSGGPLMYQSDQWHVVGIVSWGYGCGGPSTPGVYTKVSAYLNWIYNVWKAEL

SEQ ID NO: 58272 - protein, 122 aa, Homo sapiens
MSMEDYDFLFKIVLIGNAGVGKTCLVRRFTQGLFPPGQGATIGVDFMIKTVEINGEKVKLQIWDTAGQERFRSITQSYYRSANALILTYDITCEESFRCLPEWLREIEQYASNKVITVLVGK

SEQ ID NO: 58273 - protein, 156 aa, Homo sapiens
MAEEKKLKLSNTVLPSESMKVVAESMGIAQIQEETCQLLTDEVSYRIKEIAQDALKFMHMGKRQKLTTSDIDYALKLKNVEPLYGFHAQEFIPFRFASGGGRELYFYEEKEVDLSDIINTPLPRVPLDVCLKAPKEQQKAEATEPLKSAKPGQEED

SEQ ID NO: 58274 - protein, 216 aa, Homo sapiens
MNNQKQQKPTLSGQRFKTRKRDEKERFDPTQFQDCIIQGLTETGTDLEAVAKFLDASGAKLDYRRYAETLFDILVAGGMLAPGGTLADDMMRTDVCVFAAQEDLETMQAFAQVFNKLIRRYKYLEKGFEDEVKKLLLFLKGFSESERNKLAMLTGVLLANGTLNASILNSLYNENLVKEGVSAAFAVKLFKSWINEKDINAVAASLRKVSMDNRLM

SEQ ID NO: 58275 - protein, 58 aa, Homo sapiens
MSHQPLSCLTEKEDSPSESTGNGPPHLAHPNLDTFTPEELLQQMKELLTENHQLKGPH

SEQ ID NO: 58276 - protein, 136 aa, Homo sapiens
MSASAVYVLDLKGKVLICRNYRGDVDMSEVEHFMPILMEKEEEGMLSPILAHGGVRFMWIKHNNLYLVATSKKNACVSLVFSFLYKVVQVFSEYFKELEEESIRDNFVIIYELLDELMDFGYPQTTDSKILQEYIT

SEQ ID NO: 58277 - protein, 235 aa, Homo sapiens
EGFRWMIQAIQVLRFHLLELEKVHELCDNFCHRYISCLKGKMPIDLVIDERDGSSKSDHEELSGSSTNLADHNPSSWRDHDDATSTHSAGTPGPSSGGHASQSGDNSSEQGDGLDNSVASPGTGDDDDPDKDKKRQKKRGIFPKVATNIMRAWLFQHLTHPYPSEEQKKQLAQDTGLTILQVNNWFINARRRIVQPMIDQSNRAVSQGAAYSPEGQPMGSFVLDGQQHMGIRPAG

SEQ ID NO: 58278 - protein, 394 aa, Homo sapiens
MASMAAVLTWALALLSAFSATQARKGFWDYFSQTSGDKGRVEQIHQQKMAREPAGSVRDDLGTKEMMEASSLTAWISVPFSRTLKDSLEQDLNNMNKFLEKLRPLSGSEAPRLPQDPVGMRRQLQEELEEVKARLQPYMAEAHELVGWNLEGLRQQLKPYTMDLMEQVALRVQELQEQLRVVGEDTKAQLLGGVDEAWALLQGLQSRVVHHTGRFKELFHPYAESLVSGIGRHVQELHRSVAPHAPASPARLSRCVQVLSRKLTLKAKALHARIQQNLDQLREELSRAFAGTGTEEGAGPDPQMLSEEVRQRLQAFRQDTYLQIAAFTRAIDQETEEVQQQLAPPPPGHSAFAPEFQQTDSGKVLSKLQARLDDLWEDITHSLHDQGHSHLGDP

SEQ ID NO: 58279 - protein, 91 aa, Homo sapiens
  MOD_RES (1)..(1): Any amino acid
XHTSRTMSINAAELKQLLQSKEESPENLFLELEKLVLEHSKDDDNLDSLLDSVVGLKQMLESSGDPLPLSDQDVEPVLSAPESLQNLFNNR

SEQ ID NO: 58280 - protein, 71 aa, Homo sapiens
MIARRNPEPLRFLPDEARSLPPPKLTDPRLLYIGFLGYCSGLIDNLIRRRPIATADKKTYGEIFEKFHPIR

SEQ ID NO: 58281 - protein, 251 aa, Homo sapiens
MGDWSFLGNFLEEVHKHSTVVGKVWLTVLFIFRMLVLGTAAESSWGDEQADFRCDTIQPGCQNVCYDQAFPISHIRYWVLQIIFVSTPSLVYMGHAMHTVRMQEKRKLREAERAKEVRGSGSYEYPVAEKAELSCWEEGNGRIALQGTLLNTYVCSILIRTTMEVGFIVGQYFIYGIFLTTLHVCRRSPCPHPVNCYVSRPTEKNVFIVFMLAVAALSLLLSLAELYHLGWKKIRQRFVKPRQHMAKCQLS

SEQ ID NO: 58282 - protein, 138 aa, Homo sapiens
MSFSLAPFLSPQSWPPPLPPAQSEIMKVVNLKQAILQAWKERWSDYQWAINMKKFFPKGATWDILNLADALLEQAMIGPSPNPLILSYLKYAISSQFDDFSRDLCVQALLDIMDMFCDRLSCHGKAEECIGLCRALLS

SEQ ID NO: 58283 - protein, 52 aa, Homo sapiens
MDAEYSGNEFPRSEGERDQHQRPGKERKSGEAGWGTGSFKLWTISPCLRWLS

SEQ ID NO: 58284 - protein, 138 aa, Homo sapiens
MAKIKSHSQCVFISRNFHTGRFQLQEEQRKKEAAHIKAIKDHSKDEPQLATKNIICDPSETSSTTNRSSVTLSLSTLPSDSYYSQSIEAADDWFSDDSLVKRNSPMPSLGEPLMEKVFSYLSTISLEEGTESVLNDTL

SEQ ID NO: 58285 - protein, 120 aa, Homo sapiens
MDGKKCSVWMFLPLVFTLFTSAGLWIVYFIAVEDDKILPLNSAERKPGVKHAPYISIAGDDPPASCVFSQVMNMAAFLALVVAVLRFIQLKPKVLNPWLNISGLVALCLASFGMTLLAHK

SEQ ID NO: 58286 - protein, 132 aa, Homo sapiens
  MOD_RES (1)..(1): Any amino acid
XALVEPLGLERDVSRAVELLERLQRSGELPPQKLQALQRVLQSRFCSAIREVYEQLYDTLDITGSAEIRAHATAKKYKKKKKERKSRAWWRVPVIPAGLQLRRLRQENRLNPGGRGCSEPRSCHCTPAWATE

SEQ ID NO: 58287 - protein, 153 aa, Homo sapiens
  MOD_RES (1)..(1): Any amino acid
XGSFGELALIYGTPRAATVKAKTNVKLWGIDRDSYRRILMGSTLRKRKMYEEFLSKVSILESLDKWERLTVADALEPVQFEDGQKIVVQGEPGDEFFIILEGSAAVLQRRSENEEFVEVGRLGPSDYFGMYEFPHNKYMVSLSHLSVRYCSLP

SEQ ID NO: 58288 - protein, 353 aa, Homo sapiens
NKFTAGFQNIVDAYGVGSYREINPAPYTIITFPFLFAVMFGDCGHGTVMLLAALWMILNERRLLSQKTDNEIWNTFFHGRYLILLMGIFSIYTGLIYNDCFSKSLNIFGSSWSVQPMFRNGTWNTHVMEESLYLQLDPAIPGVYFGNPYPFGIDPIWNLASNKLTFLNSYKMKMSVILGIVQMVFGVILSLFNHIYFRRTLNIILQFIPEMIFILCLFGYLVFMIIFKWCCFDVHVSQHAPSILIHFINMFLFNYSDSSNAPLYKHQQEVQSFFVVMALISVPWMLLIKPFILRASHRKSQLQASRIQEDATENIEGDSSSPSSRSGQRTSADTHGALDDHGEENCLKCSGLW

SEQ ID NO: 58289 - protein, 178 aa, Homo sapiens
MASGRARCTRKLRNWVVEQVESGQFPGVCWDDTAKTMFRIPWKHAGKQDFREDQDAAFFKAWAIFKGKYKEGDTGGPAVWKTRLRCALNKSSEFKEVPERGRMDVAEPYKVYQLLPPGIVSGQPGTQKVPSKRQHSSVSSERKEEEDAMQNCTLSPSVLQDSLNNLQTQLRPPFKGIR

SEQ ID NO: 58290 - protein, 126 aa, Homo sapiens
MFPPSGHQDVSERRLDTQRPQVTMWERDVSSDRQEPGRRGRSWGLEGSQALSQQAEVIVRQLQELRRLEEEVRLLRETSLQQKMRLEAQAMELEALARAEKAGRAEAEGLRAALAGAEVVRKNLEE

SEQ ID NO: 58291 - protein, 327 aa, Homo sapiens
MTPILTVLICLGLSLGPRTHVQAGHLPKPTLWAEPGSVIIQGSPVTLRCQGSLQAEEYHLYRENKSASWVRRIQEPGKNGQFPIPSITWEHAGRYHCQYYSHNHSSEYSDPLELVVTGAYSKPTLSALPSPVVTLGGNVTLQCVSQVAFDGFILCKEGEDEHPQRLNSHSHARGWSWAIFSVGPVSPSRRWSYRCYAYDSNSPYVWSLPSDLLELLVPGVSKKPSLSVQPGPMVAPGESLTLQCVSDVGYDRFVLYKEGERDFLQRPGWQPQAGLSQANFTLGPVSPSHGGQYRCYSAHNLSSEWSAPSDPLDILITGQFYDRPSLS

SEQ ID NO: 58292 - protein, 31 aa, Homo sapiens
MTERRRDELSEEINNLREKVMKQSEENNNLQ

SEQ ID NO: 58293 - protein, 118 aa, Homo sapiens
MRMSVGLSLLLPLSGRTFLLLLSVVMAQSHWPSEPSEAVRDWENQLEASMHSVLSDLHEAVPTVVGIPDGTAVVGRSFRVTIPTDLIASSGDIIKVSAAGKEALPSWLHWDSQSHTLE

SEQ ID NO: 58294 - protein, 88 aa, Homo sapiens
MDGGDDGNLIIKKRFVSEAELDERRKRRQEEWEKVRKPEDPEECPEEVYDPRSLYERLQEQKDRKQQEYEEQFKFKNMVRGLDEDETN

SEQ ID NO: 58295 - protein, 205 aa, Homo sapiens
MAPWALLSPGVLVRTGHTVLTWGITLVLFLHDTELRQWEEQGELLLPLTFLLLVLGSLLLYLAVSLMDPGYVNVQPQPQEELKEEQTAMVPPAIPLRRCRYCLVLQPLRARHCRECRRCVRRYDHHCPWMENCVGERNHPLFVVYLALQLVVLLWGLYLACTRPLSPAPQVRPPVLPALGSVVAVQRAPVRHLPAAVPLLVGGQP

SEQ ID NO: 58296 - protein, 379 aa, Homo sapiens
  MOD_RES (1)..(1): Any amino acid
XERCTALQDKLLEEEKKQMEHVQRVLQRLKLEKDNWLLAKSTKNETITKFLQLCIFPRCIFSAIDAVYCARFVELVHQQKTPNFSTLLCYDRVFSDIIYTVASCTENEASRYGRFLCCMLETVTRWHSDRATYEKECGNYPGFLTILRATGFDGGNKADQLDYENFRHVVHKWHYKLTKASVHCLETGEYTHIRNILIVLTKILPWYPKVLNLGQALERRVHKICQEEKEKRPDLYALAMGVEVYLLPSGDYGRLCDHVSTGCYSGQLKSRKSYMIPENEFHHKDPPPRNAVASVQNGPGGGPSSSSIGSASKSDESSTEETDKSRERSQCGVKAVNKASSTTPKGNSSNGNSGSNSNKAVKENDKEKGKEKEKEKKEK

SEQ ID NO: 58297 - protein, 485 aa, Homo sapiens
MVASAGSLFGGMVLKKFLKEIQSILPGISAKLTWTSEEGSYSQDMTGVTPFQMIFEVDEKPRTLMTDCLVIKHFLRKIIMVHPKVRFHFSVKVNGILSTEIFGVENEPTLNLGNGIALLVDSQHYVRPNFGTIESHCSRIHPVLGHPVMLFIPEDVAGMDLLGELILTPAAALCPSPKVSSNQLNRISSVSIFLYGPLGLPLILSTWEQPMTTFFKDTSSLVDWKKYHLCMIPNLDLNLDRDLVLPDVSYQVESSEEDQSQTMDPQGQTLLLFLFVDFHSAFPVQQMEIWGVYTLLTTHLNAILVESHSVVQGSIQFTVDKVLEQHHQAAKAADTQEFRTKLHKVFREITQHQFLHHCSCEVKQQLTLEKKDSAQGTEDAPDNSSLELLADTSGQAENKRLKRGSPRIEEMRALRSARAPSPSEAAPRRPEATAAPLTPRGREHREAHGRALAPGRASLGSRLEDVLWLQEVSNLSEWLSPSPGP

SEQ ID NO: 58298 - protein, 966 aa, Homo sapiens
  MOD_RES (1)..(1): Any amino acid
XNVALSSSPIHSGFLVSFMVDARGGAMRGCRHNGLRIIIPPRKCTAPTRVTCRLVKRHRLATMPPMVEGEGLASRLIEVGPSGAQFLGPVIVEIPHFAALRGKERELVVLRSENGDSWKEHFCDYTEDELNEILNGMDEVLDSPEDLEKKRICRIITRDFPQYFAVVSRIKQDSNLIGPEGGVLSSTVVPQVQAVFPEGALTKRIRVGLQAQPMHSELVKKILGNKATFSPIVTLEPRRRKFHKPITMTIPVPKASSDVMLNGFGGDAPTLRLLCSITGGTTPAQWEDITGTTPLTFVNECVSFTTNVSARFWLIDCRQIQESVTFASQVYREIICVPYMAKFVVFAKSHDPIEARLRCFCMTDDKVDKTLEQQENFAEVARSRDVEVLEGKPIYVDCFGNLVPLTKSGQHHIFSFFAFKENRLPLFVKVRDTTQEPCGRLSFMKEPKSTRGLVHQAICNLNITLPIYTKIDMTSEKNPQDEQERIEERLAYIADHLGFSWTELARELDFTEEQIHQIRIENPNSLQDQSHALLKYWLERDGKHATDTNLVECLTKINRMDIVHLMETNTEPLQERISHSYAEIEQTITLDHSEGFSVLQEELCTAQHKQKEEQAVSKESETCDHPPIVSEEDISVGYSTFQDGVPKTEGDSSATALFPQTHKEQVQQDFSGKMQDLPEESSLEYQQEYFVTTPGTETSETQKAMIVPSSPSKTPEEVSTPAEEEKLYLQTPTSSERGGSPIIQEPEEPSEHREESSPRKTSLVIVESADNQPETCERLDEDAAFEKELTEELGELEASSDEEAMVTTRVVRRRVIIQGDDMPEIPPETVTEEEYIDEHGHTVVKKVTRKIIRRYVSSEGTEKEEIMVQGMPQEPVNIEEGDGYSKVIKRVVLKSDTEQSEVTLCEPSILSSTSQFQAEPVEGRRVSKVVKTTVVLGERMEKHLGDSSLATDLPSAKDDFEEDNNE

SEQ ID NO: 58299 - protein, 662 aa, Homo sapiens
  MOD_RES (1)..(1): Any amino acid
XHEFDSERIPELSGPAFLQDIHSVSSLCKLYFRELPNPLLTYQLYGKFSEAMSVPGEEERLVRVHDVIQQLPPPHYRTLEYLLRHLARMARHSANTSMHARNLAIVWAPNLLRSMELESVGMGGAAAFREVRVQSVVVEFLLTHVDVLFSDTFTSAGLDPAGRCLLPRPKSLAGSCPSTRLLTLEEAQARTQGRLGTPTEPTTPKAPASPAERRKGERGEKQRKPGGSSWKTFFALGRGPSVPRKKPLPWLGGTRAPPQPSGSRPDTVTLRSAKSEESLSSQASGAGLQRLHRLRRPHSSSDAFPVGPAPAGSCESLSSSSSSESSSSESSSSSSESSAAGLGALSGSPSHRTSAWLDDGDELDFSPPRCLEGLRGLDFDPLTFRCSSPTPGDPAPPASPAPPAPASAFPPRVTPQAISPRGPTSPASPAALDISEPLAVSVPPAVLELLGAGGAPASATPTPALSPGRSLRPHLIPLLLRGAEAPLTDACQQEMCSKLRGAQGPLGPDMESPLPPPPLSLLRPGGAPPPPPKNPARLMALALAERAQQVAEQQSQQECGGTPPASQSPFHRSLSLEVGGEPLGTSGSGPPPNSLAHPGAWVPGPPPYLPRQQSDGSLLRSQRPMGTSRRGLRGPAQEPPACPDLCTGMGGQLLPFFPHMPH

SEQ ID NO: 58300 - protein, 33 aa, Homo sapiens
  MOD_RES (1)..(1): Any amino acid
XAMLSCLHIRVGVDSDQEHLKGPQLFLNHRSYL

SEQ ID NO: 58301 - protein, 351 aa, Homo sapiens
MLNMGGPETLGDVHDFLLRLFLDRDLMTLPIQNKLAPFIAKRRTPKIQEQYRRIGGGSPIKIWTSKQGEGMVKLLDELSPNTAPHKYYIGFRYVHPLTEEAIEEMERDGLERAIAFTQYPQYSCSTTGSSLNAIYRYYNQVGRKPTMKWSTIDRWPTHHLLIQCFADHILKELDHFPLEKRSEVVILFSAHSLPMSVVNRGDPYPQEVSATVQKVMERLEYCNPYRLVWQSKVGPMPWLGPQTDESIKGLCERGRKNILLVPIAFTSDHIETLYELDIEYSQVLAKECGVENIRRAESLNGNPLFSKALADLVHSHIQSNELCSKQLTLSCPLCVNPVCRETKSFFTSQQL

SEQ ID NO: 58302 - protein, 209 aa, Homo sapiens
MEEHGVTQTEHMATIEAHAVAQQVQQVHVATYTEHSMLSADEDSPSSPEDTSYDDSDILNSTAADEVTAHLAAAGPVGMAAAAAVATGKKRKRPHVFESNPSIRKRQQTRLLRKLRATLDEYTTRVGQQAIVLCISPSKPNPVFKVFGAAPLENVVRKYKSMILEDLESALAEHAPAPQEVNSELPPLTIDGIPVSVDKMTQAQLRAFI

SEQ ID NO: 58303 - protein, 20 aa, Homo sapiens
  MOD_RES (1)..(1): Any amino acid
XNTNAGKSTFGDGTTLTVKP

SEQ ID NO: 58304 - protein, 383 aa, Homo sapiens
MASELAMSNSDLPTSPLAMEYVNDFDLMKFEVKKEPVETDRIISQCGRLIAGGSLSSTPMSTPCSSVPPSPSFSAPSPGSGSEQKAHLEDYYWMTGYPQQLNPEALGFSPEDAVEALISNSHQLQGGFDGYARGAQQLAAAAGAGAGASLGGSGEEMGPAAAVVSAVIAAAAAQSGAGPHYHHHHHHAAGHHHHPTAGAPGAAGSAAASAGGAGGAGGGGPASAGGGGGGGGGGGGGGAAGAGGALHPHHAAGGLHFDDRFSDEQLVTMSVRELNRQLRGVSKEEVIRLKQKRRTLKNRGYAQSCRFKRVQQRHVLESEKNQLLQQVDHLKQEISRLVRERDAYKEKYEKLVSSGFRENGSSSDNPSSPEFFMYPRESSTSVM

SEQ ID NO: 58305 - protein, 330 aa, Homo sapiens
MLGFLSARQTGLEDPLRLRRAESTRRVLGLELNKDRDVERIHGGGINTLDIEPVEGRYMLSGGSDGVIVLYDLENSSRQSYYTCKAVCSIGRDHPDVHRYSVETVQWYPHDTGMFTSSSFDKTLKVWDTNTLQTADVFNFEETVYSHHMSPVSTKHCLVAVGTRGPKVQLCDLKSGSCSHILQGHRQEILAVSWSPRYDYILATASADSRVKLWDVRRASGCLITLDQHNGKKSQAVESANTAHNGKVNGLCFTSDGLHLLTVGTDNRMRLWNSSNGENTLELYSGSRDCNILAWVPSLYEPVPDDDETTTKSQLNPAFEDAWSSSDEEG

SEQ ID NO: 58306 - protein, 227 aa, Homo sapiens
MSWVQATLLARGLCRAWGGTCGAALTGTSISQVPRRLPRGLHCSAAAHSSEQSLVPSPPEPRQRPTKALVPFEDLFGQAPGGERDKASFLQTVQKFAEHSVRKRGHIDFIYLALRKMREYGVERDLAVYNQLLNIFPKEVFRPRNIIQRIFVHYPRQQECGIAVLEQMENHGVMPNKETEFLLIQIFGRKSYPMLKLVRLKLWFPRFMNVNPFPVPRDLPQDPVELA

SEQ ID NO: 58307 - protein, 81 aa, Homo sapiens
  MOD_RES (1)..(1): Any amino acid
XRIQVDAYFSPIHSQLDHLLDPSSFTGRASQQCKQVPLDKNVVCVIPCCISNSKSTSDTWQLGSLPASATAPDFLVAWIYS

SEQ ID NO: 58308 - protein, 135 aa, Homo sapiens
MAESIIIRVQSPDGVKRITATKRETAATFLKKVAKEFGFQNNGFSVYINRNKTGEITASSNKSLNLLKIKHGDLLFLFPSSLAGPSSEMETSVPPGFKVFGAPNVVEDEIDQYLSKQDGKIYRSRDPQLHSMRTI

SEQ ID NO: 58309 - protein, 194 aa, Homo sapiens
  MOD_RES (1)..(1): Any amino acid
XREQDIEDQLYKLESDKRLVEEKVNQLKEEVRLQYEKLHQLLDEDLRQTVEVLDKAQAKFCSENAAQALHLGERMQEAKKLLGSLQLLFDKTEDVSFMKNTKSVKILMDRTQTCTSSSLSPTKIGHLNSKLFLNEVAKKEKQLRKMLEDGVQRPLLKQLLAPSASEWNLLKTGPLCPGKGKRNFANDSDHSKSK

SEQ ID NO: 58310 - protein, 196 aa, Homo sapiens
TVNDFWRMVFQENSRVIVMTTKEVERGKSKCVKYWPDEYALKEYGVMRVRNVKESAAHDYTLRELKLSKVGQFFLALLQGNTERTVWQYHFRTWPDHGVPSDPGGVLDFLEEVHHKQESIMDAGPVVVHCSAGIGRTGTFIVIDILIDIIREKGVDCDIDVPKTIQMVRSQRSGMVQTEAQYRFIYMAVQHYIETL

SEQ ID NO: 58311 - protein, 2193 aa, Homo sapiens
  MOD_RES (1)..(1): Any amino acid
XMEIIEEIQCQTQQENLSSNSDGISPKRRRLSSSLNPSKRAPKQTEEIKHVDMNQKSILWSALKQKAESLQISLEYSGLKNPVIEMLEGIAVVLQLTALCTVHCSHQNMNCRTFKDCQHKSKKKPSVVITWMSLDFYTKVLKSCRSLLESVQKLDLEATIDKVVKIYDALIYMQVNSSFEDHILEDLCGMLSLPWIYSHSDDGCLKLTTFAANLLTLSCRISDSYSPQAQSRCVFLLTLFPRRIFLEWRTAVYNWALQSSHEVIRASCVSGFFILLQQQNSCNRVPKILIDKVKDDSDIVKKEFASILGQLVCTLHGMFYLTSSLTEPFSEHGHVDLFCRNLKATSQHECSSSQLKASVCKPFLFLLKKKIPSPVKLAFIDNLHHLCKHLDFREDETDVKAVLGTLLNLMEDPDKDVRVAFSGNIKHILESLDSEDGFIKELFVLRMKEAYTHAQISRNNELKDTLILTTGDIGRAAKGDLVPFALLHLLHCLLSKSASVSGAAYTEIRALVAAKSVKLQSFFSQYKKPICQFLVESLHSSQMTALPNTPCQNADVRKQDVAHQREMALNTLSEIANVFDFPDLNRFLTRTLQVLLPDLAAKASPAASALIRTLGKQLNVNRREILINNFKYIFSHLVCSCSKDELERALHYLKNETEIELGSLLRQDFQGLHNELLLRIGEHYQQVFNGLSILASFASSDDPYQGPRDIISPELMADYLQPKLLGILAFFNMQLLSSSVGIEDKKMALNSLMSLMKLMGPKHVSSVRVKMMTTLRTGLRFKDDFPELCCRAWDCFVRCLDHACLGSLLSHVIVALLPLIHIQPKETAAIFHYLIIENRDAVQDFLHEIYFLPDHPELKKIKAVLQEYRKETSESTDLQTTLQLSMKAIQHENVDVRIHALTSLKETLYKNQEKLIKYATDSETVEPIISQLVTVLLKGCQDANSQARLLCGECLGELGAIDPGRLDFSTTETQGKDFTFVTGVEDSSFAYGLLMELTRAYLAYADNSRAQDSAAYAIQELLSIYDCREMETNGPGHQLWRRFPEHVREILEPHLNTRYKSSQKSTDWSGVKKPIYLSKLGSNFAEWSASWAGYLITKVRHDLASKIFTCCSIMMKHDFKVTIYLLPHILVYVLLGCNQEDQQEVYAEIMAVLKHDDQHTINTQDIASDLCQLSTQTVFSMLDHLTQWARHKFQALKAEKCPHSKSNRNKVDSMVSTVDYEDYQSVTRFLDLIPQDTLAVASFRSKAYTRAVMHFESFITEKKQNIQEHLGFLQKLYAAMHEPDGVAGVSAIRKAEPSLKEQILEHESLGLLRDATACYDRAIQLEPDQIIHYHGVVKSMLGLGQLSTVITQVNGVHANRSEWTDELNTYRVEAAWKLSQWDLVENYLAADGKSTTWSVRLGQLLLSAKKRDITAFYDSLKLVRAEQIVPLSAASFERGSYQRGYEYIVRLHMLCELEHSIKPLFQHSPGDSSQEDSLNWVARLEMTQNSYRAKEPILALRRALLSLNKRPDYNEMVGECWLQSARVARKAGHHQTAYNALLNAGESRLAELYVERAKWLWSKGDVHQALIVLQKGVELCFPENETPPEGKNMLIHGRAMLLVGRFMEETANFESNAIMKKYKDVTACLPEWEDGHFYLAKYYDKLMPMVTDNKMEKQGDLIRYIVLHFGRSLQYGNQFIYQSMPRMLTLWLDYGTKAYEWEKAGRSDRVQMRNDLGKINKVITEHTNYLAPYQFLTAFSQLISRICHSHDEVFVVLMEIIAKVFLAYPQQAMWMMTAVSKSSYPMRVNRCKEILNKAIHMKKSLEKFVGDATRLTDKLLELCNKPVDGSSSTLSMSTHFKMLKKLVEEATFSEILIPLQSVMIPTLPSILGTHANHASHEPFPGHWAYIAGFDDMVEILASLQKPKKISLKGSDGKFYIMMCKPKDDLRKDCRLMEFNSLINKCLRKDAESRRRELHIRTYAVIPLNDECGIIEWVNNTAGLRPILTKLYKEKGVYMTGKELRQCMLPKSAALSEKLKVFREFLLPRHPPIFHEWFLRTFPDPTSWYSSRSAYCRSTAVMSMVGYILGLGDRHGENILFDSLTGECVHVDFNCLFNKGETFEVPEIVPFRLTHNMVNGMGPMGTEGLFRRACEVTMRLMRDQREPLMSVLKTFLHDPLVEWSKPVKGHSKAPLNETGEVVNEKMASSSNSFK

SEQ ID NO: 58312 - protein, 281 aa, Homo sapiens
MADISLDELIRKRGAAAKGRLNARPGVGGVRSRVGIQQGLLSQSTRTATFQQRFDARQKIGLSDARLKLGVKDAREKLLQKDARFRIKGKVQDAREMLNSRKQQTTVPQKPRQVADAREKISLKRSSPAAFINPPIGTVTPALKLTKTIQVPQQKAMAPLHPHPAGMRINVVNNHQAKQNLYDLDEDDDGIASVPTKQMKFAASGGFLHHMAGLSSSKLSMSKALPLTKVVQNDAYTAPALPSSIRTKALTNMSRTLVNKEEPPKELPAAEPIGRHQDDCE

SEQ ID NO: 58313 - protein, 92 aa, Homo sapiens
MATDWLGSIVSINCGDSLGVYQGRVSAVDQVSQTISLTRPFHNGVKCLVPEVTFRAGDITELKILEIPGPGDNQHFGDLHQTELGPSGAGCQ

SEQ ID NO: 58314 - protein, 98 aa, Homo sapiens
MTPEFDEEVVFEVRPVGRTCRSEDGGKSARENSPLYQYLQDLGHTDFEICSSLSPKTEKCTTEGQQKPPTRVLPKYLGYSNHSMNINCTYWHAQGMGY

SEQ ID NO: 58315 - protein, 61 aa, Homo sapiens
MSRTLASAVPLSSPDYYERLGQLQHGLRDRFPWRLLHTFVPFVLDASGIFCFLDQRSIFTK

SEQ ID NO: 58316 - protein, 170 aa, Homo sapiens
MSGRGKQGGKARAKAKTRSSRAGLQFPVGRVHRLLRKGNYSERVGAGAPVYLAAVLEYLTAEILELAGNAARDNKKTRIIPRHLQLAIRNDEELNKLLGKVTIAQGGVLPNIQAVLLPKKTESHHKAKAGFRSSQWLVPSRLLASPRVGKRHASSWPPRLLERALQPPAA

SEQ ID NO: 58317 - protein, 190 aa, Homo sapiens
MSPCGGEDIVADHVASYGVNLYQSYGPSGQFTHEFDGDEEFYVDLERKETVWKLPLFHRLRFDPQFALTNIAVLKHNLNILIKRSNSTAATNEVPEVTVFSKSPVTLGQPNTLICLVDNIFPPVVNITWLSNGHSVTEGVSETSFLSKSDHSFFKISYLTFLPSADEIYDCKVEHWGLDEPLLKHWDLLE

SEQ ID NO: 58318 - protein, 68 aa, Homo sapiens
MADDDVLFEDVYELCEVIGKGPFSVVRRCINRETGQQFAVKIVDVAKFTSSPGLSTEVWMEQICVLKS

SEQ ID NO: 58319 - protein, 67 aa, Homo sapiens
  MOD_RES (1)..(1): Any amino acid
XQGMEQTTPGAGPDVPQLGNIDVIHSYLCKGLQEKFFKRKPKVLGVLCGHKFSTHSGCADSDCLDEP

SEQ ID NO: 58320 - protein, 122 aa, Homo sapiens
  MOD_RES (1)..(1): Any amino acid
XFYGPRIGALYIRGLGEFTPLYPMLFGGGQERNFRPGTENTPMIAGLGKAAELVTQNCEAYEAHMRDVRDYLEERLEAEFGQKRIHLNSQFPGTQRLPNTCNFSIRGPRLQGDGPSPWSFRV

SEQ ID NO: 58321 - protein, 233 aa, Homo sapiens
MAQESVMFSDVSVDFSQEEWECLNDDQRDLYRDVMLENYSNLVSMGHSISKPNVISYLEQGKEPWLADRELTRGQWPVLESRCETKKLFLKKEIYEIESTQWEIMEKLTRRDFQCSSFRDDWECNRQFKKELGSQGGHFNQLVFTHEDLPTLSHHPSFTLQQIINSKKKFCASKEYRKTFRHGSQFATHEIIHTIEKPYECKECGKSFRHPSRLTHHQKIHTGKKPFECKECG

SEQ ID NO: 58322 - protein, 155 aa, Homo sapiens
  MOD_RES (1)..(1): Any amino acid
XGHVETCPGPWKGGFILPVLGAVLALLFLLLVLLLLVRKKRKIKEPLLLPEDDTRDNVFYYGEEGGGEEDQDYDITQLHRGLEARPEVVLRNDVAPTIIPTPMYRPRPANPDEIGNFIIEVRRGRPVEGHPLFKPSTSHTGEQAWAWSLGSGFKF

SEQ ID NO: 58323 - protein, 365 aa, Homo sapiens
MVSNNPLCVCLCRNIFPSNLVSAAFRSYSTTYEERNITGTRVKVPVGQEVEGMNILGLVVFAIVFGVALRKLGPEGELLIRFFNSFNEATMVLVSWIMWYAPVGIMFLVAGKIVEMEDVGLLFARLGKYILCCLLGHAIHGLLVLPLIYFLFTRKNPYRFLWGIVTPLATAFGTSSSSATLPLMMKCVEENNGVAKHISRFILPIGATVNMDGAALFQCVAAVFIAQLSQQSLDFVKIITILVTATASSVGAAGIPAGGVLTLAIILEAVNLPVDHISLILAVDWLVDRSCTVLNVEGDALGAGLLQNYVDRTESRSTEPELIQVKSELPLDPLPVPTEEGNPLLKHYRGPAGDATVASEKESVM

SEQ ID NO: 58324 - protein, 124 aa, Homo sapiens
MPFLGQDWRSPGWSWIKTEDGWKRCESCSQKLERENNRCNISHSIILNSEDGEIFNNEEHEYASKKRKKDHFRNDTNTQSFYREKWIYVHKESTKERHGYCTLGEAFNRLDFSSAIQDIRRFNY

SEQ ID NO: 58325 - protein, 51 aa, Homo sapiens
MFESFNVPGLYIAVQAVLALAASWTSRQVGERTLTGIVIDSGDGVTHVIPV

SEQ ID NO: 58326 - protein, 161 aa, Homo sapiens
MEPSDMPAGYHCPLDSAPWDETRDPQSTELIPRRAISRSPTCARCRNHGVTAHLKGHKRLCLFQACECHKCVLILERRRVMAAQVALRRQQEAQLKKHLMRRGEASPKAPNHFRKGTTQPQVPSGKENIAPQPQTPHGAVLLAPTPPGKNSCGPLLLSHPP

SEQ ID NO: 58327 - protein, 362 aa, Homo sapiens
QQMSSMVIEHMASHGTRFLRGCAPSRVRRLPDGQLQVTWEDSTTGKEDTGTFDTVLWAIGRVPDTRSLNLEKAGVDTSPDTQKILVDSREATSVPHIYAIGDVVEGRPELTPIAIMAGRLLVQRLFGGSSDLMDYDNVPTTVFTPLEYGCVGLSEEEAVARHGQEHVEVYHAHYKPLEFTVAGRDASQCYVKMVCLREPPQLVLGLHFLGPNAGEVTQGFALGIKCGASYAQVMRTVGIHPTCSEEVVKLRISKRSGLDPTVTGCCGMAAGQVWGASTLSWSACEMVSVERKCWTGGPCAPQGWLRGLSTSPLHLSASAAGHPPPGSWCQMMTTWVETYPVGTHVRAPWHFCNANKEGTFSE

SEQ ID NO: 58328 - protein, 197 aa, Homo sapiens
MEEETHTDAKIRAENGTGSSPRGPGCSLRHFACEQNLLSRPDGSASFLQGVAEKSRERLIRNTCEAVVLGTLHPRTSITVVLQVVSDAGSLLACCLNAACMALVDAGVPMRALFCGVACALDSDGTLVLDPTSKQEKEARAVLTFALDSVERKLLMSSTKGLYSDTELQQCLAAAQAASQHVFRFYRESLQRRYSKS

SEQ ID NO: 58329 - protein, 99 aa, Homo sapiens
MAGTALKRLMAEYKQLTLNPPEGIVAGPMNEENFFEWEALIMGPEDTCFEFGVFPAILSFPLDYPLSPPKMRFTCEMFHPNSGQPDVQGKYASSFFHSP

SEQ ID NO: 58330 - protein, 196 aa, Homo sapiens
MPASISSIFPELDSEDAPPCCRLALGEPPPYGAAPIGIPRPPPPRPGMHSPPPRPAPSPGTWESQPARSVRLGGPGGGAGGAGGGRVLECPSIRITSISPTPEPPAALEDNPDAWGDGSPRDYPPPEGFGGYREAGGQGGGAFFSPSPGSSSLSSWSFFSDASDEAALYAACDEVESELNEAASRFGLGSPLPSPR

SEQ ID NO: 58331 - protein, 176 aa, Homo sapiens
MADSAQAQKLVYLVTGGCGFLGEHVVRMLLQREPRLGELRVFDQHLGPWLEELKTGPVRVTAIQGDVTQAHEVAAAVAGAHVVIHTAGLVDVFGRASPKTIHEVNVQGTRNVIEACVQTGTRFLVYTSSMEVVGPNTKGHPFYRGNEDTPYEAVHRHPYPCSKALAEWLVLEANGR

SEQ ID NO: 58332 - protein, 143 aa, Homo sapiens
MLPLPSCSLPILLLFLLPSVPIESQPPPSTLPPFLAPEWDLLSPRVVLSRGAPAGPPLLFLLEAGAFRESAGAPANRSRRGVSETAPASRRGELAVCDAVSGWVTDRRTAVDLRGREVEVLGEVPAAGGSPLRQYFFETRCKA

SEQ ID NO: 58333 - protein, 379 aa, Homo sapiens
MADPKYADLPGIARNEPDVYETSDLPEDDQAEFDAEELTSTSVEHIIVNPNAAYDKFKDKRVGTKGLDFSDRIGKTKRTGYESGEYEMLGEGLGVKETPQQKYQRLLHEVQELTTEVEKIKTTVKESATEEKLTPVLLAKQLAALKQQLVASHLEKLLGPDAAINLTDPDGALAKRLLLQLEATKNSKGGSGGKTTGTPPDSSLVTYELHSRPEQDKFSQAAKNPLSAGLQGACLMETVELLQAKVSALDLAVLDQVEARLQSVLGKVNEIAKHKASVEDADTQSKVHQLYETIQRWSPIASTLPELVQRLVTIKQLHEQAMQFGQLLTHLDTTQQMIANSLKDNTTLLTQVQTTMRENLATVEGNFASIDERMKKLGK

SEQ ID NO: 58334 - protein, 931 aa, Homo sapiens
MPHKIGFVVVSSSGHEDGFSARELMIHAPTVSGWRSPRFCQFPQEIVLQMVERCRIRKLQLLAHQYMISSKIEFYISESLPEYFAPYQAERFRRLGCVLFFSYVSLCDNEKTGCKARELKSVYVDAVGQFLKLIFHQNHVNKYNIYNQVALVAINIIGDPADFSDESNTASREKLIDHYLGHNSEDPALEGTYARKSDYISPLDDLAFDMYQDPEVAQIIRKLDERKREAVQKERYDYAKKLKQAIADLQKVGERLGRYEVEKRCAVEKEDYDLAKEKKQQMEQYRAEVYEQLELHSLLDAELMRRPFDLPLQPLARSGSPCHQKPMPSLPQLEERGTENQFAEPFLQEKPSSYSLTISPQHSAVDPLLPATDPHPKINAESLPYDERPLPAIRKHYGEAVVEPEMSNADISDARRGGMLGEPEPLTEKALREASSAIDVLGETLVAEAYCKTWSYREDALLALSKKLMEMPVGTPKEDLKNTLRASVFLVRRAIKDIVTSVFQASLKLLKMIITQYIPKHKLSKLETAHCVERTIPVLLTRTGDSSARLRVTAANFIQEMALFKEVKSLQIIPSYLVQPLKANSSVHLAMSQMGLLARLLKDLGTGSSGFTIDNVMKFSVSALEHRVYEVRETAVRIILDMYRQHQASILEYLPPDDSNTRRNILYKTIFEGFAKIDGRATDAEMRARRKAATEEAEKQKKEEIKALQGQLAALKEIQAEVQEKESDAVKPKNQDIQGGKAAPAEALGIPDEHYLDNLCIFCGERSESFTEEGLDLHYWKHCLMLTRCDHCKQVVEISSLTEHLLTECDKKDGFGKCYRCSEAVFKEELPRHIKHKDCNPAKPEKLANRCPLCHENFSPGEEAWKAHLMGPAGCTMNLRKTHILQKAPALQPGKSSAVAASGPLGSKAGSKIPTPKGGLSKSSSRTYAKR

SEQ ID NO: 58335 - protein, 548 aa, Homo sapiens
MAVMDLSSPWALTKQDSACFHLRNAEEERMIAVFLTTWLQEPMTFKDVAVEFTQEEWMMLDSAQRSLYRDVMLENYRNLTSVEYQLYRLTVISPLDQEEIRNMKKRIPQAICPDQKIQPKTKESTVQKILWEEPSNAVKMIKLTMHNWSSTLREDWECHKIRKQHKIPGGHWRQMIYAPKKTVPQELFRDYHELEENSKLGSKLIFSQSIFTSKHCQKCYSEIGCLKHNSIINNYVKNSISEKLYESHECDTTLWHFQRNQTVQKEYTYSKHGMHFTHNMFPVPNNLHMAQNACECNKDETLCHQSSLKKQGQTHTEKKHECNQCGKAFKRISNLTLYKKSHMGEKQYECKECGKVFNDSSTLRRHVRTHTGEKPYECNQCGKAFSQKTSLKAHMRTHTGEKPYECNQCGKSFGTSSYLIVHKRIHTGEKLYECSECGKAFNTSSHLKVHKKIHTGENVYECSDCGKVFSGVSSLRMHIRTHTGEKPYECKECRKAFSVSSSLRRHVRIHTGEKPYECIQCGKAFSQSSSLIIHKRIHTERETLNLHT

SEQ ID NO: 58336 - protein, 237 aa, Homo sapiens
MDGIVPDIAVGTKRGSDELFSTCVTNGPFIMSSNSASAANGNDSKKFKGDSRSAGVPSRVIHIRKLPIDVTEGEVISLGLPFGKVTNLLMLKGKNQAFIEMNTEEAANTMVNYYTSVTPVLRGQPIYIQFSNHKELKTDSSPNQAAALQAVNSVQSGNLALAASAAAVDAGMAMAGQSPVLRIIVENLFYPVTLDVLHQIFSKFGTVLKIITFTKNNQFQALLQYADPVSAQHAKLS

SEQ ID NO: 58337 - protein, 125 aa, Homo sapiens
MAKSLLKTASLSGRTKLLHQTGLSLYSTSHGFYEEEVKKTLQQFPGGSIDLQKEDNGIGILTLNNPSRMNAFSGVMMLQLLEKVIELENWTEGKGLIVRGAKNTFSSGSDLNAVKSLGTPEANFL

SEQ ID NO: 58338 - protein, 574 aa, Homo sapiens
MEPTENPCQGPLGQKAGEKPLAAGPGEEELLRGSAPHAQDTQSEELPPSCTISGEKKPPAVSGEATGADAGRLCPPPRSRAPHKDRTLARSRPQTQGEDCSLPVGEVKIGKRSYSPAPGKQKKPNAMGLAPTSSPGAPNSARATHNPVPCGSGRGPCHLANLLSTLAQSNQNRDHKQGPPEVTCQIRKKTRTLYRSDQLEELEKIFQEDHYPDSDKRREIAQTVGVTPQRIMVWFQNRRAKWRKMEKLNGKESKDNPAAPGPASSQCSSAAEILPAVPMEPKPDPFPQESPLDTFPEPPMLLTSDQTLAPTQPSEGAQRVVTPPLFSPPPVRRADLPFPLGPVHTPQLMPLLMDVAGSDSSHKDGPCGSWGTSITLPPPCSYLEELEPQDYQQSNQPGPFQFSQAPQPPLFQSPQPKLPYLPTFPFSMPSSLTLPPPEDSLFMFPCGPSGGTSQGYCPGASSGQILMQPPAGNIGTASWSDPCLPELPFPGPFCPQALGHPPGGDGYFPDLFPTPCPQALGRQPSSALSWMPEGARPGTGPLLSKAKEEPPAASLDQPSALEEARGDDKNSHVP

SEQ ID NO: 58339 - protein, 98 aa, Homo sapiens
MRSLGQNPTEAELQDMINEVDADGNGTIDFPEFLTMMARKMKDTDSEEEIREAFRVFDKDGNGYISAAELRHVMTNLGEKLTDEEVDEMIREADIDGD

SEQ ID NO: 58340 - protein, 132 aa, Homo sapiens
MASQNRDPAATSVAAARKGAEPSGGAARGPVGKRLQQELMTLMAVGSIRTSSTVCLLSGPRETQDSSKPLVWGLGWDMRLLLELTLQLFLQMPEPNIDSPLNTHAAELWKNPTAFKKYLQETYSKQVTSQEP

SEQ ID NO: 58341 - protein, 508 aa, Homo sapiens
MVAEVDSMPAASSVKKPFVLRSKMGKWCRHCFPCCRGSGKSNVGTSGDQDDSTMKTLRSKMGKWCCHCFPCCRGSGKSNVGTSGDHDDSAMKTLRSKMGKWCCHCFPCCRGSGKSNVGAWGDYDDSAFVEPRYHVRREDLDKLHRAAWWGKVARKDLIVMLRDTDVNKQDKQKRTALHLASANGNSGVVKLLLDRRCQLNVLDNKKRTALTKAVQCQEDECALMLLEHGTDPNIPDEYGNTTLHYAIYNEDKLMAKALLLYGADIESKNKHGLTPLLLGVHEQKQQVVKFLIKKKANLNALDRYGRTALILAVCCGSASIVSLLLEQNIDVSSQDLSGQTAREYAVSSHHHVICQLLSDYKEKQMLKISSENSNPEQDLKLTSEEESQRFKGSENSQPEKMSQEPEINKDGDRKVEEEMKKHGSTHVGFPENLTNGATAGNGDDGLIPPRKSRTPESQQFPDTENEEYHSDEQNDTQKQFCEEQNTGILHDEILIHEEKQIEVVENEF

SEQ ID NO: 58342 - protein, 49 aa, Homo sapiens
MAASGAVEPGPPGAAVAPSPAPAPPPAPDHLFRPISAEDEEQQPTEIEA

SEQ ID NO: 58343 - protein, 107 aa, Homo sapiens
KILFLSSIIPFDCLLTVRALGGLLKFLGRRRIGVELEDYNVSVPILGFKKFMLTHLVNIDQDTYSVLQIFKSESHPSVYKVASGLKEGLSLFGILNRCHCKWGEKLL

SEQ ID NO: 58344 - protein, 137 aa, Homo sapiens
MESQKEARTLQEPVARPSGASSSQTPNDKERREGGAVPAAAALGAEADDDSADGLWELPVEPAERRPECTRCSRPQKVCLCPFLPAHPLHISTHLYIIQHPAEENKVLRTVPLLAACLPQDKCKVKIGRRFSEERCN

SEQ ID NO: 58345 - protein, 564 aa, Homo sapiens
MMNCWFSCTPKNRHAADWNKYDDRLMKAAERGDVEKVTSILAKKGVNPGKLDVEGRSVFHVVTSKGNLECLNAILIHGVDITTSDTAGRNALHLAAKYGHALCLQKLLQYNCPTEHADLQGRTALHDAAMADCPSSIQLLCDHGASVNAKDVDGRTPLVLATQMSRPTICQLLIDRGADVNSRDKQNRTALMLGCEYGCRDAVEVLIKNGADISLLDALGHDSSYYARIGDNLDILTLLKTASENTNKGRELWKKGPSLQQRNLTHMQDEVNVKSHQREHQNIQDLEIENEDLKERLRKIQQEQRILLDKVNGLQLQLNEREKLKSLLAAKEKQHEESLRTIEALKNRFKYFESDHLGSGSHFSNRKEDMLLKQGQMYMADSQCTSPGIPAHMQSRSMLRPLELSLPSQTSYSENEILKKELEAMRTFCESAKQDRLKLQNELAHKVAECKALALECERVKEDSDEQIKQLEDALKDVQKRMYESEGKVKQMQTHFLALKEHLTSEAASGNHRLTEELKDQLKDLKVKYEGASAEVGKLRNQIKQNEMIVEEFKRDEGKLIEEN

SEQ ID NO: 58346 - protein, 257 aa, Homo sapiens
  MOD_RES (1)..(1): Any amino acid
XPGPHASPVPYRRPRFLRGSSSSPGAADASRRPDSRPVRSPARGRTLPWNAGYAEIINAEKSEFNEDQAACGKLCIRRCEFGAEEEWLTLCPEEDEVIGRELEASGQMGGCTALVAVSLQGKLYMANAGDSRAILVRRDEIRPLSFEFTPETERQRIQQLAFVYPELLAGEFTRLEFPRRLKGDDLGQKVLFRDHHMSGWSYKRVEKSDLKYPLIHGQGRQARLLGTLAVSRGLGDHQLRVLDTNIQLKPFLLSVPQ

SEQ ID NO: 58347 - protein, 82 aa, Homo sapiens
MARTAGDTLDVFTMIDIFKYVIYGIAAAFFVYGILLMVEGFFTTGAIKDLYGDFKITTCGRCVSAWFIMLTYLFMLAWLGVT

SEQ ID NO: 58348 - protein, 201 aa, Homo sapiens
  MOD_RES (1)..(1): Any amino acid
XPLPASPELEDDKISLPFVVTDLRGRNLRPMRERTAVQGQYLTVEQLTLDFEYVINEVIRHDATWGHQFCSFSDYDIVILEVCPETNQVLINIGLLLLAFPSPTEEGQLRPKTYHTSLKVAWDLNTGIFETVSVGDLTEVKGQTSGSVWSSYRKSCVDMVMKWLVPESSGRYVNRMTNEALHKGCSLKVLADSERYTWIVL

SEQ ID NO: 58349 - protein, 1299 aa, Homo sapiens
MPKKKRLSAGRVPLILFLCQMISALEVPLDPKLLEDLVQPPTITQQSPKDYIIDPRENIVIQCEAKGKPPPSFSWTRNGTHFDIDKDPLVTMKPGTGTLIINIMSEGKAETYEGVYQCTARNERGAAVSNNIVVRPSRSPLWTKEKLEPITLQSGQSLVLPCRPPIGLPPPIIFWMDNSFQRLPQSERVSQGLNGDLYFSNVLPEDTREDYICYARFNHTQTIQQKQPISVKVISVDELNDTIAANLSDTEFYGAKSSRERPPTFLTPEGNASNKEELRGNVLSLECIAEGLPTPIIYWAKEDGMLPKNRTVYKNFEKTLQIIHVSEADSGNYQCIAKNALGAIHHTISVRVKAAPYWITAPQNLVLSPGEDGTLICRANGNPKPRISWLTNGVPIEIAPDDPSRKIDGDTIIFSNVQERSSAVYQCNASNEYGYLLANAFVNVLAEPPRILTPANTLYQVIANRPALLDCAFFGSPLPTIEWFKGAKGSALHEDIYVLHENGTLEIPVAQKDSTGTYTCVARNKLGMAKNEVHLEIKDPTWIVKQPEYAVVQRGSMVSFECKVKHDHTLSLTVLWLKDNRELPSDERFTVDKDHLVVADVSDDDSGTYTCVANTTLDSVSASAVLSVVAPTPTPAPVYDVPNPPFDLELTDQLDKSVQLSWTPGDDNNSPITRIHHEYEDAMHKPGLWHHQTEVSGTQTTAQLKLSPYVNYSFRVMAVNSIGKSLPSEASEQYLTKASEPDKNPTAVEGLGSEPDNLVITWKPLNGFESNGPGLQYKVSWRQKDGDDEWTSVVVANVSKYIVSGTPTFVPYLIKVQALNDMGFAPEPAVVMGHSGEDLPMVAPGNVRVNVVNSTLAEVHWDPVPLKSIRGHLQGYRIYYWKTQSSSKRNRRHIEKKILTFQGSKTHGMLPGLEPFSHYTLNVRVVNGKGEGPASPDRVFNTPEGVPSAPSSLKIVNPTLDSLTLEWDPPSHPNGILTEYTLKYQPINSTHELGPLVDLKIPANKTRWTLKNLNFSTRYKFYFYAQTSAGSGSQITEEAVTTVDEAGILPPDVGAGKVQAVNPRISNLTAAAAETYANISWEYEGPEHVNFYVEYGVAGSKEEWRKEIVNGSRSFFGLKGLMPGTAYKVRVGAVGDSGFVSSEDVFETGPAMASRQVDIATQGWFIGLMCAVALLILILLIVCFIRRNKGGKYPVKEKEDAHADPEIQPMKEDDGTFGEYSDAEDHKPLKKGSRTPSDRTVKKEDSDDSLVDYGEGVNGQFNEDGSFIGQYSGKKEKEPAEGNESSEAPSPVNAMNSFV

SEQ ID NO: 58350 - protein, 150 aa, Homo sapiens
MLIATSFFLFFSSVVAAPTHSSFWQFQRRVKHITGRSAFFSYYGYGCYCGLGDKGIPVDDTDSPSSPSPYEKLKEFSCQPVLNSYQFHIVNGAVVCGCTLGPGASCHCRLKACECDKQSVHCFKESLPTYEKNFKQFSSQPRCGRHKPWC

SEQ ID NO: 58351 - protein, 118 aa, Homo sapiens
MRGAAPGKKTSGLQQKNVEVKTKKNKQKTPGNGDGGSTSETPQPPRKKRARVDPTVENEETFMNRVEVKVKIPEELKPWLVDDWDLITRQKQLFYLPAKKNVDSILEDYANYKKSRGN

SEQ ID NO: 58352 - protein, 680 aa, Homo sapiens
IPIAAVLITFVGHVSFFKEADFSPSVAFASLSLFHILVTPLFLLSSVVRSTVKALVSVQKLSEFLSSAEIREEQCAPHEPTPQGPASKYQAVPLRVVNRKRPAREDCRGLTGPLQSLVPSADGDADNCCVQIMGGYFTWTPDGIPTLSNITIRIPRGQLTMIVGQVGCGKSSLLLAALGEMQKVSGAVFWSSSLPDSEIGEDPSPERETATDLDIRKRGPVAYASQKPWLLNATVEENIIFESPFNKQRYKMVIEACSLQPDIDILPHGDQTQIGERGINLSGGQRQRISVARALYQHANVVFLDDPFSALDIHLSDHLMQAGILELLRDDKRTVVLVTHKLQYLPHADWIIAMKDGTIQREGTLKDFQRSECQLFEHWKTLMNRQDQELEKETVTERKATEPPQGLSRAMSSRDGLLQDEEEEEEEAAESEEDDNLSSMLHQRAEIPWRACAKYLSSAGILLLSLLVFSQLLKHMVLVAIDYWLAKWTDSALTLTPAARNCSLSQECTLDQTVYAMVFTVLCSLGIVLCLVTSVTVEWTGLKVAKRLHRSLLNRIILAPMRFFETTPLGSILNRFSSDCNTIDQHIPSTLECLSRSTLLCVSALAVISYVTPVFLVALLPLAIVCYFIQKYFRVASRDLQQLDDTTQLPLLSHFAETVEGLTTIRAFRDRIPPCWPGWS

SEQ ID NO: 58353 - protein, 4589 aa, Homo sapiens
MDDLRVLWMRDRVYAAFGITDPQLFEDLLNRDDGQGEDLILHFLNQASEEEGPSALFIYRTMVPEEVEVEIDEIPVLSEEGEEEEETYSQKVESVDKVRAKRVSLRTESLGQPLNREDEEMDKEISEKLPSKRTAKHIMEKMHLHMLCTPLPEEFLDQNVVFFLRNTKEAISEATDMKEAMEIMPETLEYGIINANVLHFLKNIICQVFLPALSFNQHRTSTTVGVTSGEVSNSSEHESDLPPMPGEAVEYHSIQLIRDEFLMNVQKFASNIQRTMQQLEGEIKLEMPIISVEGEVSDLAADPETVDILEQCVINWLNQISTAVEAQLKKTPQGKGPLAEIEFWRERNATLSALHEQTKLPIVRKVLDVIKESDSMLVANLQPVFTELFKFHTEASDNVRFLSTVERYFKNITHGSGFHVVLDTIPAMMSALRMVWIISRHYNKDERMIPLMERIAWEIAERVCRVVNLRTLFKENRASAQSKTLEARNTLRLWKKAYFDTRAKIEASGREDRWEFDRKRLFERTDYMATICQDLSDVLQILEEFYNIFGPELKAVTGDPKRIDDVLCRVDGLVTPMENLTFDPFSIKSSQFWKYVMDEFKIEVLVIEKEAKHFIDESFKTLRSAEAAFDMLLKFKHIRSREAVNRQMMMKFNDILAQYCKEIDIINKIFVQNLENPPLYKNHPPVAGAIYWERSLFFRIKHTILRFQEVQEILDSDRGQEVKQKYLEVGRTMKEYEDRKYEQWMEVTEQVLPALMKKSLLTKSSIATEEPSTLERGAVFAINFSPALREIINETKYLEQLGFTVPELARNVALQEDKFLRYTAGIQRMLDHYHMLIGTLNDAESVLLKDHSQELLRVFRSGYKRLNWNSLGIGDYITGCKQAIGKFESLVHQIHKNADDISSRLTLIEAINLFKYPAAKSEEELPGVKEFFEHIERERASDVDHMVRWYLAIGPLLTKVEGLVVHTNTGKAPKLASYYKYWEKKIYEVLTKLILKNLQSFNSLILGNVPLFHTETILTAPEIILHPNTNEIDKMCFHCVRNCVEITKHFVRWMNGSCIECPPQKGEEEEVVIINFYNDISLNPQIIEQAVMIPQNVHRILINLMKYLQKWKRYRPLWKLDKAIVMEKFAAKKPPCVAYDEKLQFYSKIAYEVMRHPLIKDEHCIRLQLRHLANTVQENAKSWVISLGKLLNESAKEELYNLHEEMEHLAKNLRKIPNTLEDLKFVLATIAEIRSKSLVMELRYRDVQERYRTMAMYNLFPPDAEKELVDKIESIWSNLFNDSVNVEHALGDIKRTFTELTRGEIMNYRVQIEEFAKRFYSEGPGSVGDDLDKGVELLGVYERELARHEKSRQELANAEKLFDLPITMYPELLKVQKEMSGLRMIYELYEGLKVAKEEWSQTLWINLNVQILQEGIEGFLRALRKLPRPVRGLSVTYYLEAKMKAFKDSIPLLLDLKNEALRDRHWKELMEKTSVFFEMTETFTLENMFAMELHKHTDVLNEIVTAAIKEVAIEKAVKEILDTWENMKFTVVKYCKGTQERGYILGSVDEIIQSLDDNTFNLQSISGSRFVGPFLQTVHKWEKTLSLIGEVIEIWMLVQRKWMYLESIFIGGDIRSQLPEEAKKFDNIDKVFKRIMGETLKDPVIKRCCEAPNRLSDLQNVSEGLEKCQKSLNDYLDSKRNAFPRFFFISDDELLSILGSSDPLCVQEHMIKMYDNIASLRFNDGDSGEKLVSAMISAEGEVMEFRKILRAEGRVEDWMTAVLNEMRRTNRLITKEAIFRYCEDRSRVDWMLLYQGMVVLAASQVWWTWEVEDVFHKAQKGEKQAMKNYGRKMHRQIDELVTRITMPLSKNDRKKYNTVLIIDVHARDIVDSFIRGSILEAREFDWESQLRFYWDREPDELNIRQCTGTFGYGYEYMGLNGRLVITPLTDRIYLTLTQALSMYLGGAPAGPAGTGKTETTKDLAKALGLLCVVTNCGEGMDYRAVGKIFSGLAQCGAWGCFDEFNRIDASVLSVISSQIQTIRNALIHQLTTFQFEGQEISLDSRMGIFITMNPGYAGRTELPESVKALFRPVVVIVPDLQQICEIMLFSEGFLEAKTLAKKMTVLYKLAREQLSKQYHYDFGLRALKSVLVMAGELKRGSSDLREDVVLMRALRDMNLPKFVFEDVPLFLGLISDLFPGLDCPRVRYPDFNDAVEQVLEENGYAVLPIQVDKVVQMFETMLTRHTTMVVGPTRGGKSVVINTLCQAQTKLGLTTKLYILNPKAVSVIELYGILDPTTRDWTDGVLSNIFREINKPTDKKERKYILFDGDVDALWVENMNSVMDDNRLLTLANGERIRLQAHCALLFEVGDLQYASPATVSRCGMVYVDPKNLKYRPYWKKWVNQIPNKVEQYNLNSLFEKYVPYLMDVIVEGIVDGRQAEKLKTIVPQTDLNMVTQLAKMLDALLEGEIEDLDLLECYFLEALYCSLGASLLEDGRMKFDEYIKRLASLSTVDTEGVWANPGELPGQLPTLYDFHFDNKRNQWVPWSKLVPEYIHAPERKFINILVHTVDTTRTTWILEQMVKIKQPVIFVGESGTSKTATTQNFLKNLSEETNIVLMVNFSSRTTSMDIQRNLEANVEKRTKDTYGPPMGKRLLVFMDDMNMPRVDEYGTQQPIALLKLLLEKGYLYDRGKELNCKSIRDLGFIAAMGKAGGGRNEVDPRFISLFSVFNVPFPSEESLHLIYSSILKGHTSTFHESIVAVSGKLTFCTLALYKNIVQDLPPTPSKFHYIFNLRDLSRVFNGLVLTNPERFQTVAQMVRVWRNECLRVFHDRLISETDKQLVQQHIGSLVVEHFKDDVEVVMRDPILFGDFQMALHEGEPRIYEDIQDYEAAKALFQEILEEYNESNTKMNLVLFDDALEHLTRVHRIIRMDRGHALLVGVGGSGKQSLSRLAAFTASCEVFEILLSRGYSENSFREDLKSLYLKLGIENKAMIFLFTDAHVAEEGFLELINNMLTSGIVPALFSEEEKESILSQIGQEALKQGMGPAKESVWQYFVNKSANNLHIVLGMSPVGDTLRTWCRNFPGMVNNTGIDWFMPWPPQALHAVAKSFLGYNPMIPAENIENVVKHVVLVHQSVDHYSQQFLQKLRRSNYVTPKNYLDFINTYSKLLDEKTQCNIAQCKRLDGGLDKLKEATIQLDELNQKLAEQKIVLAEKSAACEALLEEIAVNTAVAEEKKKLAEEKAMEIEEQNKVIAMEKAEAETTLAEVMPILEAAKLELQKLDKSDVTEIRSFAKPPKQVQTVCECILIMKGYKELNWKTAKGVMSDPNFLRSLMEIDFDSITQSQVKNIKGLLKTLNTTTEEMEAVSKAGLGMLKFVEAVMGYCDVFREIKPKREKVARLERNFYLTKRELERIQNELAAIQKELETLGAKYEAAILEKQKLQEEAEIMERRLIAADKLISGLGSENIRWLNDLDELMHRRVKLLGDCLLCAAFLSYEGAFTWEFRDEMVNRIWQNDILEREIPLSQPFRLESLLTDDVEISRWGSQGLPPDELSVQNGILTTRASRFPLCIDPQQQALNWIKRKEEKNNLRVASFNDPDFLKQLEMSIKYGTPFLFRDVDEYIDPVIDNVLEKNIKVSQGRQFIILGDKEVDYDSNFRLYLNTKLANPRYSPSVFGKAMVINYTVTLKGLEDQLLSVLVAYERRELEEQREHLIQETSENKNLLKDLEDSLLRELATSTGNMLDNVDLVHTLEETKSKATEVSEKLKLAEKTALDIDRLRDGYRPAARRGAILFFVLSEMALVNSMYQYSLIAFLEVFRLSLKKSLPDSILMKRLRNIMDTLTFSIYNHGCTGLFERHKLLFSFNMTIKIEQAEGRVPQEELDFFLKGNISLEKSKRKKPCAWLSDQGWEDIILLSEMFSDNFGQLPDDVENNQTVWQEWYDLDSLEQFPVPLGYDNNITPFQKLLILRCFRVDRVYRAVTDYVTVTMGEKYVQPPMISFEAIFEQSTPHSPIVFILSPGSDPATDLMKLAERSGFGGNRLKFLAMGQGQEKVALQLLETAVARGQWLMLQNCHLLVKWLKDLEKSLERITKPHPDFRLWLTTDPTKGFPIGILQKSLKVVTEPPNGLKLNMRATYFKISHEMLDQCPHPAFKPLVYVLAFFHAVVQERRKFGKIGWNVYYDFNESDFQVCMEILNTYLTKAFQQRDPRIPWGSLKYLIGEVMYGGRAIDSFDRRILTIYMDEYLGDFIFDTFQPFHFFRNKEVDYKIPVGDEKEKFVEAIEALPLANTPEVFGLHPNAEIGYYTQAARDMWAHLLELQPQTGESSSGISRDDYIGQVAKEIENKMPKVFDLDQVRKRLGTGLSPTSVVLLQELERFNKLVVRMTKSLAELQRALAGEVGMSNELDDVARSLFIGHIPNIWRRLAPDTLKSLGNWMVYFLRRFSQYMLWVTESEPSVMWLSGLHIPESYLTALVQATCRKNGWPLDRSTLFTQVTKFQDADEVNERAGQGCFVSGLYLEGADWDIEKGCLIKSKPKVLVVDLPILKIIPIEAHRLKLQNTFRTPVYTTSMRRNAMGVGLVFEADLFTTRHISHWVLQGVCLTLNSD

SEQ ID NO: 58354 - protein, 539 aa, Homo sapiens
MAALFLSAPPQAEVTFEDVAVYLSREEWGRLGPAQRGLYRDVMLETYGNLVSLGVGPAGPKPGVISQLERGDEPWVLDVQGTSGKEHLRVNSPALGTRTEYKELTSQETFGEEDPQGSEPVEACDHISKSEGSLEKLVEQRGPRAVTLTNGESSRESGGNLRLLSRPVPDQRPHKCDICEQSFEQRSYLNNHKRVHRSKKTNTVRNSGEIFSANLVVKEDQKIPTGKKLHYCSYCGKTFRYSANLVKHQRLHTEEKPYKCDECGKAFSQSCEFINHRRMHSGEIPYRCDECGKTFTRRPNLMKHQRIHTGEKPYKCGECGKHFSAYSSLIYHQRIHTGEKPYKCNDCGKAFSDGSILIRHRRTHTGEKPFECKECGKGFTQSSNLIQHQRIHTGEKPYKCNECEKAFIQKTKLVEHQRSHTGEKPYECNDCGKVFSQSTHLIQHQRIHTGEKPYKCSECGKAFHNSSRLIHHQRLHHGEKPYRCSDCKKAFSQSTYLIQHRRIHTGEKPYKCSECGKAFRHSSNMCQHQRIHLREDFSM

SEQ ID NO: 58355 - protein, 1091 aa, Homo sapiens
MRNLKLFRTLEFRDIQGPGNPQCFSLRTEQGTVLIGSEHGLIEVDPVSREVKNEVSLVAEGFLPEDGSGRIVGVQDLLDQESVCVATASGDVILCSLSTQQLECVGSVASGISVMSWSPDQELVLLATGQQTLIMMTKDFEPILEQQIHQDDFGESKFITVGWGRKETQFHGSEGRQAAFQMQMHESALPWDDHRPQVTWRGDGQFFAVSVVCPETGARKVRVWNREFALQSTSEPVAGLGPALAWKPSGSLIASTQDKPNQQDIVFFEKNGLLHGHFTLPFLKDEVKVNDLLWNADSSVLAVWLEDLQREESSIPKTCVQLWTVGNYHWYLKQSLSFSTCGKSKIVSLMWDPVTPYRLHVLCQGWHYLAYDWHWTTDRSVGDNSSDLSNVAVIDGNRVLVTVFRQTVVPPPMCTYQLLFPHPVNQVTFLAHPQKSNDLAVLDASNQISVYKCGDCPSADPTVKLGAVGGSGFKVCLRTPHLEKRYKIQFENNEDQDVNPLKLGLLTWIEEDVFLAVSHSEFSPRSVIHHLTAASSEMDEEHGQLNVSSSAAVDGVIISLCCNSKTKSVVLQLADGQIFKYLWESPSLAIKPWKNSGGFPVRFPYPCTQTELAMIGEEECVLGLTDRCRFFINDIEVASNITSFAVYDEFLLLTTHSHTCQCFCLRDASFKTLQAGLSSNHVSHGEVLRKVERGSRIVTVVPQDTKLVLQMPRGNLEVVHHRALVLAQIRKWLDKLMFKEAFECMRKLRINLNLIYDHNPKVFLGNVETFIKQIDSVNHINLFFTELKEEDVTKTMYPAPVTSSVYLSRDPDGNKIDLVCDAMRAVMESINPHKYCLSILTSHVKKTTPELEIVLQKVHELQGNAPSDPDAVSAEEALKYLLHLVDVNELYDHSLGTYDFDLVLMVAEKSQKDPKEYLPFLNTLKKMETNYQRFTIDKYLKRYEKAIGHLSKCGPEYFPECLNLIKDKNLYNEALKLYSPSSQQYQDISIAYGEHLMQEHMYEPAGLMFARCGAHEKALSAFLTCGNWKQALCVAAQLNFTKDQLVGLGRTLAGKLVEQRKHIDAAMVLEECAQRWGVTSCPRWSETPGLK

SEQ ID NO: 58356 - protein, 147 aa, Homo sapiens
MDNLSDTLKKLKITAVDKTEDSLEGCLDCLLQALAQNKFMRIPCVDAGLISPLVQLLNSKDQEVLLQTGRALGNICYDSHEGRSAVDQAGGAQIVIDHLRSLCSITDPANEKLLTVFCGMLMNYSNENDSLQAQLINMGVIPTLVKL

SEQ ID NO: 58357 - protein, 7 aa, Homo sapiens
  MOD_RES (1)..(1): Any amino acid
XTYQQRT

SEQ ID NO: 58358 - protein, 120 aa, Homo sapiens
LEELGTGLIQQYKPDSTAAPDQRAPVFLVVMFWTMMLNGPLPRALQNSEHPTLQASACDALSSILPEAFSNLPNDRQMLCITVLLGLNDSKNRLVKAATSRALGVYVLFPCLRQTQQMQY

SEQ ID NO: 58359 - protein, 124 aa, Homo sapiens
MGLPEERVRSGSGSRGQEEAGAGGRARSWSPPPEVSRSAHVPSLQRYRELHRRSVEEPREFWGDIAKEFYWKTPCPGPFLRYNFDVTKGKIFIEWMKGATTNICYNVLDRNVHEKKLGDKVAFY

SEQ ID NO: 58360 - protein, 626 aa, Homo sapiens
  MOD_RES (1)..(1): Any amino acid
XTMTVYQIPIHSEQRRGKHQPWQSPERPLSRLSPERSSDSESNENEPHLPHGVSQRRGVRDSSLVVAFICKLHLKRGNFLVLKAKEMGLPVGTAAIAPIIAAVKDGKSITHEGREILAEELCTPPDPGAAFVVVECPDESFIQPICENATFQRYQQWMERFGPDTQHLVLNENCASVHNLRSHKIQTQLNLIHPDIFPLLTSFRCKKEGPTLSVPMVQGECLLKYQLRPRREWQRDAIITCNPEEFIVEALQLPNFQQSVQEYRRSAQDGPAPAEKRSQYPEIIFLGTGSAIPMKIRNVSATLVNISPDTSLLLDCGEGTFGQLCRHYGDQVDRVLGTLAAVFVSHLHADHHTGLPSILLQRERALASLGKPLHPLLVVAPNQLKAWLQQYHNQCQEVLHHISMIPAKCLQEGAEISSPAVERLISSLLRTCDLEEFQTCLVRHCKHAFGCALVHTSGWKVVYSGDTMPCEALVRMGKDATLLIHEATLEDGLEEEAVEKTHSTTSQAISVGMRMNAEFIMLNHFSQRYAKVPLFSPNFSEKVGVAFDHMKVCFGDFPTMPKLIPPLKALFAGDIEEMEERREKRELRQVRAALLSRELAGGLEDGEPQQKRAHTEEPQAKKVRAQ

SEQ ID NO: 58361 - protein, 47 aa, Homo sapiens
MSHAVTIEEPQAQPQVSQTRYRERSRAGSHISSNRAYDFLYEKSSQV

SEQ ID NO: 58362 - protein, 38 aa, Homo sapiens
MKVHMHTKFCLICLLTFIFHHCNHCHEEHDHGPEALHR

SEQ ID NO: 58363 - protein, 141 aa, Homo sapiens
SRSSRRRLHSLGLAAMPEKRPFERLPADVSPINYSLCLKPDLLDFTFEGKLEAAAQVRQATNQIVMNCADIDIITASYAPEGDEEIHATGFNYQNEDEKVTLSFPSTLQTGTGTLKIDFVGELNDKMKGFYRINAWLVAWH

SEQ ID NO: 58364 - protein, 563 aa, Homo sapiens
MTPRRAQRMATDMQRKRSSECLDGTLTPSDGQSMERAESPTPGMAQGMEPGAGQEGAMFVHARSYEDLTESEDGAASGDSHKEGTRGPPPLPTDMRQISQDFSELSTQLTGVARDLQEEMLPGSSEDWLEPPGAVGRPATEPPREGTTEGDEEDATEAWRLHQKHVFVLSEAGKPVYSRYGSEEALSSTMGVMVALVSFLEADKNAIRSIHADGYKVVFVRRSPLVLVAVARTRQSAQELAQELLYIYYQILSLLTGAQLSHIFQQKQNYDLRRLLSGSERITDNLLQLMARDPSFLMGAARCLPLAAAVRDTVSASLQQARARSLVFSILLARNQLVALVRRKDQFLHPIDLHLLFNLISSSSSFREGEAWTPVCLPKFNAAGFFHAHISYLEPDTDLCLLLVSTDREDFFAVSDCRRRFQERLRKRGAHLALREALRTPYYSVAQVGIPDLRHFLYKSKSSGLFTSPEIEAPYTSEEEQERLLGLYQYLHSRAHNASRPLKTIYYTGPNENLLAWVTGAFELYMCYSPLGTKASAVSAIHKLMRWIRKEEDRLFILTPLTY

SEQ ID NO: 58365 - protein, 48 aa, Homo sapiens
  MOD_RES (1)..(1): Any amino acid
XGADLSALVREASICALRQEMARQKSGNEKVETGFHHVSQDGLDLLTS

SEQ ID NO: 58366 - protein, 14 aa, Homo sapiens
MALVLGSLLLLGLC

SEQ ID NO: 58367 - protein, 299 aa, Homo sapiens
MVVSAGPLSSEKAEMNILEINEKLRPQLAEKKQQFRNLKEKCFLTQLAGFLANQQNKYKYEECKDLIKFMLRNERQFKEEKLAEQLKQAEELRQYKVLVHAQERELTQLREKLREGRDASRSLNEHLQALLTPDEPDKSQGQDLQEQLAEGCRLAQHLVQKLSPENDNDDDEDVQIEVAEKVQKSSAPREMQKAEEKEVPEDSLEECAITYSNSHGPYDSNQPHRKTKITFEEDKVDSTLIGSSSHVEREDAVHIIPENESDDEEEEEKGPVSPRTSVGSSEKGGPRGNRSQAQQGAAG

SEQ ID NO: 58368 - protein, 194 aa, Homo sapiens
  MOD_RES (1)..(1): Any amino acid
XGGLHTQCPGWPLPGGAGPDPLRLRGHLPVRTSCPRLYHSCSCAGLRLTAQVCVWPPSEQPLWATVPHLLLEVCWKLPQSKVGTVVTAAVAGVVLVVVKLLNDKLQQQLPMPIPGELLTLIGATGISYGMGLKHRFEAGAPSGPQHPAVLKARGQRLHHRCGWVCHCHLTGEDLRPEARLPGGQQPGAGGPGPQ

SEQ ID NO: 58369 - protein, 62 aa, Homo sapiens
MSVDIPLPTSEMSQKPAKEGPRLSKNQKYSEHFSIHCCPPFTFLNSKKEIVDRKYSICKSGC

SEQ ID NO: 58370 - protein, 163 aa, Homo sapiens
MWLAKREDGAAILNMPSPSFYADFGPLNLAMVYRYCCKLNKKLKSYSLSRKKIVHYTCFDQRKRANAAFLIGAYAVIYLKKTPEEAYRALLSGSNPPYLPFRDASFGNCTYNLTILDCLQGIRKGLQHGFFDFETFDVDEYEHYEVILFTPLKPTFLISKSIM

SEQ ID NO: 58371 - protein, 177 aa, Homo sapiens
MEAAAQFFVESPDVVYGPEAIEAQYEYRTTRVSREGGVLKVHPTSTRFTFRTARQVPRLGVMLVGWGGNNGSTLTAAVLANRLRLSWPTRSGRKLEQIRRDIRDFRSSAGLDKVIVLWTANTERFCEVIPGLNDTAENLLRTIELGLEVSPSTLFAVASILEGCAFLNGSPQNTLVP

SEQ ID NO: 58372 - protein, 184 aa, Homo sapiens
  MOD_RES (1)..(1): Any amino acid
XGMSDPRAGGDATDSSQTALDNKASLLHSMPTHSSPRSRDYNPYNYSDSISPFNKSALKEAMFDDDADQFPDDLSLDHSDLVAELLKELSNHNERVEERKIALYELMKLTQEESFSVWDEHFKTILLLLLETLGDKEPTIRALALKVLREILRHQPARFKNYAELTVMKTLEAHKDPHKEVDTQ

SEQ ID NO: 58373 - protein, 134 aa, Homo sapiens [sequence omitted]

SEQ ID NO: 58374 - protein, 130 aa, Homo sapiens
MNQRSHLGTTYLDTAKGAVETFMKLRARDPASRGDRYMLVTFEEPPYAIKAGWKENHATFMNELKNLQAEGLTTLGQSLRTAFDLLNLNRLVTGIDNYGQGRNPFFLEPAIIITITDGSKLTTTSGVQDE

SEQ ID NO: 58375 - protein, 1271 aa, Homo sapiens
MASGSCQGCEEDEETLKKLIVRLNNVQEGKQIETLVQILEDLLVFTYSERASKLFQGKNIHVPLLIVLDSYMRVASVQQVGWSLLCKLIEVCPGTMQSLMGPQDVGNDWEVLGVHQLILKMLTVHNASVNLSVIGLKTLDLLLTSGKITLLILDEESDIFMLIFDAMHSFPANDEVQKLGCKALHVLFERVSEEQLTEFVENKDYMILLSALTNFKDEEEIVLHVLHCLHSLAIPCNNVEVLMSGNVRCYNIVVEAMKAFPMSERIQEVSCCLLHRLTLGNFFNILVLNEVHEFVVKAVQQYPENAALQISALSCLALLTETIFLNQDLEEKNENQENDDEGEEDKLFWLEACYKALTWHRKNKHVQEAACWALNNLLMYQNSLHEKIGDEDGHFPAHREVMLSMLMHSSSKEVFQASANALSTLLEQNVNFRKILLSKGIHLNVLELMQKHIHSPEVAESGCKMLNHLFEGSNTSLDIMAAVVPKILTVMKRHETSLPVQLEALRAILHFIVPGMPEESREDTEFHHKLNMVKKQCFKNDIHKLVLAALNRFIGNPGIQKCGLKVISSIVHFPDALEMLSLEGAMDSVLHTLQMYPDDQEIQCLGLSLIGYLITKKNVFIGTGHLLAKILVSSLYRFKDVAEIQTKGFQTILAILKLSASFSKLLVHHSFDLVIFHQMSSNIMEQKDQQFLNLCCKCFAKVAMDDYLKNVMLERACDQNNSIMVECLLLLGADANQAKEGSSLICQVCEKESSPKLVELLLNSGSREQDVRKALTISIGKGDSQIISLLLRRLALDVANNSICLGGFCIGKVEPSWLGPLFPDKTSNLRKQTNIASTLARMVIRYQMKSAVEEGTASGSDGNFSEDVLSKFDEWTFIPDSSMDSVFAQSDDLDSEGSEGSFLVKKKSNSISVGEFYRDAVLQRCSPNLQRHSNSLGPIFDHEDLLKRKRKILSSDDSLRSSKLQSHMRHSDSISSLASEREYITSLDLSANELRDIDALSQKCCISVHLEHLEKLELHQNALTSFPQQLCETLKSLTHLDLHSNKFTSFPSYLLKMSCIANLDVSRNDIGPSVVLDPTVKCPTLKQFNLSYNQLSFVPENLTDVVEKLEQLILEGNKISGICSPLRLKELKILNLSKNHISSLSENFLEACPKVESFSARMNFLAAMPFLPPSMTILKLSQNKFSCIPEAILNLPHLRSLDMSSNDIQYLPGPAHWKSLNLRELLFSHNQISILDLSEKAYLWSRVEKLHLSHNKLKEVRRLLPLKKYTL

SEQ ID NO: 58376 - protein, 133 aa, Homo sapiens
MGSKKLKRVGLSQELCDRLSRHQILTCQDFLCLSPLELMKVTGLSYRGVHELLCMVSRACAPKMQTAYGIKAQRSADFSPAFLSTTLSALDEALHGGVACGSLTEITGPPGCGKTQFCIMMSILATLPTNMGG

SEQ ID NO: 58377 - protein, 215 aa, Homo sapiens
MIYTMKKVHALWASVCLLLNLAPAPLNADSEEDEEHTIITDTELPPLKLMHSFCAFKADDGPCKAIMKRFFFNIFTRQCEEFIYGGCEGNQNRFESLEECKKMCTREKPDFCFLEEDPGICRGYITRYFYNNQTKQCERFKYGGCLGNMNNFETLEECKNICEDGPNGFQVDNYGTQLNAVNNSLTPQSTKVPSLFEFHGPSWCLTPADRGLCRA

SEQ ID NO: 58378 - protein, 174 aa, Homo sapiens
MDQVRSLSTEAWRGPPCCSRAGACVRRASRGQRQGCGGTCLCSESTGCCCPVLGDERDRVQKKTFTKWVNKHLIKAQRHISDLYEDLRDGHNLISLLEVLSGDSLPREKGRMRFHKLQNVQIALDYLRHRQVKLVNIRNDDIADGNPKLTLGLIWTIILHFQISDIQVSGQSED

SEQ ID NO: 58379 - protein, 268 aa, Homo sapiens
MDPRGILKAFPKRQKIHADASSKVLAKIPRREEGEEAEEWLSSLRAHVVRTGIGRARAELFEKQIVQHGGQLCPAQGPGVTHIVVDEGMDYERALRLLRLPQLPPGAQLVKSAWLSLCLQERRLVDVAGFSIFIPSRYLDHPQPSKAEQDASIPPGTHEALLQTALSPPPPPTRPVSPPQKAKEAPNTQAQPISDDEASDGEETQVSAADLEALISGHYPTSLEGDCEPSPAPAVLDKWVCAQPSSQKATNHNLHITEKLEVLAKAYS

SEQ ID NO: 58380 - protein, 152 aa, Homo sapiens
MGKQNSKLRPEVMQDLLESTDFTEHEIQEWYKGFLRDCPSGHLSMEEFKKIYGNFFPYGDASKFAEHVFRTFDANGDGTIDFREFIIALSVTSRGKLEQKLKWAFSMYDLDGNGYISKAEMLEIVQERKKMAQLFFHRFTLVELICVSLEIK

SEQ ID NO: 58381 - protein, 218 aa, Homo sapiens
MGCCTGRCSLICLCALQLVSALERQIFDFLGFQWAPILGNFLHIIVVILGLFGTIQYRPRYIMVYTVWTALWVTWNVFIICFYLEVGGLSKDTDLMTFNISVHRSWWREHGPGCVRRVLPPSAHGMMDDYTYVSVTGCIVDFQYLEVIHSAVQILLSLVGFVYACYVISISMEEEDTFDFIGGLDTHSYYQDHVELKPVKPVEISNDIEPEMRLLNLT

SEQ ID NO: 58382 - protein, 343 aa, Homo sapiens
QERNPQQNMNIRQHVRPEEDFPGRTPDRNYSDMLNLMRLEEQLSPRSRVFASCAKEDGCHERDDDTTSVNSDRSEEVFDMTKGNLTLLEKAIALETERAKAMREKMAMEAGRRDNMRSYEDQSPRQLPGEDRKPKSSDSHVKKPYYGKDPSRTEKKESKCPTPGCDGTGHVTGLYPHHRSLSGCPHKDRVPPEILAMHESVLKCPTPGCTGRGHVNSNRNSHRSLSGCPIAAAEKLAKAQEKHQSCDVSKSSQASDRVLRPMCFVKQLEIPQYGYRNNVPTTTPRSNLAKELEKYSKTSFEYNSYDNHTYGKRAIAPKRSGTARTPAPAAAAPAATRPAAAAT

SEQ ID NO: 58383 - protein, 242 aa, Homo sapiens
MVPWVRTMGQKLKQRLRLDVGREICRQYPLFCFLLLCLSAASLLLNRYIHILMIFWSFVAGVVTFYCSLGPDSLLPNIFFTIKYKPKLGLQELFPQGHSCAVCGKVKCKRHRPSLLLENYQPWLDLKISSKVDASLSEVLELVLENFVYPWYRDVTDDESFVDELRITLRFFASVLIRRIHKSFALSPRLEYSGMISAHCNLRLPGSSDSPASASRVAGTTGICHHARLIFCIFSRDRVSPC

SEQ ID NO: 58384 - protein, 95 aa, Homo sapiens
  MOD_RES (1)..(1): Any amino acid
XSGFIGILIMMSMCREVHVYEYIPSVRQTELCHYHELYYDAACTLGAYHPLLYEKLLVQRLNMGTQGDLHRKGKVVLPGFQAVHCPAPSPVIPHS

SEQ ID NO: 58385 - protein, 115 aa, Homo sapiens
MQFGELLAAVRKAQANVMLFLEEKEQAALSQANGIKAHLEYRSAEMEKSKQELERMAAISNTVQFLEEYCKFKNTEDITFPSVYVGLKDKLSGIRKVITESTVHLIQLLENYKKK

SEQ ID NO: 58386 - protein, 61 aa, Homo sapiens
MLRWLIGGGREPQGLAEKSPLQTIGEEQTQNPYTELLVLKAHHDIVRFLVQLDDYRQGKNF

SEQ ID NO: 58387 - protein, 61 aa, Homo sapiens
MMATQTLSIDSYQDGQQMQVVTELKTEQDPNCSEPDAEGVSPPPVESQTPMDVDKQAIYRW

SEQ ID NO: 58388 - protein, 151 aa, Homo sapiens
MLWPEEEPWGGRCACVTEACPADAGPLTSRRGSLKRSFEVEEVETPNSTPPRRVQTPLLRATVASSTQKFQDLGVKNSEPSARHVDSLSQRSPKASLRRVELSGPKAAEPVSRRTELSIDISSKQVENAGAIGPSRFGLKRAEVLGHKTPE

SEQ ID NO: 58389 - protein, 143 aa, Homo sapiens
MAPGAEPDMEQTIHSPQHLPEELRTVTEKIYYLKLHPDHPETVFHFWIRLVQILQKGLSITTKDPRILVTHCLVPKNCSSPSGDSKLVQKKLQASQPSESLIQLMTKGESEALSQIFADLHQQNQLRNQLDQQFRGRTNSLSF

SEQ ID NO: 58390 - protein, 46 aa, Homo sapiens
MDREERKTINQGQEDEMEIYGYNLSRWKLAIVSLGVICSGGFLLLL

SEQ ID NO: 58391 - protein, 15 aa, Homo sapiens
MRRRVHQINGHKFMA

SEQ ID NO: 58392 - protein, 413 aa, Homo sapiens
  MOD_RES (1)..(1): Any amino acid
XRKTTASTRKVSLAPQANLTELDIYSRRLSQETGLEISEEINEEDLKECFFDDMESIPAVTTWNTYLRYITVHKSLIFVLIWCLVIFLAEVAASLVVLWLLGNTPLQDKGNSTHSRNNSYAVIITSTSSYYVFYIYVGVADTLLAMGFFRGLPLVHTLITVSKILHHKMLHSVLQAPMSTLNTLKAGGILNRFSKDIAILDDLLPLTIFDFIQLLLIVIGAIAVVAVLQPYIFVATVPVIVAFIMLRAYFLQTSQQLKQLESEGRSPIFTHLVTSLKGLWTLRAFGRQPYFETLFHKALNLHTANWFLYLSTLRWFQMRIEMIFVIFFIAVTFISILTTGEGEGRVGIILTLAMNIMSTLQWAVNSSIDVDSLMRSVSRVFKFIDMPTEGGPLGKNWIREEYFVISFFETTEH

SEQ ID NO: 58393 - protein, 170 aa, Homo sapiens
MSFIFDWIYSGFSSVLQFLGLYKKTGKLVFLGLDNAGKTTLLHMLKDDRLGQHVPTLHPTSEELTIAGMTFTTFDLGGHVQARRVWKNYLPAINGIVFLVDCADHERLLESKEELDSLMTDETIANVPILILGNKIDRPEAISEERLREMFGLYGQTTGKGSISLKELNA

SEQ ID NO: 58394 - protein, 150 aa, Homo sapiens
MERLVIRMPFSHLSTYSLVWVMAAVVLCTAQVQVVTQDEREQLYTPASLKCSLQNAQEALIVTWQKKKAVSPENMVTFSENHGVVIQPAYKDKINITQLGLQNSTITFWNITLEDEGCYMCLFNTFGFGKISGTACLTVYAHSIPSLQIL

SEQ ID NO: 58395 - protein, 80 aa, Homo sapiens
MSSLGGGSQDAGGSSSSSTNGSGGSGSSGPKAGAADKSAVVAAAAPASVADDTPPPERRNKSGIISEPLNKSLRRSRPLS

SEQ ID NO: 58396 - protein, 153 aa, Homo sapiens
MSEIQGTVEFSVELHKFYNVDLFQRGYYQIRVTLKVSSRIPHRLSASIAGQTESSSLHSACVHDSTVHSRVFQILYRNEEVPINDAVVFRVHLLLGGERMEDALSEVDFQLKVDLHFTDSEQQLRDVAGAPMVSSRTLGLHFHPRNGLHHQVP

SEQ ID NO: 58397 - protein, 170 aa, Homo sapiens
MPAAHATSSAPTVTLVQLPNGQTVQVHGVIQAAQPSVIQSPQVQTVQISTIAESEDSQESVDSVTDSQKRREILSRRPSYRKILNDLSSDAPGVPRIEEEKSEEETSAPAITTVTVPTPIYQTSSGQYTASGDVQTYQIRTAPTSTIAPGVVMASSPALPTQPAEEAARK

SEQ ID NO: 58398 - protein, 134 aa, Homo sapiens
MDVSLAYRDDAFAEWTEMAHERVPRKLKCTFTSPKTPEHEGRYYECDVLPFMEIGSVAHKFYLLNIRLPVNEKKKINVGIGEIKDIRLVGIHQNGGFTKVWFAMKTFLTPSIFIIMVWYWRRITMMSRPPVLLE

SEQ ID NO: 58399 - protein, 298 aa, Homo sapiens
  MOD_RES (1)..(1): Any amino acid
XFSSPSPSAAAAAQEVRSATDGNTSTTPPTSAKKRKLNSSSSSSSNSSNEREDFDSTSSSSSTPPLQPRDSASPSTSSFCLGVSVAASSHVPIQKKLRFEDTLEFVGFDAKMAEESSSSSSSSSPTAATSQQQQLKNKSILISSVASVHHANGLAKSSTTVSSFANSKPGSAKKLVIKNFKDKPKLPENYTDETWQKLKEAVEAIQNSTSIKYNLEELYQLCYLPIGKASRHADIIHVPLDCSQKDYFEMFKFKQEDKGGCRKSLFLQDFCKLVQTAETDLRRSHQSTDSSIQRGFIG

SEQ ID NO: 58400 - protein, 175 aa, Homo sapiens
  MOD_RES (1)..(1): Any amino acid
XLTARSFKANRDAVLSRIPEHKSDRLISLQSASVVYDLLTIALGRRGQYEMLSECLERAMKFAFEEFHLWYQFALSLMAAGKSARAVKVLKECIRLKPDDATIPLLAAKLCMGSLHWLEEAEKFAKTVVDVGEKTSEFKAKGYLALGLTYSLQATDASLRGMQEVLQRKALLAFQ

SEQ ID NO: 58401 - protein, 274 aa, Homo sapiens
MPALRPALLWALLALWLCWAAPAHALQCRDGYEPCVNKGMCVTYHSGTGYCKCPEGFLGEYCQHRDPCEKNRCQNGGTCVAQAMLGKATCRCASGFTGEDCQYSTPHPCFVSRPCLNGGTCHMLSRDTYECTCQVGFTGKECQWTDACLSHLCANGSTCTTVANQFSCKCLTGFTGQKCETDVNECDIPGHCQHGGTCLNLPGSYQCQCLQGFTGQYCDRLYVPCAHSPCVNGGTCRQTGDFTFECNCLPETVRNKRNRALGKRQASLEWKRTR

SEQ ID NO: 58402 - protein, 32 aa, Homo sapiens
MDFFSSHLLADSSSPATNSSHTDAHEILVSDF

SEQ ID NO: 58403 - protein, 114 aa, Homo sapiens
MAGLSDLELRRELQALGFQPGPITDTTRDVYRNKLRRLRGEARLRDEERLREEARPRGEERLREEARLREDAPLRARPAAASPRAEPWLSQPASGSAYATPGAYGDIRPSAASW

SEQ ID NO: 58404 - protein, 142 aa, Homo sapiens
MTLRCLEPSGNGGEGTRSQWGTAGSAEEPSPQAARLAKALRELGQTGWYWGSMTVNEAKEKLKEAPEGTFLIRDSSHSDYLLTISVKTSAGPTNLRIEYQDGKFRLDSIICVKSKLKQFDSVVHLIDYYVQMCKDKRTGPEA

SEQ ID NO: 58405 - protein, 60 aa, Homo sapiens
MLSTLSQCEFSMGKTLLVYDMNLREMENYEKIYKEIECSIAGAHEKIAECKKQILQAKRI

SEQ ID NO: 58406 - protein, 94 aa, Homo sapiens
MLRGVLGKTFRLVGYTIQYGCIAHCAFEYVGGVVMVPMGHVWLEGDNLQNSTDSRCYGPIPYGLIRGRIFFKIWPLSDFGFLRASPNGHRFSDD

SEQ ID NO: 58407 - protein, 84 aa, Homo sapiens
MSGGGEQLDILSVGILVKERWKVGKTMFVDLLAVGGMIDSTMWSCSCRVGIWQIFAVASPEAHSPLVPLSGWVDRFWSLLKAFI

SEQ ID NO: 58408 - protein, 949 aa, Homo sapiens
MRAVRRGLREGGAMAAARDPPEVSLREATQRKLRRFSELRGKLVARGEFWDIVAITAADEKQELAYNQQLSEKLKRKELPLGVQYHVFVDPAGAKIGNGGSTLCALQCLEKLYGDKWNSFTILLIHSDEWKKKVSESYVITIERLEDDLQIKEKELTELRNIFGSDEAFSKVNLNYRTENGLSLLHLCCICGGKKSHIRTLMLKGLRPSRLTRNGFTALHLAVYKDNAELITSLLHSGADIQQVGYGGLTALHIATIAGHLEAADVLLQHGANVNIQDAVFFTPLHIAAYYGHEQVTRLLLKFGADVNVSGEVGDRPLHLASAKGFLNIAKLLMEEGSKADVNAQDNEDHVPLHFCSRFGHHDIVKYLLQSDLEVQPHVVNIYGDTPLHLACYNGKFEVAKEIIQISGTESLTKENIFSETAFHSACTYGKSIDLVKFLLDQNVININHQGRDGHTGLHSACYHGHIRLVQFLLDNGADMNLVACDPSRSSGEKDEQTCLMWAYEKGHDAIVTLLKHYKRPQDELPCNEYSQPGGDGSYVSVPSPLGKIKSMTKEKADILLLRAGLPSHFHLQLSEIEFHEIIGSGSFGKVYKGRCRNKIVAIKRYRANTYCSKSDVDMFCREVSILCQLNHPCVIQFVGACLNDPSQFAIVTQYISGGSLFSLLHEQKRILDLQSKLIIAVDVAKGMEYLHNLTQPIIHRDLNSHNILLYEDGHAVVADFGESRFLQSLDEDNMTKQPGNLRWMAPEVFTQCTRYTIKADVFSYALCLWEILTGEIPFAHLKPAAAAADMAYHHIRPPIGYSIPKPISSLLIRGWNACPEGRPEFSEVVMKLEECLCNIELMSPASSNSSGSLSPSSSSDCLVNRGGPGRSHVAALRSRFELEYALNARSYAALSQSAGQYSSQGLSLEEMKRSLQYTPIDKYGYVSDPMSSMHFHSCRNSSSFEDSS

SEQ ID NO: 58409 - protein, 65 aa, Homo sapiens
MSGQRVDVKVVMLGKEYVGKTSLVERYVHDRFLVGPYQNTIGAAFVAKVMSVGDRTVTLGIWDTA

SEQ ID NO: 58410 - protein, 45 aa, Homo sapiens
MAEMNPAQMESCCVVTQAGVQWHDLGSLQPAPPGFKQFCLNLPSS

SEQ ID NO: 58411 - protein, 41 aa, Homo sapiens
  MOD_RES (1)..(1): Any amino acid
XTIPPCLGHLRLELPPSSSPRKGSQRLQTRPTLSLRASRPL

SEQ ID NO: 58412 - protein, 104 aa, Homo sapiens
MEEDLFQLRQLPVVKFRRTGESARSEDDTASGEHEVQIEGVHVGLEAVELDDGAAVPKEFANPTDGGLCRHDVQLHALGKYLRPVRQENRAEDQRAVDSVLWHP

SEQ ID NO: 58413 - protein, 494 aa, Homo sapiens
MAALTIATGTGNWFSALALGVTLLKCLLIPTYHSTDFEVHRNWLAITHSLPISQWYYEATSEWTLDYPPFFAWFEYILSHVAKYFDQEMLNVHNLNYSSSRTLLFQRFSVIFMDVLFVYAVRECCKCIDGKKVGKELTEKPKFILSVLLLWNFGLLIVDHIHFQYNGFLFGLMLLSIARLFQKRHMEGAFLFAVLLHFKHIYLYVAPAYGVYLLRSYCFTANKPDGSIRWKSFSFVRVISLGLVVFLVSALSLGPFLALNQLPQVFSRLFPFKRGLCHAYWAPNFWALYNALDKVLSVIGLKLKFLDPNNIPKASMTSGLVQQFQHTVLPSVTPLATLICTLIAILPSIFCLWFKPQGPRGFLRCLTLCALSSFMFGWHVHEKAILLAILPMSLLSVGKAGDASIFLILTTTGHYSLFPLLFTAPELPIKILLMLLFTIYSISSLKTLFRKEKPLFNWMETFYLLGLGPLEVCCEFVFPFTSWKRYGWFSTTNS

SEQ ID NO: 58414 - protein, 38 aa, Homo sapiens
MRPCQVPGAATGPRAMWLCPLALTLILMAASGAACEVK

SEQ ID NO: 58415 - protein, 45 aa, Homo sapiens
ALEQFATVVEAKLIKHKKGIVTAGRRGHRPLCHGGGSLEGLKIPE

SEQ ID NO: 58416 - protein, 81 aa, Homo sapiens
MKIAVIGQSLFGQEVYCHLRKEGHEVVGVFTVPDKDGKADPLGPSFTEIRKGGFPSSGRMMVWTPETCCCRRSVRCSRTTP

SEQ ID NO: 58417 - protein, 250 aa, Homo sapiens
MVFLALTIVALYILSLKDQDRRVPNLPPSNITSSQEPALLPTASSSAPNTSLVTTPASLQVPEITFCEILPCQETYCCPIRGMKEVSSSPVQRQSEEKEFHQRRWSEDKSKSVLARNALSGPDWESDWIDTTISSIQIMEIQQIIDHQYCIQSLQCGTTEPLIVFQCKFTLGNICFHSKRGTKGLESHREISQEMTQGYQHIWSLPVAPFSDSMFHFRVAAPDLADCSTDPYFAGIFFTDYFFYFYRRCA

SEQ ID NO: 58418 - protein, 270 aa, Homo sapiens
MASSTQISNTSVFKLEENPKPALILEEKNEANHLGGQRDSNKQGGSYTQGNPGTFRLQGQPGYFNKLEKPRHFKQGRAGVLNQPGILKNSGKSNQKGNPESSNKQENSGSSSQLGRPGISTQQGNPGSSDQQEKPGSFSQKVMVGSSSQQGKPGSSSQHGNLGSSTQKGNLGSSSLQGHLGLSSHQGKPESSGQQGKPGSSSQQGNLGTSGQQEKPGSSSQQGKPGLSSHQGKPGSSSQQGNLHLSSQQGNQGPSSKQRKPGSSSRQGNL

SEQ ID NO: 58419 - protein, 207 aa, Homo sapiens
PKCTACQESIVKDKVFKDNCCKREILALQIYCRNESRGCAEQLMLGHLLVHLKNDCHFEELPCVRPDCKEKVLRKDLRDHVEKACKYREATCSHCKSQVPMIALQKHEDTDCPCVVVSCPHKCSVQTLLRSELSAHLSECVNAPSTCSFKRYGCVFQGTNQQIKAHEASSAVQHVNLLKEWSNSLEKKGYENKESENSVPSLTDGNE

SEQ ID NO: 58420 - protein, 153 aa, Homo sapiens
MEAPDYEVLSVREQLFHERIRECIISTLLFATLYILCHIFLTRFKKPAEFTTGSSCAPLPWQLPWVLSCSCPSPSSAMRCCSPCLGTTTSSGSTAPSSMVCGSWKLLGASGTLFFSSPTCPSSSSCPLHISSLSLRALLAPERVSWAGSMRQW

SEQ ID NO: 58421 - protein, 659 aa, Homo sapiens
MAEAVAAPISPWTMAATIQAMERKIESQAARLLSLEGRTGMAEKKLADCEKTAVEFGNQLEGKWAVLGTLLQEYGLLQRRLENVENLLRNRNFWILRLPPGSKGESPKVPVTFDDVAVYFSEQEWGKLEDWQKELYKHVMRGNYETLVSLDYAISKPEVLSQIEQGKEPCNWRRPGPKIPDVPVDPSPGSGPPVPAPDLLMQIKQEGELQLQEQQALGVEAWAAGQPDIGEEPWGLSQLDSGAGDISTDATSGVHSNFSTTIPPTSWQTDLPPHHPSSACSDGTLKLNTAASTEDVKIVIKTEVQEEEVVATPVHPTDLEAHGTLFGPGQATRFFPSPAQEGAWESQGSSFPSQDPVLGLREPARPERDMGELSPAVAQEETPPGDWLFGGVRWGWNFRCKPPVGLNPRTGPEGLPYSSPDNGEAILDPSQAPRPFNEPCKYPGRTKGFGHKPGLKKHPAAPPGGRPFTCATCGKSFQLQVSLSAHQRSCGAPDGSGPGTGGGGSGSGGGGGGSGGGSARDGSALRCGECGRCFTRPAHLIRHRMLHTGERPFPCTECEKRFTERSKLIDHYRTHTGVRPFTCTVCGKSFIRKDHLRKHQRNHAAGAKTPARGQPLPTPPAPPDPFKSPASKGPLASTDLVTDWTCGLSVLGPTDGGDM

SEQ ID NO: 58422 - protein, 705 aa, Homo sapiens
MLLPVFTLKLRHKISPRMVAIGRYDGTHPCLAAATQTGKVFIHNPHTRNQHVSASRVFQSPLESDVSLLSINQAVSCLTAGVLNPELGYDALLVGTQTNLLAYDVYNNSDLFYREVADGANAIVLGTLGDISSPLAIIGGNCALQGFNHEGSDLFWTVTGDNVNSLALCDFDGDGKKELLVGSEDFDIRVFKEDEIVAEMTETEIVTSLCPMYGSRFGYALSNGTVGVYDKTSRYWRIKSKNHAMSIHAFDLNSDGVNELITGWSNGKVDARSDRTGEVIFKDNFSSAIAGVVEGDYRMDGHIQLICCSVDGEIRGYLPGTAEMRGNLMDTSAEQDLIRELSQKKQNLLLELRNYEENAKAELASPLNEADGHRGIIPANTRLHTTLSVSLGNETQTAHTELRISTSNGESHVVHPSIHNLSSSICIPIVPPKDVPVDLHLKAFVGYRSSTQFHVFESTRQLPRFSMYALTSLDPASEPISYVNFTIAERAQRVVVWLGQNFLLPEDTHIQNAPFQVCFTSLRNGGHLHIKIKLSGEITINTDDIDLAGDIIQSMASFFAIEDLQVEADFPVYFEELRKVLVKVDEYHSVHQKLSADMADHSNLIRSLLVGAEDARLMRDMKTMKSRYMELYDLNRDLLNGYKIRCNNHTELLGNLKAVNQAIQRAGRLRVGKPKNQVITACRDAIRSNNINTLFKIMRVGTASS

SEQ ID NO: 58423 - protein, 88 aa, Homo sapiens
  MOD_RES (1)..(1): Any amino acid
XVVIHEKKVSSFEVFLKEVTGGVQAPFGAVRNIYTPRTGHRIRKLDQIQSGGNYVAGGQEAFKKLNYLDIGEIKKRPMEVVNTELHVL

SEQ ID NO: 58424 - protein, 304 aa, Homo sapiens
MISVIVVMTIFLVVLYKYRCYKFIHGWLIMSSLMLLFLFTYIYLGEVLKTYNVAMDYPTLLLTVWNFGAVGMVCIHWKGPLVLQQAYLIMISALMALVFIKYLPEWSAWVILGAISVYDLVAVLCPKGPLRMLVETAQERNEPIFPALIYSSAMVWTVGMAKLDPSSQGALQLPYDPEMEEDSYDSFGEPSYPEVFEPPLTGYPGEELEEEEERGVKLGLGDFIFYSVLVGKAAATGSGDWNTTLACFVAILIGLCLTLLLLAVFKKALPALPISITFGLIFYFSTDNLVRPFMDTLASHQLYI

SEQ ID NO: 58425 - protein, 527 aa, Homo sapiens
MAALTIATGTGNWFSALALGVTLLKCLLIPTYSHSTDFEVHRNWLAITHSLPISQWYYEATSEWTLDYPPFFAWFEYILSHVAKYFDQEMLNVHNLNYSSSRTLLFQRFSVIFMDVLFVYAVRECCKCIDGKKVGKELTEKPKFILSVLLLWNFGLLIVDHIHFQYNGFLFGLMLLSIARLFQKRHMEGAFLFAVLLHFKHIYLYVAPAYGVYLLRSYCFTANKPDGSIRWKSFSFVRVISLGLVVFLVSALSLGPFLALNQLPQVFSRLFPFKRGLCHAYWAPNFWALYNALDKVLSVIGLKLKFLDPNNIPKASMTSGLVQQFQHTVLPSVTPLATLICTLIAILPSIFCLWFKPQGPRGFLRCLTLCALSSFMFGWHVHEKAILLAILPMSLLSVGKAGDASIFLILTTTGHYSLFPLLFTAPELPIKILLMLLFTIYSISSLKTLFRKEKPLFNWMETFYLLGLGPLEVCCEFVFPFTSWKVKYPFIPLLLTSVYCAVGITYAWFKLYVSVLIDSAIGKTKKQ

SEQ ID NO: 58426 - protein, 101 aa, Homo sapiens
MGTFCSVIKFENLQELKRLCHWGPIIALGVIAICSTMAMIDSVLWYWPLHTTGGSVNFIMLINWTVMILYNYFNAMFVGPGFVPLGWKPHHWVVSMLLSFL

SEQ ID NO: 58427 - protein, 37 aa, Homo sapiens
MGRAMVARLGLGLLLLALLLPTQKMLRIPNLIDLKNM

SEQ ID NO: 58428 - protein, 189 aa, Homo sapiens
MQQVLDNLGSLPSATGAAELDLIFLRGIMESPIAHERLEETKLEAVRDNNLELVQEILRDLAQLAEQSSTAAELAHILQEPHFQSLLETHDSVASKTYETPPPSPGLDPTFSNQPVPPDAVRMVGIRKTAGEHLGVTFRVEGGELVIARILHGGMVAQQGLLHVGDIIKEVNGQPVGSDPRALQELLRN

SEQ ID NO: 58429 - protein, 103 aa, Homo sapiens
MPTSSSFKHRIKEQEDYIRDWTAHREEIARISQDLALIAREINDVAGEIDSVTSSGTAPSTTLVDRVFDESLNFRKIPPLVHSKTPEGNNGRSGDPRPQAAEP

SEQ ID NO: 58430 - protein, 42 aa, Homo sapiens
  MOD_RES (1)..(1): Any amino acid
XVATRERDVRRHYEAEHEYYERHKFGPIKNDEEKRLHSRIRR

SEQ ID NO: 58431 - protein, 18 aa, Homo sapiens
  MOD_RES (1)..(1): Any amino acid
XALGKNKKVRKDKKRNEH

SEQ ID NO: 58432 - protein, 464 aa, Homo sapiens
MFENESRKIFSEMPEGESAQHSDGESDFERDAGIQRLQGHSPGEDHGEVVSQDREVGQLIGLQGTYLGEKPYECPQCGKTFSRKSHLITHERTHTGEKYYKCDECGKSFSDGSNFSRHQTTHTGEKPYKCRDCGKSFSRSANLITHQRIHTGEKPFQCAECGKSFSRSPNLIAHQRTHTGEKPYSCPECGKSFGNRSSLNTHQGIHTGEKPYECKECGESFSYNSNLIRHQRIHTGEKPYKCTDCGQRFSQSSALITHRRTHTGEKPYQCSECGKSFSRSSNLATHRRTHMVEKPYKCGVCGKSFSQSSSLIAHQGMHTGEKPYECLTCGESFSWSSNLLKHQRIHTGEKPYKCSECGKCFSQRSQLVVHQRTHTGEKPYKCLMCGKSFSRGSILVMHQRAHLGDKPYRCPECGKGFSWNSVLIIHQRIHTGEKPYKCPECGKGFSNSSNFITHQRTHMKEKLY

SEQ ID NO: 58433 - protein, 95 aa, Homo sapiens
MATLDRKVPSPEAFLGKPWSSWIDAAKLHCSDNMHLFGHYPAHDDFYLVVCSACNQVVKPQVFQSHCGRKQDNRRNEGISRSGPESSQAIEKHQV

SEQ ID NO: 58434 - protein, 220 aa, Homo sapiens
MLSNNKKLSENTQNTSLCSGTVVHGRRFHHAHAQIPVVKTAAQSLDRKERKEYPPHVQKVEINPVRLSRLQGVERIMKKTEESESQVEPEIKRKVQQKRHCSTYQPTPPLSPASKKCLTHLEDLQRNCRQAITLNESTGPLLRTSIHQNSGGQKSQNTGLTTKKFYGNNVEKVPIDIIVNCDDSKHTYLQTNGKVILPGAKIPKITNLKERKTSLSDLND

SEQ ID NO: 58435 - protein, 1930 aa, Homo sapiens
MRITLRNLEEVEFCVEDKPGTHFTPVPPTPPDACRGMLCGFGAVCEPNAEGPGRASCVCKKSPCPSVVAPVCGSDASTYSNECELQRAQCSQQRRIRLLSRGPCGSRDPCSNVTCSFGSTCARSADGLTASCLCPATCRGAPEGTVCGSDGADYPGECQLLRRACARQENVFKKFDGPCDPCQGALPDPSRSCRVNPRTRRPEMLLRPESCPARQAPVCGDDGVTYENDCVMGRSGAARGLLLQKVRSGQCQGRDQCPEPCRFNAVCLSRRGRPRCSCDRVTCDGAYRPVCAQDGRTYDSDCWRQQAECRQQRAIPSKHQGPCDQAPSPCLGVQCAFGATCAVKNGQAACECLQACSSLYDPVCGSDGVTYGSACELEATACTLGREIQVARKGPCDRCGQCRFGALCEAETGRCVCPSECVALAQPVCGSDGHTYPSECMLHVHACTHQISLHVASAGPCETCGDAVCAFGAVCSAGQCVCPRCEHPPPGPVCGSDGVTYGSACELREAACLQQTQIEEARAGPCEQAECGSGGSGSGEDGDCEQELCRQRGGIWDEDSEDGPCVCDFSCQSVPGSPVCGSDGVTYSTECELKKARCESQRGLYVAAQGACRGPTFAPLPPVAPLHCAQTPYGCCQDNITAARGVGLAGCPSACQCNPHGSYGGTCDPATGQCSCRPGVGGLRCDRCEPGFWNFRGIVTDGRSGCTPCSCDPQGAVRDDCEQMTGLCSCKPGVAGPKCGQCPDGRALGPAGCEADASAPATCAEMRCEFGARCVEESGSAHCVCPMLTCPEANATKVCGSDGVTYGNECQLKTIACRQGLQISIQSLGPCQEAVAPSTHPTSASVTVTTPGLLLSQALPAPPGALPLAPSSTAHSQTTPPPSSRPRTTASVPRTTVWPVLTVPPTAPSPAPSLVASAFGESGSTDGSSDEELSGDQEASGGGSGGLEPLEGSSVATPGPPVERASCYNSALGCCSDGKTPSLDAEGSNCPATKVFQGVLELEGVEGQELFYTPEMADPKSELFGETARSIESTLDDLFRNSDVKKDFRSVRLRDLGPGKSVRAIVDVHFDPTTAFRAPDVARALLRQIQVSRRRSLGVRRPLQEHVRFMDFDWFPAFITGATSGAIAAGATARATTASRLPSSAVTPRAPHPSHTSQPVAKTTAAPTTRRPPTTAPSRVPGRRPPAPQQPPKPCDSQPCFHGGTCQDWALGGGFTCSCPAGRGGAVCEKVLGAPVPAFEGRSFLAFPTLRAYHTLRLALEFRALEPQGLLLYNGNARGKDFLALALLDGRVQLRFDTGSGPAVLTSAVPVEPGQWHRLELSRHWRRGTLSVDGETPVLGESPSGTDGLNLDTDLFVGGVPEDQAAVALERTFVGAGLRGCIRLLDVNNQRLELGIGPGAATRGSGVGECGDHPCLPNPCHGGAPCQNLEAGRFHCQCPPGRVGPTCADEKSPCQPNPCHGAAPCRVLPEGGAQCECPLGREGTFCQTASGQDGSGPFLADFNGFSHLELRGLHTFARDLGEKMALEVVFLARGPSGLLLYNGQKTDGKGDFVSLALRDRRLEFRYDLGKGAAVIRSREPVTLGAWTRVSLERNGRKGALRVGDGPRVLGESPKSRKVPHTVLNLKEPLYVGGAPDFSKLARAAAVSSGFDGAIQLVSLGGRQLLTPEHVLRQVDVTSFAGHPCTRASGHPCLNGASCVPREAAYVCLCPGGFSGPHCEKGLVEKSAGDVDTLAFDGRTFVEYLNAVTESELANEIPVPETLDSGALHSEKALQSNHFELSLRTEATQGLVLWSGKATERADYVALAIVDGHLQLSYNLGSQPVVLRSTVPVNTNRWLRVVAHREQREGSLQVGNEAPVTGSSPLGATQLDTDGALWLGGLPELPVGPALPKAYGTGFVGCLRDVVVGRHPLHLLEDAVTKPELRPCPTP

SEQ ID NO: 58436 - protein, 62 aa, Homo sapiens
MSCVPWKGDKAKSESLELPQAAPPQIYHEKQRRELCALHALNNVFQDSNAFTRDTLQEIFQR

SEQ ID NO: 58437 - protein, 69 aa, Homo sapiens
MWDLVLSIALSVGCTGAVPLIQSRIVGGWECEKHSQPWQVAVYSHGWAHCGGVLVHPQWVLTAAHCLKK

SEQ ID NO: 58438 - protein, 208 aa, Homo sapiens
MYQVPLPLDRDGTLVRLRFTMVALVTVCCPLVAFLFCILWSLLFHFKETTATHCGVPNYLPSVSSAIGGEVPQRYVWRFCIGLHSAPRFLVAFAYWNHYLSCTSPCSCYRPLCRLNFGLNVVENLALLVLTYVSSSEDFTIHENAFIVFIASSLGHMLLTCILWRLTKKHTVSQEVRSIPSGGSKAAQKKIKDICPQDSGNGEVGTEF

SEQ ID NO: 58439 - protein, 106 aa, Homo sapiens
MDRSKENCISGPVKATAPVGGPKRVLVTQQFPCQNPLPVNSGQAQRVLCPSNSSQRIPLQAQKLVSSHKPVQNQKQKQLQATSVPHPVSRPLNNTQKSKQPLPSAP

SEQ ID NO: 58440 - protein, 2081 aa, Homo sapiens
MGCTTSVILFKGIRTVFERNCAYMCKQQGENNALEYTAYNWTKEDSELLISSWLAKPKLIEPLDYENVIVQKKTQILNDCLREMLLFPYDDFQTAILRRQGRYICSTVPAKAEEEAQSLFVTECIKTYNSDWHLVNYKYEDYSGEFRQLPNKVVKLDKLPVHVYEVDEEVDKDEDAASLGSQKGGITKHGWLYKGNMNSAISVTMRSFKRRFFHLIQLGDGSYNLNFYKDEKISKEPKGSIFLDSCMGVVQNNKVRRFAFELKMQDKSSYLLAADSEVEMEEWITILNKILQLNFEAAMQEKRNGDSHEDDEQSKLEGSGSGLDSYLPELAKSAREAEIKLKSESRVKLFYLDPDAQKLDFSSAEPEVKSFEEKFGKRILVKCNDLSFNLQCCVAENEEGPTTNVEPFFVTLSLFDIKYNRKISADFHVDLNHFSVRQMLATTSPALMNGSGQSPSVLKGILHEAAMQYPKQGIFSVTCPHPDIFLVARIEKVLQGSITHCAEPYMKSSDSSKVAQKVLKNAKQACQRLGQYRMPFAWAARTLFKDASGNLDKNARFSAIYRQDSNKLSNDDMLKLLADFRKPEKMAKLPVILGNLDITIDNVSSDFPNYVNSSYIPTKQFETCSKTPITFEVEEFVPCIPKHTQPYTIYTNHLYVYPKYLKYDSQKSFAKARNIAICIEFKDSDEEDSQPLKCIYGRPGGPVFTRSAFAAVLHHHQNPEFYDEIKIELPTQLHEKHHLLLTFFHVSCDNSSKGSTKKRDVVETQVGYSWLPLLKDGRVVTSEQHIPVSANLPSGYLGYQELGMGRHYGPEIKWVDGGKPLLKISTHLVSTVYTQDQHLHNFFQYCQKTESGAQALGNELVKYLKSLHAMEGHVMIAFLPTILNQLFRVLTRATQEEVAVNVTRVIIHVVAQCHEEGLESHLRSYVKYAYKAEPYVASEYKTVHEELTKSMTTILKPSADFLTSNKLLKYSWFFFDVLIKSMAQHLIENSKVKLLRNQRFPASYHHAVETVVNMLMPHITQKFRDNPEASKNANHSLAVFIKRCFTFMDRGFVFKQINNYISCFAPGDPKTLFEYKFEFLRVVCNHEHYIPLNLPMPFGKGRIQRYQDLQLDYSLTDEFCRNHFLVGLLLREVGTALQEFREVRLIAISVLKNLLIKHSFDDRYASRSHQARIATLYLPLFGLLIENVQRINVRDVSPFPVNAGMTVKDESLALPAVNPLVTPQKGSTLDNSLHKDLLGAISGIASPYTTSTPNINSVRNADSRGSLISTDSGNSLPERNSEKSNSLDKHQQSSTLGNSVVRCDKLDQSEIKSLLMCFLYILKSMSDDALFTYWNKASTSELMDFFTISEVCLHQFQYMGKRYIARTGMMHARLQQLGSLDNSLTFNHSYGHSDADVLHQSLLEANIATEVCLTALDTLSLFTLAFKNQLLADHGHNPLMKKVFDVYLCFLQKHQSETALKNVFTALRSLIYKFPSTFYEGRADMCAALCYEILKCCNSKLSSIRTEASQLLYFLMRNNFDYTGKKSFVRTHLQVIISVSQLIADVVGIGGTRFQQSLSIINNCANSDRLIKHTSFSSDVKDLTKRIRTVLMATAQMKEHENDPEMLVDLQYSLAKSYASTPELRKTWLDSMARIHVKNGDLSEAAMCYVHVTALVAEYLTRKGVFRQGCTAFRVITPNIDEEASMMEDVGMQDVHFNEDVLMELLEQCADGLWKAERYELIADIYKLIIPIYEKRRDFERLAHLYDTLHRAYSKVTEVMHSGRRLLGTYFRVAFFGQGFFEDEDGKEYIYKEPKLTPLSEISQRLLKLYSDKFGSENVKMIQDSGKVNPKDLDSKYAYIQVTHVIPFFDEKELQERKTEFERSHNIRRFMFEMPFTQTGKRQGGVEEQCKRRTILTAIHCFPYVKKRIPVMYQHHTDLNPIEVAIDEMSKKVAELRQLCSSAEVDMIKLQLKLQGSVSVQVNAGPLAYARAFLDDTNTKRYPDNKVKLLKEVFRQFVEACGQALAVNERLIKEDQLEYQEEMKANYREMAKELSEIMHEQICPLEEKTSVLPNSLHIFNAISGTPTSTMVHGMTSSSSVV

SEQ ID NO: 58441 - protein, 46 aa, Homo sapiens
MSSAEIIGSTNLIILLEDEVFADFFNTFLSLPLCFAGFWSDTILYC

SEQ ID NO: 58442 - protein, 608 aa, Homo sapiens
MASLSRALRVAAAHPRQSPTRGMGPCNLSSAAGPTAEKSVPYQRTLKEGQGTSVVAQGPSRPLPSTANVVVIGGGSLGCQTLYHLAKLGMSGAVLLERERLTSGTTWHTAGLLWQLRPSDVEVELLAHTRRVVSRELEEETGLHTGWIQNGGLFIASNRQRLDEYKRLMSLGKAYGVESHVLSPAETKTLYPLMNVDDLYGTLYVPHDGTMDPAGTCTTLARAASARGAQVIENCPVTGIRVWTDDFGVRRVAGVETQHGSIQTPCVVNCAGVWASAVGRMAGVKVPLVAMHHAYVVTERIEGIQNMPNVRDHDASVYLRLQGDALSVGGYEANPIFWEEVSDKFAFGLFDLDWEVFTQHIEGAINRVPVLEKTGIKSTVCGPESFTPDHKPLMGEAPELRGFFLGCGFNSAGMMLGGGCGQELAHWIIHGRPEKDMHGYDIRRFHHSLTDHPRWIRERSHESYAKNYSVVFPHDEPLAGRNMRRDPLHEELLGQGCVFQERHGWERPGWFHPRGPAPVLEYDYYGAYGSRAHEDYAYRRLLADEYTFAFPPHHDTIKKECLACRGAAAVFDMSYFGKFYLVGLDARKAADWLFSADVSRPPGSTVYT

SEQ ID NO: 58443 - protein, 44 aa, Homo sapiens
MAELQMLLEEEIPGGRRALFDSYTNLERVADYCENNYIQISREP

SEQ ID NO: 58444 - protein, 178 aa, Homo sapiens
MSRQSSVSFRSGGSRGFGGPGFPVCPPGGIQEVTVNQSLLTPLNLQIDPSIQRVRTEEREQIKTLNNKFASFIDKVRFLEQQNKVLDTKWTLLQEQGTKTVRQNLEPLFEQYINNLRRQLDSIVGERGRLDSELRNMQDLVEDFKNKYEDEINKRTTAENEFVMLKKDVDAAYMNKVE

SEQ ID NO: 58445 - protein, 1135 aa, Homo sapiens
  MOD_RES (1)..(1): Any amino acid
XESLKCASMKMAQLQLENKELESEKEQLKKGLELLKASFKKTERLEVSYQGLDIENQRLQKTLENSNKKIQQLESELQDLEMENQTLQKNLEELKISSKRLEQLEKENKSLEQETSQLEKDKKQLEKENKRLRQQAEIKDTTLEENNVKIGNLEKENKTLSKEIGIYKESCVRLKELEKENKELVKRATIDIKTLVTLREDLVSEKLKTQQMNNDLEKLTHELEKIGLNKERLLHDEQSTDDSRYKLLESKLESTLKKSLEIKEEKIAALEARLEESTNYNQQLRQELKTVKKNYEALKQRQDEERMVQSSPPISGEDNKWERESQETTRELLKVKDRLIEVERNNATLQAEKQALKTQLKQLETQNNNLQAQILALQRQTVSLQEQNTTLQTQNAKLQVENSTLNSQSTSLMNQNAQLLIQQSSLENENESVIKEREDLKSLYDSLIKDHEKLELLHERQASEYESLISKHGTLKSAHKNLEVEHRDLEDRYNQLLKQKGQLEDLEKMLKVEQEKMLLENKNHETVAAEYKKLCGENDRLNHTYSQLLKETEVLQTDHKNLKSLLNNSKLEQTRLEAEFSKLKEQYQQLDITSTKLNNQCELLSQLKGNLEEENRHLLDQIQTLMLQNRTLLEQNMESKDLFHVEQRQYIDKLNELRRQKEKLEEKIMDQYKFYDPSPPRRRGNWITLKMRKLIKSKKDINRERQKSLTLTPTRSDSSEGFLQLPHQDSQDSSSVGSNSLEDGQTLGTKKSSMVALKRLPFLRNRPKDKDKMKACYRRSMSMNDLVQSMVLAGQWTGSTENLEVPDDISTGKRRKELGAMAFSTTAINFSTVNSSAGFRSKQLVNNKDTTSFEDISPQGVSDDSSTGSRVHAGAVNNQSRPQSHSSGEFSLLHDHEAWSSSGSSPIQYLKRQTRSSPVLQHKISETLESRHHKIKTGSPGSEVVTLQQFLEESNKLTSVQIKSSSQENLLDEVMKSLSVSSDFLGKDKPVSCGLARSVSGKTPGDFYDRRTTKPEFLRPGPRKTEDTYFISSAGKPTPGTQGKIKLVKESSLSRQSKDSNPYATLPRASSVISTAEGTTRRTSIHDFLTKDSRLPISVDSPPAAADSNTTAASNVDKVQESRNSKSRSREQQSS

SEQ ID NO: 58446 - protein, 247 aa, Homo sapiens
MADKQISLPAKLINGGIAGLIGVTCVFPIDLAKTRLQNQQNGQRVYTSMSDCLIKTVRSEGYFGMYRGAAVNLTLVTPEKAIKLAANDFFRHQLSKDGQKLTLLKEMLAGCGAGTCQVIVTTPMEMLKIQLQDAGRIAAQRKILAAQGQLSAQGGAQPSVEAPAAPRPTATQLTRDLLRSRGIAGLYKGLGATLLRDVPFSVVYFPLFANLNQLGRPASEEKSPFYVSFLAGCVAGSAAAVAVNPCD

SEQ ID NO: 58447 - protein, 1145 aa, Homo sapiens
MPTAESEAKVKTKVRFEELLKTHSDLMREKKKLKKKLVRSEENISPDTIRSNLHYMKETTSDDPDTIRSNLPHIKETTSDDVSAANTNNLKKSTRVTKNKLRNTQLATENPNGDASVEEDKQGKPNKKVIKTVPQLTTQDLKPETPENKVDSTHQKTHTKPQPGVDHQKSEKANEGREETDLEEDEELMQAYQCHVTEEMAKEIKRKIRKKLKEQLTYFPSDTLFHDDKLSSEKRKKKKEVPVFSKAETSTLTISGDTVEGEQKKESSVRSVSSDSHQDDEISSMEQSTEDSMQDDTKPKPKKTKKKTKAVADNNEDVDGDGVHEITSRDSPVYPKCLLDDDLVLGVYIHRTDRLKSDFMISHPMVKIHVVDEHTGQYVKKDDSGRPVSSYYEKENVDYILPIMTQPYDFKQLKSRLPEWEEQIVFNENFPYLLRGSDESPKVILFFEILDFLSVDEIKNNSEVQNQECGFRKIAWAFLKLLGANGNANINSKLRLQLYYPPTKPRSPLSVVEAFEWWSKCPRNHYPSTLYVTVRGLKVPDCACRIPNKHLFSLNAGERGCFCLDFSHNGRILAAACASRDGYPIILYEIPSGRFMRELCGHLNIIYDLSWSKDDHYILTSSSDGTARIWKNEINNTNTFRVLPHPSFVYTAKFHPAVRELVVTGCYDSMIRIWKVEMREDSAILVRQFDVHKSFINSLCFDTEGHHMYSGDCTGVIVVWNTYVKINDLEHSVHHWTINKEIKETEFKGIPISYLEIHPNGKRLLIHTKDSTLRIMDLRILVARKFVGAANYREKIHSTLTPCGTFLFAGSEDGIVYVWNPETGEQVAMYSDLPFKSPIRDISYHPFENMVAFCAFGQNEPILLYIYDFHVAQQEAEMFKRYNGTFPLPGIHQSQDALCTCPKLPHQGSFQIDEFVHTESSSTKMQLVKQRLETVTEVIRSCAAKVNKNLSFTSPPAVSSQQSKLKQSNMLTAQEILHQFGFTQTGIISIERKPCNHQVDTAPTVVALYDYTANRSDELTIHRGDIIRVFFKDNEDWWYGSIGKGQEGYFPANHVASETLYQELPPEIKERSPPLSPEEKTKIEKSPAPQKQSINKNKSQDFRLGSESMTHSEMRKEQSHEDQGHIMDTRMRKNKQAGRKVTLIE

SEQ ID NO: 58448 - protein, 72 aa, Homo sapiens
MLCQLQRRMHTLWQEHFKLVVLFSQMRLANFQTDSQESIQKILAVQEESSNLMQHILGFFQTLTDGTCENDG

SEQ ID NO: 58449 - protein, 92 aa, Homo sapiens
MRLFLSLPVLVVVLSIVLEGPAPAQGTPDVSSALDKLKEFGNTLEDKARELISRIKQSELSAKMRLEPFPGHGRAGGVVFRDISESEGETQD

SEQ ID NO: 58450 - protein, 88 aa, Homo sapiens
MAMLPPPGPQSFVHFTKQSLALIEQRIAERKSKEPKEEKKDDDEEAPKPSSDLEAGKQLPFIYGDIPPGMVSEPLEDLDPYYADKKLL

SEQ ID NO: 58451 - protein, 197 aa, Homo sapiens
LMIAKITSDEPLTKDDIPVFLRHAELIASTFVDQCKTVLKLASEEPPDDEEALATIRLLDVLCEMTVNTELLGYLQVFPGLLERVIDLLRVIHVAGKETTNIFSNCGCVRAEGDISNVANGFKSHLIRLIGNLCYKNKDNQDKVNELDGIPLILDNCNISDSNPYVCTHHPDGNTEHAHLPRRLLECPVSLTANPQM

SEQ ID NO: 58452 - protein, 47 aa, Homo sapiens
MGCTLSAEDKAAVERSKMIDRNLREDGEKAAREVKLLLLETFYVLYF

SEQ ID NO: 58453 - protein, 528 aa, Homo sapiens
MSAAPAYSEDKGGSAGPGEPEYGHDPASGGIFSSDYKRHDDLKEMLDTNKDSLKLEAMKRIVAMIARGKNASDLFPAVVKNVACKNIEDPNQLIRASALRVLSSIRVPIIVPIMMLAIKEAASDMSPYVRKTAAHAIPKLYSLDSDQKDQLIEVIEKLLADKTTLVAGSVVMAFEEVCPERIDLIHKNYRKLCNLLIDVEEWGQVVIISMLTRYARTQFLSPTQNESLLEENAEKAFYGSEEDEAKGAGSEETAAAAAPSRKPYVMDPDHRLLLRNTKPLLQSRSAAVVMAVAQLYFHLAPKAEVGVIAKALVRLLRSHSEVQYVVLQNVATMSIKRRGMFEPYLKSFYIRSTDPTQIKILKLEVLTNLANETNIPTVLREFQTYIRSMDKDFVAATIQAIGRCATNIGRVRDTCLNGLVQLLSNRDELVVAESVVVIKKLLQMQPAQHGEIIKHLAKLTDNIQVPMARASILWLIGEYCEHVPRIAPDVLRKMAKSFTAEEDIVKLQVINLAAKLYLTNSKQVKIKR

SEQ ID NO: 58454 - protein, 10 aa, Homo sapiens
MNVTSLFSFT

SEQ ID NO: 58455 - protein, 273 aa, Homo sapiens
AAVMQAAANSAQSRQGSFPGMNQSGLMASSSPYSQPMNNSSSLMNTQAPPYSMAPAMVNSSAASVGLADMMSPGESKLPLPLKADGKEEGTPQPESKSKKSSSSTTTGEKITKVYELGNEPERKLWVDRYLTFMEERGSPVSSLPAVGKKPLDLFRLYVCVKEIGGLAQVNKNKKWRELATNLNVGTSSSAASSLKKQYIQYLFAFECKIERGEEPPPEVFSTGDTKKQPKLQPPSPGKWRRCSHWPRKAQAPGLGGSGKVVSQSGQQGTWDF

SEQ ID NO: 58456 - protein, 117 aa, Homo sapiens
MVMEKPSPLLVGREFVRQYYTLLNQAPDMLHRFYGKNSSYVHGGLDSNGKPADAVYGQKEIHRKVMSQNFTNCHTKIRHVDAHATLNDGVVVQVMGLLSNNNQALRRFMQTFVLAPE

SEQ ID NO: 58457 - protein, 773 aa, Homo sapiens
MSVKEGAQRKWAALKEKLGPQDSDPTEANLESADPELCIRLLQMPSVVNYSGLRKRLEGSDGGWMVQFLEQSGLDLLLEALARLSGRGVARISDALLQLTCVSCVRAVMNSRQGIEYILSNQGYVRQLSQALDTSNVMVKKQVFELLAALCIYSPEGHVLTLDALDHYKTVCSQQYRFSIVMNELSGSDNVPYVVTLLSVINAVILGPEDLRARTQLRNEFIGLQLLDVLARLRDLEDADLLIQLEAFEEAKAEDEEELLRVSGGVDMSSHQEVFASLFHKVSCSPVSAQLLSVLQGLLHLEPTLRSSQLLWEALESLVNRAVLLASDAQECTLEEVVERLLSVKGRPRPSPLVKAHKSVQANLDQSQRGSSPQNTTTPKPSVEGQQPAAAAACEPVDHAQSESILKVSQPRALEQQASTPPPPPPPPLLPGSSAEPPPPPPPPPLPSVGAKALPTAPPPPPLPGLGAMAPPAPPLPPPLPGSCEFLPPPPPPLPGLGCPPPPPPLLPGMGWGPPPPPPPLLPCTCSPPVAGGMEEVIVAQVDHGLGSAWVPSHRRVNPPTLRMKKLNWQKLPSNVAREHNSMWASLSSPDAEAVEPDFSSIERLFSFPAAKPKEPTMVAPRARKEPKEITFLDAKKSLNLNIFLKQFKCSNEEVAAMIRAGDTTKFDVEVLKQLLKLLPEKHEIENLRAFTEERAKLASADHFYLLLLAIPCYQLRIECMLLCEGAAAVLDMVRPKAQLVLAACESLLTSRQLPIFCQLILRIGNFLNYPHR

SEQ ID NO: 58458 - protein, 125 aa, Homo sapiens [sequence omitted]

SEQ ID NO: 58459 - protein, 103 aa, Homo sapiens
MSYVFVNDSSQTNVPLLQACIDGDFNYSKRLLESGFDPNIRDSRGRTGLHLAAARGNVDICQLLHKFGADLLATDYQGNTALHLCGHVDTIQFLVSNGLKIDI

SEQ ID NO: 58460 - protein, 42 aa, Homo sapiens
MLLLHRAVVLRLQQACRLKSIPSRICIQACSTNDSFQPQRPS

SEQ ID NO: 58461 - protein, 110 aa, Homo sapiens
MHRLPLLGEKQEAKENGTNLTFIGDKTAMHEPLQTWQDAPYIFIVHIGISSSKESSKENSLSNLFTMTVEVKGPYEYLTLEDYPLMIFFMVMCIVYVLFGVLWLAWSACY

SEQ ID NO: 58462 - protein, 80 aa, Homo sapiens
MVIMGQCYYNETIGFFYNNSGKELSSHWRPKDVVVVALGLTVSVLVLLTNLLVIAAIASNRRFHQPIYYLLGNLAAADLF

SEQ ID NO: 58463 - protein, 182 aa, Homo sapiens
MSGMEATVTIPIWQNKPHGAARSVVRRIGTNLPLKPCARASFETLPNISDLCLRDVPPVPTLADIAWIAADEEETYARVRSDTRPLRHTWKPSPLIVMQRNASVPNLRGSEERLLALKKPALPALSRTTELQDELSHLRSQIAKIVAADAALNVANQNTKLPAVRLKRMTASLCPRPAALQT

SEQ ID NO: 58464 - protein, 219 aa, Homo sapiens
MKVLWAALLVTFLAGCQAKVEQAVETEPEPELRQQTEWQSGQRWELALGRFWDYLRWVQTLSEQVQEELLSSQVTQELRALMDETMKELKAYKSELEEQLTPVAEETRARLSKELQAAQARLGADMEDVCGRLVQYRGEVQAMLGQSTEELRVRLASHLRKLRKRLLRDADDLQKRLAVYQAGAREGAERGLSAIRERLGPLVEQGRVRAATVGSLAGQ

SEQ ID NO: 58465 - protein, 98 aa, Homo sapiens
MSGGKSAQGPEEGGVCITEALITKRNLTFPEDGELSEKMFHTLDELQTVRLDREGITTIRNLEGLQNLHSLYLQGLQPISCFEEEETMKIPVHHSDPT

SEQ ID NO: 58466 - protein, 274 aa, Homo sapiens
MSGAGVAAGTRPPSSPTPGSRRRRQRPSVGVQSLRPQSPQLRQSDPQKRNLDLEKSLQFLQQQHSEMLAKLHEEIEHLKRENKDLRYKLIMNQTSQKKDGPSGNHLSRASAPLGARWVCINGVWVEPGGPSPARLKEGSSRTHRPGGKHGRLAGGSADTVRSPADSLSTSSFQSVKSISNSGKARPQPGSFNKQDSKADVPQKADLEEEPLLHNSKLDKVPGVQGQASCSTSSPSWKGARGPRQSRRKLAFPGTKKPRISPRSPPRASPRNACF

SEQ ID NO: 58467 - protein, 62 aa, Homo sapiens
MWTARGPFRRDRWSSEDEEAAGPSQALSPLLSVFHSPVEGHCVASRFWQLWIKVLQIFTNFV

SEQ ID NO: 58468 - protein, 124 aa, Homo sapiens
MEKSRMNLPKGPDTLCFDKDEFMKEDFDVDHFVSDCRKRVQLEELRDDLELYYKLLKTAMVELINKDYADFVNLSTNLVGMDKALNQLSVPLGQLREEVLIMSAVSWDSPCLSHWRQGLHPDEQ

SEQ ID NO: 58469 - protein, 120 aa, Homo sapiens
MKLKKQVTVCGAAIFCVAVFSLYLMLDRVQHDPTRHQNGGNFPRSQISVLQNRIEQLEQLLEENHEIISHIKDSVLELTANAEGPPAMLPYYTVNGSWVVPPEPRPSFFSISPQDCQFAL

SEQ ID NO: 58470 - protein, 88 aa, Homo sapiens
MVKKFKDSKSVLLITCKTCNRTVKHHGKSRSFVSTLKSNPATPTSKLSLKTPERRTANPNHDMSGSKGKSPASVFRTPTSGQSVSTCS

SEQ ID NO: 58471 - protein, 314 aa, Homo sapiens
MDVQQRAWRSNRSRQKGLRSICMHTKKRVSSFRGNKIGLKDVITLRRHVETKVRAKIRKRKVTTKINRHDKINGKRKTARKQKMFQRAQELRRRAEDYHKCKIPPSARKPLCNWVRMAAAEHRHSSGLPYWLYLTAETLKNRMGRQPPPPTQQHSITDNSLSLKTPPECLLTPLPPSVDDNIKECPLAPLPPSPLPPSVDDNLKECLFVPLPPSPLPPSVDDNLKECLFVPLPPSPLPPSVDDNLKTPPLATQEAEVEKPPKPKRWRVDEVEQSPKPKRQREAEAQQLPKPKRRRLSKLRTRHCTQAWAIRINP

SEQ ID NO: 58472 - protein, 95 aa, Homo sapiens [sequence omitted]

SEQ ID NO: 58473 - protein, 85 aa, Homo sapiens
MQTCPLAFPGHVSQALGTLLFLAASLSAQNEGWDSPICTEGVVSVSWGENTVMSCNISNAFSHVNIKLRAHGQESAIFNEVAPGY

SEQ ID NO: 58474 - protein, 942 aa, Homo sapiens
MVVSAGPWSSEKAEMNILEINETLRPQLAEKKQQFRNLKEKCFLTQLAGFLANQQKKYKYEECKDLIKFMLRNERQFKEEKLAEQLKQAEELRQYKVLVHSQERELTQLREKLREGRDASRSLYEHLQALLTPYEPDKSQGQDLQEQLAEGCRLAQHLVQKLSPENDEDEDEDVQVEEAEKVLESSAPREVQKAEESKVPEDSLEECAITCSNSHGPCDSNQPHKNIKITFEEDEVNSTLVVDRESSHDECQDALNILPVPGPTSSATNVSMVVSAGPLSSEKAEMNILEINEKLRPQLAEKKQQFRNLKEKCFLTQLSGFLANQQKKYKYEECKDLIKFMLRNERQFKEEKLAEQLKQAEELRQYKVLVHAQERELTQLREKLREGRDASRSLNEHLQALLTPDEPDKSQGQDLQEQLAEGCRLAQHLVQKLSPENDNDDDEDVQVEVAEKVQKSSAPREMQKAEEKEVPEDSLEECAITYSNSHGSYDSNQPHRKTKITFEEDKVDSTLIGSSSHVEWEDAVHIIPENESDDEEEEEKGPVSPRNLQESEEEEVPQESWDEGYSTLSIPPEMLASYQSYSSTFHSLEEQQVCMAVDIGRHRWDQVKKEDQEATGPRLSRELLDEKGPEVLQDSLDRCYSTPSGCLELTDSCQPYRSAFYVLEQQRVGLAVDMDEIEKYQEVEEDQDPSCPRLSRELLDEKEPEVLQDSLDRCYSTPSGYLELPDLGQPYSSAVYSLEEQYLGLALDVDRIKKDQEEEEDQGPPCPRLSRELLEVVEPEVLQDSLDRCYSTPSSCLEQPDSCQPYGSSFYALEEKHVGFSLDVGEIEKKGKGKKRRGRRSKKERRRGRKEGEEDQNPPCPRLNGVLMEVEEREVLQDSLDRCYSTPSMYFELPDSFQHYRSVFYSFEEQHISFALYVDNRFFTLTVTSLHLVFQMGVIFPQ

SEQ ID NO: 58475 - protein, 60 aa, Homo sapiens
  MOD_RES (1)..(1): Any amino acid
XSLPLLLLLLGAWAIPGGLGDRAPLTATAPQLDDEEMYSAHMPAHLRCDACRAVAYQAHP

SEQ ID NO: 58476 - protein, 105 aa, Homo sapiens
MEPEREGTERHPRKVRESRQAPNKLVGAAEAMKAGWDLEESQPEAKKARLSTILFTDNCEVTHDQLCELLKYAVLGKSNVPKPSWCQLFHQNHLNNVVVFVLQGM

SEQ ID NO: 58477 - protein, 49 aa, Homo sapiens
MADPDVLTEVPAALKRLAKYVIRGFYGIEHALALDILIRNSCVKEEDML

SEQ ID NO: 58478 - protein, 116 aa, Homo sapiens [sequence omitted]

SEQ ID NO: 58479 - protein, 132 aa, Homo sapiens
MSTVHEILCKLSLEGDHSTPPSAYGSVKAYTNFDAERDALNIETAIKTKGVDEVTIVNILTNRSNAQRQDIAFAYQRRTKKELASALKSALSGHLETVILGLLKTPAQYDASELKASMKVNAWAGNRRGLSH

SEQ ID NO: 58480 - protein, 141 aa, Homo sapiens
IIGGYAEFLYQIGLLDEKQKKYFQKQCHECIEHIRKQNWFEAFEVLIYNGQLDIIVAAALTERSLMGMDWKGSQEYKKAEKKVWKIFKSDSEVAGYIRQAGDFHQVIIRGGGHILPYDQPLRAFDMINRFIYGKGWDPYVG

SEQ ID NO: 58481 - protein, 68 aa, Homo sapiens
  MOD_RES (1)..(1): Any amino acid
XHVITALRVKKKNNEYLLPESVDLECVKYCVVYDNNSSTLEILLKDDDDDSDSDGDGKGTGCISAIPH

SEQ ID NO: 58482 - protein, 800 aa, Homo sapiens
MLPVYQEVKPNPLQDANLCSRVFFWWLNPLFKIGHKRRLEEDDMYSVLPEDRSQHLGEELQGFWDKEVLRAENDAQKPSLTRAIIKCYWKSYLVLGIFTLIEESAKVIQPIFLGKIINYFENYDPMDSVALNTAYAYATVLTFCTLILAILHHLYFYHVQCAGMRLRVAMCHMIYRKALRLSNMAMGKTTTGQIVNLLSNDVNKFDQVTVFLHFLWAGPLQAIAVTALLWMEIGISCLAGMAVLIILLPLQSCFGKLFSSLRSKTATFTDARIRTMNEVITGIRIIKMYAWEKSFSNLITNLRKKEISKILRSSCLRGMNLASFFSASKIIVFVTFTTYVLLGSVITASRVFVAVTLYGAVRLTVTLFFPSAIERVSEAIVSIRRIQTFLLLDEISQRNRQLPSDGKKMVHVQDFTAFWDKASETPTLQGLSFTVRPGELLAVVGPVGAGKSSLLSAVLGELAPSHGLVSVHGRIAYVSQQPWVFSGTLRSNILFGKKYEKERYEKVIKACALKKDLQLLEDGDLTVIGDRGTTLSGGQKARVNLARAVYQDADIYLLDDPLSAVDAEVSRHLFELCICQILHEKITILVTHQLQYLKAASQILILKDGKMVQKGTYTEFLKSGIDFGSLLKKDNEESEQPPVPGTPTLRNRTFSESSVWSQQSSRPSLKDGALESQDTENVPVTLSEENRSEGKVGFQAYKNYFRAGAHWIVFIFLILLNTAAQVAYVLQDWWLSYWANKQSMLNVTVNGGGNVTEKLDLNWYLGIYSATWAFSTRKRFNCSYRSFWHSKISIGILRPC

SEQ ID NO: 58483 - protein, 56 aa, Homo sapiens
MVAAKKTKKSLESINSRLQLVMKSGKYVLGYKQTLKMIRQGKAKLVILANNCPALR

SEQ ID NO: 58484 - protein, 211 aa, Homo sapiens
MLGAQGRAVHQCDRGWAPVFLDREQSISLMSVGFLLEKPDEAVVWRGPKKNALIKQFVSDVAWGELDYLVVDTPPGTSDEHMATIEALRPYQPLGALVVTTPQAVSVGDVRRELTFCRKTGLRVMGIVENMSGFTCPHCTECTSVFSRGGGEELAQLAGVPFLGSVPLDPALMRTLEEGHDFIQEFPGSPAFAALTSIAQKILDATPACLP

SEQ ID NO: 58485 - protein, 1828 aa, Homo sapiens
  MOD_RES (1)..(1): Any amino acid
XRLAVVEVQCERLRMLYRDCARPPPPPLQADRRQPKEITWSPSRVFPPVRACMFSSHLTSVTFLADPSAGGGLPRGTFIYATSPLPVQAPSFYWEIEIVSYGDTDDDTGPIVSFGFTTEAEKRDGAWTNPVGTCLFHNNGRAVHYNGSSLLQWKSVRLDVTLSPGDVAGIGWERTEGTPPPPGQPAKGRVYFTYCGQRLSPYLEDVSGGMWPVVHIQKKNTKTRANFGSRPFAYAEGQAHRNAADLCTDLAEEISANFEALPFAMASDSDNDAGTSIASDPGTHGPPCRIAAVATAQQQYDSDTSCHYKVELSYENFITSGPDPHPPPIADDESDDDDDDDIPQEDHYALLVKAWETKVFPTIRRRFRNEAERKSGLDQIKGALQLGMVDIARQTVEFLYEENGGIPRDLYLPTIEDIKDEANKFTIDKVRKGLTVVTRSPDSNNVASSAVGTALPKFAIRGMLKTFGLHGVVLDVDSVNELVQVETYLRSEGVLVRYWYPIDMLERPPAGYRRTATNGLVTLDNTNLQIHRELLRCEAALARLYCRMALLNIFAPKLPHLFTRLFHIPAIRDITLEHLQLLSNQLLAPPLPDGTISSSSILLAQSLQHCIHSQNCSATDLFYQGNSQTVREWLNVAITRTLHQGEESLLELTKQICSFLQTAPEQFPSEEFPISESKVNMDVNFPGAAFVVVSCKESQSGFRKDSSLYKAPWARVLVYGLGHKVKRNGQLNLIEAACYPRDASPANTGLAPPPTADQYPSVVLSTDRVHIKLGVSPPPGAVLVLHSLPLEFPLAMAFAEQLLSWKSEDSEGKSEDEPDTIPTSVLLQVVELLGNFLWTTDMAACVKELVFHLLAELLRTVHTLEQRRHPAGLSSSIALQLNPCLAMLMALQSELHKLYDEETQNWVSGGACGGSGGAAAGDQGRFSTYFHALMEGCLAVAEVTLPTNMSVTASGVTSATAPNLSDSSSSSSSSPGQTPQSPSLLSKRKKVKMKREKASSSGKRQSSRTVDSDPTVLSIGGSKPEDMLWFHRALTLLIILRHLTRKDPQGLGVTSDAIADACQALVGPTAHSRLLVISGIPTHLDEGVVRGAIRKACNAHGGVFKDEIYIPLQEEDTKKPKDKAEGGDGKVEPEKTLAFPGTDSMEVSTSSSLTPAMSISASASTSQASICSSQGISQTVSDLSVDPLPAGLELPIPPGLLEPHAVSSQESLDISLCSTGSLGSLGSLGEPLDNAETASVSDMGSMYTVTSLDNQPLAARPIKGFAVVEIRSRAKIEKIRASLFNNNDLIGLSSLDGEDELMEMSTEEILTVSVVNQSLFDTQGSPGLEDYFNDKSIKGEKLVPGAREVLTEIFKSCAHSEQTLSLTPAKPIRVSDIYLSKEQINSQTPGNLLHLFFTNVRPPKKVLEDQLTQILRKYGVPKPKFDKSKYSKAGKEQHPVKVVSTKRPITKPPAKDKAVLNSVSRTALSEKKPTVKPKSPEKSKPDEKDPEKSPTKKQEVPEEKYLTLEGFHKFVIDRARQDIRSVWRAILSCGYDLHFERCACIDVRHAQKASRKWTLEMDVALVQYINQLCRHLAITPARLHPHEVYLDPADAADPRVACLLMIGLPVLPVSQASQPPGRDLSLTAPAPSDVPIESLRLRFALLQSLNTTLETFFLPLVELRQTPMYTHSIAALLKEAKGLIFYDTKVTVMNRVLNATVQRTADHAAPEITLDPLEIVGGEIRASENSYFCQAARQLASVPSSQLCVKLASGGDPTYAFNIRFTGEEVHGTTANLPRVPALAHPTHRETGTLQSQVTSQGHAASWGSRVQAPGLPGVSSQDAPASP

SEQ ID NO: 58486 - protein, 99 aa, Homo sapiens
MDVAIEFSVEEWQCLDTAQQNLYRNVMLENYRNLVFLGIAVSKPDLITCLEQGKEPWNMERHEMVAKPPGMCCYFAQDLRPEQSIKASLQRIILRKYEK

SEQ ID NO: 58487 - protein, 101 aa, Homo sapiens
MLERGAESAAGATDPSPTGKEPVTKEAPHQGPPQKPSQSAPGPTASAGSPPRPRRRPPPQRPHRCPDCDKAFSYPSKLATHRLAHGGARPHPCPDCPKAFS

SEQ ID NO: 58488 - protein, 151 aa, Homo sapiens
AVPILPLGLAPDTFDDTYVGCAEEMEEKAAPLLKEEMAHHALLRESWEAAQETWEDKRRGLTLPPGFKAQNGIAIMVYTNSSNTLYWELNQAAFSVFPKEREVLIPPHEVFLVTRFSQDGAQSLVTLWSYNQTCSHFNCAYLGGEKRRGCV

SEQ ID NO: 58489 - protein, 437 aa, Homo sapiens
MENPQDIFSSNGGCLSDIVIEKYLVESKESVSHVQLACSMQDCAFPLDGTELCIWNTKDPSHQLLILRGHHQPITAMAFGNKVNPLLICSASLDYVIMWNLDECREKVLQGLVPRGTVMGSLLGKVLCLQLSLDDHVVAVCAGNKIFMLDIEVWDHCTGSLIYSSSVLSAYPLLSLFIDAESRQLVTGCADGQLWIFSLMDGHHYRRVARVDLRKKTETFSTRRVKSGLCSQPEESQLPSTSALGKGEQVEVTFPVLRLAPCDLSLIPNSACGCLSSENTRCVWIGSSVGLFVFNLANLEVEAALYYKDFQSLSILLAGSCALRNRTADQKVLCLLASLFGGKIAVLEINPAALVRAQQCPSMGQSLSVPASSCVLPTSPLYLGIAKEKSTKAASEQRRATCPRLTAVPLVPVAVGVQSGPSAITDCENIFFPFFLC

SEQ ID NO: 58490 - protein, 107 aa, Homo sapiens
MDLRTDFIITASHDGHVKFWKKIEEGIEFVKHFRSHLGVIESIAVSSEGALFCSVGDDKAMKVFDVVNFDMINMLKLGYFPGQCEWIYCPGDAISSVAASEKSTGKI

SEQ ID NO: 58491 - protein, 159 aa, Homo sapiens
MHMMVSKPEQWVKPMAVAGANQYTFHLEATENPGALIKDIRENGMKVGLAIKPGTSVEYLAPWANQIDMALVMTVEPGFGGQKFMEDMMPKVHWLRTQFPSLDIEVDGGVGPDTVHKCAEAGANMIVSGSAIMRSEDPRSVINLLRNVCSEAAQKRSLD

SEQ ID NO: 58492 - protein, 128 aa, Homo sapiens
MLCWGYWSLGQPGISTNLQGIVAEPQVCGFISDRSVKEVACGGNHSVFLLEDGEVYTCGLNTKGQLGHEREGNKPEQIGALADQHIIHVACGESHSLALSDRGQLFSWGAGSDGQLGLMTTEDSVAVP

SEQ ID NO: 58493 - protein, 365 aa, Homo sapiens
MPIMGSSVYITVELAIAVLAILGNVLVCWAVWLNSNLQNVTNYFVVSLAAADIAVGVLAIPFAITISTGFCAACHGCLFIACFVLVLTQSSIFSLLAIAIDRYIAIRIPLRYNGLVTGTRAKGIIAICWVLSFAIGLTPMLGWNNCGQPKEGKNHSQGCGEGQVACLFEDVVPMNYMVYFNFFACVLVPLLLMLGVYLRIFLAARRQLKQMESQPLPGERARSTLQKEVHAAKSLAIIVGLFALCWLPLHIINCFTFFCPDCSHAPLWLMYLAIVLSHTNSVVNPFIYAYRIREFRQTFRKIIRSHVLRQQEPFKAAGTSARVLAAHGSDGEQVSLRLNGHPPGVWANGSAPHPERRPNGYALGL

SEQ ID NO: 58494 - protein, 79 aa, Homo sapiens
MGLLTFRDVAIEFSLEEWQCLDTAQRNLYKNVILENYRNLVFLGIAVSKQDLITCLEQEKEPLTVKRHEMVNEPPGQKQ

SEQ ID NO: 58495 - protein, 183 aa, Homo sapiens
MAVPPTYADLGKSARDVFTKGYGFGLIKLDLKTKSENGLEFTSSGSANTETTKVTGSLETKYRWTEYGLTFTEKWNTDNTLGTEITVEDQLARGLKLTFDSSFSPNTGKKNAKIKTGYKREHINLGCDMDFDIAGPSIRGALVLGYEGWLAGYQMNFETAKSRVTQSNFAVGYKTDEFQLHTN

SEQ ID NO: 58496 - protein, 177 aa, Homo sapiens
MDPRNTAMLGLGSDSEGFSRKSPSAISTGTLVSKREVELEKNTKEEEDLRKRNRERNIEAGKDDGLTDAQQQFSVKETNFSEGNLKLKIGLQAKRTKKPPKNLENYVCRPAIKTTIKHPRKALKSGKMTDEKNEHCPSKRMESYSVAQTGVQWCDLGSPQPPPPGFKRFSYSPASAP

SEQ ID NO: 58497 - protein, 189 aa, Homo sapiens
  MOD_RES (1)..(1): Any amino acid
XNQLRITQVSAPPLLHNMSDHEQHVFQRCSSSFWRSNGDSSPCLNISSISVTPINSPDSRLSLGLLIPPPSKCGFPKPVSESSIPRPHAGSMTPKSPSTDIFDMIPFSPISHQSSMPTRNGTQPPPVPSRSTEIKRDLFGAEPFDPFNCGAADFPPDIQSKLDEMQEGFKMGLTLEGTVFCLDPLDSRC

SEQ ID NO: 58498 - protein, 183 aa, Homo sapiens
SSVLQSHGPSDTPQPLLDFDTDDLDLNSLRIQPVRSDPVSMPGSSRPVSDRRGVSTVIDAASVDSSTALEWGTSRPSHSRSAHHPSVQGARSSAHLKPQGLMETIHSHSRMSQHCMQPAMATGRRVRHGPWSCRLTCPRLSQDRAQDLTEEASQQGTFDRSVTLLEVCGSWPEGFGLRHMSSM

SEQ ID NO: 58499 - protein, 68 aa, Homo sapiens
LEFVMIVVFGLEFIIRIWSAGCCCRYRGWQGRLRFARKPFCVIGEYQSLRYLDYDTNILVFYLLFCNI

SEQ ID NO: 58500 - protein, 423 aa, Homo sapiens
MAAALRVAAVGARLSVLASGLRAAVRSLCSQAITVGAPVIGLNDSGGARIQEGVESLAGYADIFLRNVTASGVIPQISLIMGPCAGGAVYSPALTDFTFMVKDTSYLFITGPDVVKSVTNEDVTQEELGGAKTHTTMSGVAHRAFENDVDALCNLRDFFNYLPLSSQDPAPVRECHDPSDRLVPELDTIVPLESTKAYNMVDIIHSVVDEREFFEIMPNYAKNIIVGFARMNGRTVGIVGNQPKVASGCLDINSSVKGARFVRFCDAFNIPLITFVDVPGFLPGTAQEYGGIIRHGAKLLYAFAEATVPKVTVITRKAYGGAYDVMSSKHLCGDTNYAWPTAEIAVMGAKGAVEIIFKGHENVEAAQAEYIEKFANPFPAAVRGFVDDIIQPSSTRARICCDLDVLASKKVQRPWRKHANIPL

SEQ ID NO: 58501 - protein, 360 aa, Homo sapiens
MQSNKTFNLEKQNHTPRKHHQHHHQQQHHQQQQQQPPPPPIPANGQQASSQNEGLTIDLKNFRKPGEKTFTQRSRLFVGNLPPDITEEEMRKLFEKYGKAGEVFIHKDKGFGFIRLETRTLAEIAKVELDNMPLRGKQLRVRFACHSASLTVRNLPQYVSNELLEEAFSVFGQVERAVVIVDDRGRPSGKGIVEFSGKPAARKALDRCSEGSFLLTTFPRPVTVEPMDQLDDEEGLPEKLVIKNQQFHKEREQPPRFAQPGSFEYEYAMRWKALIEMEKQQQDQVDRNIKEAREKLEMEMEAARHEHQVMLMRQDLMRRQEELRRMEELHNQEVQKRKQLELRRKSAGAVKKRCGGSKKK

SEQ ID NO: 58502 - protein, 213 aa, Homo sapiens
MKAVVQRVTRASVTVGGEQISAIGRGICVLLGISLEDTQKELEHMVRKILNLRVFEDESGKHWSKSVMDKQYEILCVSQFTLQCVLKGNKPDFHLAMPTEQAEGFYNSFLEQLRKTYRPELIKDGKFGAYMQVHIQNDGPVTIELESPAPGTATSDPKQTDSRSVSQAGVQWRDLRSLQAPPPGFMPFFGLSLPSSWDYRHVPPCPANFFVFF

SEQ ID NO: 58503 - protein, 122 aa, Homo sapiens
VRELEAELDAEQKKHAEALKGVRKHERRVKELAYQAEEDRKNLARMQDLVDKLQSKVKSYKRQFEEAEQQANTNLAKYRKAQHELDDAEERADMAETQANKLRARTRDALGPKLSLSPQHKE

SEQ ID NO: 58504 - protein, 150 aa, Homo sapiens
MNPAAEAEFNILLATDSYKVTHYKQYPPNTSKVYSYFECREKKTENSKLRKVKYEETVFYGLQYILNKYLKGKVVTKEKIQEAKDVYKEHFQDDVFNEKGWNYILEKYDGHLPIEIKAVPEGFVIPRGNVLFTVENTDPECYWLTNWIEI

SEQ ID NO: 58505 - protein, 129 aa, Homo sapiens
  MOD_RES (1)..(1): Any amino acid
XPVQSKSPRFASWDEMNVLAHGLLQLGQGLREHAERTRSQLSALERRLSACGSACQGTEGSTDLPLAPESRVDPEVLHSLQTQLKAQNSRIQQLFHKVAQQQRHLEKQHLRIQHLQSQTGLNGGLSHID

SEQ ID NO: 58506 - protein, 50 aa, Homo sapiens
MKNTSWIRKNWLLVAGISFIGVHLGTYFLQRSAKQSVKFQSQSKQKSIEE

SEQ ID NO: 58507 - protein, 93 aa, Homo sapiens
MRQAGRYLPEFRETRAAQDFFSTCRSPEACCELTLQPLRRFPLDAAIIFSDILVVPQALGMEVTMVPGKGPSFPEPLREEQDLERLRDPEVVA

SEQ ID NO: 58508 - protein, 280 aa, Homo sapiens
MHILVRCSHFLCLRFKKSTLGYSDTVSFAMEVSPWSCLQKQAAWGRSVVDFFLVITQLGFCSVYIVFLAENVKQVHEGFLESKVFISNSTNSSNPCERRSVDLRIYMLCFLPFIILLVFIRELKNLFVLSFLANVSMAVSLVIIYQYVVRNMPDPHNLPIVAGWKKYPLFFGTAVFAFEGIGVVLPLENQMKESKRFPQALNIGMGIVTTLYVTLATLGYMCFHDEIKGSITLNLPQDVWLYQSVKILYSFGIFVTYSIQFYVPAEIIIPGITSKFHTKW

SEQ ID NO: 58509 - protein, 73 aa, Homo sapiens
MGDPGSEIIESVPPAGPEASESTTDENEDDIQFVSEGPLRPVLEYIDLVSSDDEEPSTSYTDGSALCLMTLPL

SEQ ID NO: 58510 - protein, 37 aa, Homo sapiens
  MOD_RES (1)..(1): Any amino acid
XYTDASPSPRLKSVGIPVLCLNSVDDVFSPSHGNLRS

SEQ ID NO: 58511 - protein, 623 aa, Homo sapiens
MSVSDTPHYPPELESVSHPVQRDCLGLLVHAQRTPSWPPSPDEDPRLPSFPLEEPGSRPLVPRNLPFPALSLEEEEEEEEDEDAAEPEWLRSEEHPSQFFAEAQRLREQRLLLDEEVSVAGRVYGVHRVILAAISSLFRDRLLGGGGPRPPFSLEVSPGGWEAVLTFAYEGVLGPASQGDVLAAAEALGAPRVKAAAQQTCERAGNAREDVKKPSQAEELRENLRGIELLYREGVGCDLKLEAGGCQLSVHRAALACGSEFFGAMLLSGMRESQGTEVSLRTISTQDLRLLVSFAYSGVVRARWPGLLRAAQAALQYQSSSCLDLCQKGLARGLSPARCLALFPMAEAPGLERLWSKARHYLLTHLPAVALCPAFPSLPAACLAELLDSDELHVQEEFEAFVAARCWLAANPETQESEAKALLRCVRFGRMSTRELRRVRAAGLLPPLTPDLLHQLMVEADVPGQERRREPDRALVVIGGDGLRPDMALRQPSRAVWWARAFRCGVGLVRTVEWGQLPALPAPGRFRHGAASLAGSELYVCGGQDFYSHSNTLASTLRWEPSQEDWEEMAPLSQARSLFSLVALDGKLYALGGRHNDVALDSVETYNPELNVWSCLILCPVLP

SEQ ID NO: 58512 - protein, 871 aa, Homo sapiens
RRRSRRHVSPGSGRAAAVAELLWLRPLEIKLEYEGTLFTEWSVPETCFVLNKSSPTTELRCSSPGVHAIKPIVTGPDEEERYLFVESSHTCFLWYYRVRTWRIVVPMTKDDALKEIRGNQVTFQDCFIADFLILLTFPLLTIPEIPGYLPISSPRGSQLMASWDACVVASAVLVTDMETFHTTDSFKSWTRIRVPPDILSDDERRSVAHVILSRDGIVFLINGVLYIKSFRGFIRLGGIVNLPDGGITGISSRKWCWVNYLLKAKGRRSTFAVWTENEIYLGSILLKFARLVTTTELKNILSLSVTATLTIDRVEYTGHPLEIAVFLNYCTVCNVTKKIFLVIYNEDTKQWVSQDFTLDAPIDSVTMPHFTFSALPGLLLWNKHSIYYCYHNFTFTGILQTPAGHGNLSMLSNDSIIHEVFIDYYGDILVKMENNVIFYSKINTRDAVKLHLWTNYTTRAFIFLSTSGQTYFLYALDDGTIQIQDYPLHLEAQSIAFTTKDKCPYMAFHNNVAHVFYFLDKGEALTVWTQIVYPENTGLYVIVESYGPKILQESHEISFEAAFGYCTKTLTLTFYQNVDYERISDYFETQDKHTGLVLVQFRPSEYSKACPIAQKVFQIAVGCDDKKFIAIKGFSKKGCHHHDFSYVIEKSYLRHQPSKNLRVRYIWGEYGCPLRLDFTEKFQPVVQLFDDNGYVKDVEANFIVWEIHGRDDYSFNNTMAQSGCLHEAQTWKSMIELNKHLPLEEVWGPENYKHCFSYAIGKPGDLNQPYEIINSSNGNHIFWPMGHSGMYVFRVKILDPNYSFCNLTAMFAIETFGLIPSPSVYLVASFLFVLMLLFFTILVLSYFRYMRIYRRYIYEPLHKPQRKRKKN

SEQ ID NO: 58513 - protein, 510 aa, Homo sapiens
  MOD_RES (1)..(1): Any amino acid
XIEQIIAQGEQLIEKSEPLDAAIIEEELDELRRYCQEVFGRVERYHKKLIRLPPSSNLSLSLAQPLRSERSGRDTPASVDSIPLEWDHDYDLSRDLESAMSRALPSEDEEGQDDKDFYLRGAVGLSGDHSALESQIRQLGKALDDSRFQIQQTENIIRSKTPTGPELDTSYKGYMKLLGECSSSIDSVKRLEHKLKEEEESLPGFVNLHSTETQTAGVIDRWELLQAQALSKELRMKQNLQKWQQFNSDLNSIWAWLGDTEEELEQLQRLELSTDIQTIELQIKKLKELQKAVDHRKAIILSINLCSPEFTQADSKESRDLQDRLSQMNGRWDRVCSLLEEWRGLLQDALMQCQGFHEMSHGLLLMLENIDRRKNEIVPIDSNLDAEILQDHHKQLMQIKHELLESQLRVASLQDMSCQLLVNAEGTDCLEAKEKVHVIGNRLKLLLKEVSRHIKELEKLLDVSSSQQDLSSWSSADELDTSGSVSPTSGRSTPNRQKTVHKRWLRFLPF

SEQ ID NO: 58514 - protein, 125 aa, Homo sapiens
DEYQNYDKAHGALTEAYKCLAKAKAKSPLDQETRLAQLQSRMALVKRFIQARRTYTEDPKESIKQCELLLEEPDLDSTIRIGDVYGFLVEHYVRKEEYQTVRPECCSLAASRHTRLLKRRLNGSN

SEQ ID NO: 58515 - protein, 170 aa, Homo sapiens
MLIKVKTLTGKEIEIDIEPTDKVERIKERVEEKEGIPPQQQRLIYSGKQIDGTVRDRRGQDVRLYPEVPEVLKRLQSLGVPGAAASRTSEIEGANQLLELFDLFRYFVHREIYPGSKITHFERLQQKTGIPFSQMIFFDDERRNIVDVSKLGVTCIHIQNGMNLQTLSQG

SEQ ID NO: 58516 - protein, 617 aa, Homo sapiens
  MOD_RES (1)..(1): Any amino acid
XSSFESRLMKLENSIIPVHKQTENLQRLQENVEKTLSCLDHVISYYHVASDTEKIIREGPTGRLEEYLGSMAKIQKAVEYFQDNSPDSPELNKVKLLFERGKEALESEFRSLMTRHSKVVSPVLILDLISGDDDLEAQEDVTLEHLPESVLQDVIRISRWLVEYGRNQDFMNVYYQIRSSQLDRSIKGLKEHFHKSSSSSGVPYSPAIPNKRKDTPTKKPVKRPGTIRKAQNLLKQYSQHGLDGKKGGSNLIPLEGRDDMLDVETDAYIHCVSAFVKLAQSEYQLLADIIPEHHQKKTFDSLIQDALDGLMLEGENIVSAARKAIVRHDFSTVLTVFPILRHLKQTKPEFDQVLQGTAASTKNKLPGLITSMETIGAKALEDFADNIKNDPDKEYNMPKDGTVHELTSNAILFLQQLLDFQETAGAMLASQGKVLGNLQLNLLSKSKVYEDPALSAIFLHNNYNYILKSLEKSELIQLVAVTQKTAERSYREHIEQQIQTYQRSWLKVTDYIAEKNLPVFQPGVKLRDKERQIIKERFKGFNDGLEELCKIQKAWAIPDTEQRDRIRQAQKTIVKETYGAFLQKFGSVPFTKNPEKYIKYGVEQVGDMIDRLFDTSA

SEQ ID NO: 58517 - protein, 37 aa, Homo sapiens
MSMEDYDFLFKIVLIGNAGVGKTCLVRRFTQLQIWDT

SEQ ID NO: 58518 - protein, 187 aa, Homo sapiens
PDRLKQFSVAPRHFEEMIPPERPRIAFQTPLPPLSAPSVPPIPSVHPVPSQNEDLRSGLSSALGEMVSPRIAPLPPPPLLPPLATNYRTPYDDAYYFYGSRNTFDPSLAYYGSGMMGVQPAAYVSAPVTHQLAQPVVNTVGQNELKITSDQVINSGLIFEDKPKPSKQSLQSYQEALQQQFLLPLKS

SEQ ID NO: 58519 - protein, 49 aa, Homo sapiens
EYKRKLARVSLVRKELRSRIQSLPDLSRLPNVTGSHMHLPFAGDIYSED

SEQ ID NO: 58520 - protein, 170 aa, Homo sapiens
MEVQAPPGTTIGHVLQTWHPFLPKFSIQDADRQTVLRVVGPCWTCGCGTDTNFEVKTRDESRSVGRISKQWGGLVREALTDADDFGLQFPLDLDVRVKAVLLGATFLIVSWLPLPPPPACPLLSFEALCISWPLARGKSGIGVVGVEVLELACDSQAGLAQPDLPLTVAS

SEQ ID NO: 58521 - protein, 59 aa, Homo sapiens
MNYSLHLAFVCLSLFTERMCIQGSQFNVEVGRSDKLSLPGFENLTAGYNKFLRPNFGGE

SEQ ID NO: 58522 - protein, 241 aa, Homo sapiens
MKWLKKCLDTAPTPMWPDDLQNHTFLHTVYCQDGSPSVGLSEAYDEDQLFFFDFSQNTRVPRLPEFADWAQEQGDAPAILFDKEFCEWMIQQIGPKLDGKIPVSRGFPIAEVFTLKPLEFGKPNTLVCFVSNLFPPMLTVNWQHHSVPVEGFGPTFVSAVDGLSFQAFSYLNFTPEPSDIFSCIVTHEIDRYTAIAYWVPRNALPSDLLENVLCGVAFGLGVLGIIVGIVLIIYFRKPCSG

SEQ ID NO: 58523 - protein, 221 aa, Homo sapiens
  MOD_RES (1)..(1): Any amino acid
XKRTLPAFQVPYPPRQLLRDFQSRLPYQYLHYALFKANRLEKAVAAAYTFLQRNPKHELTAKYLNYYQGMLDVADESLTDLEAQPYEAVFLRAVKLYNSGDFRSSTEDMERALSEYLAVFARCLAGCEGAHEQVDFKDFYPAIAVNDVRQAARSAASYMLFDPKDSVMQQNLVYYRFHRARWGLEEEDFQPREEAMLYHNQTAELRELLEFTHMYLQSDDE

SEQ ID NO: 58524 - protein, 218 aa, Homo sapiens
MTSEFFAAQLRAQISDDTTHPISYYKPEFYTPDDGGTAHLSVVAEDGSAVSATSTINLYFGSKVRSPVSGILFNNEMDDFSSPSITNEFGVPPSPANFIQPGKQPLSSMCPTIMVGQDGQPPSHADHTPMPQAIIYNLWFGYDVKRAVEEPRLHNQLLPNVTTVERNIDQAVTAALETRHHHTQIASTFIAVVQAIVRTAGGWAAASDSRKGGEPAGY

SEQ ID NO: 58525 - protein, 47 aa, Homo sapiens
MVLESVARIVKVQLPAYLKRLPVPESITGFARLTESCSCHPGWSAMA

SEQ ID NO: 58526 - protein, 2211 aa, Homo sapiens
MMPQKKRRRKKDIDFLALYEAELLNYASEDDEGELEHEYYKARVYEVVTATGDVRGAGTDANVFITLFGENGLSPKLQLTSKSKSAFEKGNVDVFRVRTNNVGLIYKVRIEHDNTGLNASWYLDHVIVTDMKRPHLRYYFNCNNWLSKVEGDRQWCRDLLASFNPMDMPRGNKYEVKVYTGDVIGAGTDADVFINIFGEYGDTGERRLENEKDNFEKGAEDRFILDAPDLGQLMKINVGHNNKGGSAGWFLSQIVIEDIGNKRKYDFPLNRWLALDEDDGKIQRDILVGGAETTAITYIVTVFTGDVRGAGTKSKIYLVMYGARGNKNSGKIFLEGGVFDRGRTDIFHIELAVLLSPLSRVSVGHGNVGVNRGWFCEKVVILCPFTGIQQTFPCSNWLDEKKADGLIERQLYEMVSLRKKRLKKFPWSLWVWTTDLKKAGTNSPIFIQIYGQKGRTDEILLNPNNKWFKPGIIEKFRIELPDLGRFYKIRVWHDKRSSGSGWHLERMTLMNTLNKDKYNFNCNRWLDANEDDNEIVREMTAEGPTVRRIMGMARYHVTVCTGELEGAGTDANVYLCLFGDVGDTGERLLYNCRNNTDLFEKGNADEFTIESVTMRNVRRVRIRHDGKGSGSGWYLDRVLVREEGQPESDNVEFPCLRWLDKDKDDGQLVRELLPSDSSATLKNFRYHISLKTGDVSGASTDSRVYIKLYGDKSDTIKQVLLVSDNNLKDYFERGRVDEFTLETLNIGNINRLVIGHDSTGMHASWFLGSVQIRVPRQGKQYTFPANRWLDKNQADGRLEVELYPSEVVEIQKLVHYEVEIWTGDVGGAGTSARVYMQIYGEKGKTEVLFLSSRSKVFERASKDTFQLEAADVGEVYKLRLGHTGEGFGPSWFVDTVWLRHLVVREVDLTPEEEARKKKEKDKLRQLLKKERLKAKLQRKKKKRKGSDEEDEGEEEESSSSEESSSEEEEMEEEEEEEEFGPGMQEVIEQHKFEAHRWLARGKEDNELVVELVPAGKPGPERNTYEVQVVTGNVPKAGTDANVYLTIYGEEYGDTGERPLKKSDKSNKFEQGQTDTFTIYAIDLGALTKIRIRHDNTGNRAGWFLDRIDITDMNNEITYYFPCQRWLAVEEDDGQLSRELLPVDESYVLPQSEEGRGGGDNNPLDNLALEQKDKSTTFSVTIKTGVKKNAGTDANVFITLFGTQDDTGMTLLKSSKTNSDKFERDSIEIFTVETLDLGDLWKVRLGHDNTGKAPGWFVDWVEVDAPSLGKCMTFPCGRWLAKNEDDGSIIRDLFHAELQTRLYTPFVPYEITLYTSDVFAAGTDANIFIIIYGCDAVCTQQKYLCTNKREQKQFFERKSASRFIVELEDVGEIIEKIRIGHNNTGMNPGWHCSHVDIRRLLPDKDGAETLTFPCDRWLATSEDDKKTIRELVPYDIFTEKYMKDGSLRQVYKEVEEPLDIVLYSVQIFTGNIPGAGTDAKVYITIYGDLGDTGERYLGKSENRTNKFERGTADTFIIEAADLGVIYKIKLRHDNSKWCADWYVEKVEIWNDTNEDEFLFLCGRWLSLKKEDGRLERLFYEKEYTGDRSSNCSSPADFWEIALSSKMADVDISTVTGPMADYVQEGPIIPYYVSVTTGKHKDAATDSRAFIFLIGEDDERSKRIWLDYPRGKRGFSRGSVEEFYVAGLDVGIIKKIEVLYEMTVWTGDVVGGGTDSNIFMTLYGINGSTEEMQLDKKKARFEREQNDTFIMEILDIAPFTKMRIRIDGLGSRPEWFLERILLKNMNTGDLTMFYYGDWLSQRKGKKTLVCEMCAVIDEEEMMEWTSYTVAVKTSDILGAGTDANVFIIIFGENGDSGTLALKQSANWNKFERNNTDTFNFPDMLSLGHLCKLRVWHDNKGIFPGWHLSYVDVKDNSRDETFHFQCDCWLSKSEGDGQTVRDFACANNKICDELEETTYEIVIETGNGGETRENVWLILEGRKNRSKEFLMENSSRQRAFRKGTTDTFEFDSIYLGDIASLCVGHLAREDRFIPKRELAWHVKTITITEMEYGNVYFFNCDCLIPLKRKRKYFKVFEVTKTTESFASKVQSLVPVKYEVIVTTGYEPGAGTDANVFVTIFGANGDTGKRELKQKMRNLFERGSTDRFFLETLELGELRKVRLEHDSSGYCSGWLVEKVEVTNTSTGVATIFNCGRWLDKKRGDGLTWRDLFPSV

SEQ ID NO: 58527 - protein, 71 aa, Homo sapiens
MAAPRGEPLAGVSASVFVERVLGTTPGIIGQVESAPGIPRKDGIPTFLCGAAVCLGEDGFQQRSGAAVGQQ

SEQ ID NO: 58528 - protein, 556 aa, Homo sapiens
MALTQVRLTFRDVAIEFSQEEWKCLDPAQRILYRDVMLENYWNLVSLGLCHFDMNIISMLEEGKEPWTVKSCVKIARKPRTPECVKGVVTDIPPKCTIKDLLPKEKSSTEAVFHTVVLERHESPDIEDFSFKEPQKNVHDFECQWRDDTGNYKGVLMAQKEGKRDQRDRRDIENKLMNNQLGVSFHSHLPELQLFQGEGKMYECNQVEKSTNNGSSVSPLQQIPSSVQTHRSKKYHELNHFSLLTQRRKANSCGKPYKCNECGKAFTQNSNLTSHRRIHSGEKPYKCSECGKTFTVRSNLTIHQVIHTGEKPYKCHECGKVFRHNSYLATHRRIHTGEKPYKCNECGKAFRGHSNLTTHQLIHTGEKPFKCNECGKLFTQNSHLISHWRIHTGEKPYKCNECGKAFSVRSSLAIHQTIHTGEKPYKCNECGKVFRYNSYLGRHRRVHTGEKPYKCNECGKAFSMHSNLATHQVIHTGTKPFKCNECSKVFTQNSQLANHRRIHTGEKPYKCNECGKAFSVRSSLTTHQAIHSGEKPYKCIECGKSFTQKSHLRSHR

SEQ ID NO: 58529 - protein, 79 aa, Homo sapiens
MAGGRCGPQLTALLAAWIAAVAATAGPEEAALPPEQSRVQPMTASNWTLVMEGEWMLKLYRYVLEEKGHSVTSTCSMNT

SEQ ID NO: 58530 - protein, 314 aa, Homo sapiens
MAPTNLTSAPVFLLLGLVDGTDAHPLLFLLCLGIYLLNALSNLSMVALVRSDGALRSPMYYFLGHLSLVDVCFTTVTVPRLLAGLLHPGQAISFQACFAEMYFFVALGITESYLLAAMSYDRPTAACRPLRYGALVTPWRCASLVRASWAVTHLHSLLHTLLLSALSYPYPTPVRPFFCDMTVMLSLATSDTSAAETAIFSEGLAVVLAPLLLVFLFLRAHPGRGARLAGGRRRAFSTCGAHLVAVAVALFFGSVLSVYFPPSSAYSARYDRLASVVYAVITPTLNPFINSLRNKEVKGALKRGLRWRAAPQEA

SEQ ID NO: 58531 - protein, 138 aa, Homo sapiens
ITEQQLRASLWAQEAKAAQLQLRLRSTESQLEALAAEQQPGNQAQAQAQLASLYSALQQALGSVCESRPELSGGGDSAPSVWGLEPDQNGARSLFKRGPLLTALSAEAVASALHKLHQDLWKTQQTRRNLSGKESRTP

SEQ ID NO: 58532 - protein, 91 aa, Homo sapiens
MFQASMRSPNMEPFKQQKVEDFYDIGEELGSGQFAIVKKCREKSTGLEYAAKFIKKRQSRASRRGVSREEIERESVWRRALRFPGPEGVTE

SEQ ID NO: 58533 - protein, 187 aa, Homo sapiens
MTMTTMPESLNSPVSGKAVFMEFGPPNQQMSPSPMSHGHYSMHCLHSAGHSQPDGAYSSASSFSRPLGYPYVNSVSSHASSPYISSVQSYPGSASLAQSRLEDPGADSEKSTVVEGGEVRFNGKGKKIRKPRTIYSSLQLQALNRRFQQTQYLALPERAELAASLGLTQTQVKIWFQNKRSKFKKLM

SEQ ID NO: 58534 - protein, 261 aa, Homo sapiens
MAQWEMLQNLDSPFQDQLHQLYSHSLLPVDIRQYLAVWIEDQNWQEAALGSDDSKATMLFFHFLDQLNYECGRCSQDPESLLLQHNLRKFCRDIQPFSQDPTQLAEMIFNLLLEEKRILIQAQRAQLEQGEPVLETPVESQQHEIESRILDLRAMMEKLVKSISQLKDQQDVFCFRYKIQAKGKTPSLDPHQTKEQKILQETLNELDKRRKEVLDASKALLGRLTTLIELLLPKLEEWKAQQQKACIRAPIDHGLEQLETW

SEQ ID NO: 58535 - protein, 79 aa, Homo sapiens
MEGDCLSCMKYLMFVFNFFIFLGGACLLAIGIWVMVDPTGFREIVAANPLLLTGAYILLAMGGLLFLLGFLGCCGAVRE

SEQ ID NO: 58536 - protein, 437 aa, Homo sapiens
MQKPPLLLRRPLPPKFTKLSLHEKKTHTAKTGKIESLHVAFTEDETTSIKMDRTRFPDVLRNQSLTPINIQNIFLDHCVQERVTAISSPQKSTKHVREQIPDTATGSIFFPHCNSASTRIFGKQTNKMESSRKFKTMKDVYTEKRLENILILSSKFSKPKSTPGSVIAQKLEKMHPKHQPLPESPGYTYQHISRDLSATVPSPPPMTVSMKPEGQWPEHFKSTATLTLRVTEFPGFVSLPTPVLPRKPHRQSVIETLVTENGNIESVPKQIPPRPPEGLTKTEKIESEIHVVRGEGFKTVAATRYETITAMTNLAIVNCQVYGRNALNLKGFFILNCPDLTPLAFQLIYLNLSFNDLHYFPTEILCLKNLQILKLRNNPIKEIPSEIQQLEFLRIFTIAFNLITVLPIGGSVEDGCEGINRIKGDQLEGHCSSSSKR

SEQ ID NO: 58537 - protein, 50 aa, Homo sapiens
MSNKDRHIDSSCSSFIKTEPSSPASLTDSVNHHSPGGSSDASGSYSSTMN

SEQ ID NO: 58538 - protein, 734 aa, Homo sapiens
MPAKGRYFLNEGEEGPDQDALYEKYQLTSQHGPLLLTLLLVAATACVALIIIAFSQGDPSRHQAILGMAFLVLAVFAALSVLMYVECLLRRWLRALALLTWACLVALGYVLVFDAWTKAACAWEQVPFFLFIVFVVYTLLPFSMRGAVAVGAVSTASHLLVLGSLMGGFTTPSVRVGLQLLANAVIFLCGNLTGAFHKHQMQDASRDLFTYTVKCIQIRRKLRIEKRQQENLLLSVLPAHISMGMKLAIIERLKEHGDRRCMPDNNFHSLYVKRHQNVSILYADIVGFTQLASDCSPKELVVVLNELFGKFDQIAKANECMRIKILGDCYYCVSGLPVSLPTHARNCVKMGLDMCQAIKQVREATGVDINMRVGIHSGNVLCGVIGLRKWQYDVWSHDVSLANRMEAAGVPGRVHITEATLKHLDKAYEVEDGHGQQRDPYLKEMNIRTYLVIDPRSQQPPPPSQHLPRPKGDAALKMRASVRMTRYLESWGAARPFAHLNHRESVSSGETHVPNGRRPKSVPQRHRRTPDRSMSPKGRSEDDSYDDEMLSAIEGLSSTRPCCSKSDDFYTFGSIFLEKGFEREYRLAPIPRARHDFACASLIFVCILLVHVLLMPRTAALGVSFGLVACVLGLVLGLCFATKFSRCCPARGTLCTISERVETQPLLRLTLAVLTIGSLLTVAIINLPLMPFQVPELPVGNETGLLAASSKTRALCEPLPHLHTVFSRLNELTS

SEQ ID NO: 58539 - protein, 152 aa, Homo sapiens
MKAVLILYFLYFLHWNEDTSTSIYHAFSSLCYFTPILGAAIADSWLGKFKTIIYLSLVYVLGHVIKSLGALPILGGQVVHTVLSLIGLSLIALGTGGIKPCVAAFGGDQFEEKHAEERTRYFSVFYLSINAGSLISTFITPMLRGDVQCFGE

SEQ ID NO: 58540 - protein, 86 aa, Homo sapiens
MGDPFMLQQSTNPAPGILGPPPPSFHLGGPAVGPRGNLGAGNGNLQGPRHMQKGRVETSRVVHIMDFQRGKNLRYQLLQLVEPFGV

SEQ ID NO: 58541 - protein, 80 aa, Homo sapiens
MNKLRENKEFLEFRKARSDMLLSRKNQLLLEFSFWNEPVPRSGPNIYELRSYQLRPGTMIEWGNYWARAIRFRQDGNEAV

SEQ ID NO: 58542 - protein, 84 aa, Homo sapiens
KDELYLNLVLEYVPETVYRVARHFTKAKLTIPILYVKVGQQVYMYQLFRSLAYIHSQGVCHRDIKPQNLLVDPDTAVLKLCDFG

SEQ ID NO: 58543 - protein, 165 aa, Homo sapiens
MSQQGYVATPPYSQPQPGIGLSPPHYGHYGDPSHTASPTGMMKPAGPLGATATRGMLPPGPPPPGPHQFGQNGAHATGHPPQRFPGPPPVNNVASSHAPYQPSAQSSYPGPISTSSVTQLGSQLSAMQINSYGSGMAPPSQGPPGPLSATSLQTPPRPPQPSILQ

SEQ ID NO: 58544 - protein, 129 aa, Homo sapiens
MILSNTTAVTPFLTKLWQETVQQGGNMSGLARRSPRSGDGKLEALYVLMVLGFFGFFTLGIMLSYIRSKKLEHSNDPFNVYIESNAWQEKDKAYVQARVLESYRSCYVVENHLAIEQPNTHLPETKPSP

SEQ ID NO: 58545 - protein, 48 aa, Homo sapiens
MEAAETEAEAAALEVLAEVAGILEPVGLQEEAELPAKILVEFVVVCTR

SEQ ID NO: 58546 - protein, 308 aa, Homo sapiens
  MOD_RES (1)..(1): Any amino acid
XELKKKPRRSCTLPNYTKGSGDVLGKIAHLAQIEDDRAAMVISWHLASDMDCVVTLTTDAARRIYDETQGRQQVLPLDSIYKKTLPDWKRSLPHFRNGKLYFKPIGDPVFARDLLTFPDNVEHCETVFGMLLGDTIILDNLDAANHYRKEVVKITHCPTLLTRDGDRIRSNGKFGGLQNKAPPMDKLRGMVFGAPVPKQCLILGEQIDLLQQYRSAVCKLDSVNKDLNSQLEYLRTPDMRKKKQELDEHEKNLKLIEEKLGMTPIRKCNDSLRHSPKVETTDCPVPPKRMRREATRQNRDGVSLCWPG

SEQ ID NO: 58547 - protein, 70 aa, Homo sapiens
MGELCRRDSALTALDEETLWEMMESHRHRIVRCICPSRLTPYLRQAKVLCQLDEEEVLHSPRLTNSAMRA

SEQ ID NO: 58548 - protein, 659 aa, Homo sapiens
MLLPVFTLKLRHKISPRMVAIGRYDGTHPCLAAATQTGKVFIHNPHTRNQHVSASRVFQSPLESDVSLLSINQAVSCLTAGVLNPELGYDALLVGTQTNLLAYDVYNNSDLFYREVADGANAIVLGTLGDISSPLAIIGGNCALQGFNHEGSDLFWTVTGDNVNSLALCDFDGDGKKELLVGSEDFDIRVFKEDEIVAEMTETEIVTSLCPMYGSRFGYALSNGTVGVYDKTSRYWRIKSKNHAMSIHAFDLNSDGVNELITGWSNGKVDARSDRTGEVIFKDNFSSAIAGVVEGDYRMDGHIQLICCSVDGEIRGYLPGTAEMRGNLMDTSAEQDLIRELSQKKQNLLLELRNYEENAKAELASPLNEADGHRGIIPANTRLHTTLSVSLGNETQTAHTELRISTSNDTIIRAVLIFAEGIFTGESHVVHPSIHNLSSSICIPIVPPKDVPVDLHLKAFVGYRSSTQFHVFESTRQLPRFSMYALTSLDPASEPISYVNFTIAERAQRVVVWLGQNFLLPEDTHIQNAPFQVCFTSLRNGGHLHIKIKLSGEITINTDDIDLAGDIIQSMASFFAIEDLQVEADFPVYFEELRKVLVKVDEYHSVHQKLSADMADHSNLIRSLLVGAEDARLMRDMCSVVQHIFRADSSCLTETIGKQ

SEQ ID NO: 58549 - protein, 185 aa, Homo sapiens
MSGGFELQPRDGGPRVALAPGETVIGRGPLLGIHTNPCFYQSSEKSQLLPLKPNLWCYLNPGDSFSLLVDKYIFRILSIPSEVEMQCTLRNSQVLDEDNILNETPKSPVINLPHETTGASQLEGSTEIAKTQMTPTNSVSFLGENRDCNKQQPILAERKRILPTWMLAEHLSDQNLSVPAISGGR

SEQ ID NO: 58550 - protein, 221 aa, Homo sapiens
MAPGAPSSSPSPILAVLLFSSLVLSPAQAIVVYTDREVHGAVGSRVTLHCSFWSSEWVSDDISFTWRYQPEGGRDAISIFHYAKGQPYIDEVGTFKERIQWVGDPRWKDGSIVIHNLDYSDNVPTRYGVVLGAVIGGVLGVVLLLLLLFYVVRYCWLRRQAALQRRLSAMEKGKLHKPGKDASKRGRQTPVLYAMLDHSRSTKAVSEKKAKGLGESRKDKK

SEQ ID NO: 58551 - protein, 1245 aa, Homo sapiens
MGSVTGAVLKTLLLLSTQNWNRVEAGNSYDCDDPLVSALPQASFSSSSELSSSHGPGFARLNRRDGAGGWSPLVSNKYQWLQIDLGERMEVTAVATQGGYGSSNWVTSYLLMFSDSGWNWKQYRQEDSIWGFSGNANADSVVYYRLQPSIKARFLRFIPLEWNPKGRIGMRIEVFGCAYRSEVVDLDGKSSLLYRFDQKSLSPIKDIISLKFKTMQSDGILLHREGPNGDHITLQLRRARLFLLINSGEAKLPSTSTLVNLTLGSLLDDQHWHSVLIQRLGKQVNFTVDEHRHHFHARGEFNLMNLDYEISFGGIPAPGKSVSFPHRNFHGCLENLYYNGVDIIDLAKQQKPQIIAMGNVSFSCSQPQSMPVTFLSSRSYLALPDFSGEEEVSATFQFRTWNKAGLLLFSELQLISGGILLFLSDGKLKSNLYQPGKLPSDITAGVELNDGQWHSVSLSAKKNHLSVAVDGQMASAAPLLGPEQIYSGGTYYFGGCPDKSFGSKCKSPLGGFQGCMRLISISGKVVDLISVQQGSLGNFSDLQIDSCGISDRCLPNYCEHGGECSQSWSTFHCNCTNTGYRGATCHNSIYEQSCEAYKHRGNTSGFYYIDSDGSGPLEPFLLYCNMTETAWTIIQHNGSDLTRVRNTNPENPYAGFFEYVASMEQLQATINRAEHCEQEFTYYCKKSRLVNKQDGTPLSWWVGRTNETQTYWGGSSPDLQKCTCGLEGNCIDSQYYCNCDADRNEWTNDTGLLAYKEHLPVTKIVITDTGRLHSEAAYKLGPLLCQGDRSFWNSASFDTEASYLHFPTFHGELSADVSFFFKTTASSGVFLENLGIADFIRIELRSPTVVTFSFDVGNGPFEISVQSPTHFNDNQWHHVRVERNMKEASLQVDQLTPKTQPAPADGHVLLQLNSQLFVGGTATRQRGFLGCIRSLQLNGMTLDLEERAQVTPEVQPGCRGHCSSYGKLCRNGGKCRERPIGFFCDCTFSAYTGPFCSNEISAYFGSGSSVIYNFQENYLLSKNSSSHAASFHGDMKLSREMIKFSFRTTRTPSLLLFVSSFYKEYLSVIIAKNGSLQIRYKLNKYQEPDVVNFDFKNMADGQLHHIMINREEGVVFIEIDDNRRRQVHLSSGTEFSAVKSLVLGRILEHSDVDQDTALAGAQGFTGCLSAVQLSHVAPLKAALHPSHPDPVTVTGHVTESSCMAQPGTDATSRERTHSFADHSGTIDDREPLANAIKSDSAVIGG

SEQ ID NO: 58552 - protein, 710 aa, Homo sapiens
MGDILAHESELLGLVKEYLDFAEFEDTLKTFSKECKIKGKPLCKTVGGSFRDSKSLTIQKDLVAAFDNGDQKVFFDLWEEHISSSIRDGDSFAQKLEFYLHIHFAIYLLKYSVGRPDKEELDEKISYFKTYLETKGAALSQTTEFLPFYALPFVPNPMVHPSFKELFQDSWTPELKLKLIKFLALISKASNTPKLLTIYKENGQSNKEILQQLHQQLVEAERRSVTYLKRYNKIQADYHNLIGVTAELVDSLEATVSGKMITPEYLQSVCVRLFSNQMRQSLAHSVDFTRPGTASTMLRASLAPVKLKDVPLLPSLDYEKLKKDLILGSDRLKAFLLQALRWRLTTSHPGEQRETVLQAYISNDLLDCYSHNQRSVLQLLHSTSDVVRQYMARLINAFASLAEGRLYLAQNTKVLQMLEGRLKEEDKDIITRENVLGALQKFSLRRPLQTAMIQDGLIFWLVDVLKDPDCLSDYTLEYSVALLMNLCLRSTGKNMCAKVAGLVLKVLSDLLGHENHENFGSQKQDVLSVPVCLAHWPVPGPSGIAVSHHLAPNIPPPHAIPLIQPYVNGALYSILSVPSIREEARAMGMEDILRCFIKEGNAEMIRQIEFIIKQLNSEELPDGVLESDDDEDEDDEEDHDIMEADLDKDELIQPQLGELSGEKLLTTEYLGIMTNTGKTRRKGLANVQWSGDEPLQRPVTPGGHRNGYPV

SEQ ID NO: 58553 - protein, 144 aa, Homo sapiens
PHPPPPPPPLPPPALGLHQSTSAVDLIKERREKRANAGKTLVKNNPKKPEMPNMLEILKEMNSVKLRSVKRSEQDVKPKPVDATDPAALIAEALKKKFAYRYRSDSQDEVEKGIPKSESEATSERVLSLPAGFIQPHVSKHCLG

SEQ ID NO: 58554 - protein, 74 aa, Homo sapiens
  MOD_RES (1)..(1): Any amino acid
XNRETNFNKVFNSSPTVGVINPLAKGLSSHVLFLMQQKKKNDKSPTNSPAQSEASPVASPDPQRQEWFARYFTF

SEQ ID NO: 58555 - protein, 52 aa, Homo sapiens
MDFLRNLFSQTLSLGSQKERLLDELTLEGVARYMQSERSATVSLLRQPGLLP

SEQ ID NO: 58556 - protein, 147 aa, Homo sapiens
MSSGKSARYNRFSGGPSNLPTPDVTTGTRMETTFGPAFSAVTTITKADGTSTYKQHCRTPSSSSTLAYSPRDEEDSMPPISTPRRSDSAISVRSLHSESSMSLRSTFSLPEEEEEPEPLVFAEQPSVKLCCQLCCSVFKDPVITTCG

SEQ ID NO: 58557 - protein, 190 aa, Homo sapiens
  MOD_RES (1)..(1): Any amino acid
XSSKDSLACFNQTYTINLYLVETGRRLLDTTITFSLEQSGTRPERLYIQVFLKKDDSVGYRALVQTEDHLLLFLQQLAGKVVLWSREESLAEVVCLEMVDLPLTGAQAELEGEFGKKAAIQDGLLGMFLKRLSSQLILLQAWTSHLWKMFYDARKPRSQIKNEINIDTLARDEFNLQKMMVMVTASGKVS

SEQ ID NO: 58558 - protein, 159 aa, Homo sapiens
MKCLGQSKKEEVSFRKIFILQLVGLVLTYDFTNCDFEKIKAAYLSTISKDLITYMSGTKSTEFNNTVSCSNRPHCLTEIQSLTFNPTAGCASLAKEMFAMKTKAALAIWCPGYSETQINATQAMKKRRKRKVTTNKCLEQVSQLQGLWRRFNRPLLKQQ

SEQ ID NO: 58559 - protein, 307 aa, Homo sapiens
MHLAITMDRKKTIKVWNCQDRDALAVLPMPQPCYCMEAYLTKDGPFLMVGDAAGDIYTFTLPGLRDVSKVTAFQYGIVLLHCSPDKKWVFACGTYSRTLPQVFLTESLLRPSEGSVPLSTFLPHKLCASACWTPKVKNRITLMSQSSTGKKTEFITFDLTTKKTGGQTVIQAYEIASFQVAAHLKCPIWMGASDGYMIVFTSGPYLLLFSITGFLLQRFEDHQAAINNFWVDPCYVLTTSENSVHVYMWEEGGRHPYLRSCCHLENTWHDHTTDSCISSVMCDNASIVLRVRKVSDSSILVMYSLNT

SEQ ID NO: 58560 - protein, 30 aa, Homo sapiens
KNESSPIRYCSCVYITTYQSKKATPVSSSR

SEQ ID NO: 58561 - protein, 56 aa, Homo sapiens
MAPVGVEKKLLLGPNGPAVAAAGDLTSEEEEGQSLCCRPARTSWSSVKMVLVKQPS

SEQ ID NO: 58562 - protein, 77 aa, Homo sapiens
MLPCASCLPGSLLLWALLLLLLGSASPQDSEEPDSYTECTDGYEWDPDSQHCRGPAQETGCAQQAPLCRCQRVSDHP

SEQ ID NO: 58563 - protein, 99 aa, Homo sapiens
MASPDWGYDDKNGPEQWSKLYPIANGNNQSPVDIKTSETKHDTSLKPISVSYNPATAKEIINVGHSFHVNFEDNDNRSVLKGGPFSDSYRLFQFHFHWG

SEQ ID NO: 58564 - protein, 148 aa, Homo sapiens
MRVFLLCAYILLLMVSQLRAVSFPEDDEPLNTVDYHYSRQYPVFRGRPSGNESQHRLDFQLMLKIRDTLYIAGRDQVYTVNLNEMPKTEVIPNKKLTWRSRQQDRENCAMKGKHKDECHNFIKVFVPRNDEMVFVCGTNAFNPMCRYY

SEQ ID NO: 58565 - protein, 408 aa, Homo sapiens
LLQMHRLTVEGADFVPDPFFVELTESLLRLEWHIKGKYTCLGCLVECIGVEHILAIDKTIPSQILEVMGDQSLVPYASDLLETMFRNHKSHLKSQTAESSWIDQWHETWVSPLLFILCEGNLDQKSYVIDYYLPKLLSYSPESLQYMVKILQTSIDAKTGQEQSFPSLGSCNSRGALGALMACLRIARAHGHLQSATDTWENLVSDARIKQGLIHQHCQVRIDTLGLLCESNRSTEIVSMEEMQWIQFFITYNLNSQSPGVRQQICSLLKKLFCRIQESSQVLYKLEQSKSKREPENELTKQHPSVSLQQYKNFMSSICNSLFEALFPGSSYSTRFSALTILGSIAEVFHVPEGRIYTVYQLSHDIDVGRFQTLMECFTSTFEDVKILAFDLLMKLSKTAVHFQLSNA

SEQ ID NO: 58566 - protein, 105 aa, Homo sapiens
MERWAMRVNELYVDDPDKDSGGKIDVSLNISLPNLHCELVGLDIQDEMGRHEVGHIDNSMKIPLNNGAGCRFEGQFSINKVPGNFHVSTHSATAQPQNPDMTHVI

SEQ ID NO: 58567 - protein, 442 aa, Homo sapiens
LIHAGSALAANVCKKITGRLTSAIAKQEDVSVQLEALDIMADMLSRQGGLLVNFHPSILTCLLPQLTSPRLAVRKRTIIALGHLVMSCGNIVFVDLIEHLLSELSKNDSMSTTRTYIQCIAAISRQAGHRIGEYLEKIIPLVVKFCNVDDDELREYCIQAFESFVRRCPKEVYPHVSTIINICLKYLTYDPNYNYDDEDEDENAMDADGGDDDDQGSDDEYSDDDDMSWKVRRAAAKCLDAVVSTRHEMLPEFYKTVSPALISRFKEREENVKADVFHAYLSLLKQTRPVQSWLCDPDAMEQGETPLTMLQSQVPNIVKALHKQMKEKSVKTRQCCFNMLTELVNVLPGALTQHIPVLVPGIIFSLNDKSSSSNLKIDALSCLYVILCNHSPQVFHPHVQALVPPVVACVGDPFYKITSEALLVTQQLVKAHHMPEAQWLRL

SEQ ID NO: 58568 - protein, 113 aa, Homo sapiens
TLLEVLGYNGCLVPAMRLHATCLTLLDLVYLLHEPIYESLLRASIENSTPSQLQGEKFTSVKEDFMLLAVGIIAASAFIQNHECWSQVCTTEQDQHGCGAFAEHHWYCLGKHC

SEQ ID NO: 58569 - protein, 91 aa, Homo sapiens
MASRCWRWWGWSAWPRTRLPPAGSTPSFCHHFSTQEKTPQICVVGSGPAGFYTAQHLLKLPPCSPAAPPGPRGHLRETACALWPGALWCGA

SEQ ID NO: 58570 - protein, 54 aa, Homo sapiens
MTERFDCHHCNESLFGKKYILREESPYCVVCFETLFANTCEECGKPIGCDCKAC

SEQ ID NO: 58571 - protein, 322 aa, Homo sapiens
MDFLLLQDPASTCVPEPASQHTLRSGPGCLQQPEQQGVRDPGGIWAKLGAAEASAERLQGRRSRGASGSEPQQMGSDVRDLNALLPAVPSLGGGGGCALPVSGAAQWAPVLDFAPPGASAYGSLGGPAPPPAPPPPPPPPPHSFIKQEPSWGGAEPHEEQCLSAFTVHFSGQFTGTAGACRYGPFGPPPPSQASSGQARMFPNAPYLPSCLESQPAIRNQGYSTVTFDGTPSYGHTPSHHAAQFPNHSFKHEDPMGQQGSLGEQQYSVPPPVYGCHTPTDSCTGSQALLLRTPYSSDNLYQMTSQLECMTWNQMNLGATLKG

SEQ ID NO: 58572 - protein, 228 aa, Homo sapiens
MTSKGPEEEHPSVTLFRQYLRIRTVQPKPDYGAAVAFFEETARQLGLGCQKVETTYPPDHLQVAPGYVVTVLTWPGTNPTLSSILLNSHTDVVPVFKEHWSHDPFEAFKDSEGYIYARGAQDMKCVSIQYLEAVRRLKVEGHRFPRTIHMTFVPDEEVGGHQGMELFVQRPEFHALRAGFALDEGIANPTDAFTVFYSERSPWWVRVTSTGRPGHASRFMEDTAAEKL

SEQ ID NO: 58573 - protein, 39 aa, Homo sapiens
MSTEKVDQKEEAGEKEVCGDQIKGPDKEEMPTGPRSCGR

SEQ ID NO: 58574 - protein, 418 aa, Homo sapiens
MASALTDRTSRAPSTYTYTSRPRALPCQRSRYRDSLTQPDEEPMHYGNIMYDRRVIRGNTYALQTGPLLGRPDSLELQRQREARKRALARKQAQEQLRPQTPEPVEGRKHVDVQTELYLEEIADRIIEVDMECQTDAFLDRPPTPLFIPAKTGKDVATQILEGELFDFDLEVKPVLEVLVGKTIEQSLLEVMEEEELANLRASQREYEELRNSERAEVQRLEEQERRHREEKERRKKQQWEIMHKHNETSQKIAARAFAQRYLADLLPSVFGSLRDSGYFYDPIERDIEIGFLPWLMNEVEKTMEYSMVGRTVLDMLIREVVEKRLCMYEHGEDTHQSPEPEDEPGGPGAMTESLEASEFLEQSMSQTRELLLDGGYLQRTTYDRRSSQERKFMEERELLGQDEETAMRKSLGEEELS

SEQ ID NO: 58575 - protein, 38 aa, Homo sapiens
MADLANEDGVSPCWPGWSPSPDLVICPPRPPKVLGLQA

SEQ ID NO: 58576 - protein, 654 aa, Homo sapiens
MLQFVSNQVGEFPDLFSEQLCSSFPGSGGSGSSSGSSGSSSSSSNGRGSSSGAVDPSVQRSFTQVTLPSFSPSAASPQAPTLQVKVSPTSVPTTPRATPILQPRPQPQPQPQTQLQQQTVMITPTFSTTPQTRIIQQPLIYQNAATSFQVLQPQVQSLVTSSQVQPVTIQQQVQTVQAQRVLTQTANGTLQTLAPATVQTVAAPQVQQVPVLVQPQIIKTDSLVLTTLKTDGSPVMAAVQNPALTALTTPIQTAALQVPTLVGSSGTILTTMPVMMGQEKVPIKQVPGGVKQLEPPKEGERRTTHNIIEKRYRSSINDKIIELKDLVMGTDAKMHKSGVLRKAIDYIKYLQQVNHKLRQENMVLKLANQKNKLLKGIDLGSLVDNEVDLKIEDFNQNVLLMSPPASDSGSQAGFSPYSIDSEPGSPLLDDAKVKDEPDSPPVALGMVDRSRILLCVLTFLCLSFNPLTSLLQWGGAHDSDQHPHSGSGRSVLSFESGSGGWFDWMMPTLLLWLVNGVIVLSVFVKLLVHGEPVIRPHSRSSVTFWRHRKQADLDLARGVYGKKSGATHSIEEELNIHISRGTRTRTLLSSRRFCSCCRQPTNLPGSFGPGTAHLPPGPGLQPLLERDPLQPAEATPGALAAQESLPVPAGHASH

SEQ ID NO: 58577 - protein, 92 aa, Homo sapiens
MSTLFPSLFPRVTETLWFNLDRPCVEETELQQQEQQHQAWLQSIAEKDNNLVPIGKPASEACRAYRLCPAHQHYDDEEEEDDEDDEDSEEDS

SEQ ID NO: 58578 - protein, 219 aa, Homo sapiens
VCLTLTAKRMARKNCLVKNLEAVETLGSTSTICSDKTGTLTQNRMTVAHMWFDMTVYEADTTEEQTGKTFTKSSDTWFMLARIAGLCNRADFKANQEILPIAKRATTGDASESALLKFIEQSYSSVAEMREKNPKVAEIPFNSTNKYQVQNPQRRPSGHFLSITRGTPWRAPFHTSEIKRKCKTHISLSLLRVVPSGSFHECALSLPHHSHKDSHAQPH

SEQ ID NO: 58579 - protein, 183 aa, Homo sapiens
RNANGRSPNNSDKTFLSKFSSQEITLVKPRFYIESISFLKDKTTVELFFLNAKACVHKGQIEVESETIFKLAAFILQEAKGDYTSDENARKDLKTLPAFPTKTLQEHPSLAYCEDRVIEHYLKIKGLTRGQAVVQYMKIVEALPTYGVHYYAVKDKQGLPWWLGISYKGIGQYDIQDKVKPRK

SEQ ID NO: 58580 - protein, 1203 aa, Homo sapiens
MENCSAASTFLTDSLELELGTEWCKPPYFSCAVDNRGGGKHFSGESYLCSGALKRLILNLDPLPTNFEEDTLEIFGIQWVTETALVNSSRELFHLFRQQLYNLETLLQSSCDFGKVSTLHCKADNIRQQCVLFLHYVKVFIFRYLKVQNAESHVPVHPYEALEAQLPSVLIDELHGLLLYIGHLSELPSVNIGAFVNQNQIKLFPPSWHLLHLHLDIHWLVLEILYMLGEKLKQVVYGHQFMNLASDNLTNISLFEEHCETLLCDLISLSLNRYDKVRSSESLMSDQCPCLCIKELWVLLIHLLDHRSKWFVSESFWNWLNKLLKTLLEKSSDRRRSSMPVIQSRDPLGFSWWIITHVASFYKFDRHGVPDEMRKVESNWNFVEELLKKSISVQNSSFSISWLPFKGLANTMKSPLSMLEMVKTCCCDKQDQELYKSSSSYTIFLCILAKVVKKAMKSNGPHPWKQVKGRIYSKFHQKRMEELTEVGLQNFFSLFLLLAAVAEVEDVASHVLDLLNFLKPAFVTSQRALIWKGHMAFLLMYAQKNLDIGVLAEKFSCAFREKAKEFLVSKNEEMVQRQTIWTLLSIYIDGVQEVFETSYCLYPSHEKLLNDGFSMLLRACRESELRTVLSFLQAVLARIRSMHQQLCQELQRDNVDLFVQSSLSAKERHLAAVASALWRHFFSFLKSQRMSQVVPFSQLADAAADFTLLAMDMPSTAPSDFQPQPVISIIQLFGWDDIICPQVVARYLSHVLQNSTLCEALSHSGYVSFQALTVRSWIRCVLQMYIKNLSGPDDLLIDKNLEEAVEKEYMKQLVKLTRLLFNLSEVKSIFSKAQVEYLSISEDPKKALVRFFEAVGVTYGNVQTLSDKSAMVTKSLEYLGEVLKYIKPYLGKKVFSAGLQLTYGMMGILVKSWAQIFATSKAQKLLFRIIDCLLLPHAVLQQEKELPAPMLSAIQKSLPLYLQGMCIVCCQSQNPNAYLNQLLGNVIEQYIGRFLPASPYVSDLGQHPVLLALRNTATIPPISSLKKCIVQVIRKSYLEYKGSSPPPRLASILAFILQLFKETNTDIYEVELLLPGILKCLVLVSEPQVKRLATENLQYMVKACQVGSEEEPSSQLTSVFRQFIQDYGMRYYYQVYSILETVATLDQQVVIHLISTLTQSLKDSEQKWGLGRNIAQREAYSKLLSHLGQMGQDEMQRLENDNT

SEQ ID NO: 58581 - protein, 84 aa, Homo sapiens
MVKEPVEDTDPSTLSFNMSDKYPIQDTELPKAEECDTITLNCPRNSDMKNQGEENGFPDSTGDPLPEISKDNSCKENCTCSSCL

SEQ ID NO: 58582 - protein, 97 aa, Homo sapiens
MAAHEWDWFQREELIGQISDIRVQNLQVERENVQKRTFTRWINLHLEKCNPPLEVKDLFVDIQDGKILMALLEVLSGRNLSPGHQLLCPWWASTGSL

SEQ ID NO: 58583 - protein, 128 aa, Homo sapiens
MKPKLMYQELKVPAEEPANELPMNEIEAWKAAEKKARWVLLVLILAVVGFGALMTQLFLWEYGDLHLFGPNQRPAPCYDPCEAVLVESIPEGLDFPNASTGNPSTSQAWLGLLAGAHSSLDIASFYWT

SEQ ID NO: 58584 - protein, 188 aa, Homo sapiens
MRPLIAKKNPKIPMSKMMTILGAKWREFSANNPFKGSAAAVAAAAAAAAAAVAEQVSAAVSSATPIAPSGPPALPPPPAADIQPPPIRRAKTKEGKGPGHKRRSKSPRVPDGRKKLRGKKMAPLKIKLGLLGGKRKKGGSYVFQSDEGPEPEAEESDLDSGSVHSASGRPDGPVRTKKLKRGRPGRKK

SEQ ID NO: 58585 - protein, 711 aa, Homo sapiens
MSGSRKEFDVKQILKIRWRWFGHQASSPNSTVDSQQGEFWNRGQTGANGGRKFLDPCSLQLPLASIGYRRSSQLDFQNSPSWPMASTSEVPAFEFTAEDCGGAHWLDRPEVDDGTSEEENESDSSSCRTSNSSQTLSSCHTMEPCTSDEFFQALNHAEQTFKKMENYLRHKQLCDVILVAGDRRIPAHRLVLSSVSDYFAAMFTNDVREARQEEIKMEGVEPNSLWSLIQYAYTGRLELKEDNIECLLSTACLLQLSQVVEACCKFLMKQLHPSNCLGIRSFADAQGCTDLHKVAHNYTMEHFMEVIRNQEFVLLPASEIAKLLASDDMNIPNEETILNALLTWVRHDLEQRRKDLSKLLAYIRLPLLAPQFLADMENNVLFRDDIECQKLIMEAMKYHLLPERRPMLQSPRTKPRKSTVGTLFAVGGMDSTKGATSIEKYDLRTNMWTPVANMNGRRLQFGVAVLDDKLYVVGGRDGLKTLNTVECYNPKTKTWSVMPPMSTHRHGLGVAVLEGPMYAVGGHDGWSYLNTVERWDPQARQWNFVATMSTPRSTVGVAVLSGKLYAVGGRDGSSCLKSVECFDPHTNKWTLCAQMSKRRGGVGVTTWNGLLYAIGGHDAPASNLTSRLSDCVERYDPKTDMWTAVASMSISRDAVGVCLLGDKLYAVGGYDGQAYLNTVEAYDPQTNEWTQVWHSCFIITLTLFLLKQFLW

SEQ ID NO: 58586 - protein, 139 aa, Homo sapiens
MSRRKQTNPNKVHWDQVFAGLEEQARQAMMKTDFPGDLGSQRQAIQQLRDQDSSSSDSEGDEEETTQDEVSSHTSEEDGGVVKVEKELENTEQPVGGNEVVEHEVTGNLNSDPLLELCQCPLCQLDCGSREQLIAHVYQ

SEQ ID NO: 58587 - protein, 284 aa, Homo sapiens
MAGRLLGKALAAVSLSLALASVTIRSSRCRGIQAFRNSFSSSWFHLNTNVMSGSNGSKENSHNKARTSPYPGSKVERSQVPNEKVGWLVEWQDYKPVEYTAVSVLAGPRWADPQIRNPAGRTGLVGRGLLGRWGPNHAADPIITRWKRDSSGNKIMHPVSGKHILQFVAIKRKDCGEWAIPGGMVDPGEKISATLKREFGEEALNSLQKTSAEKREIEEKLHKLFSQDHLVIYKGYVDDPRNTDNAWMETEAVNYHDETGEIMDNLMLEAGDDAGKVKWVDIND

SEQ ID NO: 58588 - protein, 36 aa, Homo sapiens
MELKQSLSTHLEAEKPLRRYGAVEETAWKTERLGRS

SEQ ID NO: 58589 - protein, 143 aa, Homo sapiens
MEPSALRKAGSEQEEGFEGLPRRVTDLGMVSNLRRSNSSLFKSWRLQCPFGNNDKQESLSSWIPENIKKKECVYFVESSKLSDAGKVVCQCGYTHEQHLEEATKPHTFQGTQWDPKKHVQEMPTDAFGDIVFTGLSQKVKKYV

SEQ ID NO: 58590 - protein, 133 aa, Homo sapiens
MSLTSWFLVSSGGTRHRLPREMIFVGRDDCELMLQSRSVDKQHAVINYDASTDEHLVKDLGSLNGTFVNDVRIPEQTYITLKLEDKLRFGYDTNLFTVVQGEMRVPEEALKHEKFTIQLQLSQKSSESELSKS

SEQ ID NO: 58591 - protein, 128 aa, Homo sapiens
KRRRTQAAGDSGWDMISQRSAGGRPGSGPQLGTGRGTLRLRSRGPATVEDLPSAFEEKAIEKVDDLLESYMGIRDTELAATMVELGKDKRNPDELAEALDERLGDFAFPDEFVFDVWGAIGDAKVGRY

SEQ ID NO: 58592 - protein, 410 aa, Homo sapiens
MTLDVGPEDELPDWAAAKEFYQKYDPKDVIGRGVSSVVRRCVHRATGHEFAVKIMEVTAERLSPEQLEEVREATRRETHILRQVAGHPHIITLIDSYESSSFMFLVFDLMRKGELFDYLTEKVALSEKETRSIMRSLLEAVSFLHANNIVHRDLKPENILLDDNMQIRLSDFGFSCHLEPGEKLRELCGTPGYLAPEILKCSMDETHPGYGKEVDLLFPSWACGVILFTLLAGSPPFWHRRQILMLRMIMEGQYQFSSPEWDDRSSTVKDLISRLLQVDPEARLTAEQALQHPFFERCEGSQPWNLTPRQRFRVAVWTVLAAGRVALSTHRVRPLTKNALLRDPYALRSVRHLIDNCAFRLYGHWVKKGEQQNRAALFQHRPPGPFPIMGPEEEGDSAAITEDEAVLVLG

SEQ ID NO: 58593 - protein, 127 aa, Homo sapiens
PLQTYTAVYYVLADLVMLTLYFYYKFRTRPSLLSAPINSVLLFLMGMACATPLLSAAGPVAAPREAFRGRALLSVESGSKPFTRQEVIGFVIGSISSVLYLLSRLPQIRTNSCTPPVCQAPSWTLEP

SEQ ID NO: 58594 - protein, 11 aa, Homo sapiens
MSMTLGYWDIR

SEQ ID NO: 58595 - protein, 134 aa, Homo sapiens
MGAGPSLLLAALLLLLSGDGAVRCDTPANCTYLDLLGTWVFQVGSSGSQRDVNCSVMGPQEKKVVVYLQKLDTAYDDLGNSGHFTIIYNQGFEIVLNDYKWFAFFKRMDLILSSRPEFSGWIIAHCNLKTPGLK

SEQ ID NO: 58596 - protein, 1273 aa, Homo sapiens
MAQSKRHVYSRTPSGSRMSAEASARPLRVGSRVEVIGKGHRGTVAYVGATLFATGKWVGVILDEAKGKNDGTVQGRKYFTCDEGHGIFVRQSQIQVFEDGADTTSPETPDSSASKVLKREGTDTTAKTSKLRGLKPKKAPTARKTTTRRPKPTRPASTGVAGASSSLGPSGSASAGELSSSEPSTPAQTPLAAPIIPTPVLTSPGAVPPLPSPSKEEEGLRAQVRDLEEKLETLRLKRAEDKAKLKELEKHKIQLEQVQEWKSKMQEQQADLQRRLKEARKEAKEALEAKERYMEEMADTADAIEMATLDKEMAEERAESLQQEVEALKERVDELTTDLEILKAEIEEKGSDGAASSYQLKQLEEQNARLKDALVRMRDLSSSEKQEHVKLQKLMEKKNQELEVVRQQRERLQEELSQAESTIDELKEQVDAALGAEEMVEMLTDRNLNLEEKVRELRETVGDLEAMNEMNDELQENARETELELREQLDMAGARVREAQKRVEAAQETVADYQQTIKKYRQLTAHLQDVNRELTNQQEASVERQQQPPPETFDFKIKFAETKAHAKAIEMELRQMEVAQANRHMSLLTAFMPDSFLRPGGDHDCVLVLLLMPRLICKAELIRKQAQEKFELSENCSERPGLRGAAGEQLSFAAGLVYSLSLLQATLHRYEHALSQCSVDVYKKVGSLYPEMSAHERSLDFLIELLHKDQLDETVNVEPLTKAIKYYQHLYSIHLAEQPEDCTMQLADHIKFTQSALDCMSVEVGRLRAFLQGGQEATDIALLLRDLETSCSDIRQFCKKIRRRMPGTDAPGIPAALAFGPQVSDTLLDCRKHLTWVVAVLQEVAAAAAQLIAPLAENEGLLVAALEELAFKASEQIYGTPSSSPYECLRQSCNILISTMNKLATAMQEGEYDAERPPSKPPPVELRAAALRAEITDAEGLGLKLEDRETVIKELKKSLKIKGEELSEANVRLSLLEKKLDSAAKDADERIEKVQTRLEETQALLRKKEKEFEETMDALQADIDQLEAEKAELKQRLNSQSKRTIEGLRGPPPSGIATLVSGIAGGAIPGQAPGSVPGPGLVKDSPLLLQQISAMRLHISQLQHENSILKGAQMKASLASLPPLHVAKLSHEGPGSELPAGALYRKTSQLLETLNQLSTHTHVVDITRTSPAAKSPSAQLMEQVAQLKSLSDTVEKLKDEVLKETVSQRPGATVPTDFATFPSSAFLRAKEEQQDDTVYMGKVTFSCAAGFGQRHRLVLTQEQLHQLHSRLIS

SEQ ID NO: 58597 - protein, 119 aa, Homo sapiens
MREAAERRQQLQLEHDQALAVLSAKQQEIDLLQKAQVEAKKEHEGAVRLLESKVRELEEKCRTQSEQFNLLSRDLEKFRQHAGKIDLLGGSAVAPLDISTAPSKPFPQFMNGLATSLGK

SEQ ID NO: 58598 - protein, 114 aa, Homo sapiens
  MOD_RES (1)..(1): Any amino acid
XTASSEPAPASAAKQEKPAEKPAETPVATSPTATDSTSGDSSRSNLFEDATSALVTGQSYENMVTEIMSMGYEREQVIAALRASFNNPDRAVEYLLMIIVKTGNKKKKQPLLGK

SEQ ID NO: 58599 - protein, 288 aa, Homo sapiens
  MOD_RES (1)..(1): Any amino acid
XYFRALVNFTRSIEYSPQLEDAGSREFREVSEAVVDTLESEYLKIPGDQVVSVVFIKELDGWVFVELDVGSEGNADGAQIQEMLLRVISSGSVASYVTSPQGFQFRRLGTAQTPPPPPAAVAVAVTPVPQFPRACTEAEFACHSYNECVALEYRCDRRPDCRDMSDELNCEEPVLGISPTFSLLVETTSLPPRPETTIMRQPPVTHAPQPLLPGSVRPLPCGPQEAACRNGHCIPRDYLCDGQEDCEDGSDELDCGPPPPCEPNEFPCGNGHCALKLWRCDGDFDCED

SEQ ID NO: 58600 - protein, 463 aa, Homo sapiens
  MOD_RES (1)..(1): Any amino acid
XLALVLCTVDSRPPAQLALSHAGRLLASSTAASVPNTLRLELRGPQPRDEGFYSCSARSPLGQANTSLELRLEGVRVILAPEAAVPEGAPITVTCADPAAHAPTLYTWYHNGRWLQEGPAASLSFLVATRAHAGAYSCQAQDAQGTRSSRPAALQVLYAPQDAVLSSFRDSRARSMAVIQCTVDSEPPAELALSHDGKVLATSSGVHSLASGTGHVQVARNALRLQVQDVPAGDDTYVCTAQNLLGSISTIGRLQVEGARVVAEPGLDVPEGAALNLSCRLLGGPGPVGNSTFAWFWNDRRLHAEPVPTLAFTHVARAQAGMYHCLAELPTGAAASAPVMLRVLYPPKTPTMMVFVEPEGGLRGILDCRVDSEPLASLTLHLGSRLVASSQPQGAPAEPHIHVLASPNALRVDIEALRPSDQGEYICSASNVLGSASTSTYFGVRGEGRGLHLPGHSAQKPSS

SEQ ID NO: 58601 - protein, 188 aa, Homo sapiens
  MOD_RES (1)..(1): Any amino acid
XYTMSRSLDGASVNENHEIYMKDSMSAAEVGTGQYATTKGISQTNLITTVTPEKKAEEERDEEEDKRRKGEEVTPISAIRHEGKTDSERTDTAADGETTATESDQEEDAELKAQELEKTQDDLMKHQTNISELKRTFLETSTDTAVTNEWEKRLSTSPVRLAARQEDAPMIEPLVPEETKQSSGEKLM

SEQ ID NO: 58602 - protein, 622 aa, Homo sapiens
MNHFRKMEVINLTTLPMIPVDEHLAVSLVARNTMVKTVRKELENNPPSCLIGSMHQVNQKIADINLRTEPSANSLAIERFELEKKALREKTRSSPEDKVKRQRKSQYSCKGSELRHARSSVIKRKTADKNLLAELYQYSNFNSSKPNKLPNGVDFCDMVGNVVRAERDCLSGKHFCSGRELEKFLSSSSPRAIWLDSFWWIFHERYQPNKELQNNLFDRIAQHYALLLFRVPKSHSEEALLKRLPSLLSKAVYTSFCCCFPQSWFDTHEFKSDICNTMSLWISGTYPSPQSYDSWDYSELDPERFRREELMLYRRRLTKGREFSLFAGKRAFSQKPAQSRKFYHPQSSSANSPSEKTSSAKQNSEKSLRMQNTAKEHHCQTLVLKKPTQEVKRISEARECENMFPKKSCAACKSPELTSNLFNIYGKSPLIVYFLQNYASLQQHGKNVLIVRREKTTSTPDCTPTYTDVISETLCSMKKRKDNLNQLYQHHWTEWNYFDKHLKELQDNFSREMKNIDPKAADTKKANHMFIPPSAVNEESPDKKTKGSLQREIEFKGCSNKNHGKGRSVNMRGKEEREREEKQKLNISFHSLPSPEELHNLEPGSAYRIRDISATRWSGTRK

SEQ ID NO: 58603 - protein, 74 aa, Homo sapiens
MLRPRFLPPDDRTVREGERKAAKLHFSQLGNSENFLLEVEKSSREKTMKNCVTGESSASKVSANVDSRIEMASL

SEQ ID NO: 58604 - protein, 267 aa, Homo sapiens
KRSGAGPGGSGGGGARGAEEEPPPPLQAVLVADSFDRRFFPISKDQPRVLLPLANVALIDYTLEFLTATGVQETFVFCCWKAAQIKEHLLKSKWCRPTSLNVVRIITSELYRSLGDVLRDVDAKALVRSDFLLVYGDVISNINITRALEEHRLRRKLEKNVSVMTMIFKESSPSHPTRCHEDNVVVAVDSTTNRVLHFQKTQGLRRFAFPLSLFQGSSDGVEVRYDLLDCHISICSPQPTPLPFHRWHNSLQTTLTTKLEMTLCEVS

SEQ ID NO: 58605 - protein, 175 aa, Homo sapiens
MPYLGSEDVVKELKKALCNPHIQADRLRYRNVIQRVIRMSKLDQWGQAEVLNFLLRYQPRSEEELFDILNLLDSFLKSSSPGVVMGATKLFLILAKMFPHVQTDVLVRVKGPLLAACSSESRELCFVALCHVRQILHSLPGHFSSHYKKFFCSYSEPHYIKLQKVEVLCELVNDE

SEQ ID NO: 58606 - protein, 145 aa, Homo sapiens
MTMLQESFSFDDLSVDFTQKEWQLLDPSQKNLYKDVMLENYSSLVSLGYEVMKPDVIFKLEQGEEPWVGDGEIPSSDSPVSGCFLPHGETWSAVREKNEAMMKAKSRKSPDCVPVPGSSGLHVQVHLCPFHVLIVEFFCEILQIS

SEQ ID NO: 58607 - protein, 54 aa, Homo sapiens
  MOD_RES (1)..(1): Any amino acid
XSAGAQGAVTVVGGGGGGGGTEPVVEPPRPPRVCRDHVCLICWDPRAGTGQVIL

SEQ ID NO: 58608 - protein, 47 aa, Homo sapiens
  MOD_RES (1)..(1): Any amino acid
XSVWRQLNSCLARLGTPEALLGPKYFLSCPVVPGHAQVTVKARPAYS

SEQ ID NO: 58609 - protein, 56 aa, Homo sapiens
MTLHATRGAALLSWVNSLHVADPVEAVLQLQDCSIFIKIIDRIHGTEEGQQILKQP

SEQ ID NO: 58610 - protein, 162 aa, Homo sapiens
MRLGAQRPASVWSGGGAERGITLYKVVDCPVCKQQCFSKDIVENYFMRDSGSKAATDAQDANQCCTSCEDNAPATSYCVECSEPLCETCVEAHQRVKYTKDHTVRSTGPAKSRDGERTVYCNVHKHEPLVLFCESCDTLTCRDCQLNAHKDHQYQFLEDAVR

SEQ ID NO: 58611 - protein, 159 aa, Homo sapiens
  MOD_RES (1)..(1): Any amino acid
XRPPRPPPRGTPPRRHSFRKHLYLLRGLPGSGKTTLARQLQHDFPRALIFSTDDFFFREDGAYEFNPDFLEEAHEWNQKRARKAMRNGISPIIIDNTNLHAWEMKPYAVMALENNYEVIFREPDTRWKFNVQELARRNIHGVSREKIHRMKERLESDLM

SEQ ID NO: 58612 - protein, 65 aa, Homo sapiens
  MOD_RES (1)..(1): Any amino acid
XWTEQSVDYRHKFSLPSVDGQKRYTFRVRSRFNPLCGSAQHWSEWSHPIHWGSNTSKGRCPEFPP

SEQ ID NO: 58613 - protein, 96 aa, Homo sapiens
  MOD_RES (1)..(1): Any amino acid
XLATTIPVPCGAFMPVFVIAFGRLVGESMAAWFPDGIHTDSSTYRIVPGGYAVVGAAALAGAVTHTVSTAVIVFELTGQIAHILPVMIAVILANAV

SEQ ID NO: 58614 - protein, 272 aa, Homo sapiens
MLHNLEHSMGMHSYDLGMNHLGDMTSEEVMSLMSSLRVPSQWQRNITYKSNPNRILPDSVDWREKGCVTEVKYQGSCGACWAFSAVGALEAQLKLKTGKLVSLSAQNLVDCSTEKYGNKGCNGGFMTTAFQYIIDNKGIDSDASYPYKAMDQKCQYDSKYRAATCSKYTELPYGREDVLKEAVANKGPVSVGVDARHPSFFLYRSGVYYEPSCTQNVNHGVLVVGYGDLNGKEYWLVKNSWGHNFGEEGYIRMARNKGNHCGIASFPSYPEI

SEQ ID NO: 58615 - protein, 492 aa, Homo sapiens
MAFPHLQQPSFLLASLKADSINKPFAQQCQDLVKVIEDFPAKELHTIFPWLVESIFGSLDGVLVGWNLRCLQGRVNPVEYSIVMEFLDPGGPMMKLVYKLQAEDYKFDFPVSYLPGPVKASIQECILPDSPLYHNKVQFTPTGGLGLNLALNPFEYYIFFFALSLITQKPLPVSLHVRTSDCAYFILVDRYLSWFLPTEGSVPPPLSSSPGGTSPSPPPRTPAIPFASYGLHHTSLLKRHISHQTSVNADPASHEIWRSETLLQVFVEMWLHHYSLEMYQKMQSPHAKLEVLHYRLSVSSALYSPAQPSLQALHAYQESFTPTEEHVLVVRLLLKHLHAFANSLKPEQASPSAHSHATSPLEEFKRAAVPRFVQQKLYLFLQHCFGHWPLDASFRAGRFLPLPDQGVLCPLGWEKPTLASGGPARAKPHRAVHVSPAPSGGSEKSQSHPAAAWYLGSRPPSIWPPATEPLAHTSPTGPGDVAELPAAVAVRA

SEQ ID NO: 58616 - protein, 144 aa, Homo sapiens
MLLHSLPCFIEKDLKEALTQFIEEESLSDYDRDAEASLAAVKSGEVDLHQLASTWAKAYAETTLEHARPEEPSWDEDFADVYHDLIHSPASETLLNLEHNYFVSISELIGERDVELKKLRERQGIEMEKVMQELGKSLTDQDVN

SEQ ID NO: 58617 - protein, 171 aa, Homo sapiens
MRWILFIGALIGSSICGQEKFFGDQVLRINVRNGDEISKLSQLVNSNNLKLNFWKSPSSFNRPVDVLVPSVSLQAFKSFLRSQGLEYAVTIEDLQALLDNEDDEMQHNEGQERSSNNFNYGAYHSLEAIYHEMDNIAADFPDLARRVKIGHSFENRPMYVLKIVSDYQRDP

SEQ ID NO: 58618 - protein, 113 aa, Homo sapiens
MMDLKEEKPRARELRISRGFDLASFNPHGISTFIDNDDTVYLFVVNHPEFKNTVEIFKFEEAENSLLHLKTVKHELLPSVNDITAVGPAHFYATNDHYFSDPFLKYLETYLNL

SEQ ID NO: 58619 - protein, 125 aa, Homo sapiens
MAGNVVTGEMVEELILSGADIIKVGIGPGSVCTTRKKTGVGYPQLSAVMECADAAHGLKGHIISDGGCSCPGDVAKAFGAGADFVMLGGMLAGHSESGGELIERDGKKYKLFYGMSSEMAMKKYA

SEQ ID NO: 58620 - protein, 70 aa, Homo sapiens
MNTPNGNSLSAAELTCGMIMCLARPETFRDQEITFPMARPAFPPAGGGSGGIYLCSNSSLQFPSELSGIH

SEQ ID NO: 58621 - protein, 184 aa, Homo sapiens
  MOD_RES (1)..(1): Any amino acid
XTQDFARNQVSSQTPQQPPTSTFQNSPSALVSTPVRTKTSNRYSPESQAQSVHHQRPGSRVSPENLVDKSRGRPGKSPERSHVSSEPYEPISPPQVPVVHEKQDSLLLLSQRGAEPAEQRNDARSPGSISYLPSFFTKLENTSPMVKSKKQEIFRKLNSSGGGDSDMAAAQPGTEIFNLPAVTT

SEQ ID NO: 58622 - protein, 46 aa, Homo sapiens
MQVHKETIDAVPNAIPGRTDIELEIYGMEGIPEKDMDERRRLLEQK

SEQ ID NO: 58623 - protein, 268 aa, Homo sapiens
MLLKEYRICMPLTVDEYKIGQLYMISKHSHEQSDRGEGVEVVQNEPFEDPHHGNGQFTEKRVYLNSKLPSWARAVVPKIFYVTEKAWNYYPYTITEYTCSFLPKFSIHIETKYEDNKGSNDTIFDNEAKDVEREVCFIDIACDEIPERYYKESEDPKHFKSEKTGRGQLREGWRDSHQPIMCSYKLVTVKFEVWGLQTRVEQFVHKVVRDILLIGHRQAFAWVDEWYDMTMDDVREYEKNMHEQTNIKVCNQHSSPVDDIESHAQTST

SEQ ID NO: 58624 - protein, 126 aa, Homo sapiens
MAQLEGYYFSAALSCTFLVSCLLFSAFSRALREPYMDEIFHLPQAQRYCEGHFSLSQWDPMITTLPGLYLVSIGVIKPAIWIFGWSEHVVCSIGMLRFVNLLFSVGNFYLLYLLFCKVQPRNKEYF

SEQ ID NO: 58625 - protein, 436 aa, Homo sapiens
  MOD_RES (1)..(1): Any amino acid
XSRLRASMWIDRSTRAVSVHFTLYNPPTQLFTSVSLRVEILPTGSLVPSSLVESFSIFRSDSALQYHLMLPQLVFLALSLIHLCVQLYRMMDKGVLSYWRKPRNWLELSVVGVSLTYYAVSGHLVTLAGDVTNQFHRGLCRAFMDLTLMASWNQRARWLRGILLFLFTLKCVYLPGIQNTMASCSSMMRHSLPSIFVAGLVGALMLAALSHLHRFLLSMWVLPPGTFTDAFPGLLFHFPRRSQKDCLLGLSKSDQRAMACYFGILLIVSATLCFGMLRGFLMTLPQKRKSFQSKSFVRLKDVTAYMWEKVLTFLRLETPKLEEAEMVENHNYYLDEFANLLDELLMKINGLSDSLQLPLLEKTSNNTGEARTEESPLVDISSYQAAESLTLVTQTEVQWHDLGSLQPPHPRFKQFSCLSLPSSWDYRRVPLCLANF

SEQ ID NO: 58626 - protein, 151 aa, Homo sapiens
DLSQKLEELQRHYSTLEEQRDHVIASKTGAESKITALEQKEQELQALIQQLSIDLQKVTAETQEKEDVITHLQEKVASLEKRLEQNLSGEEHLQELLKEKTLAEQNLEDTRQQLLAARSSQAKAINTLETRVRELEQTLLWSSSSWSAPRR

SEQ ID NO: 58627 - protein, 58 aa, Homo sapiens
VSDEILFQIYQPREPLHFSKFLDPDFQPSCSEVDLIGFVVSVVKKTVSYQWKIEDMII

SEQ ID NO: 58628 - protein, 60 aa, Homo sapiens
  MOD_RES (1)..(1): Any amino acid
XRYKAGEKEPDPKTWKANFRCAMNSLPDIEEVKDQSRNKGSSAVRVYRMLPPLTKNQRKG

SEQ ID NO: 58629 - protein, 151 aa, Homo sapiens
  MOD_RES (1)..(1): Any amino acid
XRQDDCMVLKEFLRANSPTMDKLLADSKTAQKAEQEVEQWKKEAAAQEAGADTPGKGEPPAPKSPPKARRPQMDLISELKRRQQKEPLIYESDRDGAIEDIITGKGLARPWSYPQSVLLCFLLTQCAILWGTGCHTASCYLFCFSFLFPFS

SEQ ID NO: 58630 - protein, 37 aa, Homo sapiens
EIHRKVMSQNFTNCHTKIRHVDAHATLNDGVVVQIPR

SEQ ID NO: 58631 - protein, 457 aa, Homo sapiens
MAGPAPPAADELPGPAARRLYSRMEASCLELALEGERLCKAGDFKTGVAFFEAAVQVGTEDLKTLSAIYSQLGNAYFYLKEHGRALEYHKHDLLLARTIGDRMGEAKASGNLGNTLKVLGRFDEAAVCCQRHLSIAQEQGDKVGEARALYNIGNVYHAKGKQLSWNAANATQDPGHLPPDVRETLCKASEFYERNLSLVKELGDRAAQGRAYGNLGNTHYLLGNFTEATTFHKERLAIAKEFGDKAAERRAYSNLGNAHVFLGRFDVAAEYYKKTLQLSRQLRDQAVEAQACYSLGNTYTLLQDYERAAEYHLRHLLIAQELADRVGEGRACWSLGNAYVSMGRPAQALTFAKKHLQISQEIGDRHGELTARMNVAQLQLVLGRLTSPAASEKPDLAGYEAQGEFQGCGGVLLPTGTDRIRSCGGVGSRPGQHGGGGSRQKMAPTSQFFLASGTAQA

SEQ ID NO: 58632 - protein, 480 aa, Homo sapiens
MAAGGDHGSPDSYRSPLASRYASPEMCFVFSDRYKFRTWRQLWLWLAEAEQTLGLPITDEQIQEMKSNLENIDFKMAAEEEKRLRHDVMAHVHTFGHCCPKAAGIIHLGATSCYVGDNTDLIILRNALDLLLPKLARVISRLADFAKERASLPTLGFTHFQPAQLTTVGKRCCLWIQDLCMDLQNLKRVRDDLRFRGVKGTTGTQASFLQLFEGDDHKVEQLDKMVTEKAGFKRAFIITGQTYTRKVDIEVLSVLASLGASVHKICTDIRLLANLKEMEEPFEKQQIGSSAMPYKRNPMRSERCCSLARHLMTLVMDPLQTASVQWFERTLDDSANRRICLAEAFLTADTILNTLQNISEGLVVYPKVIERRIRQELPFMATENIIMAMVKAGGSRQDCHEKIRVLSQQAASVVKQEGGDNDLIERIQVDAYFSPIHSQLDHLLDPSSFTGRASQQVQRFLEEEVYPLLKPYESVMKVSF

SEQ ID NO: 58633 - protein, 239 aa, Homo sapiens
MWKDMEECQNKLSLIGTETLTDSNAQLSLLIMQVKCLTAELSQWQKKTPETIPLTEDVLITLGKEEFQKLRQDLEMVLSTKESKNEKLKEDLEREQRWLDEQQQIMESLNVLHSELKNKVETFSESRIFNELKTKMLNIKEYKEKLLSTLGEFLEDHFPLPDRSVKKKKKNIQESSVNLITLHEMLEILINRLFDVPHDPYVKISDSFWPPYVELLLRNGIALRHPEDPTRIRLEAFHQ

SEQ ID NO: 58634 - protein, 66 aa, Homo sapiens
MAAAVQESARIPDEYLLSLKFLFGSSATQALDLVDRQSITLISSPSGRRVYQRQGLTMLPRLVSNS

SEQ ID NO: 58635 - protein, 101 aa, Homo sapiens
MREYKLVVLGSGGVGKSALTVQFVQGIFVEKYDPTIEDSYRKQVEVDAQQCMLEILDTAGTEQFTAMRDLYMKNGQGFALVYSITAQSTFNDLQDLREQIL

SEQ ID NO: 58636 - protein, 117 aa, Homo sapiens [sequence omitted]

SEQ ID NO: 58637 - protein, 93 aa, Homo sapiens
MRKGVLKDPEIADLFYKDDPEELFIGLHEIGHGSFGAVYFATNAHTSEVVAIKKMSYSGKQTHEKWQDILKEVKFLRQLKHPNTIEYKGCYLK

SEQ ID NO: 58638 - protein, 59 aa, Homo sapiens
MVEDGAEELEDLVHFSVSELPSRGYGVMEEIRRQGKLCDVTLKCPGGSDQLCLQRQPCH

SEQ ID NO: 58639 - protein, 101 aa, Homo sapiens
  MOD_RES (1)..(1): Any amino acid
XALNFQTPGLPMDLQNGKFLDNGGSGYILKPHFLRESKSYFNPSNIKEGMPITLTIRLISGIQLPLTHSSSNKGYRRIPLFSRMGESLEPASLFVYVWYVR

SEQ ID NO: 58640 - protein, 98 aa, Homo sapiens
MELGGHWDMNSAPRLVSETAERKQEQKTGTEAEAADSGAVGARRFLLCLYLVGFLHGCAFIEPSCQVPWSKSNSCWNSRRRMFKEILRFEHYNQVPCH

SEQ ID NO: 58641 - protein, 83 aa, Homo sapiens
  MOD_RES (1)..(1): Any amino acid
XQKYHTVNGHNCEVRKALSKQEMASASSSQRGSNFGGGGSYNDFGNYNNQSSNFGPMKGGNFGGRSSGPYGGGGQYFAKPRNQ

SEQ ID NO: 58642 - protein, 396 aa, Homo sapiens
VITRKVNIQVGDVNDNAPTFHNQPYSVRIPENTPVGTPIFIVNATDPDLGAGGSVLYSFQPPSQFFAIDSARGIVTVIRELDYETTQAYQLTVNATDQDKTRPLSTLANLAIIITDVQDMDPIFINLPYSTNIYEHSPPGTTVRIITAIDQDKGRPRGIGYTIVSGNTNSIFALDYISGVLTLNGLLDRENPLYSHGFILTVKGTELNDDRTPSDATVTTTFNILVIDINDNAPEFNSSEYSVAITELAQVGFALPLFIQVVDKDENLGLNSMFEVYLVGNNSHHFIISPTSVQGKADIRIRVAIPLDYETVDRYDFDLFANESVPDHVGYAKVKITLINENDNRPIFSQPLYNISLYENVTVGTSVLTVLWEKFFCSNSSRFSSAQLVVSSWNQL

SEQ ID NO: 58643 - protein, 133 aa, Homo sapiens
MAEKLITQTFSHHNQLAQKTRREKRARQEAERREKAERAARLAKEAKSETSGPQIKELTDEEAERLQLEIDQKKDAENHEAQLKNGSLDSPGKQDTEEDEEEDEKDKGKLKPNLGNGADLPNYRWTQTLSELD

SEQ ID NO: 58644 - protein, 249 aa, Homo sapiens
  MOD_RES (1)..(1): Any amino acid
XNELPENILLELFTHVPARQLLLNCRLVCSLWRDLIDLMTLWKRKCLREGFITKDWDQPVADWKIFYFLRSLHRNLLRNPCAEEDMFAWQIDFNGGDRWKVESLPGAHGTDFPDPKVKKYFVTSYEFAARADCGCTYQLKVQLASADYFVLASFEPPPVTIQQWNNATWTEVSYTFSDYPRGVRYILFQHGGRDTQYWAGWYGPRVTNSSIVVSPKMTRNQASSEAQPGQKHGQEEAAQSPYRAVVQIF

SEQ ID NO: 58645 - protein, 2750 aa, Homo sapiens
MSDKMSSFLHIGDICSLYAEGSTNGFISTLGLVDDRCVVQPETGDLNNPPKKFRDCLFKLCPMNRYSAQKQFWKAAKPGANSTTDAVLLNKLHHAADLEKKQNETENRKLLGTVIQYGNVIQLLHLKSNKYLTVNKRLPALLEKNAMRVTLDEAGNEGSWFYIQPFYKLRSIGDSVVIGDKVVLNPVNAGQPLHASSHQLVDNPGCNEVNSVNCNTSWKIVLFMKWSDNKDDILKGGDVVRLFHAEQEKFLTCDEHRKKQHVFLRTTGRQSATSATSSKALWEVEVVQHDPCRGGAGYWNSLFRFKHLATGHYLAAEVDPDFEEECLEFQPSVDPDQDASRSRLRNAQEKMVYSLVSVPEGNDISSIFELDPTTLRGGDSLVPRNSYVRLRHLCTNTWVHSTNIPIDKEEEKPVMLKIGTSPVKEDKEAFAIVPVSPAEVRDLDFANDASKVLGSIAGKLEKGTITQNERRSVTKLLEDLVYFVTGGTNSGQDVLEVVFSKPNRERQKLMREQNILKQIFKLLQAPFTDCGDGPMLRLEELGDQRHAPFRHICRLCYRVLRHSQQDYRKNQEYIAKQFGFMQKQIGYDVLAEDTITALLHNNRKLLEKHITAAEIDTFVSLVRKNREPRFLDYLSDLCVSMNKSIPVTQELICKAVLNPTNADILIETKLVLSRFEFEGVSSTGENALEAGEDEEEVWLFWRDSNKEIRSKSVRELAQDAKEGQKEDRDVLSYYRYQLNLFARMCLDRQYLAINEISGQLDVDLILRCMSDENLPYDLRASFCRLMLHMHVDRDPQEQVTPVKYARLWSEIPSEIAIDDYDSSGASKDEIKERFAQTMEFVEEYLRDVVCQRFPFSDKEKNKLTFEVVNLARNLIYFGFYNFSDLLRLTKILLAILDCVHVTTIFPISKMAKGEENKGSNVMRSIHGVGELMTQVVLRGGGFLPMTPMAAAPEGNVKQAEPEKEDIMVMDTKLKIIEILQFILNVRLDYRISCLLCIFKREFDESNSQTSETSSGNSSQEGPSNVPGALDFEHIEEQAEGIFGGSEENTPLDLDDHGGRTFLRVLLHLTMHDYPPLVSGALQLLFRHFSQRQEVLQAFKQVQLLVTSQDVDNYKQIKQDLDQLRSIVEKSELWVYKGQGPDETMDGASGENEHKKTEEGNNKPQKHESTSSYNYRVVKEILIRLSKLCVQESASVRKSRKQQQRLLRNMGAHAVVLELLQIPYEKAEDTKMQEIMRLAHEFLQNFCAGNQQNQALLHKHINLFLNPGILEAVTMQHIFMNNFQLCSEINERVVQHFVHCIETHGRNVQYIKFLQTIVKAEGKFIKKCQDMVMAELVNSGEDVLVFYNDRASFQTLIQMMRSERDRMDENSPLMYHIHLVELLAVCTEGKNVYTEIKCNSLLPLDDIVRVVTHEDCIPEVKIAYINFLNHCYVDTEVEMKEIYTSNHMWKLFENFLVDICRACNNTSDRKHADSILEKYVTEIVMSIVTTFFSSPFSDQSTTLQTRQPVFVQLLQGVFRVYHCNWLMPSQKASVESCIRVLSDVAKSRAIAIPVDLDSQVNNLFLKSHSIVQKTAMNWRLSARNAARRDSVLAASRDYRNIIERLQDIVSALEDRLRPLVQAELSVLVDVLHRPELLFPENTDARRKCESGGFICKLIKHTKQLLEENEEKLCIKVLQTLREMMTKDRGYGEKLISIDELDNAELPPAPDSENATEQELEPSPPLRQLEDHKRGEALRQVLVNRYYGNVRPSGRRESLTSFGNGPLSAGGPGKPGGGGGGSGSSSMSRGEMSLAEVQCHLDKEGASNLVIDLIMNASSDRVFHESILLAIALLEGGNTTIQHSFFCRLTEDKKSEKFFKVFYDRMKVAQQEIKATVTVNTSDLGNKKKDDEVDRDAPSRKKAKEPTTQITEEVRDQLLEASAATRKAFTTFRREADPDDHYQPGEGTQATADKAKDDLEMSAVITIMQPILRFLQLLCENHNRDLQNFLRCQNNKTNYNLVCETLQFLDCICGSTTGGLGLLGLYINEKNVALINQTLESLTEYCQGPCHENQNCIATHESNGIDIITALILNDINPLGKKRMDLVLELKNNASKLLLAIMESRHDSENAERILYNMRPKELVEVIKKAYMQGEVEFEDGENGEDGAASPRNVGHNIYILAHQLARHNKELQSMLKPGGQVDGDEALEFYAKHTAQIEIVRLDRTMEQIVFPVPSICEFLTKESKLRIYYTTERDEQGSKINDFFLRSEDLFNEMNWQKKLRAQPVLYWCARNMSFWSSISFNLAVLMNLLVAFFYPFKGVRGGTLEPHWSGLLWTAMLISLAIVIALPKPHGIRALIASTILRLIFSVGLQPTLFLLGAFNVCNKIIFLMSFVGNCGTFTRGYRAMVLDVEFLYHLLYLVICAMGLFVHEFFYSLLLFDLVYREETLLNVIKSVTRNGRSIILTAVLALILVYLFSIVGYLFFKDDFILEVDRLPNETAVPETGESLASEFLFSDVCRVESGENCSSPAPREELVPAEETEQDKEHTCETLLMCIVTVLSHGLRSGGGVGDVLRKPSKEEPLFAARVIYDLLFFFMVIIIVLNLIFGVIIDTFADLRSEKQKKEEILKTTCFICGLERDKFDNKTVTFEEHIKEEHNMWHYLCFIVLVKVKDSTEYTGPESYVAEMIKERNLDWFPRMRAMSLVSSDSEGEQNELRNLQEKLESTMKLVTNLSGQLSELKDQMTEQRKQKQRIGLLGHPPHMNVNPQQPA

SEQ ID NO: 58646 - protein, 82 aa, Homo sapiens
ELRRAELVEIIVETEAQTGVSGINVAGGGKEGIFVRELREDSPAARSLSLQEAHCAHRGPGSAARDRVWLRDQGPAGQGGQA

SEQ ID NO: 58647 - protein, 92 aa, Homo sapiens
MAASAARGAAALRRSINQPVAFVRRIPWTAASSQLKEHFAQFGHVRRCILPFDKETGFHRGLGWVQFSSEEGLRNALQQENHIIDGVKCLFF

SEQ ID NO: 58648 - protein, 44 aa, Homo sapiens
MSTLFPSLFPRVTETLWFNLDRPCVEETELQQQEQQHQAWLQSI

SEQ ID NO: 58649 - protein, 158 aa, Homo sapiens
MELSAIGEQVFAVESIRKKRVRKGKVEYLVKWKGWPPKYSTWEPEEHILDPRLVMAYEEKEERDRASGYRKRGPKPKRLLLQEPPAPDVLQAAGEWEPAAQPPEEEADADLAEGPPPWTPALPSSEVTVTDITANSITVTFREAQAAEGFFRDRSGKF

SEQ ID NO: 58650 - protein, 39 aa, Homo sapiens
MSNYSVSLVGPAPWGFRLQGGKDFNMPLTISSSICCTQA

SEQ ID NO: 58651 - protein, 301 aa, Homo sapiens
MEKWYLMTVVVLIGLTVRWTVSLNSYSGAGKPPMFGDYEAQRHWQEITFNLPVKQWYFNSSDNNLQYWGLDYPPLTAYHSLLCAYVAKFINPDWIALHTSRGYESQAHKLFMRTTVLIADLLIYIPAVVLYCCCLKEISTKKKIANALCILLYPGLILIDYGHFQYNSVSLGFALWGVLGISCDCDLLGSLAFCLAINYKQMELYHALPFFCFLLGKCFKKGLKGKGFVLLVKLACIVVASFVLCWLPFFTEREQTLQVLRRLFPVDRGLFEDKVANIWCSFNVFLKIKDILPRHIQLIMS

SEQ ID NO: 58652 - protein, 830 aa, Homo sapiens
MNGHISNHPSSFGMYPSQMNGYGSSPTFSQTDREHGSKTSAKALYEQRKNYARDSVSSVSDISQYRVEHLTTFVLDRKDAMITVDDGIRKLKLLDAKGKVWTQDMILQVDDRAVSLIDLESKNELENFPLNTIQHCQAVMHSCSYDSVLALVCKEPTQNKPDLHLFQCDEVKANLISEDIESAISDSKGGKQKRRPDALRMISNADPSIPPPPRAPAPAPPGTVTQVDVRSRVAAWSAWAADQGDFEKPRQYHEQEETPEMMAARIDRDVQILNHILDDIEFFITKLQKAAEAFSELSKRKKNKKGKRKGPGEGVLTLRAKPPPPDEFLDCFQKFKHGFNLLAKLKSHIQNPSAADLVHFLFTPLNMVVQATGGPELASSVLSPLLNKDTIDFLNYTVNGDERQLWMSLGGTWMKARAEWPKEQFIPPYVPRFRNGWEPPMLNFMGATMEQDLYQLAESVANVAEHQRKQEIKRLSTEHSSVSEYHPADGYAFSSNIYTRGSHLDQGEAAVAFKPTSNRHIDRNYEPLKTQPKKYAKSKYDFVARNNSELSVLKDDILEILDDRKQWWKVRNASGDSGFVPNNILDIVRPPESGLGRADPPYTHTIQQLLGELSEKQRMEYGPRPADTPPAPSPPPTPAPVPVPLPPSTPAPVPVSKVPANITRQNSSSSDSGGSIVRDSQRHKQLPVDRRKSQMEEVQDELIHRLTIGRSAAQKKFHVPRQNVPVINITYDSTPEDVKTWLQSKGFNPVTVNSLGVLNGAQLFSLNKDELRTVCPEGARVYSQITVQKAALEDSSGSSELQEIMRRRQEKISAAASDSGVESFDEGSSH

SEQ ID NO: 58653 - protein, 859 aa, Homo sapiens
MAERGRLGLPGAPGALNTPVPMNLFATWEVDGSSPSCVPRLCSLTLKKLVVFKELEKELISVVIAVKMQYPHFLKREGNKLQIMLQRRKRYKNRTILGYKTLAAGSISMAEVMQHPSEGGQVLSLCSSIKEAPVKAAEIWIASLSSQPIDHEDSTMQAGPKAKSTDNYSEEEYESFSSEQEASDDAVQGQDLDEDDFDVGKPKKQRRSIVRTTSMTRQQNFKQKVVALLRRFKVSDEVLDSEQDPAEHIPEAEEDLDLLYDTLDMEHPSDSGPDMEDDDSVLSTPKPKLRPYFEGLSHSSSQTEIGSIHSARSHKEPPSPADVPEKTRSLGGRQPSDSVSDTVALGVPGPREHPGQPEDSPEAEASTLDVFTERLPPSGRITKTESLVIPSTRSEGKQAGRRGRSTSLKERQAARPQNERANSLDNERCPDARSQLQIPRKTVYDQLNHILISDDQLPENIILVNTSDWQGQFLSDVLQRHTLPVVCTCSPADVQAAFSTIVSRIQRYCNCNSQPPTPVKIAVAGAQHYLSAILRLFVEQLSHKTPDWLGYMRFLVIPLGSHPVARYLGSVDYRYNNFFQDLAWRDLFNKLEAQSAVQDTPDIVSRITQYIAGANCAHQLPIAEAMLTYKQKSPDEESSQKFIPFVGVVKVGIVEPSSATSGDSDDAAPSGSGTLSSTPPSASPAAKEASPTPPSSPSVSGGLSSPSQGVGAELMGLQVDYWTAAQPADRKRDAEKKDLPVTKNTLKCTFRSLQVSRLPSSGEAAATPTMSMTVVTKEKNKKVMFLPKKAKDKDVESKSQCIEGISRLICTARQQQNMLRVLIDGVECSDVKFFQLAAQWSSHVKHFPICIFGHSKATF

SEQ ID NO: 58654 - protein, 182 aa, Homo sapiens
MRPGGFLGAGQRLSRAMSRCVLEPRPPGKRWMVAGLGNPGLPGTRHSVGMAVLGQLARRLGVAESWTRDRHCAADLALAPLGDAQLVLLRPRRLMNANGRSVARAAELFGLTAEEVYLVHDELDKPLGRLALKLGGSARQCQGCGWVSGARRTLRRFRPMCWAASPLLSRSCCLCCWIEPPT

SEQ ID NO: 58655 - protein, 327 aa, Homo sapiens
  MOD_RES (1)..(1): Any amino acid
XVQKWVKFSSVSDGFNSDSTSHHGGKIPRKLANHVVDRVWQECNMNRAQNKRKYSASSGGLCEEATAAKVASWDFVEATQRTNCSCLRHKNLKSRNAGQQGQAPSLGQQQQILPKHKTNEKQEKSEKPQKRPLTPFHHRVSVSDDVGMDADSASQRLVISAPDSQVRFSNIRTNDVAKTPQMHGTEMANSPQPPPLSPHPCDVVDEGVTKTPSTPQSQHFYQMPTPDPLVPSKPMEDRIDSLSQSFPPQYQEAVEPTVYVGTAVNLEEDEANIAWKYYKFPKKKDVEFLPPQLPSDKFKDDPVGPFGQESVTSVTEYVFFLIVTIII

SEQ ID NO: 58656 - protein, 21 aa, Homo sapiens
MVSLVSGASGYSATSTSSFKK

SEQ ID NO: 58657 - protein, 1174 aa, Homo sapiens
MAVETLSPDWEFDRVDDGSQKIHAEVQLKNYGKFLEEYTSQLRRIEDALDDSIGDVWDFNLDPIALKLLPYEQSSLLELIKTENKVLNKVITVYAALCCEIKKLKYEAETKFYNGLLFYGEGATDASMVEGDCQIQMGRFISFLQELSCFVTRCYEVVMNVVHQLAALYISNKIAPKIIETTGVHFQTMYEHLGELLTVLLTLDEIIDNHITLKDHWTMYKRLLKSVHHNPSKFGIQEEKLKPFEKFLLKLEGQLLDGMIFQACIEQQFDSLNGGVSVSKNSTFAEEFAHSIRSIFANVEAKLGEPSEIDQRDKYVGICGLFVLHFQIFRTIDKKFYKSLLDICKKVPAITLTANIIWFPDNFLIQKIPAAAKLLDRKSLQAIKIHRDTFLQQKAQSLTKDVQSYYVFVSSWMMKMESILSKEQRMDKFAEDLTNRCNVFIQVGFLYAYSISTIIKTTMNLYMSMQKPMTKTSVKALCRLVELLKAIEHMFYRRSMVVADSVSHITQHLQHQALHSISVAKKRVISDKKYSEQRLDVLSALVLAENTLNGPSTKQRRLIVSLALSVGTQMKTFKDEELFPLQVVMKKLDLISELRERVQTQCDCCFLYWHRAVFPIYLDDVYENAVDAARLHYMFSALRDCVPAMMHARHLESYEILLDCYDKEIMEILNEHLLDKLCKEIEKDLRLSVHTHLKLDDRNPFKVGMKDLALFFSLNPIRFFNRFIDIRAYVTHYLDKTFYNLTTVALHDWATYSEMRNLATQRYGLVMTEAHLPSQTLEQGLDVLEIMRNIHIFVSRYLYNLNNQIFIERTSNNKHLNTINIRHIANSIRTHGTGIMNTTVNFTYQFLKKKFYIFSQFMYDEHIKSRLIKDIRFFREIKDQNDHKYPFDRAEKFNRGIRKLGVTPEGQSYLDQFRQLISQIGNAMGYVRMIRSGGLHCSSNAIRFVPDLEDIVNFEELVKEEGLAEETLKAARHLDSVLSDHTRNSAEGTEYFKMLVDVFAPEFRRPKNIHLRNFYIIVPPLTLNFVEHSISCKEKLNKKNKIGAAFTDDGFAMGVAYILKLLDQYREFDSLHWFQSVREKYLKEIRAVAKQQNVQSASQDEKLLQTMNLTQKRLDVYLQEFELLYFSLSSARIFFRADKTAAEENQEKKEKEEETKTSNGDLSDSTVSADPVVK

SEQ ID NO: 58658 - protein, 119 aa, Homo sapiens
  MOD_RES (1)..(1): Any amino acid
XLQAALGLGRAGWHWPAGRAASGGRGRAWLQPTGRETGVQVYNSLTGRKEPLIVAHAEAASWYSCGPTVYDHAHLGHACSYVRFDIIRRILTKVFGCSIVMVMGITDVDDKIIKRANEA

SEQ ID NO: 58659 - protein, 1065 aa, Homo sapiens
MTDPLLDSQPASSTGEMDGLCPELLLIPPPLSNRGILGPVQSPCPSRDPAPIPTEPGCLLVEATATEEGPGNMEIIVETVAGTLTPGAPGETPGVLVKVVEVYFCERCEQSFAEPTLLALHQCSETHIQPVQGLSSPPCSVELPPSNPTLPGPLQGQSPPVSPLSCPVCRQEFAQPQALKSHFKIHRGTPDTFSCPESGCVFSAEDRKGLQHHLRQTHRAVPVPCSFRGCPLLFGSQQGMELHRQAHYPFHCSHCSFIGSNVKLFRQHQRSHGAGTQGELSAVQGLPSQELLPAPKLPPGEREPSQEAGTPLPGQETAEEENVEKEEKSDTQKDSQKAVDKGQGAQRLEGDVVSGTESLFKTHMCPECKRCFKKRTHLVEHLHLHFPDPSLQCPNCQKFFTSKSKLKTHLLRELGEKAHHCPLCHYSAVERNALNRHMASMHEDISNFYSDTYACPVCREEFRLSQALKEHLKSHTAAAAAEPLPLRCFQEGCSYAAPDRKAFIKHLKETHGVRAVECRHHSCPMLFATAEAMEAHHKSHYAFHCPHCDFACSNKHLFRKHKKQGHPGSEELRCTFCPFATFNPVAYQDHVGKMHAHEKIHQCPECNFATAHKRVLIRHMLLHTGEKPHKCELCDFTCRDVSYLSKHMLTHSNTKDYMCTECGYVTKWKHYLRVHMRKHAGDLRYQCNQCSYRCHRADQLSSHKLRHQGKSLMCEVCAFACKRKYELQKHMASQHHPGTPAPLYPCHYCSYQSRHKQAVLSHENCKHTRLREFHCALCDYRTFSNTTLLFHKRKAHGYVPGDQAWQLRYASQEPEGAMQGPTPPPDSEPSNQLSARPEGPGHEPGTVVDPSLDQALPEMSEEVNTGRQEGSEAPHGGDLGGSPSPAEVEEGSCTLHLEALGVELESVTEPPLEEVTETAPMEFRPLGLEGPDGLEGPELSSFEGIGTSDLSAEENPLLEKPVSEPSTNPPSLEEAPNNWVGTFKTTPPAETAPLPPLPESESLLKALRRQDKEQAEALVLEGRVQMVVIQGEGRAFRCPHCPFITRREKALNLHSRTGCQGRREP

SEQ ID NO: 58660 - protein, 470 aa, Homo sapiens
MVPASRSREGPENMVRIALQLDDGSRLQDSFCSGQTLWELLSHFPQIRECLQHPGGATPVCVYTRDEVTGEAALRGTTLQSLGLTGGSATIRFVMKCYDPVGKTPGSLGSSASAGQAAASAPLPLESGELSRGDLSRPEDADTSGPCCEHTQEKQSTRAPAAAPFVPFSGGGQRLGGPPGPTRPLTSSSAKLPKSLSSPGGPSKPKKSKSGQDPQQEQEQERERDPQQEQERERPVDREPVDREPVVCHPDLEERLQAWPAELPDEFFELTVDDVRRRLAQLKSERKRLEEAPLVTKAFREAQIKEKLERYPKTESLSVAQAGVSGAISAHCKLRLPGSSGSPASASQVAGISGGSEGPVPRPLRPTGLLPPQRDSGGLARLREEPPGEPRAVILPVHHPSKNSPGRPHADPLSGEPLPGRSGALGSRGAGRCLPGAWPAGACHLPICGRCAGGQVHVQGRRVPFPIASP

SEQ ID NO: 58661 - protein, 13 aa, Homo sapiens
MEPSQCVEELEDD

SEQ ID NO: 58662 - protein, 254 aa, Homo sapiens [sequence omitted]

SEQ ID NO: 58663 - protein, 147 aa, Homo sapiens
  MOD_RES (1)..(1): Any amino acid
XTARGPEPEQMGLAPCCTQALCGLALRHHSHLQQIRLEFHRLSEENTLLKNDLGRVRQELEAAESTHDAQRKEIEVLKKDKEKACSEMEVLNRQNQNYKDQLSQLNVRVLQLGQEASTHQAQNEEHRVTIQMLTQSLEEVVRSGQQQ

SEQ ID NO: 58664 - protein, 771 aa, Homo sapiens
MAGRRAPGEKRWQLVRWYVQEGRFRIEERTLTAFQWLYSPQQHRILSRADLESPSRIDKTMLASLKVKKQELANSSDATLPDRPLSPPLTAPPTMKSSEFFEMLEKMQGIKLEEQKPGPQKNKDDYIPYPSIDEVVEKGGPYPQVILPQFGGYWIEDPENVGTPTSLGSSICEEEEEDNLSPNTFGYKLECKGEARAYRRHFLGKDHLNFYCTGSSLGNLILSVKCEEAEGIEYLRVILRSKLKTVHERIPLAGLSKLPSVPQIAKAFCDDAVGLRFNPVLYPKASQMIVSYDEHEVNNTFKFGVIYQKARQTLEEELFGNNEESPAFKEFLDLLGDTITLQDFKGFRGGLDVTHGQTGVESVYTTFRDREIMFHVSTKLPFTDGDAQQLQRKRHIGNDIVAIIFQEENTPFVPDMIASNFLHAYIVVQVETPGTETPSYKVSVTAREDVPTFGPPLPSPPVFQKGPEFREFLLTKLTNAENACCKSDKFAKLEDRTRAALLDNLHDELHAHTQAMLGLGPEEDKFENGGHGGFLESFKRAIRVRSHSMETMVGGQKKSHSGGIPGSLSGGISHNSMEVTKTTFSPPVVAATVKNQSRSPIKRRSGLFPRLHTGSEGQGDSRARCDSTSSTPKTPDGGHSSQEIKSETSSNPSSPEICPNKEKPFMKLKENGRAISRSSSSTSSVSSTAGEGEAMEEGDSGGSQPSTTSPFKQEVFVYSPSPSSESPSLGAAATPIIMSRSPTDAKSRNSPRSNLKFRFDKLSHASSGAGH

SEQ ID NO: 58665 - protein, 106 aa, Homo sapiens
MGDRERNKKRLLELLRAPDTGNAHCADCGAADPDWASYKLGIFICLNCCGVHRNFPDISRVKSVRLDFWDDSIVEFMIHNGNLRVKAKFEARVPAFYYIPQANDCL

SEQ ID NO: 58666 - protein, 175 aa, Homo sapiens
MATLSVIGSSSLIAYAVFHNIQKSPEIRPLFYLSFCDLLLGLCWLTETLLYGASVANKDIICYNLQAVGQIFYISSFLYTVNYIWYLYTELRMKHTQSGQSTSPLVIDYTCRVCQMAFVFSSLIPLLLMTPVFCLGNTSECFQNFSQSHKCILMHSPPSAMAELPPSANTSVCST

SEQ ID NO: 58667 - protein, 109 aa, Homo sapiens
MENMDDTSGSSFEDMGELHQRLREEEVDADAADAAAAEEEDGEFLGMKGFKGQLSRQVADQMWQAGKRQASRAFSLYANIDILRPYFDVEPAQVRSRLLESMIPIKMVN

SEQ ID NO: 58668 - protein, 184 aa, Homo sapiens
MEICADELKKVLNTVVNKHKDLKTHGFTLESCRSMIALMDTDGSGKLNLQEFHHLWNKIKAWQKIFKHYDTDQSGTINSYEMRNAVNDAGFHLNNQLYDIITMRYADKHMNIDFDSFICCFVRLEGMFRAFHAFDKDGDGIIKLNVLEVKHRHSTFPLHIKTQGGGVNGADWTQGVLLISTQWW

SEQ ID NO: 58669 - protein, 126 aa, Homo sapiens
  MOD_RES (1)..(1): Any amino acid
XALGPAGGLLGARGGSHLHLTPTPRRPPDLPGFSLGNQVSTSGKEVEVPEDEEDYTGVCHPECGDKGCDGPNADQCLNCVHFSLGSVKTSRKCVSVCPLGYFGDTAARRCRRCHKGCETCSSRAAT

SEQ ID NO: 58670 - protein, 500 aa, Homo sapiens
MVLAGLIRKLGHQLAEIRERALKSILCKIEHNLICYADLIQERQLFLHLLEWFNFPSVPMKEEVLNLLSRLVKYPPAVQHLVDVGAVEFLSKLRSNVEPNLQAEIDGILDGLFLLPSEVPALSSASYQTNQTELSKNPEILTGYFPQDKSNFQQMEVPPRPVVNQTVKCLKFSTFPWLPLTTTDRHVLSSNESSLRSSNHTLIWNTCELLKDVIMQDFPAEIFLQRPKIVQSLLSLLKLAFGDGKHRLALQSVSCLQQLCMYLRNRLNFHRDPGFFSNKHDTVSQNSSLSYCHEARGTHHSQNPSPGSSSPRPSVVGRTGQRPRGDGQDWDAASSSGSSSHAHVNSRISVHSPLDMGHIDLPELETEDTLELQFQQLSLPQFCVSILESAVPLLRTGSRQVIIRVLELLTEDMTLIGEAISTDIWDDSSLFGIDMKEKLLLVLGALGETMCYHKSSISLEQPEVMLVHHRMAFISISLFAVRLLQTLLPVEKLLWPIWNS

SEQ ID NO: 58671 - protein, 194 aa, Homo sapiens
  MOD_RES (1)..(1): Any amino acid
XIRQHSALTRLRLRNVFRRFLRDFQPGRLSQQMVMVKYLATLERLAPRFGTERVPVCHLRLLAQAEGEPCYIRDSGVAPTDPGPESAAGPPTHEVLVTGTGGIQWWPVEEEVNKEEELSLPSRAAALSFVSLVDGYFRLTADSSHYLCHEVAPPRLVMSIRDGIHGPLLEPFVQAKLRPEDGLYLIHWSTSHPY

SEQ ID NO: 58672 - protein, 82 aa, Homo sapiens
MAGPRGALLAWCRRQCEGYRGVEIRDLSSSFRDGLAFCAILHRHRPDLLDFDSLSKDNVFENNRLLVSRHPERALHPVPRRL

SEQ ID NO: 58673 - protein, 588 aa, Homo sapiens
MANVPWAEVCEKFQAALALSRVELHKNPEKEPYKSKYSARALLEEVKALLGPAPEDEDERPEAEDGPGAGDHALGLPAEVVEPEGPVAQRAVRLAVIEFHLGVNHIDTEELSAGEEHLVKCLRLLRRYRLSHDCISLCIQAQVGSPPLDPTERFLPEEEKLTEQERSKRFEKVYTHNLYYLAQVYQHLEMFEKAAHYCHSTLKRQLEHNAYHPIEWAINAATLSQFYINKLCFMEARHCLSAANVIFGQTGKISATEDTPEAEGEVPELYHQRKGEIARCWIKYCLTLMQNAQLSMQDNIGELDLDKQSELRALRKKELDEEESIRKKAVQFGTGELCDAISAVEEKVSYLRPLDFEEARELFLLGQHYVFEAKEFFQIDGYVTDHIEVVQDHSALFKVLAFFETDMERRCKMHKRRIAMLEPLTVDLNPQYYLLVNRQIQFEIAHAYYDMMDLKVAIADRLRDPDSHIVKKINNLNKSALKYYQLFLDSLRDPNKVFPEHIGEDVLRPAMLAKFRVARLYGKIITADPKKELENLATSLEHYKFIVDYCEKHPEAAQEIEVELELSKEMVSLLPTKMERFRTKMALT

SEQ ID NO: 58674 - protein, 70 aa, Homo sapiens
MLSVQPDTKPKGCAGCNRKIKDRYLLKALDKYWHEDCLKCACCDCRLGEVGSTLYTKANLILCRRDYLSI

SEQ ID NO: 58675 - protein, 1944 aa, Homo sapiens
MEEKKKKKQEEKKKKEGAQKKAADQKTKVPEPTKTCSSQPQPAGTSTSTSTSTISSSNNGKRASASGQQPAASRYLPREVPPRFRQQEQKQLLKRGQPLPTGTLTSVSPTQGAGPAGVSPPPLPGAGTQHHPSKLQPDLSHSGLADHYENSHWGQQPTYRSEANCSWDKVIIDRTDKEAWPSITGTETESASECTTDTDSASNCGSENSSMATGSAQGNFTGHTKKTNGNNGTNGALVQSPSNQSALGAGGANSNGSAARVWGVATGSSSGLAHCSVSGGDGKMDTMIGDGRSQNCWGASNSNAGINLNLNPNANPAAWPVLGHEGTVATGNPSSICSPVSAIGQNMGNQNGNPTGTLGAWGNLLPQESTEPQTSTSQNVSFSAQPQNLNTDGPNNTNPMNSSPNPINAMQTNGLPNWGMAVGMGAIIPPHLQGLPGANGSSVSQVSGGSAEGISNSVWGLSPGNPATGNSNSGFSQGNGDTVNSALSAKQNGSSSAVQKEGSGGNAWDSGPPAGPGILAWGRGSGNNGVGNIHSGAWGHPSRSTSNGVNGEWGKPPNQHSNSDINGKGSTGWESPSVTSQNPTVQPGGEHMNSWAKAASSGTTASEGSSDGSGNHNEGSTGREGTGEGRRRDKGIIDQGHIQLPRNDLDPRVLSNTGWGQTPVKQNTAWEFEESPRSERKNDNGTEAWGCAATQASNSGGKNDGSIMNSTNTSSVSGWVNAPPAAVPANTGWGDSNNKAPSGPGVWGDSISSTAVSTAAAAKSGHAWSGAANQEDKSPTWGEPPKPKSQHWGDGQRSNPAWSAGGGDWADSSSVLGHLGDGKKNGSGWDADSNRSGSGWNDTTRSGNSGWGNSTNTKANPGTNWGETLKPGPQQNWASKPQDNNVSNWGGAASVKQTGTGWIGGPVPVKQKDSSEATGWEEPSPPSIRRKMEIDDGTSAWGDPSNYNNKTVNMWDRNNPVIQSSTTTNTTTTTTTTTSNTTHRVETPPPHQAGTQLNRSPLLGPVSSGWGEMPNVHSKTENSWGEPSSPSTLVDNGTAAWGKPPSSGSGWGDHPAEPPVAFGRAGAPVAASALCKPASKSMQEGWGSGGDEMNLSTSQWEDEEGDVWNNAASQESTSSCSSWGNAPKKGLQKGMKTSGKQDEAWIMSRLIKQLTDMGFPREPAEEALKSNNMNLDQAMSALLEKKVDVDKRGLGVTDHNGMAAKPLGCRPPISKESSVDRPTFLDKLTLSFSNQDGGLVEEPTPSPFLPSPSLKLPLSHSALPSQALGGIASGLGMQNLNSSRQIPSGNLGMFGNSGAAQARTMQQPPQPPVQPLNSSQPSLRAQVPQFLSPQVQAQLLQFAAKNIGLNPALLTSPINPQHMTMLNQLYQLQLAYQRLQIQQQMLQAQRNVSGSMRQQEQQVARTITNLQQQIQQHQRQLAQALLVKQPPPPPPPPHLSLHPSAGKSAMDSFPSHPQTPGLPDLQTKEQQSSPNTFAPYPLAGLNPNMNVNSMDMTGGLSVKDPSQSQSRLPQWTHPNSMDNLPSAASPLEQNPSKHGAIPGGLSIGPPGKSSIDDSYGRYDLIQNSESPASPPVAVPHSWSRAKSDSDKISNGSSINWPPEFHPGVPWKGLQNIDPENDPDVTPGSVPTGPTINTTIQDVNRYLLKSGGSSPPSSQNATLPSSSAWPLSASGYSSSFSSIASAPSVAGKLSDIKSTWSSGPTSHTQASLSHELWKVPRNSTAPTRPPPGLTNPKPSSTWGASPLGWTSSYSSGSAWSTDTSGRTSSWLVLRNLTPQIDGSTLRTLCLQHGPLITFHLNLTQGNAVVRYSSKEEAAKAQKSLHMCVLGNTTILAEFAGEEEVNRFLAQGQALPPTSSWQSSSASSQPRLSAAGSSHGLVRSDAGHWNAPCLGGKGSSELLWGGVPQYSSSLWGPPSADDSRVIGSPTPLTTLLPGDLLSGESL

SEQ ID NO: 58676 - protein, 342 aa, Homo sapiens
MGNVLQSSSDAIYLARHVGLRVGIPKETPALTINRLCGSGFQSIVNGCQEICVKEAEVVLCGGTESMSQAPYCVRNVRFGTKLGSDIKLEDSLWVSLTDQHVQLPMAMTAENLAVKHKISREECDKYALQSQQRWKAANDAGYFNDEMAPIEVKTKKGKQTMQVDEHARPQTTLEQLQKLPPVFKKDGTVTAGNASGVADGAGAVIIASEDAVKKHNFTPLARIVGYFVSGCDPSIMGIGPVPAISGALKKAGLSLKDMDLVEVNEAFAPQYLAVERSLDLDISKTNVNGGAIALGHPLGGSGSRITAHLVHELRRRGGKYAVGSACIGGGQGIAVIIQSTA

SEQ ID NO: 58677 - protein, 67 aa, Homo sapiens
MQLSFTQLTIDYYPYHKAEKDYPLKGTCRTPSVLSQQSKAKLMSSSVVVRLADFNIYQVSTAEQCRS

SEQ ID NO: 58678 - protein, 12 aa, Homo sapiens
METTNGTETWYE

SEQ ID NO: 58679 - protein, 124 aa, Homo sapiens
MAFVLTVVGLVAVFTFHNHGRTANLYSLHSWLGITTVFLFACQWFLGFAVFLLPWASMWLRSLLKPIHVFFGAAILSLSIASVISGINEKLFFSLKNTTRPYHSLPSEAVFANSTGMLVVAFGL

SEQ ID NO: 58680 - protein, 200 aa, Homo sapiens
  MOD_RES (1)..(1): Any amino acid
XRDPLGASYLGVPSDADSSAASNKISGASNSKPNRPSLAKILLSLDGNLAKQQALSHILTALQIMYARDAVVGALMPAAMIAPVECPSFSSAAPSDASAMASPMNGEECMLAVDIEDRLSPNPWQEKREIVSSEDAVTPSAVTPSAPSASARPFIPVTDDLGAASIIAETMTKTKEVADMLLELCVTELEDVATDSQSGR

SEQ ID NO: 58681 - protein, 881 aa, Homo sapiens
  MOD_RES (1)..(1): Any amino acid
XLSQPLSAYNSSSLSLNSLSSSRSSTPAKTQPAPPHISHHPSASPFPLSLPNHSPLHSFTPTLQPPAHSHHPNMFAPPTALPPPPPLTSGSLQVAGHPAGSTYSEQDILRQELNTRFLASQSADRGASLGPPPYLRTEFHQHQHQHQHTHQHTHQHTFTPFPHAIPPTAIMPTPAPPMVRTPGRNFDKYPTKVDPFYRHSLFHSYPPAVSGIPPMIPPTGPFGSLQGAFQPKTSNPIDVAARPGTVPHTLLQKDPRLTDPFRPMLRKPGKWCAMHVHIAWQIYHHQQKVKKQMQSDPHKLDFGLKPEFLSRPPGPSLFGAIHHPHDLARPSTLFSAAGAAHPTGTPFGPPPHHSNFLNPAAHLEPFNRPSTFTGLAAVGGNAFGGLGNPSVTPNSMFGHKDGPSVQNFSNPHEPWNRLHRTPPSFPTPPPWLKPGELERSASAAAHDRDRDVDKRDSSVSKDDKERESVEKRHSSHPSPAPVLPVNALGHTRSSTEQIRAHLNTEAREKDKPKERERDHSESRKDLAADEHKAKEGHLPEKDGHGHEGRAAGEEAKQLARVPSPYVRTPVVESARPNSTSSREAEPRKGEPAYENPKKSSEVKVKEERKEDHDLPPEAPQTHRASEPPPPNSSSSVHPGPLASMPMTVGVTGIHPMNSISSLDRTRMMTPFMGISPLPGGERFPYPSFHWDPIRDPLRDPYRELDIHRRDPLGRDFLLRNDPLHRLSTPRLYEADRSFRDREPHDYSHHHHHHHHPLSVDPRREHERGGHLDERERLHMLREDYEHTRLHSVHPASLDGHLPHPSLITPGLPSMHYPRISPTAGNQNGLLNKTPPTAALSAPPPLISTLGGRPVSPRRTTPLSAEIRERPPSHTLKDIEAR

SEQ ID NO: 58682 - protein, 135 aa, Homo sapiens
DFLDDVRRMNKRQLYYQVLNFGMIVSSALMIWKGLMVITGSESPIVVVLSGSMEPAFHRGDLLFLTNRVEDPIRVGEIVVFRIEGREIPIVHRVLKIHEKFVPYIGIVTILMNDYPKFKYAVLFLLGLFVLVHRE

SEQ ID NO: 58683 - protein, 47 aa, Homo sapiens
MESVLSKYEDQITIFTDYLEEYPDTDELVWILGKQHLLKTDWERKTF

SEQ ID NO: 58684 - protein, 224 aa, Homo sapiens
MAWPNVFQRGSLLSQFSHHHVVVFLLTFFSYSLLHASRKTFSNVKVSISEQWTPSAFNTSVELPVEIWSSNHLFPSAEKATLFLGTLDTIFLFSYAVGLFISGIVGDRLNLRWVLSFGMCSSALVVFVFGALTEWLRFYNKWLYCCLWIVNGLLQSTGWPCVVAVMGNWFGKAGRGVVFGLWSACASVGNILGACLASSVLQYGYEVSRVLRQKKTLKKTHTGH

SEQ ID NO: 58685 - protein, 63 aa, Homo sapiens
YLMEGSYNKVFLAKGNIPAESYTFFIDILLDTISELGLVMGLWITALISPPLAVDMCGHVCQT

SEQ ID NO: 58686 - protein, 73 aa, Homo sapiens
THLDVSDEKQRKACMSKITKELLNKRGFPAIRDYHFVNATEESDALAKLRKTIINESLNFKESFFIFKTQHCS

SEQ ID NO: 58687 - protein, 601 aa, Homo sapiens
MLYEKFSPAGPVLSIRVCRDMITRRSLGYAYVNFQQPADAERALDTMNFDVIKGKPIRIMWSQRDPSLRKSGVGNVFIKNLDKSIDNKALYDTFSAFGNILSCKVVCDENGSKGYAFVHFETQEAADKAIEKMNGMLLNDRKVFVGRFKSRKEREAELGAKAKEFTNVYIKNFGEEVDDESLKELFSQFGKTLSVKVMRDPNGKSKGFGFVSYEKHEDANKAVEEMNGKEISGKIIFVGRAQKKVERQAELKRKFEQLKQERISRYQGVNLYIKNLDDTIDDEKLRKEFSPFGSITSAKVMLEDGRSKGFGFVCFSSPEEATKAVTEMNGRIVGSKPLYVALAQRKEERKAHLTNQYMQRVAGMRALPANAILNQFQPAAGGYFVPAVPQAQGRPPYYTPNQLAQMRPNPRWQQGFQGMPSAIRQSGPRPTLRHLAPTGNAPASRGLPTTTQRVGVPTAVQNLAPRAAVAAAAPRAVAPYKYASSVRSPHPAIQPLQAPQPAVHVQGQEPLTASMLAAAPPQEQKQMLGERLFPLIQTMHSNLAGKITGMLLEIDNSELLHMLESPESLRSKVDEAVAVLQAHHAKKEAAQKVGAVAAATS

SEQ ID NO: 58688 - protein, 653 aa, Homo sapiens
MAACEGRRSGALGSSQSDFLTPPVGGAPWAVATTVVMYPPPPPPPHRDFISVTLSFGENYDNSKSWRRRSCWRKWKQLSRLQRNMILFLLAFLLFCGLLFYINLADHWKALAFRLEEEQKMRPEIAGLKPANPPVLPAPQKADTDPENLPEISSQKTQRHIQRGPPHLQIRPPSQDLKDGTQEEATKRQEAPVDPRPEGDPQRTVISWRGAVIEPEQGTELPSRRAEVPTKPPLPPARTQGTPVHLNYRQKGVIDVFLHAWKGYRKFAWGHDELKPVSRSFSEWFGLGLTLIDALDTMWILGLRKEFEEARKWVSKKLHFEKDVDVNLFESTIRILGGLLSAYHLSGDSLFLRKAEDFGNRLMPAFRTPSKIPYSDVNIGTGVAHPPRWTSDSTVAEVTSIQLEFRELSRLTGDKKFQEAVEKVTQHIHGLSGKKDGLVPMFINTHSGLFTHLGVFTLGARADSYYEYLLKQWIQGGKQETQLLEDYVEAIEGVRTHLLRHSEPSKLTFVGELAHGRFSAKMDHLVCFLPGTLALGVYHGLPASHMELAQELMETCYQMNRQMETGLSPEIVHFNLYPQPGRRDVEVKPADRHNLLRPETVESLFYLYRVTGDRKYQDWGWEILQSFSRFTRVGSGGTTRLAWGWPSSRRPPP

SEQ ID NO: 58689 - protein, 211 aa, Homo sapiens
MDGPGFGGMNRIGGGIGFGGLEAMNSMGGFGGVGRMGELYRGAMTSSMERDFGRGDIGINRGFGDSFGRLGGGMGSMNSVTGGMGMGLDRMSSSFDRMGPGIGAILERSIDMDRGFLSGPMGSGMRERIGSKGNQIFVRNLPFDLTWQKLKEKFSQCGHVMFAEIKMENGKSKGCGTVRFDSPESAEKACRIMNGIKISGREIDVRLDRNA

SEQ ID NO: 58690 - protein, 59 aa, Homo sapiens
MVMVKGVNKLALPPGSVISYPLENFLLVLTVLQIPFTPYFLRKLLLFCSWLPVRKECIW

SEQ ID NO: 58691 - protein, 137 aa, Homo sapiens
  MOD_RES (1)..(1): Any amino acid
XDSRRQDGAMSSSDAEDDFLEPATPTATQAGHALPLLPQERCAEFPALRGPPTQGACSSCVQRGPVLCHRAPPGAAGEHAATEGREGAPSVSGTHALLQRPLGADCGDRPAACGPAEGPLCQAQGLCLQGGDAHHPL

SEQ ID NO: 58692 - protein, 63 aa, Homo sapiens
MPLGRLAGSARSEEGSEAFLEGMVRRSGAWRRYGAISRCRSAQPRTRSSGFGTVSGWRTWTAC

SEQ ID NO: 58693 - protein, 525 aa, Homo sapiens
  MOD_RES (1)..(1): Any amino acid
XQKQVEQKSSATLLLTWGLEDVEHVFSEEDYHTLTNYKAFSQFMRPLIAKKNPKIPMSKMMTILGAKWREFSANNPFKGSAAAVAAAAAAAAAAVAEQVSAAVSSATPIAPSGPPALPPPPAADIQPPPIRRAKTKEGKGPGHKRRSKSPRVPDGRKKLRGKKMAPLKIKLGLLGGKRKKGGSSDEGPEPEAEESDLDSGSVHSASGRPDGPVRTKKLKRGRPGRKKKKVLGCPAVAGEEEVDGYETDHQDYCEVCQQGGEIILCDTCPRAYHLVCLDPELDRAPEGKWSCPHCEKEGVQWEAKEEEEEYEEEGEEEGEKEEEDDHMEYCRVCKDGGELLCCDACISSYHIHCLNPPLPDIPNGEWLCPRCTCPVLKGRVQKILHWRWGEPPVAVPAPQQADGNPDVPPPRPLQGRSEREFFVKWVGLSYWHCSWAKELQLEIFHLVMYRNYQRKNDMDEPPPLDYGSGEDDGKSDKRKVKDPHYAEMEEKYYRFGIKPEWMTVHRIINHSVDKKGNYHYLVKWR

SEQ ID NO: 58694 - protein, 1091 aa, Homo sapiens
  MOD_RES (1)..(1): Any amino acid
XRFSTIQCQRYIHPEGSEKTWTSSTSSDTSQDRSPSEESMSSEPAPSVLPATGDSDTYLSIIHSLETKLYVTEEKLKDVTVRLESQQGQSREALLALHHQWAGTEAQLREQLRASLLQVGALASQLEQERQERARRVEGHVGELGDFQVKNSQALMCLENCREQLRSLPRASQEDEQDARAASLASVESALVSAIQALQHWPAPAHGGARAQLETGGTEENGKPASLQQCSQSELTEQEQVRLLSDQIALEASLISQIADSLKNTTSDVSRMLHEISWSGQPPMESAGAPVDTWARKVLVDGEFWSQVESLRKHLGTLGGEAVGASGDGQQSIPQGLAPILANATWVRAELSFATQSVRESFHRRLQSIQETLRGTQTALRQHKCLLREILGAYQTPDFERVMQQVLEALRLPAGHEDGVQLSWDLSPLGEVLGRDSDSSQEPFDVSDQSPGAFVAIQEELAQQLKEKASLLEEIAAALPSLPPVESLRDCQKLLQVSQSLSYNTCLGGLGQYSSLLVQDAIIQAQVCYASCRIRLEYEKELQLCKESWQTREPSCSEQAQAARALREEYEELLRKQKSEYLDVIAIVERENAELKAKAAQLDHQQQCLEDAESKHSMSMFTLRGRYEEEIRCVVEQLTRTESTLQAERSRVLSQLDASVRDRQDMERHHGEQIQTLEDRFQLKVRELQTIHEEELRTLQEHYSQSLRCLQDTLCLHQGPHPKALPAPAPNWQATQGEADSMTGLRERIQELEAQMDVMREELGHKDLEGDAATLREKYQRDLESLKATCERGFAAMEETHQKKIEDLQRQHQRELEKLREEKDRLLAEETAATISAIEAMKNAHREEMERELEKSQRSQISSVNSDVEALRRQYLEELQSVQRELEVLSEQYSQKCLENAHLAQALEAERQALRQCQRENQELNAHNQELNNRLAAEITRLRTLLTGDGGGEATGSPLAQGKDAYELEVLLRVKESEIQYLKQEISSLKDELQTALRDKKYASDKYKDIYTELSIAKAKADCDISRLKEQLKAATEALGEKSPDSATVSGYDIMKSKSNPDFLKKDRSCVTRQLRNIRSKSVIEQVSWDT

SEQ ID NO: 58695 - protein, 255 aa, Homo sapiens
MQPPPRKVKPAQEVKLRFLEQLSILQTWQQREADLLEDIRSYSKQRAAIEREYGQALQKLAGPFLKREGHRSGEMDSRTVFGAWRCLLDATVAGGQTRLQASDRYRDLAGGTGRSAKEQVLRKGTENLQRAQAEVLQSVRELSRSRKLYGQRERVWALAQEKAADVQARLNRSDHGIFHSRTSLQKLSTKLSAQSAQYSQQLQAARNEYLLNLVATNAHLDHYYQEELPALLKASFNPDTPIPQQGGKGGPPPAS

SEQ ID NO: 58696 - protein, 56 aa, Homo sapiens
MEQCACVERELDKVLQKFLTYGQHCERSLEELLHYVGQLRAELASAALQGTPLSAT

SEQ ID NO: 58697 - protein, 1603 aa, Homo sapiens
TKDSNRCCCGQFTNQHIPPLPSATPSKNEEENKQVETQPEKWSVAKHTQSYPTDSYGVLEFQGGGYSNKAMYIRVSYDTKPDSLLHLMVKDWQLELPKLLISVHGGLQNFEMQPKLKQVFGKGLIKAAMTTGAWIFTGGVSTGVISHVGDALKDHSSKSRGRVCAIGIAPWGIVENKEDLVGKDVTRVYQTMSNPLSKLSVLNNSHTHFILADNGTLGKYGAEVKLRRLLEKHISLQKINTRLGQGVPLVGLVVEGGPNVVSIVLEYLQEEPPIPVVICDGSGRASDILSFAHKYCEEGGIINESLREQLLVTIQKTFNYNKAQSHQLFAIIMECMKKKELVTVFRMGSEGQQDIEMAILTALLKGTNVSAPDQLSLALAWNRVDIARSQIFVFGPHWPPLGSLAPPTDSKATEKEKKPPMATTKGGRGKGKGKKKGKVKEEVEEETDPRKIELLNWVNALEQAMLDALVLDRVDFVKLLIENGVNMQHFLTIPRLEELYNTRLGPPNTLHLLVRDVKKSNLPPDYHISLIDIGLVLEYLMGGAYRCNYTRKNFRTLYNNLFGPKRPKALKLLGMEDDEPPAKGKKKKKKKKEEEIDIDVDDPAVSRFQYPFHELMVWAVLMKRQKMAVFLWQRGEESMAKALVACKLYKAMAHESSESDLVDDISQDLDNNSKDFGQLALELLDQSYKHDEQIAMKLLTYELKNWSNSTCLKLAVAAKHRDFIAHTCSQMLLTDMWMGRLRMRKNPGLKVIMGILLPPTILFLEFRTYDDFSYQTSKENEDGKEKEEENTDANADAGSRKGDEENEHKKQRSIPIGTKICEFYNAPIVKFWFYTISYLGYLLLFNYVILVRMDGWPSLQEWIVISYIVSLALEKIREILMSEPGKLSQKIKVWLQEYWNITDLVAISTFMIGAILRLQNQPYMGYGRVIYCVDIIFWYIRVLDIFGVNKYLGPYVMMIGKMMIDMLYFVVIMLVVLMSFGVARQAILHPEEKPSWKLARNIFYMPYWMIYGEVFADQIDLYAMEINPPCGENLYDEEGKRLPPCIPGAWLTPALMACYLLVANILLVNLLIAVFNNTFFEVKSISNQVWKFQRYQLIMTFHDRPVLPPPMIILSHIYIIIMRLSGRCRKKREGDQEERDRGLKLFLSDEELKRLHEFEEQCVQEHFREKEDEQQSSSDERIRVTSERVENMSMRLEEINERETFMKTSLQTVDLRLAQLEELSNRMVNALENLAGIDRSDLIQARSRASSECEATYLLRQSSINSADGYSLYRYHFNGEELLFEDTSLSTSPGTGVRKKTCSFRIKEEKDVKTHLVPECQNSLHLSLGTSTSATPDGSHLAVDDLKNAEESKLGPDIGISKEDDERQTDSKKEETISPSLNKTDVIHGQDKSDVQNTQLTVETTNIEGTISYPLEETKITRYFPDETINACKTMKSRSFVYSRGRKLVGGVNQDVEYSSITDQQLTTEWQCQVQKITRSHSTDIPYIVSEAAVQAEHKEQFADMQDEHHVAEAIPRIPRLSLTITDRNGMENLLSVKPDQTLGFPSLRSKSLHGHPRNVKSIQGKLDRSGHASSVSSLVIVSGMTAEEKKVKKEKASTETEC

SEQ ID NO: 58698 - protein, 216 aa, Homo sapiens
MSWIKEGELSLWERFCANIIKAGPMPKHIAFIMDGNRRYAKKCQVERQEGHSQGFNKLAETLRWCLNLGILEVTVYAFSIENFKRSKSEVDGLMDLARQKFSRLMEEKCFLNVCFAYTSRHEISNAVREMAWGVEQGLLDPSDISESLLDKCLYTNRSPHPDILIRTSGEVRLSDFLLWQTSHSCLVFQPVLWPEYTFWNLFEAILQFQMNHSVLQ

SEQ ID NO: 58699 - protein, 297 aa, Homo sapiens
MASPPACPSEEDESLKGCELYVQLHGIQQVLKDCIVHLCISKPERPMKFLREHFEKLEKEENRQILARQKSNSQSDSHDEEVSPTPPNPVVKARRRRGGVSAEVYTEEDAVSYVRKVIPKDYKTMTALAKAISKNVLFAHLDDNERSDIFDAMFPVTHIAGETVIQQGNEGDNFYVVDQGEVDVYVNGEWVTNISEGGSFGELALIYGTPRAATVKAKTDLKLWGIDRDSYRRILMGSTLRKRKMYEEFLSKVSILESLEKWERLTVADALEPVQFEDGEKIVVQGEPGDDFYIITE

SEQ ID NO: 58700 - protein, 26 aa, Homo sapiens
SVESMRKIWTASSAWRSCPQRLDTAM

SEQ ID NO: 58701 - protein, 60 aa, Homo sapiens
CPGSIVQGVCGCCYTCASQRNESCGGTFGIYGTCDRGLRCVIRPPLNGDSLTEYEAGVCE

SEQ ID NO: 58702 - protein, 224 aa, Homo sapiens
MSRRKQAKPRSLKDPNCKLEDKTEDGEALDCKKRPEDGEELEDEAVHSCDSCLQVFESLSDITEHKINQCQLTDGVDVEDDPTCSWPASSPSSKDQTSPSHGEGCDFGEEEGGPGLPYPCQFCDKSFSRLSYLKHHEQSHSDKLPFKCTYCSRLFKHKRSRDRHIKLHTGDKKYHCSECDAAFSRSDHLKIHLKTHTSNKPYKCAICRRGFLSSSSLHGHMQVH

SEQ ID NO: 58703 - protein, 517 aa, Homo sapiens
  MOD_RES (1)..(1): Any amino acid
XLISECNHLKERQYQYENEKAEREVVVRQLQQELADTLKKQSMSEASLEVTSRYRINLEDETQDLKKKLGQIRNQLQEAQDRHTEAVRCAEKMQDHKQKLEKDNAKLKVTVKKQMDKIEELQKNLLNANLSEDEKEQLKKLMELKQSLECNLDQEMKKNVELEREITGFKNLLKMTRKKLNEYENGEFSFHGDLKTSQFEMDIQINKLKHKIDDLTAELETAGSKCLHLDTKNQILQEELLSMKTVQKKCEKLQKNKKKLEQEVINLRSHIERNMVELGQVKQYKQEIEERARQEIAEKLKEVNLFLQAQAASQENLEQFRENNFASMKSQMELRIKDLESELSKIKTSQEDFNKTELEKYKQLYLEELKVRKSLSSKLTKTNERLAEVNTKLLVEKQQSRSLFTTLTTRPVMEPPCVGNLNNSLDLNRKLIPRENLVISTSNPRASNNSMENYLSKMQQELEKNITRELKEAAAELESGSIASPLGSTDESNLNQDLVWKASREYVQVVVMVCACN

SEQ ID NO: 58704 - protein, 42 aa, Homo sapiens
  MOD_RES (1)..(1): Any amino acid
XELIKDDYNETVHKKTEVVITLDFCIRNIEKTVKVFPVLREQ

SEQ ID NO: 58705 - protein, 263 aa, Homo sapiens
  MOD_RES (1)..(1): Any amino acid
XAPPVDVLRALRFPSLPDGVRRAKGICPADVAYRVARPAQLSAPTRQLFPGGFPKDFSLLTVVRTRPGLQAPLLTLYSAQGVRQLGLELGRPVRFLYEDQTGRPQPPSQPVFRGLSLADGKWHRVAVAVKGQSVTLIVDCKKRVTRPLPRSARPVLDTHGVIIFGARILDEEVFEGDVQELAIVPGVQAAYESCEQKELECEGGQRERPQNQQPHRAQRSPQQQPSRLHRPQNQEPQSQVRELGEPPSAAHPREGRHPGISPP

SEQ ID NO: 58706 - protein, 175 aa, Homo sapiens; identical to SEQ ID NO: 45445

SEQ ID NO: 58707 - protein, 461 aa, Homo sapiens
MRQAAYQAGLASPENSEQLIIALEPEAASIYCRKLRLHQMIELSSKAAVNGYSGSDTVGAGFTQAKEHIRRNRQSRTFLVENVIGEIWSELEEGDKYVVVDSGGGTVDLTVHQIRLPEGHLKELYKATGGPYGSLGVDYEFEKLLYKIFGEDFIEQFKIKRPAAWVDLMIAFESRKRAAAPDRTNPLNITLPFSFIDYYKKFRGHSVEHALRKSNVDFVKWSSQGMLRMSPDAMNALFKPTIDSIIEHLRDLFQKPEVSTVKFLFLVGGFAEAPLLQQAVQAAFGDQCRIIIPQDVGLTILKGAVLFGLDPAVIKVRRSPLTYGVGVLNRYVEGKHPPEKLLVKDGTRWCTDVFDKFISADQSVALGELVKRSYTPAKPSQLVIVINIYSSEHDNVSFITDPGVKKCGTLRLDLTGTSGTAVPARREIQTLMQFGDTEIKATAIDIATSKSVKVGIDFLNY

SEQ ID NO: 58708 - protein, 65 aa, Homo sapiens
NLMTTLPSQDASLPPQQPYIAGQQPMYQQGETHTRGPFSADRTRTQVSGQIRASASVDRKNREFT

SEQ ID NO: 58709 - protein, 43 aa, Homo sapiens
MRRQQPLQFGQKGPRMQALVLLLCIGALLGHSSCQNPASPPEE

SEQ ID NO: 58710 - protein, 103 aa, Homo sapiens
  MOD_RES (1)..(1): Any amino acid
XGAYYPAQGVQQFPTGVAPTPVLMNQPPQIAPKRERKTVSSSEGLRDIWEGENQGQVLLGHCAGKSSDLRRKELRVGREWCLWRAQVLCKMLRFQHRSRSWED

SEQ ID NO: 58711 - protein, 60 aa, Homo sapiens
  MOD_RES (1)..(1): Any amino acid
XERTASDGKAVGMASDIPGLHLPGGGRLPPEHGKSGCSDLEEAVDSGDPRELIEIKNKKK

SEQ ID NO: 58712 - protein, 388 aa, Homo sapiens
MLTFTSECGCTTFGVFDIVFATNSTQVIKMILNSSTEDGIKRIQDDCPKAGRHNYIFVMIPTLYSIIFVVGIFGNSLVVIVIYFYMKLKTVASVFLLNLALADLCFLLTLPLWAVYTAMEYRWPFGNYLCKIASASVSFNLYASVFLLTCLSIDRYLAIVHPMKSRLRRTMLVAKVTCIIIWLLAGLASLPAIIHRNVFFIENTNITVCAFHYESQNSTLPIGLGLTKNILGFLFPFLIILTSYTLIWKALKKAYEIQKNKPRNDDIFKIIMAIVLFFFFSWIPHQIFTFLDVLIQLGIIRDCRIADIVDTAMPITICIAYFNNCLNPLFYGFLGKKFKRYFLQLLKYIPPKAKSHSNLSTKMSTLSYRPSDNVSSSTKKPAPCFEVE

SEQ ID NO: 58713 - protein, 62 aa, Homo sapiens
MTPPRLFWVWLLVAGTQGELSPWEIPKAEVWKAGAPWGCSELQGDILPGARGPAVSQIFSPA

SEQ ID NO: 58714 - protein, 42 aa, Homo sapiens
MVFYFTSSSVNSSAYTIYMGKDKYENEDLIKHGWPEDIWERI

SEQ ID NO: 58715 - protein, 56 aa, Homo sapiens
MFSLKTLPFLLLLHVQISKAFPVSSKEKNTKTVQHKAISEANQMQPPDLGLPSLQN

SEQ ID NO: 58716 - protein, 80 aa, Homo sapiens
MTVLEQDTQGLDGWWLCSLHGRQGIVPGNRLKILVGMYDKKPAGPGPGPPATPAQPQPGLHAPAPPASQYTPMLPNTYQP

SEQ ID NO: 58717 - protein, 444 aa, Homo sapiens
MLLMVVSMACVGFFLVQRAGPHVGGQDKPFLSAWPSAVVPRGGHVTLRCHYRHRFNNFMLYKEDRIHVPIFHGRLFQESFNMSPVTTAHAGNYTCRGSHPHSPTGWSAPSNPVVIMVTGNHRKPSLLAHPGPLVKSGERVILQCWSDIMFEHFFLHKEGISKDPSSLVGQIHDGVSKANFSIGPMMLALAGTYRCYGSVTHTPYQLSAPSDPLDIVVTGPYEKPSLSAQPGPKVQAGESVTLSCSSRSSYDMYHLSREGGAHERRLPAVRKVNRTFQADFPLGPATHGGTYRCFGSFRHSPYEWSDPSDPLLVSVTGNPSSSWPSPTEPSSKSGNPRHLHILIGTSVVIILFILLLFFLLHLWCSNKKNAAVMDQEPAGNRTANSEDSDEQDPEEVTYAQLDHCVFTQRKITRPSQRPKTPPTDTILYTELPNAKPRSKVVSCP

SEQ ID NO: 58718 - protein, 2263 aa, Homo sapiens
MARFGDEMPARYGGGGSGAAAGVVVGSGGGRGAGGSRQGGQPGAQRMYKQSMAQRARTMALYNPIPVRQNCLTVNRSLFLFSEDNVVRKYAKKITEWPPFEYMILATIIANCIVLALEQHLPDDDKTPMSERLDDTEPYFIGIFCFEAGIKIIALGFAFHKGSYLRNGWNVMDFVVVLTGILATVGTEFDLRTLRAVRVLRPLKLVSGIPSLQVVLKSIMKAMIPLLQIGLLLFFAILIFAIIGLEFYMGKFHTTCFEEGTDDIQGESPAPCGTEEPARTCPNGTKCQPYWEGPNNGITQFDNILFAVLTVFQCITMEGWTDLLYNSNDASGNTWNWLYFIPLIIIGSFFMLNLVLGVLSGEFAKERERVENRRAFLKLRRQQQIERELNGYMEWISKAEEVILAEDETDGEQRHPFDGALRRTTIKKSKTDLLNPEEAEDQLADIASVGSPFARASIKSAKLENSTFFHKKERRMRFYIRRMVKTQAFYWTVLSLVALNTLCVAIVHYNQPEWLSDFLYYAEFIFLGLFMSEMFIKMYGLGTRPYFHSSFNCFDCGVIIGSIFEVIWAVIKPGTSFGISVLRALRLLRIFKVTKYWASLRNLVVSLLNSMKSIISLLFLLFLFIVVFALLGMQLFGGQFNFDEGTPPTNFDTFPAAIMTVFQILTGEDWNEVMYDGIKSQGGVQGGMVFSIYFIVLTLFGNYTLLNVFLAIAVDNLANAQELTKDEQEEEEAANQKLALQKAKEVAEVSPLSAANMSIAVKEQQKNQKPAKSVWEQRTSEMRKQNLLASREALYNEMDPDERWKAAYTRHLRPDMKTHLDRPLVVDPQENRNNNTNKSRAAEPTVDQRLGQQRAEDFLRKQARYHDRARDPSGSAGLDARRPWAGSQEAELSREGPYGRESDHHAREGSLEQPGFWEGEAERGKAGDPHRRHVHRQGGSRESRSGSPRTGADGEHRRHRAHRRPGEEGPEDKAERRARHREGSRPARGGEGEGEGPDGGERRRRHRHGAPATYEGDARREDKERRHRRRKENQGSGVPVSGPNLSTTRPIQQDLGRQDPPLAEDIDNMKNNKLATAESAAPHGSLGHAGLPQSPAKMGNSTDPGPMLAIPAMATNPQNAASRRTPNNPGNPSNPGPPKTPENSLIVTNPSGTQTNSAKTARKPDHTTVDIPPACPPPLNHTVVQVNKNANPDPLPKKEEEKKEEEEDDRGEDGPKPMPPYSSMFILSTTNPLRRLCHYILNLRYFEMCILMVIAMSSIALAAEDPVQPNAPRNNVLRYFDYVFTGVFTFEMVIKMIDLGLVLHQGAYFRDLWNILDFIVVSGALVAFAFTGNSKGKDINTIKSLRVLRVLRPLKTIKRLPKLKAVFDCVVNSLKNVFNILIVYMLFMFIFAVVAVQLFKGKFFHCTDESKEFEKDCRGKYLLYEKNEVKARDREWKKYEFHYDNVLWALLTLFTVSTGEGWPQVLKHSVDATFENQGPSPGYRMEMSIFYVVYFVVFPFFFVNIFVALIIITFQEQGDKMMEEYSLEKNERACIDFAISAKPLTRHMPQNKQSFQYRMWQFVVSPPFEYTIMAMIALNTIVLMMKFYGASVAYENALRVFNIVFTSLFSLECVLKVMAFGILNYFRDAWNIFDFVTVLGSITDILVTEFGNPNNFINLSFLRLFRAARLIKLLRQGYTIRILLWTFVQSFKALPYVCLLIAMLFFIYAIIGMQVFGNIGIDVEDEDSDEDEFQITEHNNFRTFFQALMLLFRSATGEAWHNIMLSCLSGKPCDKNSGILTRECGNEFAYFYFVSFIFLCSFLMLNLFVAVIMDNFEYLTRDSSILGPHHLDEYVRVWAEYDPAAWGRMPYLDMYQMLRHMSPPLGLGKKCPARVAYKRLLRMDLPVADDNTVHFNSTLMALIRTALDIKIAKGGADKQQMDAELRKEMMAIWPNLSQKTLDLLVTPHKSTDLTVGKIYAAMMIMEYYRQSKAKKLQAMREEQDRTPLMFQRMEPPSPTQEGGPGQNALPSTQLDPGGALMAHESGLKESPSWVTQRAQEMFQKTGTWSPEQGPPTDMPNSQPNSQSVEMREMGRDGYSDSEHYLPMEGQGRAASMPRLPAENQRRRGRPRGNNLSTISDTSPMKRSASVLGPKARRLDDYSLERVPPEENQRHHQRRRDRSHRASERSLGRYTDVDTGLGTDLSMTTQSGDLPSKERDQERGRPKDRKHRQHHHHHHHHHHPPPPDKDRYAQERPDHGRARARDQRWSRSPSEGREHMAHRQ

SEQ ID NO: 58719 - protein, 431 aa, Homo sapiens
MVALLIEYVCKALQELYGVNCSAEDVLNLDSSTDEKFSRHLIFQLHDVAFKDNIHVGNFLRKILQPALDLLGSEDDDSAPETTGHGFPHFSEAPARQGFSFNKMFTEKATEESWTSNSKKLERLGSAEQSSPDLSFLVVKNNMGEKHLFVDLGVYTRNRNFRLYKSSKIGKRVALEVTEDNKFFPIQSKDVSDEYQYFLSSLVSNVRFSDTLRILTCEPSQNKQKGVGYFNSIGTSVETIEGFQCSPYPEVDHFVLSLVNKDGIKGGIRRWNYFFPEELLVYDICKYRWCENIGRAHKSNNIMILVDLKNEVWYQKCHDPVCKAENFKSDCFPLPAEVCLLFLFKEEEEFTTDEADETRSNETQNPHKPSPSRLSTGASADAVWDNGIDDAYFLEATEDAELAEAAENSLLSYNSEVDEIPDELIIEVLQE

SEQ ID NO: 58720 - protein, 40 aa, Homo sapiens
MRQATCFLGRSIGVRHAGSCAGTPEEPPGGESAEEEENFV

SEQ ID NO: 58721 - protein, 22 aa, Homo sapiens
MDWKEVLRRRLATPNTCPNTAC

SEQ ID NO: 58722 - protein, 172 aa, Homo sapiens
MATPAVPVSAPPATPTPVPAAAPASVPAPTPAPAAAPVPAAAPASSSDPAAAAAATAAPGQTPASAQAPAQTPAPALPGPALPGPFPGGRVVRLHPVILASIVDSYERRNEGAARVIGTLLGTVDKHSVEVTNCFSVPHNESEDEVSGNPSCPSAVFSCSFARLPSRSLPHS

SEQ ID NO: 58723 - protein, 830 aa, Homo sapiens
MEPSSCRKTSSGLRTPTDYTLCRAIKTNQDLLPETPWTHIFYNDFWGTLLTHSGSHKSYRPLCTLSFRLNHAIGGLNPWSYHLVNVLLHAAVTGLFTSFSKILLGDGYWTFMAGLMFASHPIHTEAVAGIVGRADVGASLFFLLSLLCYIKHCSTRGYSARTWGWFLGSGLCAGCSMLWKEQGVTVLAVSAVYDVFVFHRLKIKQILPTIYKRKNLSLFLSISLLIFWGSSLLGARLYWMGNKPPSFSNSDNPAADSDSLLTRTLTFFYLPTKNLWLLLCPDTLSFDWSMDAVPLLKTVCDWRNLHTVAFYTGLLLLAYYGLKSPSVDRECNGKTVTNGKQNANGHSCLSDVEYQNSETKSSFASKVENGIKNDVSQRTQLPSTENIVVLSLSLLIIPFVPATNLFFYVGFVIAERVLYIPSMGFCLLITVGARALYVKVQKRFLKSLIFYATATLIVFYGLKTAIRNGDWQNEEMLYRSGIKVNPAKAWGNLGNVLKSQSKISEAESAYRNALYYRSNMADMLYNLGLLLQENSRFAEALHYYKLAIGSRPTLASAYLNTGIILMNQGRTEEARRTFLKCSEIPDENLKDPHAHKSSVTSCLYNLGKLYHEQGHYEEALSVYKEAIQKMPRQFAPQSLYNMMGEAYMRLSKLPEAEHWYMESLRSKTDHIPAHLTYGKLLALTGRKSEAEKLFLKAIELDPTKGNCYMHYGQFLLEEARLIEAAEMAKKAAELDSTEFDVVFNAAHMLRQASLNEAAEKYYDLAARLRPNYPAALMNLGAILHLNGRLQKAEANYLRALQLKPDDVITQSNLRKLWNIMEKQGLKTSKT

SEQ ID NO: 58724 - protein, 286 aa, Homo sapiens
MGADGMYDKLRMLNGQTGSWGTRPGWYPGTSVPGQPTQDGCQQQEGGGENTNSISSNGEDSDEAQMRLQLKRKLQRNRTSFTQEQIEALEKEFERTHYPDVFARERLAAKIDLPEARIQVWFSNRRAKWRREEKLRNQRRQASNTPSHIPISSSFSTSVYQPIPQPTTPVSSFTSGSMLGRTDTALTNTYSALPPMPSFTMANNLPMQPPVPSQTSSYSCMLPTSPSVNGRSYDTYTPPHMQTHMNSQPMGTSGTTSTGLISPGVSVPVQVPGSEPDMSQYWPRLQ

SEQ ID NO: 58725 - protein, 49 aa, Homo sapiens
  MOD_RES (1)..(1): Any amino acid
XVLEENYQELQLQISANVDFASYHCQARDVRFKETLVYQTRVFDIMSCA

SEQ ID NO: 58726 - protein, 42 aa, Homo sapiens
MPGRSCVALVLLAAAVSCAVAQHAPPWTEDCRKSTYPPSGPT

SEQ ID NO: 58727 - protein, 171 aa, Homo sapiens
MFPPSGQWDQTRGVVVVSAWETDHLCFCNSSGSTGLIPPSHFQARPLSTLPRMAPTWLSDIPLVQPPGHQDVSERRLDTQRPQVTMWERDVSSDRQEPGRRGRSWGLEGSQALSQQAEVIVRQLQELRWLEEEVWLLRETSLQQKMRLEAQAMELEALARAEKAGRAEAEG

SEQ ID NO: 58728 - protein, 71 aa, Homo sapiens
MAACRYCCSCLRLRPLSDGPFLLPRRDRALTQLQVRALWSSAGSRAVAVDLGNRLTTDKKLLQQVEFPQTI

SEQ ID NO: 58729 - protein, 141 aa, Homo sapiens
MEGAALLRVSVLCIWMSALFLGVGVRAEEAGARVQQNVPSGTDTGDPQSKPLGDWAAGTMDPGPAGSRGDSGEPCTLRPACRGQRQHGGASRISAEGPAPMPRRRTPSTAHLRVPKTSRRNLLCMRAVSLLRMPLSISRKK

SEQ ID NO: 58730 - protein, 457 aa, Homo sapiens
MLCRNQLSPVNIHPSYAPSSPSSSNSGSYKGSDCSPIMRRSGRYMSCGENHGVRPPNPEQYLTPLQQKEVTVRHLKTKLKESERRLHERESEIVELKSQLARMREDWIEEECHRVEAQLALKEARKEIKQLKQVIETMRSSLADKDKGIQKYFVDINIQNKKLESLLQSMEMAHSGSLRDELCLDFPCDSPEKSLTLNPPLDTMADGLSLEEQVTGEGADRELLVGDSIANSTDLFDEIVTATTTESGDLELVHSTPGANVLELLPIVMGQEEGSVVVERAVQTDVVPYSPAISELIQSVLQKLQDPCPSSLASPDESEPDSMESFPESLSALVVDLTPRNPNSAILLSPVETPYANVDAEVHANRLMRELDFAACVEERLDGVIPLARGGVVRQYWSSSFLVDLLAVAAPVVPTVLWAFSTQRGGTDPVYNIGALLRGCCVVALHSLRRTAFRIKT

SEQ ID NO: 58731 - protein, 651 aa, Homo sapiens
MGLADASGPRDTQALLSATQAMDLRRRDYHMERPLLNQEHLEELGRWGSAPRTHQWRTWLQCSRARAYALLLQHLPVLVWLPRYPVRDWLLGDLLSGLSVAIMQLPQGLAYALLAGLPPVFGLYSSFYPVFIYFLFGTSRHISVVLEVCWKLPQSKVGTVVTAAVAGVVLVVVKLLNDKLQQQLPMPIPGELLTLIGATGISYGMGLKHRFEVDVVGNIPAGLVPPVAPNTQLFSKLVGSAFTIAVVGFAIAISLGKIFALRHGYRVDSNQELVALGLSNLIGGIFQCFPVSCSMSRSLVQESTGGNSQVAGAISSLFILLIIVKLGELFHDLPKAVLAAIIIVNLKGMLRQLSDMRSLWKANRADLLIWLVTFTATILLNLDLGLVVAVIFSLLLVVVRTQMPHYSVLGQVPDTDIYRDVAEYSEAKEVRGVKVFRSSATVYFANAEFYSDALKQRCGVDVDFLISQKKKLLKKQEQLKLKQLQKEEKLRKQAASPKGASVSINVNTSLEDMRSNNVEDCKMMVSSGDKMEDATANGQEDSKAPDGSTLKALGLPQPDFHSLILDLGALSFVDTVCLKSLKNIFHDFREIEVEVYMAACHSPVVSQLEAGHFFDASITKKHLFASVHDAVTFALQHPRPVPDSPVSVTRL

SEQ ID NO: 58732 - protein, 70 aa, Homo sapiens
MKRTPTAEEREREAKKLRLLEELEDTWLPYLTPKDDEFYQQALKRKVRMTLISKAGILIFGMLVLRSHGT

SEQ ID NO: 58733 - protein, 153 aa, Homo sapiens
MFPLKDAEMGAFTFFASALPHDVCGSNGLPLTPNSIKILGRFQILKTITHPRLCQYVDISRGKHERLVVVAEHCERSLEDLLRERKPVSCSTVLCIAFEVLQGLQYMNKHGIVHRALSPHNILLDRKGHIKLAKFGLYHMTAHGDDVDFPIGM

SEQ ID NO: 58734 - protein, 111 aa, Homo sapiens
MSEWMKKGPLEWQDYIYKEVRVTASEKNEYKGWVLTTDPVSAKVLLSPRLECSGEISALCNLHLAGSSDSPALASRVAGTTGICHHVWLIFVFFVETGLRHVAQYCPCELP

SEQ ID NO: 58735 - protein, 117 aa, Homo sapiens
MDWTWRILFLVAAATGAHSQVQLVQSGAEVKKPGASVKVSCKASGYIFTDYYMHWVRQAPGQELGWMGRINPNSGGTNYAQKFQGRVTMTRDTSISTAYTELSSLRSEDTATYYCAR

SEQ ID NO: 58736 - protein, 303 aa, Homo sapiens
MKEQPVLERLQSQKSWIKGVFDKRECSTIIPSSKNPHRCTPVCQVCQNLIRCYCGRLIGDHAGIDYSWTISAAKGKESEQWSVEKHTTKSPTDTFGTINFQDGEHTHHAKYIRTSYDTKLDHLLHLMLKEWKMELPKLVISVHGGIQNFTMPSKFKEIFSQGLVKAAETTGAWIITEGINTGVSKHVGDALKSHSSHSLRKIWTVGIPPWGVIENQRDLIGKDVVCLYQTLDNPLSKLTTLNSMHSHFILSDDGTVGKYGNEMKLRRNLEKYLSLQKIHCREYHRGSVTQSGCRPAEVFHGLP

SEQ ID NO: 58737 - protein, 1167 aa, Homo sapiens
MIGDGCDLGLGEEEGGTGLPYPCQFCDKSFIRLSYLKRHEQIHSDKLPFKCTYCSRLFKHKRSRDRHIKLHTGDKKYHCHECEAAFSRSDHLKIHLKTHSSSKPFKCTVCKRGFSSTSSLQSHMQAHKKNKEHLAKSEKEAKKDDFMCDYCEDTFSQTEELEKHVLTRHPQLSEKADLQCIHCPEVFVDENTLLAHIHQAHANQKHKCPMCPEQFSSVEGVYCHLDSHRQPDSSNHSVSPDPVLGSVASMSSATPDSSASVERGSTPDSTLKPLRGQKKMRDDGQGWTKVVYSCPYCSKRDFNSLAVLEIHLKTIHADKPQQSHTCQICLDSMPTLYNLNEHVRKLHKNHAYPVMQFGNISAFHCNYCPEMFADINSLQEHIRVSHCGPNANPSDGNNAFFCNQCSMGFLTESSLTEHIQQAHCSVGSAKLESPVVQPTQSFMEVYSCPYCTNSPIFGSILKLTKHIKENHKNIPLAHSKKSKAEQSPVSSDVEVSSPKRQRLSASANSISNGEYPCNQCDLKFSNFESFQTHLKLHLELLLRKQACPQCKEDFDSQESLLQHLTVHYMTTSTHYVCESCDKQFSSVDDLQKHLLDMHTFVLYHCTLCQEVFDSKVSIQVHLAVKHSNEKKMYRCTACNWDFRKEADLQVHVKHSHLGNPAKAHKCIFCGETFSTEVELQCHITTHSKKYNCKFCSKAFHAIILLEKHLREKHCVFDAATENGTANGVPPMATKKAEPADLQGMLLKNPEAPNSHEASEDDVDASEPMYGCDICGAAYTMEVLLQNHRLRDHNIRPGEDDGSRKKAEFIKGSHKCNVCSRTFFSENGLREHLQTHRGPAKHYMCPICGERFPSLLTLTEHKVTHSKSLDTGTCRICKMPLQSEEEFIEHCQMHPDLRNSLTGFRCVVCMQTVTSTLELKIHGTFHMQKLAGSSAASSPNGQGLQKLYKCALCLKEFRSKQDLVKLDVNGLPYGLCAGCMARSANGQVGGLAPPEPADRPCAGLRCPECSVKFESAEDLESHMQVDHRDLTPETSGPRKGTQTSPVPRKKTYQCIKCQMTFENEREIQIHVANHMIEEGINHECKLCNQMFDSPAKLLCHLIEHSFEGMGGTFKCPVCFTVFVQANKLQQHIFAVHGQEDKIYDCSQCPQKFFFQTELQNHTMSQHAQ

SEQ ID NO: 58738 - protein, 187 aa, Homo sapiens
MSEGDSVGESVHGKPSVVYRFFTRLGQIYQSWLDKSTPYTAVRWVVTLGLSFVYMIRVYLLQGWYIVTYALGIYHLNLFIAFLSPKVDPSLMEDSDDGPSLPTKQNEEFRPFIRRLPEFKFWDASVCGDGRCSCKAGGGRQVPGAGCRCGANLLSPLEGMRLPRASLWLWSVLSSTLSTSRCSGRFW

SEQ ID NO: 58739 - protein, 117 aa, Homo sapiens
MEEIYAKFVSQKISKTRWRPLPPGSLQTAETFATGSWDNEENYISLWSIGDFGNLDSDGGFEGDHQLLCDIRHHGDVMDLQFFDQERIVAASSTGCVTVFLHHPNNQTMQIVVHSML

SEQ ID NO: 58740 - protein, 821 aa, Homo sapiens
MVYAVRSFPLSSEHAKFLIYAQDKETQEKWQVAVKLSLKPTLTEESVKESAEVEEIVFPRQFSKHSGHLQRQKRDWVIPPINLPENSRGPFPQELVRIRSDRDKNLSLRYSVTGPGADQPPTGIFIINPISGQLSVTKPLDREQIARFHLRAHAVDINGNQVENPIDIVINVIDMNDNRPEFLHQVWNGTVPEGSKPGTYVMTVTAIDADDPNALNGMLRYRIVSQAPSTPSPNMFTINNETGDIITVAAGLDREKVQQYTLIIQATDMEGNPTYGLSNTATAVITVTDVNDNPPEFTAMTFYGEVPENRVDIIVANLTVTDKDQPHTPAWNAVYRISGGDPTGRFAIQTDPNSNDGLVTVVKPIDFETNRMFVLTVAAENQVPLAKGIQHPPQSTATVSVTVIDVNENPYFAPNPKIIRQEEGLHAGTMLTTFTAQDPDRYMQQNIRYTKLSDPANWLKIDPVNGQITTIAVLDRESPNVKNNIYNATFLASDNGIPPMSGTGTLQIYLLDINDNAPQVLPQEAETCETPDPNSINITALDYDIDPNAGPFAFDLPLSPVTIKRNWTITRLNGDFAQLNLKIKFLEAGIYEVPIIITDSGNPPKSNISILRVKVCQCDSNGDCTDVDRIVGAGLGTGAIIAILLCIIILLILVLMFVVWMKRRDKERQAKQLLIDPEDDVRDNILKYDEEGGGEEDQDYDLSQLQQPDTVEPDAIKPVGIRRMDERPIHAEPQYPVRSAAPHPGDIGDFINEGLKAADNDPTAPPYDSLLVFDYEGSGSTAGSLSSLNSSSSGGEQDYDYLNDWGPRFKKLADMYGGGDD

SEQ ID NO: 58741 - protein, 102 aa, Homo sapiens
LYLFDYTDTFLPFIHTICPLQEDSSGEDIVTKLLDLKEPTWKQWREFLVKYSFLPYQLIAEFAWDWLEVHYWTSRFLIINAMLLSVLELFSFWRIWSRSELK

SEQ ID NO: 58742 - protein, 124 aa, Homo sapiens
MQPASAKWYDRRDYVFIEFCVEDSKDVNVNFEKSKLTFSCLRKGESGQSWPRLTKERAKLNWLSVDFNNWKDWEDDSDEDMSNFDRFSEMMNNMGGDEDVDLPEVDGADDDSQDSDDEKMPDLE

SEQ ID NO: 58743 - protein, 69 aa, Homo sapiens
METNESTEGSRSRSRSLDIQPSSEGLGPTSEPFPSSDDSPREPPTTWIKSQACRMALRVFSSDTDTGDC

SEQ ID NO: 58744 - protein, 104 aa, Homo sapiens
MWVPVVFLTLSVTWIGERGHGWGDAGEGASPDCQAEALSPPTQHPSPDRELGSFLSLPAPLQAHTPSPSILQQSSLPHQVPAPSHLPQNFLPIAQPAPCSQLLY

SEQ ID NO: 58745 - protein, 206 aa, Homo sapiens
MQTFLKGKRVGYWLSEKKIKKLNFQAFAELCRKRGMEVVQLNLSRPIEEQGPLDVIIHKLTDVILEADQNDSQSLELVHRFQEYIDAHPETIVLDPLPAIRTLLDRSKSYELIRKIEAYMEGLPSALDDRICSPPFMELTSLCGDDTMRLLEKNGLTFPFICKTRVAHGTNSHEMAIVFNQEGLNAIQPPCVVQNFINHNAVLYKV

SEQ ID NO: 58746 - protein, 189 aa, Homo sapiens
MLTEASLSIWGWGSLGIVLFLITFGPFVIFYLTFYILCFVGGGLVVTLLFGKTNSEKYLEQCEHSFLPPTSPGVPKCLEEMKREARTIKIDRRLTGANIIDEPLQQVIQFSLRDYVQYWYYTLSDDESFLLEIRQTLQNALIQFATRVSPCRPGWSTMAQSRLTATSASWNPVLFNKTLVSLCLLEYVI

SEQ ID NO: 58747 - protein, 372 aa, Homo sapiens
MGSLFRSETMCLAQLFLQSGTAYECLSALGEKGLVQFRDLNQNVSSFQRKFVGEVKRCEELERILVYLVQEINRADIPLPEGEASPPAPPLKQVLEMQEQLQKLEVELREVTKNKEKLRKNLLELIEYTHMLRVTKTFVKRNVEFEPTYEEFPSLESDSLLDYSCMQRLGAKLGFVSGLINQGKVEAFEKMLWRVCKGYTIVSYAELDESLEDPETGEVIKWYVFLISFWGEQIGHKVKKICDCYHCHVYPYPNTAEERREIQEGLNTRIQDLYTVLHKTEDYLRQVLCKAAESVYSRVIQVKKMKAIYHMLNMCSFDVTNKCLIAEVWCPEADLQDLRRALEEGSVRLPSSPLPGTEERLMELINSEKKRK

SEQ ID NO: 58748 - protein, 90 aa, Homo sapiens
MMNFRQRMGWIGVGLYLLASAAAFYYVFEISETYNRLALEHIQQHPEEPLEGTTWTHSLKAQLLSLPFWVWTVIFLKSESFLATSSFHYI

SEQ ID NO: 58749 - protein, 74 aa, Homo sapiens
MSGIALSRLAQERKAWRKDHPFGFVAVPTKNPDGTMNLMNWECAIPGKKGTPWEGGLFKLRMLFKDDYPSSPPK

SEQ ID NO: 58750 - protein, 474 aa, Homo sapiens
MTSSRLWFSLLLAAAFAGRATALWPWPQNFQTSDQRYVLYPNNFQFQYDVSSAAQPGCSVLDEAFQRYRDLLFGSGSWPRPYLTGKRHTLEKNVLVVSVVTPGCNQLPTLESVENYTLTINDDQCLLLSETVWGALRGLETFSQLVWKSAEGTFFINKTEIEDFPRFPHRGLLLDTSRHYLPLSSILDTLDVMAYNKLNVFHWHLVDDPSFPYESFTFPELMRKGSYNPVTHIYTAQDVKEVIEYARLRGIRVLAEFDTPGHTLSWGPGIPGLLTPCYSGSEPSGTFGPVNPSLNNTYEFMSTFFLEVSSVFPDFYLHLGGDEVDFTCWKSNPEIQDFMRKKGFGEDFKQLESFYIQTLLDIVSSYGKGYVVWQEVFDNKVKIQPDTIIQVWREDIPVNYMKELELVTKAGFRALLSAPWYLNRISYGPDWKDFYIVEPLAFEGTPEQKALVIGGEACMWGEYVDNTNLVPRLW

SEQ ID NO: 58751 - protein, 164 aa, Homo sapiens
MCKLRPLLQKWVEEADNNENLQEICKAETLVQARKRKRTSIENRVRGNLENLFLQCPKPTLQQISHIAQQLGLEKDVVRVWFCNRRQKGKRSSSDYAQREDFEAAGSPFSGGPVSFPLAPGPHFGTPGYGSPHFTALYSSVPFPEGEAFPPVSVTTLGSPMHSN

SEQ ID NO: 58752 - protein, 236 aa, Homo sapiens
MTSDCSSTHCSPESCGTASGCAPASSCSVETACLPGTCATSRCQTPSFLSRSRGLTGCLLPCYFTGSCNSPCLVGNCAWCEDGVFTSNEKETMQFLNDRLASYLEKVRSLEETNAELESRIQEQCEQDIPMVCPDYQRYFNTIEDLQQKILCTKAENSRLAVQLDNCKLATDDFKSKYESELSLRQLLEADISSLHGILEELTLCKSDLEAHVESLKEDLLCLKKNHEETKKLRPF

SEQ ID NO: 58753 - protein, 320 aa, Homo sapiens
MLPRRPLAWPAWLLRGAPGAAGSWGRPVGPLARRGCCSAPGTPEVPLTRERYPVRRLPFSTVSKQDLAAFERIVPGGVVTDPEALQAPNVDWLRTLRGCSKVLLRPRTSEEVSHILRHCHERNLAVNPQGGNTGMVGGSVPVFDEIILSTARMNRVLSFHSVSGILVCQAGCVLEELSRYVEERDFIMPLDLGAKGSCHIGGNVATNAGGLRFLRYGSLHGTVLGLEVVLADGTVLDCLTSLRKDNTGYDLKQLFIGSEGTLGIITTVSILCPPKPRAVNVAFLDAVGPEGKDHRGAEPGWLRVQVRPLPPCGAALRHRD

SEQ ID NO: 58754 - protein, 84 aa, Homo sapiens
MRKVVLITGASSGIGLALCKRLLAEDDELHLCLACRNMSKAEAVCAALLASHPTAEVTIVQVDVSNLQSVFRASKELKQRYISC

SEQ ID NO: 58755 - protein, 296 aa, Homo sapiens
MLTPPLLLLLPLLSALVAAAIDAPKTCSPKQFACRDQITCISKGWRCDGERDCPDGSDEAPEICPQSKAQRCQPNEHNCLGTELCVPMSRLCNGVQDCMDGSDEGPHCRELQGNCSRLGCQHHCVPTLDGPTCYCNSSFQLQADGKTCKDFDECSVYGTCSQLCTNTDGSFICGCVEGYLLQPDNRSCKAKNEPVDRPPVLLIANSQNILATYLSGAQVSTITPTSTRQTTAMDFSYANETVCWVHVGDSAAQTQLKCARMPGLKGFVDEHTINISLSLHRRSRKRAQENEVTQHG

SEQ ID NO: 58756 - protein, 57 aa, Homo sapiens
MCSTSGCDLEEIPLDDDDLNTIEFKILAYYTRHHVFKSTPALFSPKLLRTRSLSQRG

SEQ ID NO: 58757 - protein, 493 aa, Homo sapiens
MDFEDDYTHSACRNTYQGFNGMDRDYGPGSYGGMDRDYGHGSYGGQRSMDSYLNQSYGMDNHSGGGGGSSFSSPHMKPAPVGSRGRGTPAYPESTFGSRNYDAFGGPSTGRGRGRGHMGDFGSIHRPGIVVDYQNKSTNVTVAAARGIKRKMMQPFNKPSGTFIKKPKLAKPMEKISLSKSPTKTDPKNEEEEKRRIEARREKQRRRREKNSEKYGDGYRMAFTCSFCKFRTFEEKDIELHLESSSHQETLDHIQKQTKFDKVVMEFLHECMVNKFKKTSIRKQQTNNQTEVVKIIEKDVMEGVTVDDHMMKVETVHCSACSVYIPALHSSVQQHLKSPDHIKGKQAYKEQIKRESVLTATSILNNPIVKARYERFVKGENPFEIQDHSQDQQIEGDEEDEEKIDEPIEEEEDEDEEEEAEEVGEVEEVEEVEEVREGGIEGEGNIQGVGEGGEVGVVGEVEGVGEVEEVEELEEETAKEEPADFPVEQPEEN

SEQ ID NO: 58758 - protein, 286 aa, Homo sapiens [sequence omitted]

SEQ ID NO: 58759 - protein, 42 aa, Homo sapiens
MFSLDSFRKDRAQHRQRQCKLPPPRLPPMCVNPTPGGTISRG

SEQ ID NO: 58760 - protein, 395 aa, Homo sapiens
MKFKLHVNSARQYKDLWNMSDDKPFLCTAPGCGQRFTNEDHLAVHKHKHEMTLKFGPARNDSVIVADQTPTPTRFLKNCEEVGLFNELASPFENEFKKASEDDIKKMPLDLSPLATPIIRSKIEEPSVVETTHQDSPLPHPESTTSDEKEVPLAQTAQPTSAIVRPASLQVPNVLLTSSDSSVIIQQAVPSPTSSTVITQAPSSNRPIVPVPGPFPLLLHLPNGQTMPVAIPASITSSNVHVPAAVPLVRPVTMVPSVPGIPGPSSPQPVQSEAKMRLKAALTQQHPPVTNGDTVKGHGSGLVRTQSEESRPQSLQQPATSTTETPASPAHTTPQTQSTSGRRRRAANEDPDEKRRKFLERNRAAASRCRQKRKVWVQSLEKKAEDLSSLNGQLQ

SEQ ID NO: 58761 - protein, 348 aa, Homo sapiens
MVQLVHGMTTRSLNTHDVAAPLSPHSQEVSCYIDYNISMPAQNLWRLEIVNRGSDTDVWKTILSEVRFVHVNTSAVLKLSGAHLPDWGYRQLEIVGEKLSRGYHGSTVWNVEEHRYGASQEQRERERELHSPAQVDVSRNLSFMARFSELQWRMLALRSDDSEHKYSSSPLEWVTLDTNIAYWLHPRTSAQIHLLGNIVIWVSGSLALAIYALLSLWYLLRRRRNVHDLPQDAWLRWVLAGALCAGGWAVNYLPFFLMEKTLFLYHYLPALTFQILLLPVVLQHISDHLCRSQLQRSIFSALVVAWYSSACHVSNTLRPLTYGDKSLSPHELKALRWKDSWDILIRKH

SEQ ID NO: 58762 - protein, 193 aa, Homo sapiens
MARERGQLVFLEGLKSAVDVVFQAQKEPHPLQFLREANAGNLKPLFEFVREALKPVDSGEARWTYPVLLVDDLSVLLSLGMGAVAVLDFIHYCRATVCWELKGNMVVLVHDSGDAEDEENDILLNGLSHQSHLILRAEGLATGFCRDVHGQLRILWRRPSQPAVHRDQSFTYQYKIQDKSVSFFAKGMSPAVL

SEQ ID NO: 58763 - protein, 434 aa, Homo sapiens
MCIAEIDLIPRDRPFVCAPSSKTGSVTTTYCCNQDHCNKIELPTTVKSSPGLGPVELAAVIAGPVCFVCISLMLMVYICHNRTVIHHRVPNEEDPSLDRPFISEGTTLKDLIYDMTTSGSGSGLPLLVQRTIARTIVLQESIGKGRFGEVWRGKWRGEEVAVKIFSSREERSWFREAEIYQTVMLRHENILGFIAADNKDNGTWTQLWLVSDYHEHGSLFDYLNRYTVTVEGMIKLALSTASGLAHLHMEIVGTQGKPAIAHRDLKSKNILVKKNGTCCIADLGLAVRHDSATDTIDIAPNHRVGTKRYMAPEVLDDSINMKHFESFKRADIYAMGLVFWEIARRCSIGGIHEDYQLPYYDLVPSDPSVEEMRKVVCEQKLRPNIPNRWQSCEALRVMAKIMRECWYANGAARLTALRIKKTLSQLSQQEGIKM

SEQ ID NO: 58764 - protein, 52 aa, Homo sapiens
LAHYTKRVTITSRDIQMAVRLLLPGKMGKLAEAQGTNAALRTSLCAIWQQRK

SEQ ID NO: 58765 - protein, 45 aa, Homo sapiens
MTSRDQPRPKGPPKSTSPCPGISNSESSPTLNYQGILNRLKQFPR

SEQ ID NO: 58766 - protein, 92 aa, Homo sapiens
MNSSKSSETQCTERGCFSSQMFLWTVAGIPILFLSACFITRCVVTFRIFQTCDEKKFQLPENFTELSCYNYGSGIIVPKVNIKIYKATFSGF

SEQ ID NO: 58767 - protein, 103 aa, Homo sapiens
MEEIPAQEAAGSPRVQFQSLETQSECLSPEPQFVQDTDMEQGLTGAPPVPQVPALPREGSPGDQAAALLTARYQDFQFPSLMGSPSWNRIYRSLIWKLRLEKS

SEQ ID NO: 58768 - protein, 373 aa, Homo sapiens
MRHSKRTHCPDWDSRESWGHESYRGSHKRKRRSHSSTQENRHCKPHHQFKESDCHYLEARSLNERDYRDRRYVDEYRNDYCEGYVPRHYHRDIESGYRIHCSKSSVRSRRSSPKRKRNRHCSSHQSRSKSHRRKRSRSIEDDEEGHLICQSGDVLRARYEIVDTLGEGAFGKVVECIDHGMDGMHVAVKIVKNVGRYREAARSEIQVLEHLNSTDPNSVFRCVQMLEWFDHHGHVCIVFELLGLSTYDFIKENSFLPFQIDHIRQMAYQICQSINFLHHNKLTHTDLKPENILFVKSDYVVKYNSKMKRDEHSSAGRYVRRRCKPLKEFMLCHDEEHEKLFDLVRRMLEYDPTQRITLDEALQHPFFDLLKKK

SEQ ID NO: 58769 - protein, 122 aa, Homo sapiens
MAAARLLPVPAGPQAKLTFEDVAVLLSQDEWDRLCPAQRGLYRNVMMETYGNVVSLGLPGSKPDIISQLERGEDPWVLDRKGAKKSQGLWSDYSDNLKYDHTTACTQQDSLSCPWDPVPQKP

SEQ ID NO: 58770 - protein, 550 aa, Homo sapiens
MAACEGRRSGALGSSQSDFLTPPVGGAPWAVATTVVMYPPPPPPPHRDFISVTLSFGENYDNSKSWRRRSCWRKWKQLSRLQRNMILFLLAFLLFCGLLFYINLADHWKALAFRLEEEQKMRPEIAGLKPANPPVLPAPQKADTDPENLPEISSQKTQRHIQRGPPHLQIRPPSQDLKDGTQEEATKRQEAPVDPRPEGDPQRTVISWRGAVIEPEQGTELPSRRAEVPTKPPLPPARTQGTPVHLNYRQKGVIDVFLHAWKGYRKFAWGHDELKPVSRSFSEWFGLGLTLIDALDTMWILGLRKEFEEARKWVSKKLHFEKDVDVNLFESTIRILGGLLSAYHLSGDSLFLRKAEDFGNRLMPAFRTPSKIPYSDVNIGTGVAHPPRWTSDSTVAEVTSIQLEFRELSRLTGDKKFQEAVEKVTQHIHGLSGKKDGLVPMFINTHSGLFTHLGVFTLGARADSYYEYLLKQWIQGGKQETQLLEDYVEAIEGVRTHLLRHSEPSKLTFVGELAHGRFSAKMGRWLWASTTACPPATWSWPRSSWRLVTR

SEQ ID NO: 58771 - protein, 98 aa, Homo sapiens
MAQEKMKLGFKSLPSSTTADGNILRRVNSAPLINGLGRSLTVSPRLECSGMISAHCNLCLPGSSDSPASDSRVAGTSGTRHHAHLIFCIFSRDGVSPC

SEQ ID NO: 58772 - protein, 162 aa, Homo sapiens
MAGPVKDREAFQRLNFLYQAAHCVLAQDPENQALARFYCYTERTIAKRLVLRRPLSSSAPRDPSVKRTLCRGCSSLLVPGLTCTHRQRRCRGQRWTVQTCLTCQRSQRFLNDPGHLLWGDRPEAQLGSQADSKPLQPLPNTAHSISDRLPEEKMQTQGSSNQ

SEQ ID NO: 58773 - protein, 101 aa, Homo sapiens
MIRDLSKMYPQTRHPAPHQPAQPFKFTISESCDRIKEEFQFLQAQYHSLKLECEKLASEKTEMQRHYVMYYEMSYGLNIEMHKQVSYFFITILNDSNTGTL

SEQ ID NO: 58774 - protein, 349 aa, Homo sapiens
MSLLVVSMACVGFFLLQGAWPHEGVHRKPSLLAHPGRLVKSEETVILQCWSDVMFEHFLLHREGMFNDTLRLIGEHHDGVSKANFSISRMKQDLAGTYRCYGSVTHSPYQLSAPSDPLDIVIIGLYEKPSLSAQPGPTVLAGENVTLSCSSRSSYDMYHLSREGEAHERRLPAGTKVNGTFQANFPLGPATHGGTYRCFGSFRDSPYEWSKSSDPLLVSVTGNPSNSWPSPTEPSSETGNPRHLHVLIGTSVVKIPFTILLFFLLHRWCSDKKNAAVMDQEPAGNRTVNSEDSDEQDHQEVSYALDHCVFTQRKITRPSERPKTPPTDTSMYIELPNAEPRSKVVFCPR

SEQ ID NO: 58775 - protein, 727 aa, Homo sapiens
MFDHNGKIIQKTPYPRPRGTTVSVQQLFSTLPVRHKEFQRNIKKEYAKMVQVLHAYCIISAGIRVSCTNQLGQGKRQPVVCTGGSPSIKENIGSVFGQKQLQSLIPFVQLPPSDSVCEEYGLSCSDALHNLFYISGFISQCTHGVGRSSTDRQFFFINRRPCDPAKVCRLVNEVYHMYNRHQYPFVVLNISVDSECVDINVTPDKRQILLQEEKLLLAVLKTSLIGMFDSDVNKLNVSQQPLLDVEGNLIKMHAADLEKPMVEKQDQSPSLRTGEEKKDVSISRLREAFSLRHTTENKPHSPKTPEPRRSPLGQKRGMLSSSTSGAISDKGVLRPQKEAVSSSHGPSDPTDRAEVEKDSGHGSTSVDSEGFSIPDTGSHCSSEYAASSPGDRGSQEHVDSQEKAPKTDDSFSDVDCHSNQEDTGCKFRVLPQPTNLATPNTKRFKKEEILSSSDICQKLVNTQDMSASQVDVAVKINKKVVPLDFSMSSLAKRIKQLHHEAQQSEGEQNYRKFRAKICPGENQAAEDELRKEISKTMFAEMEIIGQFNLGFIITKLNEDIFIVDQHATDEKYNFEMLQQHTVLQGQRLIAPQTLNLTAVNEAVLIENLEIFRKNGFDFVIDENAPVTERAKLISLPTSKNWTFGPQDVDELIFMLSDSPGVMCRPSRVKQMFASRACRKSVMIGTALNTSEMKKLITHMGEMDHPWNCPHGRPTMRHIANLGVISQN

SEQ ID NO: 58776 - protein, 170 aa, Homo sapiens
MAVTGWLESLRTAQKTALLQDGRRKVHYLFPDGKEMAEEYDEKTSELLVRKWRVKSALGAMGQWQLEVGDPAPLGAGNLGPELIKESNANPIFMRKDTKMSFQWRIRNLPYPKDVYSVSVDQKERCIIVRTTNKKRTGWRLLWTPLAMRCAGVHGTPSEIDTSYLWMTPC

SEQ ID NO: 58777 - protein, 82 aa, Homo sapiens
MKDRLLERITEEERHVQDQPLGMAFVTFQEKSMATYILKDFNACKCQSLQCKGEPQPSSHSRELYTSKWTVTFAADPEDICW

SEQ ID NO: 58778 - protein, 194 aa, Homo sapiens
  MOD_RES (1)..(1): Any amino acid
XVTPTPGCCTDLRGLELRVQRNAEELGHEAFWEQELRREQAREREGQARLQALSAATAEHAARLQALDAQARALEAELQLAAEAPGPPSPMASATERLHQDLAVQERQSAEVQGSLALVSRALEAAERALQAQAQELEELNRELRQCNLQQFIQQTGAALPPPPRPDRGPPGTQVGVVLGGGWEVRTWPSPTPS

SEQ ID NO: 58779 - protein, 702 aa, Homo sapiens
MESPSAPPHRWCIPWQRLLLTASLLTFWNPPTTAKLTIESTPFNVAEGKEVLLLVHNLPQHLFGYSWYKGERVDGNRQIIGYVIGTQQATPGPAYSGREIIYPNASLLIQNIIQNDTGFYTLHVIKSDLVNEEATGQFRVYPELPKPSISSNNSKPVEDKDAVAFTCEPETQDATYLWWVNNQSLPVSPRLQLSNGNRTLTLFNVTRNDTASYKCETQNPVSARRSDSVILNVLYGPDAPTISPLNTSYRSGENLNLSCHAASNPPAQYSWFVNGTFQQSTQELFIPNITVNNSGSYTCQAHNSDTGLNRTTVTTITVYAEPPKPFITSNNSNPVEDEDAVALTCEPEIQNTTYLWWVNNQSLPVSPRLQLSNDNRTLTLLSVTRNDVGPYECGIQNELSVDHSDPVILNVLYGPDDPTISPSYTYYRPGVNLSLSCHAASNPPAQYSWLIDGNIQQHTQELFISNITEKNSGLYTCQANNSASGHSRTTVKTITVSAELPKPSISSNNSKPVEDKDAVAFTCEPEAQNTTYLWWVNGQSLPVSPRLQLSNGNRTLTLFNVTRNDARAYVCGIQNSVSANRSDPVTLDVLYGPDTPIISPPDSSYLSGANLNLSCHSASNPSPQYSWRINGIPQQHTQVLFIAKITPNNNGTYACFVSNLATGRNNSIVKSITVSASGTSPGLSAGATVGIMIGVLVGVALI

SEQ ID NO: 58780 - protein, 108 aa, Homo sapiens
MRLEKDRFSVNLDVKHFSPEELKVKVLGDVIEVHGKHEERQDEHGFISREFHRKYRIPADVDPLTITSSLSSDGVLTVNGPRKQVSGPERTIPITREEKPAVTAAPKK

SEQ ID NO: 58781 - protein, 139 aa, Homo sapiens
MHHQQRMAALGTDKELSDLLDFSAMFSPPVSSGKNGPTSLASGHFTGSNVEDRSSSGSWGNGGHPSPSRNYGDGTPYDHMTSRDLGSHDNLSPPFVNSRIQSKTERGSYSSYGRESNLQGCHQQSLLGGDMDMGNPGTL

SEQ ID NO: 58782 - protein, 1267 aa, Homo sapiens
MRGLPRGRGLMRARGRGRAAPPGSRGRGRGGPHRGRGRPRSLLSLPRAQASWTPQLSTGLTSPPVPCLPSQGEAPAEMGALLLEKETRGATERVHGSLGDTPRSEETLPKATPDSLEPAGPSSPASVTVTVGDEGADTPVGATPLIGDESENLEGDGDLRGGRILLGHATKSFPSSPSKGGSCPSRAKMSMTGAGKSPPSVQSLAMRLLSMPGAQGAAAAGSEPPPATTSPEGQPKVHRARKTMSKPGNGQPPVPEKRPPEIQHFRMSDDVHSLGKVTSDLAKRRKLNSGGGLSEELGSARRSGEVTLTKGDPGSLEEWETVVGDDFSLYYDSYSVDERVDSDSKSEVEALTEQLSEEEEEEEEEEEEEEEEEEEEEEEEDEESGNQSDRSGSSGRRKAKKKWRKDSPWVKPSRKRRKREPPRAKEPRGVNGVGSSGPSEYMEVPLGSLELPSEGTLSPNHAGVSNDTSSLETERGFEELPLCSCRMEAPKIDRISERAGHKCMATESVDGELSGCNAAILKRETMRPSSRVALMVLCETHRARMVKHHCCPGCGYFCTAGTFLECHPDFRVAHRFHKACVSQLNGMVFCPHCGEDASEAQEVTIPRGDGVTPPAGTAAPAPPPLSQDVPGRADTSQPSARMRGHGEPRRPPCDPLADTIDSSGPSLTLPNGGCLSAVGLPLGPGREALEKALVIQESERRKKLRFHPRQLYLSVKQGELQKVILMLLDNLDPNFQSDQQSKRTPLHAAAQKGSVEICHVLLQAGANINAVDKQQRTPLMEAVVNNHLEVARYMVQRGGCVYSKEEDGSTCLHHAAKIGNLEMVSLLLSTGQVDVNAQDSGGWTPIIWAAEHKHIEVIRMLLTRGADVTLTDNEENICLHWASFTGSAAIAEVLLNARCDLHAVNYHGDTPLHIAARESYHDCVLLFLSRGANPELRNKEGDTAWDLTPERSDVWFALQLNRKLRLGVGNRAIRTEKIICRDVARGYENVPIPCVNGVDGEPCPEDYKYISENCETSTMNIDRNITHLQHCTCVDDCSSSNCLCGQLSIRCWYDKDGRLLQEFNKIEPPLIFECNQACSCWRNCKNRVVQSGIKVRLQLYRTAKMGWGVRALQTIPQGTFICEYVGELISDAEADVREDDSYLFDLDNKDGEVYCIDARYYGNISRFINHLCDPNIIPVRVFMLHQDLRFPRIAFFSSRDIRTGEELGFDYGDRFWDIKSKYFTCQCGSEKCKHSAEAIALEQSRLARLDPHPELLPELGSLPPVNT

SEQ ID NO: 58783 - protein, 51 aa, Homo sapiens
MSTVKEQLIEKLIEDDENSQCKITIVGTGAVGMACAISILLKITVYLQTPE

SEQ ID NO: 58784 - protein, 1087 aa, Homo sapiens
MEGKTGNTTDDEEEEEVEEEEEDDDEDSGAEIEDDDEEGFDDEDEFDDEHDDDLDTEDNELEELEERAEARKKTTEKQQLQSLFLLWSKLTDRLWFKSTYSKMSSTLLVETRNLYGVVGAESRSAPVQHLAGWQAEEQQGETDTVLSAAALCVGVGSFADPDDLPGLAHFLEHMVFMGSLKYPDENGFDAFLKKHGGSDNASTDCERTVFQFDVQRKYFKEALDRWAQFFIHPLMIRDAIDREVEAVDSEYQLARPSDANRKEMLFGSLARPGHPMGKFFWGNAETLKHEPRKNNIDTHARLREFWMRYYSSHYMTLVVQSKETLDTLEKWVTEIFSQIPNNGLPRPNFGHLTDPFDTPAFNKLYRVVPIRKIHALTITWALPPQQQHYRVKPLHYISWLVGHEGKGSILSFLRKKCWALALFGGNGETGFEQNSTYSVFSISITLTDEGYEHFYEVAYTVFQYLKMLQKLGPEKRIFEEIRKIEDNEFHYQEQTDPVEYVENMCENMQLYPLQDILTGDQLLFEYKPEVIGEALNQLVPQKANLVLLSGANEGKCDLKEKWFGTQYSIEDIENSWAELWNSNFELNPDLHLPAENKYIATDFTLKAFDCPETEYPVKIVNTPQGCLWYKKDNKFKIPKAYIRFHLISPLIQKSAANVVLFDIFVNILTHNLAEPAYEADVAQLEYKLVAGEHGLIIRVKGFNHKLPLLFQLIIDYLAEFNSTPAVFTMITEQLKKTYFNILIKPETLAKDVRLLILEYARWSMIDKYQALMDGLSLESLLSFVKEFKSQLFVEGLVQGNVTSTESMDFLKYVVDKLNFKPLEQEMPVQFQVVELPSGHHLCKVKALNKGDANSEVTVYYQSGTRSLREYTLMELLVMHMEEPCFDFLRTKQTLGYHVYPTCRNTSGILGFSVTVGTQATKYNSEVVDKKIEEFLSSFEEKIENLTEEAFNTQVTALIKLKECEDTHLGEEVDRNWNEVVTQQYLFDRLAHEIEALKSFSKSDLVNWFKAHRGPGSKMLSVHVVGYGKYELEEDGTPSSEDSNSSCEVMQLTYLPTSPLLADCIIPITDIRAFTTTLNLLPYHKIVK

SEQ ID NO: 58785 - protein, 88 aa, Homo sapiens
GHKTVTYLTLQGNDQDDMFPALCEVLRHPECNLRYLGLVSCSATTQQWADLSLALEVNQSLTAAVLSIWGHRRAMVMPDLAVWNLSLM

SEQ ID NO: 58786 - protein, 289 aa, Homo sapiens
MGLGPVFLLLAGIFPFAPPGAAAEPHSLRYNLTVLSWDGSVQSGFLAEVHLDGQPFLRYDRQKCRAKPQGQWAEDVLGNKTWDRETRDLTGNGKDLRMTLAHIKDQKEVPQSSRAQTLAMNVRNFLKEDAMKTKTHYHAMHADCLQELRRYLESGVVLRRTVPPMVNVTRSEASEGNITVTCRASSFYPRNIILTWRQDGVSLSHDTQQWGDVLPDGNGTYQTWVATRICRGEEQRFTCYMEHSGNHSTHPVPSGKVLVLQSHWQTFHVSAVAAGCCYFCYYYFLCPLL

SEQ ID NO: 58787 - protein, 326 aa, Homo sapiens
MDAIKKKMQMLKLDKENALDRAEQAEADKKAAEDRSKQLEEDIAAKEKLLRVSEDERDRVLEELHKAEDSLLAAEEAAAKLEDELVSLQKKLKGTEDELDKYSEALKDAQEKLELAEKKATDAEADVASLNRRIQLVEEELDRAQERLATALQKLEEAEKAADESERGMKVIESRAQKDEEKMEIQEIQLKEAKHIAEDADRKYEEVARKLVIIESDLERAEERAELSEGKCAELEEELKTVTNNLKSLEAQAEKYSQKEDRYEEEIKVLSDKLKEAETRAEFAERSVTKLEKSIDDLEEKVAHAKEENLSMHQMLDQTLLELNNM

SEQ ID NO: 58788 - protein, 1640 aa, Homo sapiens
MPNVAETERSNDSGNGEHKSERKSPEENLQGAVKSFCTSASGAPLGPKGDGHYPWSCPVTHTREKIYAICSDYAFLNQATSIYKTPNPSRSPCLPDSTSLSAGNNSSRYIGIPTSTSEIIYNEENSLENLSNSLGKLPLAWEIDKSEFDGVTTNSKHKSGNAKKQVSKRKTSDKKGRYQKECPQHSPLEDIKQRKVLDLRRWYCISRPQYKTSCGISSLISCWNFLYSTMGAGNLPPITQEEALHILGFQPPFEDIRFGPFTGNTTLMRWFRQINDHFHVKGCSYVLYKPHGKNKTAGETASGALSKLTRGLKDESLAYIYHCQNHYFCPIGFEATPVKANKAFSRGPLSPQEVEYWILIGESSRKHPAIHCKKWADIVTDLNTQNPEYLDIRHLERGLQYRKTKKVGGNLHCIIAFQRLNWQRFGLWNFPFGTIRQESQPPTHAQGIAKSESEDNISKKQHGRLGRSFSASFHQDSAWKKMSNISIWLNQALKGVRDRHGNSIENPHLLTLFHRLCKLLFFRIRPIFVFDGDAPLLKKQTLVKRRQRKDLASSDSRKTTEKLLKTFLKRQAIKTAFRSKRDEALPSLTQVRRENDLYVLPPLQEEEKHSSEEEDEKEWQERMNQKQALQEEFFHNPQAIDIESEDFSSLPPEVKHEILTDMKEFTKRRRTLFEAMPEESDDFSQYQLKGLLKKNYLNQHIEHVQKEMNQQHSGHIRRQYEDEGGFLKEVESRRVVSEDTSHYILIKGIQAKTVAEVDSESLPSSSKMHGMSFDVKSSPCEKLKTEKEPDATPPSPRTLLAMQAALLGSSSEEELESENRRQARGRNAPAAVDEGSISPRTLSAIKRALDDDEDVKVCAGDDVQTGGPGAEEMRINSSTENSDEGLKVRDGKGIPFTATLASSSVNSAEEHVASTNEGREPTDSVPKEQMSLVHVGTEAFPISDESMIKDRKDRLPLESAVVRHSDAPGLPNGRELTPASPTCTNSVSKNETHAEVLEQQNELCPYESKFDSSLLSSDDETKCKPNSASEVIGPVSLQETSSIVSVPSEAVDNVENVVSFNAKEHENFLETIQEQQTTESAGQDLISIPKAVEPMEIDSEESESDGSFIEVQSVISDEELQAEFPETSKPPSEQGEEELVGTREGEAPAESESLLRDNSERDDVDGEPQEAEKDAEDSLHEWQDINLEELETLESNLLAQQNSLKAQKQQQERIAATVTGQMFLESQELLRLFGIPYIQAPMEAEAQCAILDLTDQTSGTITDDSDIWLFGARHVYRNFFNKNKFVEYYQYVDFHNQLGLDRNKLINLAYLLGSDYTEGIPTVGCVTAMEILNEFPGHGLEPLLKFSEWWHEAQKNPKIRPNPHDTKVKKKLRTLQLTPGFPNPAVAEAYLKPVVDDSKGSFLWGKPDLDKIREFCQRYFGWNRTKTDESLFPVLKQLDAQQTQLRIDSFFRLAQQEKEDAKRIKSQRLNRAVTCMLRKEKEAAASEIEAVSVAMEKEFELLDKAKGKTQKRGITNTLEESSSLKRKRLSDSKGKNTCGGFLGETCLSESSDGSSSEDAESSSLMNVQRRTAAKEPKTSASDSQNSVKEAPVKNGGATTSSSSDSDDDGGKEKMVLVTARSVFGKKRRKLRRARGRKRKT

SEQ ID NO: 58789 - protein, 224 aa, Homo sapiens
MADKVRRQRPRRRVCWALVAVLLADLLALSDTLAVMSVDLGSESMKVAIVKPGVPMEIVLNKESRRKTPVIVTLKENERFFGDSAASMAIKNPKATLRYFQHLLGKQADNPHVALYQARFPEHELTFDPQRQTVHFQISSQLQFSPEEVLGMVLNYSRSLAEDFAEQPIKDAVITVPVFFNQAERRAVLQAARMAGLKVLQLINDNTATALSYGVFRRKDINTT

SEQ ID NO: 58790 - protein, 150 aa, Homo sapiens
MDLDLLDLNPRIIAAIKKAKLKSVKEVLHFSGPDLKRLTNLSSPEVWHLLRTASLHLRGSSILTALQLHQQKERFPTQHQRLSLGCPVLDALLRGGLPLDGITELAGRSSAGKTQLALQLCLAVQFPRQHGGLEAEWQYFFIGGTSEHIC

SEQ ID NO: 58791 - protein, 410 aa, Homo sapiens
MSDHGDVSLPPEDRVRALSQLGSAVEVNEDIPPRRYFRSGVEIIRMASIYSEEGNIEHAFILYNKYITLFIEKLPKHRDYKSAVIPEKKDTVKKLKEIAFPKAEELKAELLKRYTKEYTEYNEEKKKEAEELARNMAIQQELEKEKQRVAQQKQQQLEQEQFHAFEEMIRNQELEKERLKIVQEFGKVDPGLGGPLVPDLEKPSLDVFPTLTVSSIQPSDCHTTVRPAKPPVVDRSLKPGALSNSESIPTIDGLRHVVVPGRLCPQFLQLASANTARGVETCGILCGKLMRNEFTITHVLIPKQSAGSDYCNTENEEELFLIQDQQGLITLGWIHTHPTQTAFLSSVDLHTHCSYQMMLPESVAIVCSPKFQETGFFKLTDHGLEEISSCRQKGFHPHSKDPPLFCPVLQ

SEQ ID NO: 58792 - protein, 420 aa, Homo sapiens
TLWGPGAGSHPFGVLNTRLSPDLCPGKIVLRALKESRAGMPEQDKDPRVQENPADQRTVPEVTDARSAFWPLRDNGGLSPFVPRPGPLQTDLDAQSSEIRYNQTSQTSWTSSSTKRNAISSSYSSTGGLPGLKQRRGPASSRCQLTLSYSKTVSEDRPQAVSSGHTRCEKAADTAPGETLAPRGGSPRSQASRPRRRKIRLLPSRRGEPLMLPPPLELGYRVTAEDLHLEKQAAFQRINSALHVEDKAISDCRPSRPSHTLSSLATGASGGPPLSKAPTMDAQQDRPKSQDCLGLVAPLASAAEVPSTAPVSGKKHRPPGPLFSSSDTLPATSSHSRDSAQVTSMIPAPFTAASRDAGMRRTRSAPAAAAAAPPPSTLNPTSGSLLQWMEAPHISWPQPQLQHVPRGQNQRSQTSRTRSC

SEQ ID NO: 58793 - protein, 78 aa, Homo sapiens
MSEFRIHHDVNELLSLLRVHGGDGAEVYIDLLQKNRTPYVTTTVSAHSAKAGMHVARSCLTAVSTSQADVILPSQLPK

SEQ ID NO: 58794 - protein, 29 aa, Homo sapiens
MMLPRDLGSTVWLDETGSCPDDGEIDPEA

SEQ ID NO: 58795 - protein, 215 aa, Homo sapiens
MRDNRAVSLCQQEWMCPGPAQRALYRGATQRKDSHVSLATGVPWGYEETKTLLAILSSSQFYGKLQTCQQNSQIYRAMAEGLWEQGFLRTPEQCRTKFKSLQLSYRKVRRGRVPEPCIFYEEMNALSGSWASAPPMASDAVPGQEGSDIEAGELNHQNGEPTEVEDGTVDGADRDEKDFRNPGQEVRKLDLPVLFPNRLGKTPLALMVKGWQSPL

SEQ ID NO: 58796 - protein, 62 aa, Homo sapiens
  MOD_RES (1)..(1): Any amino acid
XQQAGEQPQPASFVPSEMLMSSGYAGQFFQPASNSDYYSQSPYIDSFDEEPPLLEDKLRKCY

SEQ ID NO: 58797 - protein, 98 aa, Homo sapiens
MRALRRLIQGRILLLTICAAGIGGTFQFGYNLSIINAPTLHIQEFTNETWQARTGEPLPDHLVLLMWSLIVSLYPLGGLFGALLAGPLAITLGRSPSW

SEQ ID NO: 58798 - protein, 176 aa, Homo sapiens
MEERGLAPKFDTTFESARPTQTHMALVQLERVGLLRFLVSQNVDGLHVRSGFPRDKLAELHGNMFVEECAKCKTQYVRDTVVGTMGLKATGRLCTVAKARGLRACRGELRDTILDWEDSLPDRDLALADEASRSGPAGTCRWLPSAGEAAWSSSTCSPPSTTAMLTSASMATLTRS

SEQ ID NO: 58799 - protein, 590 aa, Homo sapiens
MRKVPCKKDAASGSFFARDNTANFLHWCRDIGVDETYLFESEGLVLHKDPRQVYLCLLEIGRIVSRYGVEPPVLVKLEKEIELEETLLNTSGPEDSISIPKSCCRHEELHEAVKHIAEDPPCSCSHRFSIEYLSEGRYRLGDKILFIRMLHGKHVMVRVGGGWDTLQGFLLKYDPCRILQFATLEQKILAFQKGVSNESVPDSPARTPQPPEMNPLSAVNMFQKQNSKPSVPVSIPKSKEKQGRPPGALVPASSLKGGNLGSMSVRSKLPNSPAASSHPKLKSSKGITKKPQAPSNNASSSLASLNPVGKNTSSPALPRTAPCISESPRKCISSPNTPKAKVIPAQNSADLPESTLLPNKCSGKTQPKYLKHNHISSRDNAVSHLAAHSNSSSKCPKLPKANIPVRPKPSFQSSAKMTKTSSKTIATGLGTQSQPSDGAPQAKPVPAQKLKSALNLNQPVSVSSVSPVKATQKSKDKNIVSATKKQPQNKSAFQKTGPSSLKSPGRTPLSIVSLPQSSTKTQTAPKSAQTVAKSQHSTKGPPRSGKTPASIRKPPSSVKDADSGDKKPTAKKKEDDDHYFVMTGSKKPRK

SEQ ID NO: 58800 - protein, 121 aa, Homo sapiens
MEAAEELDAWQSGRELCDGQLRGVQYSTESLMEEMARADRETRLFGGPRALAIRRCVLGALQVLLTLPLLFLGLSLLWTVLLDPGAVSAWLWSLTSETTLRRLRYTLSPLLELRANGLLPT

SEQ ID NO: 58801 - protein, 156 aa, Homo sapiens
MVRAGAVGAHLPASGLDIFGDLKKMNKRQLYYQVLNFAMIVSSALMIWKGLIVLTGSESPIVVVLSGSMEPAFHRGDLLFLTNFREDPIRAGEIVVFKVEGRDIPIVHRVIKVHEKDNGDIKFLTKGDNNEVDDRGLYKEGQNWLEKKDVVGRARG

SEQ ID NO: 58802 - protein, 264 aa, Homo sapiens
MGERVLWPLRAGQHWRHRPLPAGLQDGLRSSSNSRSGSRERREEQTDTSDGESVTHHIRRLNQQPSQGLGPRGYDPNRYRLHFERDSREEVERRKRAAREQVLQPVSAELLELDIREVYQPGSVLDFPRRPPWSYEMSKEQLMSQEERSFQDYLGKIHGAYSSEKLSYFEHNLETWRQLWRVLEMSDIVLLITDIRHPVVNFPPALYEYVTGELGLALVLVLNKVDLAPPALVVAWKHYFHQHYPQLHVVLFTSFPRDPRTPQD

SEQ ID NO: 58803 - protein, 68 aa, Homo sapiens
MGFGDLKSPAGLQVCVNVSVSLAGMCHHKQMWQYLKPCPAHRLPTCVMPYVGIITSSLTKRKRPACQE

SEQ ID NO: 58804 - protein, 733 aa, Homo sapiens
MSNVSEERRKRQQNIKEGLQFIQSPLSYPGTQEQYAVYLRALVRNLFNEGNDVYREHDWNNSISQYTEALNIADYAKSEEILIPKEIIEKLYINRIACYSNMGFHDKVLEDCNIVLSLNASNCKALYRKSKALSDLGRYKKAYDAVAKCSLAVPQDEHVIKLTQELAQKLGFKIRKAYVRAELSLKSVPGDGATKALNHSVEDIEPDLLTPRQEAVPVVSLPAPSFSHEVGSELASVPVMPLTSILPLQVEESALPSAVLANGGKMPFTMPEAFLDDGDMVLGDELDDLLDSAPETNETVMMNGPGSLFASENFLGISSQPRNDFGNFFGSAVTKPSSSVTPRHPLEGTHELRQACQICFVKSGPKLMDFTYHANIDHKCKKDILIGRIKNVEDKSWKKIRPRPTKTNYEGPYYICKDVAAEEECRYSGHCTFAYCQEEIDVWTLERKGAFSREAFFGGNGKINLTVFKLLQEHLGEFIFLCEKCFDHKPRMISKRNKDNSTACSHPVTKHEFEDNKCLVHILRETTVKYSKIRSFHGQCQLDLCRHEVRYGCLREDECFYAHSLVELKVWIMQNETGISHDAIAQESKRYWQNLEANVPGAQVLGNQIMPGFLNMKIKFVCAQCLRNGQVIEPDKNRKYCSAKARHSWTKDRRAMRVMSIERKKWMNIRPLPTKKQMPLQFDLCNHIASGKKCQYVGNCSFAHSPEEREVWTYMKENGIQDMEQFYELWLKS

SEQ ID NO: 58805 - protein, 712 aa, Homo sapiens
MDEPMGEEEINPQTEEVSIKEIAITHHVKEGHEKADPSQFELLKVLGQGSFGKVFLVKKISGSDARQLYAMKVLKKATLKVRDRVRTKMERDILVEVNHPFIVKLHYAFQTEGKLYLILDFLRGGDLFTRLSKEVMFTEEDVKFYLAELALALDHLHSLGIIYRDLKPENILLDEEGHIKLTDFGLSKESIDHEKKAYSFCGTVEYMAPEVVNRRGHTQSADWWSFGVLMFEMLTGTLPFQGKDRKETMTMILKAKLGMPQFLSPEAQSLLRMLFKRNPANRLGAGPDGVEEIKRHSFFSTIDWNKLYRREIHPPFKPATGRPEDTFYFDPEFTAKTPKDSPGIPPSANAHQLFRGFSFVAITSDDESQAMQTVGVHSIVQQLHRNSIQFTDGYEVKEDIGVGSYSVCKRCIHKATNMEFAVKIIDKSKRDPTEEIEILLRYGQHPNIITLKDVYDDGKYVYVVTELMKGGELLDKILRQKFFSEREASAVLFTITKTVEYLHAQGVVHRDLKPSNILYVDESGNPESIRICDFGFAKQLRAENGLLMTPCYTANFVAPEVLKRQGYDAACDIWSLGVLLYTMLTGYTPFANGPDDTPEEILARIGSGKFSLSGGYWNSVSDTAKDLVSKMLHVDPHQRLTAALVLRHPWIVHWDQLPQYQLNRQDAPHLVKGAMAATYSALNRNQSPVLEPVGRSTLAQRRGIKKITSTAL

SEQ ID NO: 58806 - protein, 194 aa, Homo sapiens
  MOD_RES (1)..(1): Any amino acid
XEQLREMENLRLESQQLIEKNWLLQGQLDDIKRQKENSDQNHPDNQQLKNEQEESIKERLAKSKIVEEMLKMKADLEEVQSALYNKEMECLRMTDEVERTQTLESKAFQEKEQLRSKLEEMYEERERTSQEMEMLRKQVECLAEENGKLVGHQNLHQKIQYVVRLKKENVRLAEETEKLRAENVFLKEKKRSES

SEQ ID NO: 58807 - protein, 327 aa, Homo sapiens
MAGEITETGELYSSYVFVRVVKPNKIAMLFIMLIPGWARWLTPVIPALWEAEAGRSPEVRSSRPAWPTCFVTTTFVIEAMAAANAQLHWKRMENLKEEEDDDSSTASDSDVLIRDNYERAEKRPILSVQRRGSPNPFEITDRVEMGQMASMFFNKVGVNLFYFCIIVYLYGDLAIYAAAVPFSLMQVTCSATGNDSCGVEADTKYNDTDRCWGPLRRVDAYRIYLAIFTLLLGPFTFFDVQKTKYLQILTSLMRWIDGPPGSVMGRAEEDASPAWPRSRCRCGGKLKLNSLYPTSATCMAPDAPGAGQVKVGVNFLCLPPHRSTRPT

SEQ ID NO: 58808 - protein, 94 aa, Homo sapiens
MSLNPPIFLKRSEENSSKFVETKQSQTTSIASEDPLQNLCLASQEVLQKAQQSGRSKCLKCGGSRMFYCYTCYVPVENVPIEQIPLVKLPLKID

SEQ ID NO: 58809 - protein, 115 aa, Homo sapiens
  MOD_RES (1)..(1): Any amino acid
XAKKKNSKKVQPNSSYQNNITHLNNENLKKSLSCANLSTFAQPPPAQPPAPPASQLSGSQTGGSSSVKKAPHPAVTSAGTPKRVIVQASTSELLRCLGMLSPPRWARITSSRPSC

SEQ ID NO: 58810 - protein, 165 aa, Homo sapiens
MAFANLRKVLISDSLDPCCRKILQDGGLQVVEKQNLSKEELIAELQDCEGLIVRSATKVTADVINAAEKLQVVGRAGTGVDNVDLEAATRKGILVMNTPNGNSLSAAELTCGMIMCLARPETFRDQEITFPMARPAFPPAGGGSGGIYLCSNSSLQFPSELSGIH

SEQ ID NO: 58811 - protein, 235 aa, Homo sapiens
MAAVAVAVREDSGSGMKAELPPGPGAVGREMTKEEKLQLRKEKKQQKKKRKEEKGAEPETGSAVSAAQCQVGPTRELPESGIQLGTPREKVPAGRSKAELRAERRAKQEAERALKQARKGEQGGPPPKASPSTAGETPSGVKRLPEYPQVDDLLLRRLVKKPERQQVPTRKDYGSKVSLFSHLPQYSRQNSLTQFMSHGATRPAVLPGPGQWLQCPVYCPASCLAAGDSGLHNTA

SEQ ID NO: 58812 - protein, 885 aa, Homo sapiens
MWLAAAAPSLARRLLFLGPPPPPLLLLVFSRSSRRRLHSLGLAAMPEKRPFERLPADVSPINYSLCLKPDLLDFTFEGKLEAAAQVRQATNQIVMNCADIDIITASYAPEGDEEIHATGFNYQNEDEKVTLSFPSTLQTGTGTLKIDFVGELNDKMKGFYRSKYTTPSGEVRYAAVTQFEATDARRAFPCWDEPAIKATFDISLVVPKDRVALSNMNVIDRKPYPDDENLVEVKFARTPVMSTYLVAFVVGEYDFVETRSKDGVCVRVYTPVGKAEQGKFALEVAAKTLPFYKDYFNVPYPLPKIDLIAIADFAAGAMENWGLVTYRETALLIDPKNSCSSSRQWVALVVGHELAHQWFGNLVTMEWWTHLWLNEGFASWIEYLCVDHCFPEYDIWTQFVSADYTRAQELDALDNSHPIEVSVGHPSEVDEIFDAISYSKGASVIRMLHDYIGDKDFKKGMNMYLTKFQQKNAATEDLWESLENASGKPIAAVMNTWTKQMGFPLIYVEAEQVEDDRLLRLSQKKFCAGGSYVGEDCPQWMVPITISTSEDPNQAKLKILMDKPEMNVVLKNVKPDQWVKLNLGTVGFYRTQYSSAMLESLLPGIRDLSLPPVDRLGLQNDLFSLARAGIISTVEVLKVMEAFVNEPNYTVWSDLSCNLGILSTLLSHTDFYEEIQEFVKDVFSPIGERLGWDPKPGEGHLDALLRGLVLGKLGKAGHKATLEEARRRFKDHVEGKQILSADLRSPVYLTVLKHGDGTTLDIMLKLHKQADMQEEKNRIERVLGATLLPDLIQKVLTFALSEEVRPQDTVSVIGGVAGGSKHGRKAAWKFIKDNWEELYNRYQGGFLISRLIKVQWLTPVIPALWDAEVGRSPEVGSSRLSWPTW

SEQ ID NO: 58813 - protein, 1698 aa, Homo sapiens
MRLLWGLIWASSFFTLSLQKPRLLLFSPSVVHLGVPLSVGVQLQDVPRGQVVKGSVFLRNPSRNNVPCSPKVDFTLSSERDFALLSLQVPLKDAKSCGLHQLLRGPEVQLVAHSPWLKDSLSRTTNIQGINLLFSSRRGHLFLQTDQPIYNPGQRVRYRVFALDQKMRPSTDTITVMVENSHGLRVRKKEVYMPSSIFQDDFVIPDISEPGTWKISARFSDGLESNSSTQFEVKKYVLPNFEVKITPGKPYILTVPGHLDEMQLDIQARYIYGKPVQGVAYVRFGLLDEDGKKTFFRGLESQTKLVNGQSHISLSKAEFQDALEKLNMGITDLQGLRLYVAAAIIEYPGGEMEEAELTSWYFVSSPFSLDLSKTKRHLVPGAPFLLQALVREMSGSPASGIPVKVSATVSSPGSVPEVQDIQQNTDGSGQVSIPIIIPQTISELQLSVSAGSPHPAIARLTVAAPPSGGPGFLSIERPDSRPPRVGDTLNLNLRAVGSGATFSHYYYMILSRGQIVFMNREPKRTLTSVSVFVDHHLAPSFYFVAFYYHGDHPVANSLRVDVQAGACEGKLELSVDGAKQYRNGESVKLHLETDSLALVALGALDTALYAAGSKSHKPLNMGKVFEAMNSYDLGCGPGGGDSALQVFQAAGLAFSDGDQWTLSRKRLSCPKEKTTRKKRNVNFQKAINEKLGQYASPTAKRCCQDGVTRLPMMRSCEQRAARVQQPDCREPFLSCCQFAESLRKKSRDKGQAGLQRALEILQEEDLIDEDDIPVRSFFPENWLWRVETVDRFQILTLWLPDSLTTWEIHGLSLSKTKGLCVATPVQLRVFREFHLHLRLPMSVRRFEQLELRPVLYNYLDKNLTVSVHVSPVEGLCLAGGGGLAQQVLVPAGSARPVAFSVVPTAAAAVSLKVVARGSFEFPVGDAVSKVLQIEKEGAIHREELVYELNPLDHRGRTLEIPGNSDPNMIPDGDFNSYVRVTASDPLDTLGSEGALSPGGVASLLRLPRGCGEQTMIYLAPTLAASRYLDKTEQWSTLPPETKDHAVDLIQKGYMRIQQFRKADGSYAAWLSRGSSTWLTAFVLKVLSLAQEQVGGSPEKLQETSNWLLSQQQADGSFQDLSPVIHRSMQGGLVGNDETVALTAFVTIALHHGLAVFQDEGAEPLKQRVEASISKASSFLGEKASAGLLGAHAAAITAYALTLTKAPADLRGVAHNNLMAMAQETGDNLYWGSVTGSQSNAVSPTPAPRNPSDPMPQAPALWIETTAYALLHLLLHEGKAEMADQAAAWLTRQGSFQGGFRSTQDTVIALDALSAYWIASHTTEERGLNVTLSSTGRNGFKSHALQLNNRQIRGLEEELQFSLGSKINVKVGGNSKGTLKVLRTYNVLDMKNTTCQDLQIEVTVKGHVEYTMEANEDYEDYEYDELPAKDDPDAPLQPVTPLQLFEGRRNRRRREAPKLTSLSDRYVSHFETEGPHVLLYFDSVPTSRECVGFEAVQEVPVGLVQPASATLYDYYNPERRCSVFYGAPSKSRLLATLCSAEVCQCAEGKCPRQRRALERGLQDEDGYRMKFACYYPRVEYGFQVKVLREDSRAAFRLFETKITQVLHFTKDVKAAANQMRNFLVRASCRLRLEPGKEYLIMGLDGATYDLEGHPQYLLDSNSWIEEMPSERLCRSTRQRAACAQLNDFLQEYGTQGCQV

SEQ ID NO: 58814 - protein, 225 aa, Homo sapiens
MCDAHLRGPSGIITSPNFPIQYDNNAHCVWIITALNPSKAGGDPGNIQCNKEGLSVETQSLRLRNRSCLLGNSKDNGCCVPNPVHGTGLQVIKLAFEEFDLERGYDTLTVGDGGQDGDQKTVLYILTGTSVPDLIVSTNHQMWLLFQTDGSGSSLGFKASYEEIEQGSCGDPGIPAYGRREGSRFHHGDTLKFECQPAFELVGQKAITCQKNNQWSAKKPGCVCK

SEQ ID NO: 58815 - protein, 408 aa, Homo sapiens
MEVNAGGVIAYISSSSSASSPASCHSEGSENSFQSSSSSVPSSPNSSNSDTNGNPKNGDLANIEGILKNDRIDCSMKTSKSSAPGMTKSHSGVTKFSGMVLLCKVCGDVASGFHYGVHACEGCKGFFRRSIQQNIQYKKCLKNENCSIMRMNRNRCQQCRFKKCLSVGMSRDAVRFGRIPKREKQRMLIEMQSAMKTMMNSQFSGHLQNDTLVEHHEQTALPAQEQLRPKPQLEQENIKSSSPPSSDFAKEEVIGMVTRAHKDTFMYNQEQQENSAESMQPQRGERIPKNMEQYNLNHDHCGNGLSSHFPCSESQQHLNGQFKGRNIMHYPNGHAICIANGHCMNFSNAYTQRVCDRVPIDGFSQNENKNSYLCNTGGRMHLYSVHIQPKFHQKQQYHTISSLNHEVL

SEQ ID NO: 58816 - protein, 55 aa, Homo sapiens
MDMAQEPVTFRDVAIYFSREEWACLEPSQRALYRDVMLDNFSSVAALGEHGLSAA

SEQ ID NO: 58817 - protein, 107 aa, Homo sapiens
MFRKGKKRHSSSSSQSSEISTKSKSVDSSLGGLSRSSTVASLDTDSTKSSGQSNNNSDTCAEFRIKYVGAIEKLKLSEGKGLEGPLDLINYIDVAQVKKKNSVTLWL

SEQ ID NO: 58818 - protein, 69 aa, Homo sapiens
MEPLRVLELYSGVGGMHHALRESCIPAQVVAAIDVNTVANEVYKYNFPHTQLLAKTIEKRSNTAQFSAT

SEQ ID NO: 58819 - protein, 38 aa, Homo sapiens
  MOD_RES (1)..(1): Any amino acid
XQESEFLCLEFDEVKVNQILKTLSEVEESISTLISQPN

SEQ ID NO: 58820 - protein, 911 aa, Homo sapiens
MKRIFSCSSTQCVKVLLQHGANEDAVDAENRSPLHWAASSGCASSVLLLCDHEAFLDVLDNDGRTPLMIASLGGHAAICSQLLQRGARVNVTDKNDKSALILACEKGSAEVAELLLSHGADAGAVDSTGHDALHYALHTQDKALWRHLQQALSRRRRGGQRLVQHPDLASQASPSEPQAGSPPKSSWRAEPEEEQEEKEDEDPCSEEWRWKYEEERRKVVRLEQELVQKTEECKTQAAAYLDLENQIREQAQELGVLLSWEPRASGKQGSSLRPGGDGMEQGCPKDLLAESTQELKKQQQAAATVNPVLAPKKAEDSAPGKIQYEVHGRSQPEEQGPPQSPASETIRKATGQQLTTNGAQTFGPDHADQLPAGQKESSQVLGVEPGGTVAEPVGPAAMNQLLLQLREELAAVWREKDAARGALSRPVMEGALGTPRAEAAAAAWEKMEARLERVLARLEWAKAGLQVKPEVPSQESREGALKAAPGSIKQDEEKEKRVPGAQGEPLGALGGEKALGGLAKGQLEKEMSVLRLSNSNLLEELGELGRERQRLQRELQSLSQRLQREFVPKPQAQVQLQQLRQSVGLLTNELAMEKEATEKLRKLLASQSSGLRGLWDCLPADLVGERSAQSKAAESLEELRACISTLVDRHREAQQVLARLQEENQQLRGSLSPCREPGTSLKAPASPQVAALEQDLGKLEEELRAVQATMSGKSQEIGKLKQLLYQATEEVAELRAREAASLRQHEKTRGSLVAQAQAWGQELKALLEKYNTACREVGRLREAVAEERRRSGDLAAQAAEQERQASEMRGRSEQFEKTAELLKEKMEHLIGACRDKEAKIKELLKKLEQLSEEVLAIRGENARLALQLQDSQKNHEEIISTYRNHLLNAARGYMEHEVYNILLQILSMEEE

SEQ ID NO: 58821 - protein, 1042 aa, Homo sapiens
MNVNQSVPPVPPFGQPQPIYPGYHQSSYGGQSGSTAPAIPYGAYNGPVPGYQQTPPQGMSRAPPSSGAPPASTAQAPCGQAAYGQFGQGDVQNGPSSTVQMQRLPGSQPFGSPLAPVGNQPPVLQPYGPPPTSAQVATQLSGMQISGAVAPAPPSSGLGFGPPTSLASASGSFPNSGLYGSYPQGQAPPLSQAQGHPGIQTPQRSAPSQASSFTPPASGGPRLPSMTGPLLPGQSFGGPSVSQPNHVSSPPQALPPGTQMTGPLGPLPPMHSPQQPGYQPQQNGSFGPARGPQSNYGGPYPAAPTFGSQPGPPQPLPPKRLDPDAIPSPIQVIEDDRNNRGTEPFVTGVRGQVPPLVTTNFLVKDQGNASPRYIRCTSYNIPCTSDMAKQAQVPLAAVIKPLARLPPEEASPYVVDHGESGPLRCNRCKAYMCPFMQFIEGGRRFQCCFCSCINDVPPQYFQHLDHTGKRVDAYDRPELSLGSYEFLATVDYCKNNKFPSPPAFIFMIDVSYNAIRTGLVRLLCEELKSLLDFLPREGGAEESAIRVGFVTYNKVLHFYNVKSSLAQPQMMVVSDVADMFVPLLDGFLVNVNESRAVITSLLDQIPEMFADTRETETVFVPVIQAGMEALKAAECAGKLFLFHTSLPIAEAPGKLKNRDDRKLINTDKEKTLFQPQTGAYQTLAKECVAQGCCVDLFLFPNQYVDVATLSVVPQLTGGSVYKYASFQVENDQERFLSDLRRDVQKVVGFDAVMRVRTSTGIRAVDFFGAFYMSNTTDVELAGLDGDKTVTVEFKHDDRLNEESGALLQCALLYTSCAGQRRLRIHNLALNCCTQLADLYRNCETDTLINYMAKFAYRGVLNSPVKAVRDTLITQCAQILACYRKNCASPSSAGQLILPECMKLLPVYLNCVLKSDVLQPGAEVTTDDRAYVRQLVTSMDVTETNVFFYPRLLPLTKSPVESTTEPPAVRASEERLSNGDIYLLENGLNLFLWVGASVQQGVVQSLFSVSSFSQITSGLVRAGSQGEYGCGSILCETIGSQYS

SEQ ID NO: 58822 - protein, 119 aa, Homo sapiens
MKSDCMQTTICQERKKDPIEMFHSGQLVKVCAPMVRYSKLAFRTLVRKYSCDLCYTPMIVAADFVKSIKARDSEFTTNQGDCPLIVQFAANDARLLSDAARIVCPYANGIDINCGCPQR

SEQ ID NO: 58823 - protein, 80 aa, Homo sapiens
MESPGESGAGSPGAPSPSSFTTGHLAREKRSSCGNLTPASARPCACGCLKPVAPPSSPATTSWRALAASPWRARSSCSQT

SEQ ID NO: 58824 - protein, 436 aa, Homo sapiens
MVVREKILDLVISCFKRHGAKGMDTPAFELKETLTEKYGEDSGLMYDLKDQGGELLSLRYDLTVPFARYLAMNKVKKMKRYHVGKVWRRESPTIVQGRYREFCQCDFDIAGQFDPMIPDAECLKIMCEILSGLQLGDFLIKVNDRRIVDGMFAVCGVPESKFRAICSSIDKLDKMAWKDVRHEMVVKKGLAPEVADRIGDYVQCHGGVSLVEQMFQDPRLSQNKQALEGLGDLKLLFEYLTLFGIADKISFDLSLARGLDYYTGVIYEAVLLQTPTQAGEEPLNVGSVAAGGRYDGLVGMFDPKGHKVPCVGLSIGVERIFYIVEQRMKTKGEKVRTTETQVFVATPQKNFLQERLKLIAELWDSGIKAEMLYKNNPKLLTQLHYCESTGIPLVVIIGEQELKEGVIKIRSVASREEVAIKRENFVAEIQKRLSES

SEQ ID NO: 58825 - protein, 1195 aa, Homo sapiens
MDLRDFYLLAALIACLRLDSAIAQELIYTIREELPENVPIGNIPKDLNISHINAATGTSASLVYRLVSKAGDAPLVKVSSSTGEIFTTSNRIDREKLCAGASYAEENECFFELEVVILPNDFFRLIKIKIIVKDTNDNAPMFPSPVINISIPENTLINSRFPIPSATDPDTGFNGVQHYELLNGQSVFGLDIVETPEGEKWPQLIVQQNLDREQKDTYVMKIKVEDGGTPQKSSTAILQVTVSDVNDNRPVFKEGQVEVHIPENAPVGTSVIQLHATDADIGSNAEIRYIFGAQVAPATKRLFALNNTTGLITVQRSLDREETAIHKVTVLASDGSSTPARATVTINVTDVNDNPPNIDLRYIISPINGTVYLSEKDPVNTKIALITVSDKDTDVNGKVICFIEREVPFHLKAVYDNQYLLETSSLLDYEGTKEFSFKIVASDSGKPSLNQTALVRVKLEDENDNPPIFNQPVIELSVSENNRRGLYLTTISATDEDSGKNADIVYQLGPNASFFDLDRKTGVLTASRVFDREEQERFIFTVTARDNGTPPLQSQAAVIVTVLDENDNSPKFTHNHFQFFVSENLPKYSTVGVITVTDADAGENKAVTLSILNDNDNFVLDPYSGVIKSNVSFDREQQSSYTFDVKATDGGQPPRSSTAKVTINVMDVNDNSPVVISPPSNTSFKLVPLSAIPGSVVAEVFAVDVDTGMNAELKYTIVSGNNKGLFRIDPVTGNITLEEKPAPTDVGLHRLVVNISDLGYPKSLHTLVLVFLYVNDTAGNASYIYDLIRRTMETPLDRNIGDSSQPYQNEDYLTIMIAIIAGAMVVIVVIFVTVLVRCRHASRFKAAQRSKQGAEWMSPNQENKQNKKKKRKKRKSPKSSLLNFVTIEESKPDDAVHEPINGTISLPAELEEQSIGRFDWGPAPPTTFKPNSPDLAKHYKSASPQPAFHLKPDTPVSVKKHHVIQELPLDNTFVGGCDTLSKRSSTSSDHFSASECSSQGGFKTKGPLHTRQCNSHSKSDNIPVTPQKCPSSTGFHIQENEESHYEPQDEFYDQASPDKRTEADGNSDPNSDGPLGPRGLAEATEMCTQECLVLGHSDNCWMPPGLGPYQHPKSPLSTFAPQKEWVKKDKLVNGHTLTRAWKEDSNRNQFNDRKQYGSNEGHFNNGSHMTDIPLANLKSYKQAGGATESPKEHQL

SEQ ID NO: 58826 - protein, 127 aa, Homo sapiens
MILISAGCPGGLWPIVVLVGLFIWICFAVRVWDVRPFAPKERCVKIFQGNVHNFEKNLLRCSWSPDGSKIAAGSADRFVYVWDTTSRRILYKLPGHAGSINEVAFHPDEPIIISASSDKRLYMGEIQ

SEQ ID NO: 58827 - protein, 65 aa, Homo sapiens
MPPPALFLSSLYPRLEFQNDFYRSCIRRSSPQPPPNLAWRPESLYSGELAGGGYVLSAPCPGETC

SEQ ID NO: 58828 - protein, 532 aa, Homo sapiens
MISAHCNLHLPGSSDSLASASQLLLAGRLPGRADAPDAPPSGRRRSRSMGSAFERVVRRVVQELDHGGEFIPVTSLQSSTGFQPYCLVVRKPSSSWFWKPRYKCVNLSIKDILEPDAAEPDVQRGRSFHFYDAMDGQIQGSVELAAPGQAKIAGGAAVSDSSSTSMNVYSLSVDPNTWQTLLHERHLRQPEHKVLQQLRSRGDNVYVVTEVLQTQKEVEVTRTHKREGSGRFSLPGATCLQGEGQGHLSQKKTVTIPSGSTLAFRVAQLVIDSDLDVLLFPDKKQRTFQPPATGHKRSTSEGAWPQLPSGLSMMRCLHNFLTDGVPAEGAFTEDFQGLRAEVETISKELELLDRELCQLLLEGLEGVLRDQLALRALEEALEQGQSLGPVEPLDGPAGAVLECLVLSSGMLVPELAIPVVYLLGALTMLSETQHKLLAEALESQTLLGPLELVGSLLEQSAPWQERSTMSLPPGLLGNSWGEGAPAWVLLDECGLELGEDTPHVCWEPQAQGRMCALYASLALLSGLSQEPH

SEQ ID NO: 58829 - protein, 435 aa, Homo sapiens
MNFSEVFKLSSLLCKFSPDGKYLASCVQYRLVVRDVNTLQILQLYTCLDQIQHIEWSADSLFILCAMYKRGLVQVWSLEQPEWHCKIDEGSAGLVASCWSPDGRHILNTTEFHLRITVWSLCTKSVSYIKYPKACLQGITFTRDGRYMALAERRDCKDYVSIFVCSDWQLLRHFDTDTQDLTGIEWAPNGCVLAVWDTCLEYKILLYSLDGRLLSTYSAYEWSLGIKSVAWSPSSQFLAVGSYDGKVRILNHVTWKMITEFGHPAAINDPKIVVYKEAEKSPQLGLGCLSFPPPRAGAGPLPSSESKYEIASVPVSLQTLKPVTDRANPKIGIGMLAFSPDSYFLATRNDNIPNAVWVWDIQKLRLFAVLEQLSPVRAFQWDPQQPRLAICTGGSRLYLWSPAGCMSVQVPGEGKHIPEATDVAALLCAVWHHTG

SEQ ID NO: 58830 - protein, 301 aa, Homo sapiens
MEKVKRENATVMDKTRALIDSVIPKGAQACQICITYICEEDSYLAGTLGLSADQTSGNYLNMQDSQGVLSSFPAPQAVQDNPAMPTSSGSEGNVKLCSLEEAQRIWKQKSAEIYPIMDKSSRTRLALIICNEEFDSIPRRTGAEVDITGMTMLLQNLGYSVDVKKNLTASDMTTELEAFAHRPEHKTSDSTFLVFMSHGIREGICGKKHSEQVPDILQLNAIFNMLNTKNCPSLKDKPKVIIIQACRGDSPGVVWFKDSVGVSGNLSLPTTEEFEDDAIKKAHIEKDFIAFCSSTPGKSQS

SEQ ID NO: 58831 - protein, 146 aa, Homo sapiens
MVALCSLQHLGSSDPRALPTLPTATSGQRPAKRRRKSPAMAALTRDPQFQKLQQWYREHRSELNLRRLFDANKDRFNHFSLTLNTNHGHILVDYSKNLVTEDVMRMLVDLAKSRGVEAARERMFNGEKINYTEGRAVLHVALRNRS

SEQ ID NO: 58832 - protein, 53 aa, Homo sapiens
MAYHSGYGAHAAPFCVCEQTQVFFCCGHSLRGQEARAAGLPLHTPELGSAVQS

SEQ ID NO: 58833 - protein, 178 aa, Homo sapiens
MWDLVLEDRRMNSLRLVAPMWNGRIRGIHRLGAAVAPEGNQKKKRTILQFLTNYFYDVEALRDYLLQREMYKVHEKNRFRDKEWIRPDKYGHFSQEFWNFCEVPVEAVDAGDCDINYEGLDNLLRLKELQSLSLQRCCHVDDWCLSRLYPLADSLQELSLAGCPRISERGLACLHHLQ

SEQ ID NO: 58834 - protein, 277 aa, Homo sapiens
MYHGMNPSNGDGFLEQQQQQQQPQSPQRLLAVILWFQLALCFGPAQLTGGFDDLQVCADPGIPENGFRTPSGGVFFEGSVARFHCQDGFKLKGATKRLCLKHFNGTLGWIPSDNSICVQEDCRIPQIEDAEIHNKTYRHGEKLIITCHEGFKIRYPDLHNMVSLCRDDGTWNNLPICQGCLRPLASSNGYVNISELQTSFPVGTVISYRCFPGFKLDGSAYLECLQNLIWSSSPPRCLALEGGRPEHLFPVLYFPHISLSTTSNGESRRFRLPPAAL

SEQ ID NO: 58835 - protein, 197 aa, Homo sapiens
  MOD_RES (1)..(1): Any amino acid
XSTVTDLQELLGCLYESQEEELVKEVMAQFKEISLHLNAVDVVPSSFCVKHCRNLQKMSLQVIKENLPENVTASESDAEVERSQDDQHMLPFWTDLCSIFGSNKDLMGLAINDSFLSASLVRILCEQIASDTCHLQRVVFKNISPADAHRNLCLALRGHKTVTYLTLQGNDQDDMFPALCEVLRHPECNLRYLGYIS

SEQ ID NO: 58836 - protein, 129 aa, Homo sapiens
MKRHEIMVAKPTVMCSHFAQDLWPEQNIKDSFQKVTLKRYGKCRHENLPLRKGCESMDECKMHKGGCNGLNQCLTATQSKIFQCDKYVKVAHKFSNSNRHEIRHTKKKPFKCTKCGKSFGMISCLTEHS

SEQ ID NO: 58837 - protein, 61 aa, Homo sapiens
  MOD_RES (1)..(1): Any amino acid
XCTSYISQSIPCSLMKSYFETSSECSKPGVIFLTKKGRQVCAKPSGPGVQDCMKKLKPYSI

SEQ ID NO: 58838 - protein, 269 aa, Homo sapiens
MSWKKALRIPGGLRVATVTLMLAMLSTPVAEGRDSPEDFVYQFKGMCYFTNGTERVRLVTRYIYNREEYARFDSDVGVYRAVTPLGPPDAEYWNSQKEVLERTRAELDTVCRHNYQLELRTTLQRRVEPTVTISPSRTEALNHHNLLVCSVTDFYPAQIKVRWFRNDQEETTGVVSTPLIRNGDWTFQILVMLEMTPQRGDVYTCHVEHPSLQNPIIVEWRAQSESAQSKMLSGIGGFVLGLIFLGLGLIIHHRSQKGPQGPPPAGLLH

SEQ ID NO: 58839 - protein, 57 aa, Homo sapiens
MSRSVALAVLALLSLSGLERELKKWSIQTCLSARTGLSISCTTLNSPPLKKMSMPAV

SEQ ID NO: 58840 - protein, 51 aa, Homo sapiens
MSNTTVPNAPQANSDSMVGYVLGPFFLITLVGVVVAVGGPAAPSPAPHVQL

SEQ ID NO: 58841 - protein, 306 aa, Homo sapiens
MRSAAVLALLLCAGQVTALPVNSPMNKGDTEVMKCIVEVISDTLSKPSPMPVSQECFETLRGDERILSILRHQNLLKELQDLALQGAKERAHQQKKHSGFEDELSEVLENQSSQAELKGRSEALAVDGAGKPGAEEAQDPEGKGEQEHSQQKEEEEEMAVVPQGLFRGGKSGELEQEEERLSKEWEDSKRWSKMDQLAKELTAEKRLEGQEEEEDNRDSSMKLSFRARAYGFRGPGPQLRRGWRPSSREDSLEAGLPLQVRGYPEEKKEEEGSANRRPEDQELESLSAIEAELEKVAHQLQALRRG

SEQ ID NO: 58842 - protein, 85 aa, Homo sapiens
MMRVCWLVRQDSRHQRIRLPHLEAVVIGRGPETKITDKKCSRQQVQLKAECNKGYVKVKQSLRKRQRTLAWKHTGRERDQATVIL

SEQ ID NO: 58843 - protein, 375 aa, Homo sapiens
MSTAGKVIKCKAAVLWEVKKPFSIEDVEVAPPKAYEVRIKMVAVGICHTDDHVVSGNLVTPLPVILGHEAAGIVESVGEGVTTVKPGDKVIPLFTPQCGKCRVCKNPESNYCLKNDLGNPRGTLQDGTRRFTCRGKPIHHFLGTSTFSQYTVVDENAVAKIDAASPLEKVCLIGCGFSTGYGSAVNVAKVTPGSTCAVFGLGGVGLSAVMGCKAAGAARIIAVDINKDKFAKAKELGATECINPQDYKKPIQEVLKEMTDGGVDFSFEVIGRLDTMMASLLCCHEACGTSVIVGVPPASQNLSINPMLLLTGRTWKGAVYGGFKSKEGIPKLVADFMAKKFSLDALITHVLPFEKINEGFDLLHSGKSIRTVLTF

SEQ ID NO: 58844 - protein, 42 aa, Homo sapiens
MDEMATTQISKDELDELKEAFAKVVETEFHRVSQDGLDLLTS

SEQ ID NO: 58845 - protein, 534 aa, Homo sapiens
MSDPYMPSYYAPSIGFPYSLGEAAWSTAGDQPMPYLTTYGQMSNGEHHYIPDGVFSQPGALGNTPPFLGQHGFNFFPGNADFSTWGTSGSQGQSTQSSAYSSSYGYPPSSLGRAITDGQAGFGNDTLSKVPGISSIEQGMTGLKIGGDLTAAVTKTVGTALSSSGMTSIATNSVPPVSSAAPKPTSWAAIARKPAKPQPKLKPKGNVGIGGSAVPPPPIKHNMNIGTWDEKGSVVKAPPTQPVLPPQTIIQQPQPLIQPPPLVQSQLPQQQPQPPQPQQQQGPQPQAQPHQVQPQQQQLQNRWVAPRNRGAGFNQNNGAGSENFGLGVVPVSASPSSVEVHPVLEKLKAINNYNPKDFDWNLKNGRVFIIKSYSEDDIHRSIKYSIWCSTEHGNKRLDAAYRSLNGKGPLYLLFSVNGSGHFCGVAEMKSVVDYNAYAGVWSQDKWKGKFEVKWIFVKDVPNNQLRHIRLENNDNKPVTNSRDTQEVPLEKAKQVLKIIATFKHTTSIFDDFAHYEKRQEEEEAMRRERNRNKQ

SEQ ID NO: 58846 - protein, 557 aa, Homo sapiens
MPLAFCGSENHSAAYRVDQGVLNNGCFVDALNVVPHVFLLFITFPILFIGWGSQSSKVHIHHSTWLHFPGHNLRWILTFMLLFVLVCEIAEGILSDGVTESHHLHLYMPAGMAFMAAVTSVVYYHNIETSNFPKLLIALLVYWTLAFITKTIKFVKFLDHAIGFSQLRFCLTGLLVILYGMLLLVEVNVIRVRRYIFFKTPREVKPPEDLQDLGVRFLQPFVNLLSKGTYWWMNAFIKTAHKKPIDLRAIGKLPIAMRALTNYQRLCEAFDAQRKDIQGTQGARAIWQALSHAFGRRLVLSSTFRILADLLGFAGPLCIFGIVDHLGKENDVFQPKTQFLGVYFVSSQEFLANAYVLAVLLFLALLLQRTFLQASYYVAIETGINLRGAIQTKIYNKIMHLSTSNLSMGEMTAGQICNLVAIDTNQLMWFFFLCPNLWAMPVQIIVGVILLYYILGVSALIGAAVIILLAPVQYFVATKLSQAQRSTLEYSNERLKQTNEMLRGIKLLKLYAWENIFRTRVETTRRKEMTSLRAFAIYTSISIFMNTAIPIAAVLIC

SEQ ID NO: 58847 - protein, 310 aa, Homo sapiens
MVDKDTERDIEMKRQLRRLRELHLYSTWKKYQEAMKTSLGVPQCERDEGSLGKPLCPPEILSETLPGSVKKRVCFPSEDHLEEFIAEHLPEASNQSLLTVAHADTGIQTNGDLEDLEEHGPGQTVSEEATEVHMMEGDPDTLAELLIRDVLQELSSYNGEEEDPEEVKTSLGVPQRGDLEDLEEHVPGQTVSEEATGVHMMQVDPATPAKSDLEDLEEHVPGQTVSEEATGVHMMQVDPATLAKQLEDSTITGSHQQMSASPSSAPAEEATEKTKVEEEVKTRKPKKKTRKPSKKSRWNVLKCWDIFNIF

SEQ ID NO: 58848 - protein, 217 aa, Homo sapiens
MLLLLLSIIVLHVAVLVLLFVSTIVSQWIVGNGHATDLWQNCSTSSSGNVHHCFSSSPNVCPGHHDPVDHLQHSVSVPVLLPTLHPHQGGQVLHHWNLPNSCWSVRDECCGHLHGEAPGVASQLGLLLRFRLHPGLGGLPPGPSQRCHLCDLAETRMRRPDGLSEALSVHREGRKGKQKADKEKRASPKSQTQTKPNRKQWRWGLLLIEDVYNISGL

SEQ ID NO: 58849 - protein, 92 aa, Homo sapiens
MAGSEELGLREDTLRVLAAFLRRGEAAGSPVPTPPRPSYSRLLCFGGPAAGTAGPRAAEISAQPRITGSPIDREGSHTAEAGGPAGGGGRSH

SEQ ID NO: 58850 - protein, 482 aa, Homo sapiens
MALRRLGAALLLLPLLAAVEETLMDSTTATAELGWMVHPPSGWEEVSGYDENMNTIRTYQVCNVFESSQNNWLRTKFIRRRGAHRIHVEMKFSVRDCSSIPSVPGSCKETFNLYYYEADFDSATKTFPNWMENPWVKVDTIAADESFSQVDLGGRVMKINTEVRSFGPVSRSGFYLAFQDYGGCMSLIAVRVFYRKCPRIIQNGAIFQETLSGAESTSLVAARGSCIANAEEVDVPIKLYCNGDGEWLVPIGRCMCKAGFEAVENGTVCRGCPSGTFKANQGDEACTHCPINSRTTSEGATNCVCRNGYYRADLDPLDMPCTTIPSAPQAVISSVNETSLMLEWTPPRDSGGREDLVYNIICKSCGSGRGACTRCGDNVQYAPRQLGLTEPRIYISDLLAHTQYTFEIQAVNGVTDQSPFSPQFASVNITTNQAAPSAVSIMHQVSRTVDSITLSWSQPDQPNGVILDYELQYYEKMKTQRS

SEQ ID NO: 58851 - protein, 34 aa, Homo sapiens
MAAAARARVAYLLRQLQRAAPWTFTFWENNRLCL

SEQ ID NO: 58852 - protein, 387 aa, Homo sapiens
MGDRERNKKRLLELLRAPDTGNAHCADCGAADPDWASYKLGIFICLNCCGVHRNFPDISRVKSVRLDFWDDSIVEVAVVLQFMIHNGNLRVKAKFEARVPAFYYIPQANDCLVLKEQWIRAKYERREFMADGETISLPGNREGFLWKRGRDNSQFLRRKFVLLAREGLLKYFTKEQGKSPKAVISIKDLNATFQTEKIGHPHGLQITYRRDGHTRNLFVYHESGKEIVDWFNALRAARLQYLKMAFPELPESELVPFLTRNYLKQGFMEKTGPKQKEPFKKRWFALDCHERRLLYYKNPLDAFEQGQVFLGNKEQGYEAYEDLPKGIRGNRWKAGLTIVTPERRFVLTCPSEKEQQEWLESLRGVLSSPLTPLNRLTASTESGRSSR

SEQ ID NO: 58853 - protein, 46 aa, Homo sapiens
  MOD_RES (1)..(1): Any amino acid
XCPDSLDDADALGSMLISWYMSGYHTGYYMGFRQNQKEGRCSHSLN

SEQ ID NO: 58854 - protein, 175 aa, Homo sapiens
MDGSGEQPRGGGFHPGSSRANGGEAPELALDPVPQDASTKKLSECLKRIGDELDSNMELQRMIAAVDTDSPREVFFRVAADMFSDGNFNWGRVVALFYFASKLVLKALCTKVPELIRTIMGWTLDFLRERLLGWIQDQGGWDGLLSYFGTPTWQTVTIFVAGVLTASLTIWKKMG

SEQ ID NO: 58855 - protein, 84 aa, Homo sapiens
MENFILYEEIGRGSKTVVYKGRRKGTINFVAILCTDKCKRPEITNWVRLTREIKHKNIVTFHEWYETSNHLWLVVELCTGQDYG

SEQ ID NO: 58856 - protein, 56 aa, Homo sapiens
MKKNTSKTTMRINKQDALCTPHSHDPRDLQNMLDGGEYAPFVSPPMLESNFIQLLS

SEQ ID NO: 58857 - protein, 239 aa, Homo sapiens
MAQKISERMAGNEALSPTSPFREGRPGEWRTPAARGPRSGDPGPGPSHPAQPKAPRFPSNIIVTNGAAREPRRTLSRAAVSVQERRAQVLATIHGHAGAFPAAGDAGEGAPGGGSSPERVARGRGLPGPAESLRAGGQAPRGPALANGFPSAHEALKSAPSSFAPAGKSLCFRPGPALPSTRARQSFPGPRQPNGAQDWRRADSLPRPQGITVQFAGRGSSEEARREALRKLGLLRESS

SEQ ID NO: 58858 - protein, 146 aa, Homo sapiens
MLPRPLRLLLDTSPPGGVVLSSFRSRDPEEGGGPGGLVVGGGQEEEEEEEEEAPVSVWDEEEDGAVFTVTSRQYRPLDPLVPMPPPRSSRRLRAGTLEALVRHLLDTRTSGTDVSFMSAFLATHRAFTSTPALLGLMADRLEALES

SEQ ID NO: 58859 - protein, 228 aa, Homo sapiens
MVDMDKLINNLEVQLNSEGGSMQVFKQVTASVRNRDPPEIEYRSNMTSPTLLDANPMENPALFNDIKIEPPEELLASDFSLPQVEPVDLSFHKPKAPLQPASMLQAPIRPPKPQSSPQTLVVSTSTSDMSTSANIPTVLTPGSVLTSSQSTGSQQILHVIHTIPSVSLPNKMGGLKTIPVVVQSLPMVYTTLPADGGPAAITVPLIGGDGKNAGSGAQRPRWMFSHLD

SEQ ID NO: 58860 - protein, 772 aa, Homo sapiens
MEDEREDVQKKTFTKWVNAQFSKFGKQHIENLFSDLQDGRRLLDLLEGLTGQKLPKEKGSTRVHALNNVNKALRVLQNNNVDLVNIGSTDIVDGNHKLTLGLIWNIILHWQVKNVMKNIMAGLQQTNSEKILLSWVRQSTRNYPQVNVINFTTSWSDGLALNALIHSHRPDLFDWNSVVCQQSATQRLEHAFNIARYQLGIEKLLDPEDVDTTYPDKKSILMYITSLFQVLPQQVSIEAIQEVEMLPRPPKVTKEEHFQLHHQMHYSQQITVSLAQGYERTSSPKPRFKSYAYTQAAYVTTSDPTRSPFPSQHLEAPEDKSFGSSLMESEVNLDRYQTALEEVLSWLLSAEDTLQAQGEISNDVEVVKDQFHTHEGYMMDLTAHQGRVGNILQLGSKLIGTGKLSEDEETEVQEQMNLLNSRWECLRVASMEKQSNLHRVLMDLQNQKLKELNDWLTKTEERTRKMEEEPLGPDLEDLKRQVQQHKVLQEDLEQEQVRVNSLTHMVVVVDESSGDHATAALEEQLKVLGDRWANICRWTEDRWVLLQDILLKWQRLTEEQCLFSAWLSEKEDAVNKIHTTGFKDQNEMLSSLQKLAVLKADLEKKKQSMGKLYSLKQDLLSTLKNKSVTQKTEAWLDNFARCWDNLVQKLEKSTAQISQAVTTTQPSLTQTTVMETVTTVTTREQILVKHAQEELPPPPPQKKRQITVDSEIRKRLDVDITELHSWITRSEAVLQSPEFAIFRKEGNFSDLKEKVNVGYALIFISVLILCCL

SEQ ID NO: 58861 - protein, 1070 aa, Homo sapiens
MTSPAKFKKDKEIIAEYDTQVKEIRAQLTEQMKCLDQQCELRVQLLQDLQDFFRKKAEIEMDYSRNLEKLAERFLAKTRSTKDQQFKKDQNVLSPVNCWNLLLNQVKRESRDHTTLSDIYLNNIIPRFVQVSEDSGRLFKKSKEVGQQLQDDLMKVLNELYSVMKTYHMYNADSISAQSKLKEAEKQEEKQIGKSVKQEDRQTPRSPDSTANVRIEEKHVRRSSVKKIEKMKEKRQAKYTENKLKAIKARNEYLLALEATNASVFKYYIHDLSDLIDCCDLGYHASLNRALRTFLSAELNLEQSKHEGLDAIENAVENLDATSDKQRLMEMYNNVFCPPMKFEFQPHMGDMASQLCAQQPVQSELVQRCQQLQSRLSTLKIENEEVKKTMEATLQTIQDIVTVEDFDVSDCFQYSNSMESVKSTVSETFMSKPSIAKRRANQQETEQFYFTKMKEYLEGRNLITKLQAKHDLLQKTLGESQRTDCSLARRSSTVRKQDSSQAIPLVVESCIRFISRHGLQHEGIFRVSGSQVEVNDIKNAFERGEDPLAGDQNDHDMDSIAGVLKLYFRGLEHPLFPKDIFHDLMACVTMDNLQERALHIRKVLLVLPKTTLIIMRYLFAFLNHLSQFSEENMMDPYNLAICFGPSLMSVPEGHDQVSCQAHVNELIKTIIIQHENIFPSPRELEGPVYSRGGSMEDYCDSPHGETTSVEDSTQDVTAEHHTSDDECEPIEAIAKFDYVGRTARELSFKKGASLLLYQRASDDWWEGRHNGIDGLIPHQYIVVQDTEDGVVERSSPKSEIEVISEPPEEKVTARAGASCPSGGHVADIYLANINKQRKRPESGSIRKTFRSDSHGLSSSLTDSSSPGVGASCRPSSQPIMSQSLPKEGPDKCSISGHGSLNSISRHSSLKNRLDSPQIRKTATAGRSKSFNNHRPMDPEVIAQDIEATMNSALNELRELERQSSVKHTPDVVLDTLEPLKTSPVVAPTSEPSSPLHTQLLKDPEPAFQRSASTAGDIACAFRPVKSVKMAAPVKPPATRPKPTVFPKTNATSPGVNSSTSPQSTDKSCTV

SEQ ID NO: 58862 - protein, 48 aa, Homo sapiens
MAAVETRVCETDGCSSEAKLQCPTCIKLGIQGSYFCSQQRGRNQRLLF

SEQ ID NO: 58863 - protein, 194 aa, Homo sapiens
MTQNLGSEMASILRSPQALQLTLALIKPDAVAHPLILEAVHQQILSNKFLIVRMRELLWRKEDCQRFYREHEGRFFYQRLVEFMASGPIRAYILAHKDAIQLWRTLMGPTRVFRARHVAPDSIRGSFGLTDTRNTTHGSDSVVSASREIAAFFPDFSEQRWYEEEEPQLRCGPVCYSPEGGVHYVAGTGGLGPA

SEQ ID NO: 58864 - protein, 139 aa, Homo sapiens
MEGSLEREAPAGALAAVLKHSSTLPPESTQVRGYDFNRGVNYRALLEAFGTTGFQATNFGRAVQQVNAMIEKKLEPLSQDEDQHADLTQSRRPLTSCTIFLGYTSNLISSGIRGRIGDHSWRRGGRPHQVPGAHILGRV

SEQ ID NO: 58865 - protein, 834 aa, Homo sapiens
MEEKRRKYSISSDNSDTTDSHATSTSASRCSKLPSSTKSGWPRQNEKKPSEVFRTDLITAMKIPDSYQLSPDDYYILADPWRQEWEKGVQVPAGAEAIPEPVVRILPPLEGPPAQASPSSTMLGEGSQPDWPGGSRYDLDEIDAYWLELINSELKEMERPELDELTLERVLEELETLCHQNMARAIETQEGLGIEYDEDVVCDVCRSPEGEDGNEMVFCDKCNVCVHQACYGILKVPTGSWLCRTCALGVQPKCLLCPKRGGALKPTRSGTKWVHVSCALWIPEVSIGCPEKMEPITKISHIPASRWALSCSLCKECTGTCIQCSMPSCVTAFHVTCAFDHGLEMRTILADNDEVKFKSFCQEHSDGGPRNEPTSEPTEPSQAGEDLEKVTLRKQRLQQLEEDFYELVEPAEVAERLDLAEALVDFIYQYWKLKRKANANQPLLTPKTDEVDNLAQQEQDVLYRRLKLFTHLRQDLERVRNLCYMVTRRERTKHAICKLQEQIFHLQMKLIEQDLCRERSGRRAKGKKSDSKRKGCEGSKGSTEKKEKVKAGPDSVLGQLAGLSTSFPIDGTFFNSWLAQSVQITAENMAMSEWPLNNGHREDPAPGLLSEELLQDEETLLSFMRDPSLRPGDPARKARGRTRLPAKKKPPPPPPQDGPGSRTTPDKAPKKTWGQDAGSGKGGQGPPTRKPPRRTSSHLPSSPAAGDCPILATPESPPPLAPETPDEAASVAADSDVQVPGPAASPKPLGRLRPPRESKVTRRLPGARPDAGMGPPSAVAERPKVSLHFDTETDGYFSDGEMSDSDVEAEDGGVQRGPREAGAEEVVRMGVLAS

SEQ ID NO: 58866 - protein, 19 aa, Homo sapiens
  MOD_RES (1)..(1): Any amino acid
XSELKLGADGSGLEGKLQV

SEQ ID NO: 58867 - protein, 98 aa, Homo sapiens
MAASRLPPATLTLKQFVRRQQVLLLYRRILQTIRQVPNDSDRKYLKDWAREEFRRNKSATEEASPTTEAQDLKEANGIVTTTGVRSICVREFSLDLGL

SEQ ID NO: 58868 - protein, 566 aa, Homo sapiens
KVQQYTVIVQATDMEGNLNYGLSNTATAIITVTDVNDNPPEFTASTFAGEVPENRVETVVANLTVMDRDQPHSPNWNAVYRIISGDPSGHFSVRTDPVTNEGMVTVVKAVDYELNRAFMLTVMVSNQAPLASGIQMSFQSTAGVTISIMDINEAPYFPSNHKLIRLEEGVPPGTVLTTFSAVDPDRFMQQAVRYSKLSDPASWLHINATNGQITTAAVLDRESLYTKNNVYEATFLAADNGIPPASGTGTLQIYLIDINDNAPELLPKEAQICERPNLNAINITAADADVDPNIGPYVFELPFVPAAVRKNWTITRLNGDYAQLSLRILYLEAGMYDVPIIVTDSGNPPLSNTSIIKVKVCPCDDNGDCTTIGAVAAAGLGTGAIVAILICILILLTMVLLFVMWMKRREKERHTKQLLIDPEDDVRDNILKYDEEGGGEEDQDYDLSQLQQPEAMGHVPSKAPGVRRVDERPVGAEPQYPIRPMVPHPGDIGDFINEGLRAADNDPTAPPYDSLLVFDYEGSGSTAGSVSSLNSSSSGDQDYDYLNDWGPRFKKLADMYGGGEED

SEQ ID NO: 58869 - protein, 30 aa, Homo sapiens
  MOD_RES (1)..(1): Any amino acid
XESVQASSPDLSAGTAVSIMIGVLAGMALI

SEQ ID NO: 58870 - protein, 1597 aa, Homo sapiens
MEAEEAQRGASPPISAIEEFSIIPEAPMRSSQVSALGLEAQEDEDPSYKWREEHRLSATQQSELRDVCDYAIETMPSFPKEGSADVEPNQESLVAEACDTPEHWEAVPQSLAGRQARTLAPPELWACPIQSEHLDMAPFSSDLGGEEEEVEFWPGLTSLTLGSGQAEEEEETSSDNSGQTRYYSPCEEHPAETNQNEGAESGTIRQGEELPSEELQESQGLLHPQEVQVLEEQGQQEAGFRGEGTLREDVCADGLLGEEQMIEQVNDEKGEQKQKQEQVQDVMLGRQGERMGLTGEPEGLNDGEWEQEDMERKAQGQGGPEQGEERKRELQVPEENRADSQDEKSQIFLGKSEEVTGKQEDHGIKEKGVPVSGQEAKEPESWDGGRLGAVGRARSREEENEHHGPSMPALIAPEDSPHCDLFPGASYLVTQIPGTQTESRAEELSPAALSPSLEPIRCSHQPISLLGSFLTEESPDKEIDQNSQQEGSRLRKGTVSSQGTEVVFASASVTPPRTPDSAPPSPAEAYPITPASVSARPPVAFPRRETSCAARAPETASAPLSMDDPSPCGTSEMCPAALYCFPSTGTSPPRPPANSTGTVQHLRSDSFPGSHRTEQTPDLVGMLLSYSHSELPQRPPKPAIYSSVTPRRDRRSGRDYSTVSASPTALSTLKQDSQESISNLERPSSPPSIQPWVSPHNPAFATESPAYGSSPSFVSMEDVRIHEPLPPPPPQRRDTHPSVVETDGHARVVVPTLKQHSHPPPLALGSGLHAPHKGPLPQASDPAVARQHRPLPSTPDSSHHAQATPRWRYNKPLPPTPDLPQPHLPPISAPGSSRIYRPLPPLPIIDPPTEPPPLPPKSRGRSRSTRGGHMNSGGHAKTRPACQDWTVPLPASAGRTSWPPATARSTESFTSTSRSKSEVSPGMAFSNMTNFLCPSSPTTPWTPELQGPTSKDEAGVSEHPEAPAREPLRRTTPQQGASGPGRSPVGQARQPEKPSHLHLEKASSWPHRRDSGRPPGDSSGQAVAPSEGANKHKGWSRQGLRRPSILPEGSSDSRGPAVEKHPGPSDTVVFREKKPKEVMGGFSRRCSKLINSSQLLYQEYSDVVLNKEIQSQQRLESLSETPGPSSPRQPRKALVSSESYLQRLSMASSGSLWQEIPVVRNSTVLLSMTHEDQKLQEVKFELIVSEASYLRSLNIAVDHFQLSTSLRATLSNQEHQWLFSRLQDVRDVSATFLSDLEENFENNIFSFQVCDVVLNHAPDFRRVYLPYVTNQTYQERTFQSLMNSNSNFREVLEKLESDPVCQRLSLKSFLILPFQRITRLKLLLQNILKRTQPGSSEEAEATKAHHALEQLIRDCNNNVQSMRRTEELIYLSQKIEFECKIFPLISQSRWLVKSGELTALEFSASPGLRRKLNTRPVHLHLFNDCLLLSRPREGSRFLVFDHAPFSSIRGEKCEMKLHGPHKNLFRLFLRQNTQGAQAEFLFRTETQSEKLRWISALAMPREELDLLECYNSPQVQCLRAYKPRENDELALEKADVVMVTQQSSDGWLEGVRLSDGERGWFPVQQVEFISNPEVRAQNLKEAHRVKTAKLQLVEQQA

SEQ ID NO: 58871 - protein, 229 aa, Homo sapiens
MPPGEWNQTEKATFAGVQTEDWGQFMHICDIINTTQDGPKDAVKALKKRISKNYNHKEIQLTLSLIDMCVQNCGPSFQSLIVKKEFVKENLVKLLNPRYNLPLDIQNRILNFIKTWSQGFPGGVDVSEVKEVYLDLVKKGVQFPPSEAEAETARQETAQISSNPPTSVPTAPALSSVIAPKNSTVTLVPEQIGKLHSELDMVKMNVRVMSAILMENTPGSENHEDIELL

SEQ ID NO: 58872 - protein, 101 aa, Homo sapiens
MAPWPPKGLVPAMLWGLSLFLNLPGPIWLQPSPPPQSSPPPQPHPCHTCRGLVDSFNKGLERTIRDNFGGGNTAWEEENLSKYKDSLSWGNREALRWLRAV

SEQ ID NO: 58873 - protein, 335 aa, Homo sapiens; identical to SEQ ID NO: 45998

SEQ ID NO: 58874 - protein, 1369 aa, Homo sapiens; identical to SEQ ID NO: 41450

SEQ ID NO: 58875 - protein, 1328 aa, Homo sapiens
  MOD_RES (1)..(1): Any amino acid
XDLLEQQDIDLSPDLAATYGPTEEAAQKVKHYYRFWILPQLWIGINFDRLTLLALFDRNREILENVLAVILAILVAFLGSILLIQGFFRDIWVFQFCLVIASCQYSLLKSVQPDSSSPRHGHNRIIAYSRPVYFCICCGLIWLLDYGSRNLTATKFKLYGITFTNPLVFISARDLVIVFTLCFPIVFFIGLLPQVNTFVMYLCEQLDIHIFGGNATTSLLAALYSFICSIVAVALLYGLCYGALKDSWDGQHIPVLFSIFCGLLVAVSYHLSRQSSDPSVLFSLVQSKIFPKTEEKNPEDPLSEVKDPLPEKLRNSVSERLQSDLVVCIVIGVLYFAIHVSTVFTVLQPALKYVLYTLVGFVGFVTHYVLPQVRKQLPWHCFSHPLLKTLEYNQYEVRNAATMMWFEKLHVWLLFVEKNIIYPLIVLNELSSSAETIASPKKLNTELGALMITVAGLKLLRSSFSSPTYQYVTVIFTVLFFKFDYEAFSETMLLDLFFMSILFNKLWELLYKLQFVYTYIAPWQITWGSAFHAFAQPFAVPHSAMLFIQAAVSAFFSTPLNPFLGSAIFITSYVRPVKFWERDYNTKRVDHSNTRLASQLDRNPGTYCQQREVEAITEGVEEDEGFCCCEPGHIPHMLSFNAAFSQRWLAWEVIVTKYILEGYSITDNSAASMLQVFDLRKVLTTYYVKGIIYYVTTSSKLEEWLANETMQEGLRLCADRNYVDVDPTFNPNIDEDYDHRLAGISRESFCVIYLNWIEYCSSRRAKPVDVDKDSSLVTLCYGLCVLGRRALGTASHHMSSNLESFLYGLHALFKGDFRISSIRDEWIFADMELLRKVVVPGIRMSIKLHQDHFTSPDEYDDPTVLYEAIVSHEKNLVIAHEGDPAWRSAVLANSPSLLALRHVMDDGTNEYKIIMLNRRYLSFRVIKVNKECVRGLWAGQQQELVFLRNRNPERGSIQNAKQALRNMINSSCDQPIGYPIFVSPLTTSYSDSHEQLKDILGGPISLGNIRNFIVSTWHRLRKGCGAGCNSGGNIEDSDTGGGTSCTGNNATTANNPHSNVTQGSIGNPGQGSGTGLHPPVTSYPPTLGTSHSSHSVQSGLVRQSPARASVASQSSYCYSSRHSSLRMSTTGFVPCRRSSTSQISLRNLPSSIQSRLSMVNQMEPSGQSGLACVQHGLPSSSSSSQSIPACKHHTLVGFLATEGGQSSATDAQPGNTLSPANNSHSRKAEVIYRVQIVDPSQILEGINLSKRKELQWPDEGIRLKAGRNSWKDWSPQEGMEGHVIHRWVPCSRDPGTRSHIDKAVLLVQIDDKYVTVIETGVLELGAEV

SEQ ID NO: 58876 - protein, 93 aa, Homo sapiens
AISQCLCSILPLVEYFLTGKYITALQNDCSEVATAFAYLMTDMWLGDSDCVSPEIFWSALGNLYPAFTKKMQQDAQEFLICVLNELHEALKKV

SEQ ID NO: 58877 - protein, 17 aa, Homo sapiens
MPVLKQLGPAQPKKRPD

SEQ ID NO: 58878 - protein, 199 aa, Homo sapiens
GVHRKPSLLAHPGPLVKSEETVILQCWSDVMFEHFLLHREGMFNDTLRLIGEHHDGVSKANFSISRMTQDLAGTYRCYGSVTHSPYQVSAPSDPLDIVIIGLYEKPSLSAQPGPTVLAGESVTLSCSSRSSYDMYHLSREGEAHERRFSAGPKVNGTFQADFPLGPATHGGTYRCFGSFRDSPYEWSNSSDPLLVSVTG

SEQ ID NO: 58879 - protein, 191 aa, Homo sapiens
MGPPSACPHRECIPWQGLLLTASLLTFWNAPTTAWLFIASAPFEVAEGENVHLSVVYLPENLYSYGWYKGKTVEPNQLIAAYVIDTHVRTPGPAYSGRETISPSGDLHFQNVTLEDTGYYNLQVTYRNSQIEQASHHLRVYGECSKFDSEISEDAAWPQDTFCWSLYPQSQWLSPPSKPAAPQSQRRAPWS

SEQ ID NO: 58880 - protein, 32 aa, Homo sapiens
MALVFVYGTLKRGQPNHRVLRDGAHGSAAFRA

SEQ ID NO: 58881 - protein, 70 aa, Homo sapiens
MKKIEDNNTLVFIVDVKANKHQIKQAVKKLYDIDVAKVNTLIRPDGEKKAYVRLAPDYDALDVANKIGII

SEQ ID NO: 58882 - protein, 93 aa, Homo sapiens
MAAANPWDPASAPNGAGLVLGHFIASGMVNQKNLEIELLKLEKDTADVVHPFFLEMKSCYVAQAGLELMASILPFQSPKTLRLQLRSVILCKA

SEQ ID NO: 58883 - protein, 69 aa, Homo sapiens
MSLRRHIGNPEYLMKRIPQNPRYQHIKSRLDTGRTVPVFPPSLVSSATKTLSSFISTHLTPNCNCDPPF

SEQ ID NO: 58884 - protein, 238 aa, Homo sapiens
MTSVVKTVYSLQPPSALSGGQPADTQTRATSKSLLPVRSKEVDVSKQLHSGGPENDVTKITKLRRENGQMKATDTATRRNVRKGYKPLSKQKSEEELKDKNQLLEAVNKQLHQKLTETQGELKDLTQKVELLEKFRDNCLAILESKGLDPALGSETLASRQESTTDHMDSMLLLETLQEELKLFNETAKKQMEELQALKVKLEMKEERVRFLEQQTLCNNQVNDLTTALKEMEQLLEM

SEQ ID NO: 58885 - protein, 243 aa, Homo sapiens
  MOD_RES (1)..(1): Any amino acid
XDLPNAFDGPITITIVNRDGTRYVQKGEYRTNPEDIYPSNPTDDDVSSGSSSERSSTSGGYIFYTFSTVHPIPDEDSPWITDSTDRIPATTLMSTSATATETATKRQETWDWFSWLFLPSESKNHLHTTTQMAGTSSNTISAGWEPNEENEDERDRHLSFSGSGIDDDEDFISSTNMDSSHSITLQPTANPNTGLVEDLDRTGPLSMTTQQSNSQSFSTSHEGLEEDKDHPTTSTLTSSNRND

SEQ ID NO: 58886 - protein, 129 aa, Homo sapiens
MKEINLLPDRVLSTPSVQLVQSWYVQSLLDIMEFLDKDPEDHRTLSQFTDALVTIRNRHNDVVPTMAQGVLEYKDTYGDDPVSNQNIQYFLDRFYLSRISIRMLINQHTLIFDGSTNPAHPKHIGSIDP

SEQ ID NO: 58887 - protein, 110 aa, Homo sapiens
MFILGFAGCIGALRENTFLLKFFSVFLGIIFFLELTAGVLAFVFKDWIKDQLYFFINNNIRAYRDDIDLQNLIDFTQEYWQCCGAFGADDWNLNIYFNCTDSNASRERCG

SEQ ID NO: 58888 - protein, 3972 aa, Homo sapiens
MAHAAASIKKVREADLDEKEKNLERDRKKQRKIPRERMERKRKSDSNASFLRAARAGNLDKVVEYLKGGIDINTCNQNGLNALHLAAKEGHVGLVQELLGRGSSVDSATKKGNTALHIASLAGQAEVVKVLVKEGANINAQSQNGFTPLYMAAQENHIDVVKYLLENGANQSTATEDGFTPLAVALQQGHNQAVAILLENDTKGKVRLPALHIAARKDDTKSAALLLQNDHNADVQSKMMVNRTTESGFTPLHIAAHYGNVNVATLLLNRGAAVDFTARNGITPLHVASKRGNTNMVKLLLDRGGQIDAKTRDGLTPLHCAARSGHDQVVELLLERGAPLLARTKNGLSPLHMAAQGDHVECVKHLLQHKAPVDDVTLDYLTALHVAAHCGHYRVTKLLLDKRANPNARALNGFTPLHIACKKNRIKVMELLVKYGASIQAITESGLTPIHVAAFMGHLNIVLLLLQNGASPDVTNIRGETALHMAARAGQVEVVRCLLRNGALVDARAREEQTPLHIASRLGKTEIVQLLLQHMAHPDAATTNGYTPLHISAREGQVDVASVLLEAGAAHSLATKKGFTPLHVAAKYGSLDVAKLLLQRRAAADSAGKNGLTPLHVAAHYDNQKVALLLLEKGASPHATAKNGYTPLHIAAKKNQMQIASTLLNYGAETNIVTKQGVTPLHLASQEGHTDMVTLLLDKGANIHMSTKSGLTSLHLAAQEDKVNVADILTKHGADQDAHTKLGYTPLIVACHYGNVKMVNFLLKQGANVNAKTKNGYTPLHQAAQQGHTHIINVLLQHGAKPNATTANGNTALAIAKRLGYISVVDTLKVVTEEVTTTTTTITEKHKLNVPETMTEVLDVSDEEGDDTMTGDGGEYLRPEDLKELGDDSLPSSQFLDGMNYLRYSLEGGRSDSLRSFSSDRSHTLSHASYLRDSAVMDDSVVIPSHQVSTLAKEAERNSYRLSWGTENLDNVALSSSPIHSGFLVSFMVDARGGAMRGCRHNGLRIIIPPRKCTAPTRVTCRLVKRHRLATMPPMVEGEGLASRLIEVGPSGAQFLGKLHLPTAPPPLNEGESLVSRILQLGPPGTKFLGPVIVEIPHFAALRGKERELVVLRSENGDSWKEHFCDYTEDELNEILNGMDEVLDSPEDLEKKRICRIITRDFPQYFAVVSRIKQDSNLIGPEGGVLSSTVVPQVQAVFPEGALTKRIRVGLQAQPMHSELVKKILGNKATFSPIVTLEPRRRKFHKPITMTIPVPKASSDVMLNGFGGDAPTLRLLCSITGGTTPAQWEDITGTTPLTFVNECVSFTTNVSARFWLIDCRQIQESVTFASQVYREIICVPYMAKFVVFAKSHDPIEARLRCFCMTDDKVDKTLEQQENFAEVARSRDVEVLEGKPIYVDCFGNLVPLTKSGQHHIFSFFAFKENRLPLFVKVRDTTQEPCGRLSFMKEPKSTRGLVHQAICNLNITLPIYTKESESDQEQEEEIDMTSEKNDETESTETSVLKSHLVNEVPVLASPDLLSEVSEMKQDLIKMTAILTTDVSDKAGSIKVKELVKAAEEEPGEPFEIVERVKEDLEKVNEILRSGTCTRDESSVQSSRSERGLVEEEWVIVSDEEIEEARQKAPLEITEYPCVEVRIDKEIKGKVEKDSTGLVNYLTDDLNTCVPLPKEQLQTVQDKAGKKCEALAVGRSSEKEGKDIPPDETQSTQKQHKPSLGIKKPVRRKLKEKQKQKEEGLQASAEKAELKKGSSEESLGEDPGLAPEPLPTVKATSPLIEETPIGSIKDKVKALQKRVEDEQKGRSKLPIRVKGKEDVPKKTTHRPHPAASPSLKSERHAPGSPSPKTERHSTLSSSAKTERHPPVSPSSKTEKHSPVSPSAKTERHSPASSSSKTEKHSPVSPSTKTERHSPVSSTKTERHPPVSPSGKTDKRPPVSPSGRTEKHPPVSPGRTEKRLPVSPSGRTDKHQPVSTAGKTEKHLPVSPSGKTEKQPPVSPTSKTERIEETMSVRELMKAFQSGQDPSKHKTGLFEHKSAKQKQPQEKGKVRVEKEKGPILTQREAQKTENQTIKRGQRLPVTGTAESKRGVRVSSIGVKKEDAAGGKEKVLSHKIPEPVQSVPEEESHRESEVPKEKMADEQGDMDLQISPDRKTSTDFSEVIKQELEDNDKYQQFRLSEETEKAQLHLDQVLTSPFNTTFPLDYMKDEFLPALSLQSGALDGSSESLKNEGVAGSPCGSLMEGTPQISSEESYKHEGLAETPETSPESLSFSPKKSEEQTGETKESTKTETTTEIRSEKEHPTTKDITGGSEERGATVTEDSETSTESFQKEATLGSPKDTSPKRQDDCTGSCSVALAKETPTGLTEEAACDEGQRTFGSSAHKTQTDSEVQESTATSDETKALPLPEASVKTDTGTESKPQGVIRSPQGLELALPSRDSEVLSAVADDSLAVSHKDSLEASPVLEDNSSHKTPDSLEPSPLKESPCRDSLESSPVEPKMKAGIFPSHFPLPAAVAKTELLTEVASVRSRLLRDPDGSAEDDSLEQTSLMESSGKSPLSPDTPSSEEVSYEVTPKTTDVSTPKPAVIHECAEEDDSENGEKKRFTPEEEMFKMVTKIKMFDELEQEAKQKRDYKKEPKQEESSSSSDPDADCSVDVDEPKHTGSGEDESGVPVLVTSESRKVSSSSESEPELAQLKKGADSGLLPEPVIRVQPPSPLPSSMDSNSSPEEVQFQPVVSKQYTFKMNEDTQEEPGKSEEEKDSESHLAEDRHAVSTEAEDRSYDKLNRDTDQPKICDGHGCEAMSPSSSAAPVSSGLQSPTGDDVDEQPVIYKESLALQGTHEKDTEGEELDVSRAESPQADCPSESFSSSSSLPHCLVSEGKELDEDISATSSIQKTEVTKTDETFENLPKDCPSQDSSITTQTDRFSMDVPVSDLAENDEIYDPQITSPYENVPSQSFFSSEESKTQTDANHTTSFHSSEVYSVTITSPVEDVVVASSSSGTVLSKESNFEGQDIKMESQQESTLWEMQSDSVSSSFEPTMSATTTVVGEQISKVIITKTDVDSDSWSEIREDDEAFEARVKEEEQKIFGLMVDRQSQGTTPDTTPARTPTEEGTPTSEQNPFLFQEGKLFEMTRSGAIDMTKRSYADESFHFFQIGQESREETLSEDVKEGATGADPLPLETSAESLALSESKETVDDEADLLPDDVSEEVEEIPASDAQLNSQMGISASTETPTKEAVSVGTKDLPTVQTGDIPPLSGVKQISCPDSSEPAVQVQLDFSTLTRSVYSDRGDDSPDSSPEEQKSVIEIPTAPMENVPFTESKSKIPVRTMPTSTPAPPSAEYESSVSEDFLSSVDEENKADEAKPKSKLPVKVPLQRVEQQLSDLDTSVQKTVAPQGQDMASIAPDNRSKSESDASSLDSKTKCPVKTRSYTETETESRERAEELELESEEGATRPKILTSRLPVKSRSTTSSCRGGTSPTKESKEHFFDLYRNSIEFFEEISDEASKLVDRLTQSEREQEIVSDDESSSALEVSVIENLPPVETEHSVPEDIFDTRPIWDESIETLIERIPDENGHDHAEDPQDEQERIEERLAYIADHLGFSWTELARELDFTEEQIHQIRIENPNSLQDQSHALLKYWLERDGKHATDTNLVECLTKINRMDIVHLMETNTEPLQERISHSYAEIEQTITLDHSEGFSVLQEELCTAQHKQKEEQAVSKESETCDHPPIVSEEDISVGYSTFQDGVPKTEGDSSATALFPQTHKEQVQQDFSGKMQDLPEESSLEYQQEYFVTTPGTETSETQKAMIVPSSPSKTPEEVSTPAEEEKLYLQTPTSSERGGSPIIQEPEEPSEHREESSPRKTSLVIVESADNQPETCERLDEDAAFEKGDDMPEIPPETVTEEEYIDEHGHTVVKKVTRKIIRRYVSSEGTEKEEIMVQGMPQEPVNIEEGDGYSKVIKRVVLKSDTEQSEDNNE

SEQ ID NO: 58889 - protein, 361 aa, Homo sapiens
MMDLRNTPAKSLDKFIEDYLLPDTCFRMQINHAIDIICGFLKERCFRGSSYPVCVSKVVKGGSSGKGTTLRGRSDADLVVFLSPLTTFQDQLNRRGEFIQEIRRQLEACQRERAFSVKFEVQAPRWGNPRALSFVLSSLQLGEGVEFDVLPAFDALGQLTGGYKPNPQIYVKLIEECTDLQKEGEFSTCFTELQRDFLKQRPTKLKSLIRLVKHWYQNCKKKLGKLPPQYALELLTVYAWERGSMKTHFNTAQGFRTVLELVINYQQLCIYWTKYYDFKNPIIEKYLRRQLTKPRPVILDPADPTGNLGGGDPKGWRQLAQEAEAWLNYPCFKNWDGSPVSSWILLAESNSADDETDDPRR

SEQ ID NO: 58890 - protein, 166 aa, Homo sapiens
SPDQCRDSITSYLKGEAGKFEANGSHTEITPEAKTKSYFPESQNDVGKQSTKETLKPKIHGSGHVEEPASPLAAYQKSLEETSKLIIEETKPCVPVSMKKMSRTSPADGKPRLSLHEEEGSSGSEQKVKSPGAAPTRMTACCYKQGEGFKVKTKKEIRHVEKKSHS

SEQ ID NO: 58891 - protein, 131 aa, Homo sapiens
MAGRRLNLRWALSVLCVLLMAETVSGTRGSSTGAHISPQFPASGVNQTPVVDCRKVCGLNVSDRCDFIRTNPDCHSDGGYLDYLEGIFCHFPPSLLPLAVTLYVSWLLYLFLILGVTAAKFFCPNLSAIST

SEQ ID NO: 58892 - protein, 245 aa, Homo sapiens
MSLHFLYYCSEPTLDVKIAFCQGFDKQVDVSYIAKHYNMSKSKVDNQFYSVEVGDSTFTVLKRYQNLKPIGSGAQGIVCAAYDAVLDRNVAIKKLSRPFQNQTHAKRAYRELVLMKCVNHKNIISLLNVFTPQKTLEEFQDVYLVMELMDANLCQVIQMELDHERMSYLLYQMLCGIKHLHSAGIIHRDLKPSNIVVKSDCTLKILDFGLARTAGTSFMMTPYVVTRYYRAPEVILGMGYKENGE

SEQ ID NO: 58893 - protein, 26 aa, Homo sapiens
  MOD_RES (1)..(1): Any amino acid
XLRRDPNLPVHIRGWLHKQTAARRVS

SEQ ID NO: 58894 - protein, 150 aa, Homo sapiens
  MOD_RES (1)..(1): Any amino acid
XIETAMEDLKGHVAETSGETIQGFWLLTKIDHWNNEKERILLVTDKTLLICKYDFIMLSCVQLQRIPLSAVYRICLGKFTFPGMSLDKRQGEGLRIYWGSPEEQSLLSRWNPWSTEVPYATFTEHPMKYTSEKFLEICKYAETTAGKDEY

SEQ ID NO: 58895 - protein, 231 aa, Homo sapiens
GSSGLGGGSSRTSCRLSGGLGAGSCRLGSAGGLGSTLGGSSYSSCYSFGSGGGYGSSFGGVDGLLAGGEKATMQNLNDRLASYLDKVRALEEANTELEVKIRDWYQRQAPGPARDYSQYYRTIEELQNKILTATVDNANILLQIDNARLAADDFRTKVLDELTLARADLEMQIENLKEELAYLKKNHEEEMNALRGQVGGEINVEMDAAPGVDLSRILNEMRDQYEKMAEK

SEQ ID NO: 58896 - protein, 681 aa, Homo sapiens
MTRRCMPARPGFPSSPAPGSSPPRCHLRPGSTAHAAAGKRTESPGDRKQSIIDFFKPASKQDRHMLDSPQKSNIKYGGSRLSITGTEQFERKLSSPKESKPKRVPPEKSPIIEAFMKGVKEHHEDHGIHESRRPCLSLASKYLAKGTNIYVPSSYHLPKEMKSLKKKHRSPERRKSLFIHENNEKNDRDRGKTNADSKKQTTVAEADIFNNSSRSLSSRSSLSRHHPEESPLGAKFQLSLASYCRERELKRLRKEQMEQRINSENSFSEASSLSLKSSIERKYKPRQEQRKQNDIIPGKNNLSNVENGHLSRKRSSSDSWEPTSAGSKQNKFPEKRKRNSVDSDLKSTRESMIPKARESFLEKRPDGPHQKEKFIKHIALKTPGDVLRLEDISKEPSDETDGSSAGLAPSNSGNSGHHSTRNSDQIQVAGTKETKMQKPHLPLSQEKSAIKKASNLQKNKTASSTTKEKETKLPLLSRVPSAGSSLVPLNAKNCALPVSKKDKERSSSKECSGHSTESTKHKEHKAKTNKADSNVSSGKISGGPLRSEYGTPTKSPPAALEVVPCIPSPAAPSDKAPSEGESSGNSNAGSSALKRKLRGDFDSDEESLGYNLDSDEEEETLKSLEEIMALNFNQTPAATGKPPALSKGLRSQSSDYTFYYFLPAPQWITLHTPCFGDHICK

SEQ ID NO: 58897 - protein, 114 aa, Homo sapiens
PASLGYSGAAGPRPITQSELATALALASTPESSSHTPTPGTQSGTPITNDLFSQALQHALQASGQPSLQSQWQPQLQQLRDMGIQDDELSLRALQATGGDIQAALELIFAGGAP

SEQ ID NO: 58898 - protein, 110 aa, Homo sapiens
MAGWQSYVDNLMCDGCCQEAAIVGYCDAKYVWAATAGGVFQSITPIEIDMIVGKDREGFFTNGLTLGAKKCSVIRDSLYVDGDCTMDIRTKSQGGEPTYNVAVGRAGRGE

SEQ ID NO: 58899 - protein, 123 aa, Homo sapiens
MKLHCCLFTLVASIIVPAAFVLEDVDFDQMVSLEANRSSYNASFPSSFELSASSHSDDDVIIAKEGTSVSIECLLTASHYEDVHWHNSKGQQLDGRSRGGKWLVSDNFLNITNVAFDDRGLYT

SEQ ID NO: 58900 - protein, 70 aa, Homo sapiens
MSYGSITFGDVAIDFSHQEWEYLSLVQKTLYQEVMMENYDNLVSLDLDSRCEIISDGKMQLYRKHSCVTL

SEQ ID NO: 58901 - protein, 159 aa, Homo sapiens
MWYEDALASSHPIILYLHGNAGTRGGDHRVELYKVLSSLGYHVVTFDYRGWGDSVGTPSERGMTYDALHVFDWIKARSGDNPVYIWGHSLGTGVATNLVRRLCERETPPDALILESPFTNIREEAKSHPFSVIYRYFPGFDWFFLDPITSSGIKFANDE

SEQ ID NO: 58902 - protein, 206 aa, Homo sapiens
MGTKGKVIKCKAAIAWEAGKPLCIEEVEVAPPKAHEVRIQIIATSLCHTDATVIDSKFEGLAFPVIVGHEAAGIVESIGPGVTNVKPGDKVIPLYAPLCRKCKFCLSPLTNLCGKIRFTCKGKPVYHFFGTSTFSQYTVVSDINLAKIDDDANLERVCLLGCGFSTGYGAAINNAKVTPGSTCAVFGLGGVGLSAVMGCKAAGASR

SEQ ID NO: 58903 - protein, 93 aa, Homo sapiens
MAEGDEAARGQQPHQGLWRRRRTSDPSAAVNHVSSTTSLDGVSLCRPGWGAVARSRLTASSASWVHAILRPQPPEYLGLQAPATVSGLLFLYF

SEQ ID NO: 58904 - protein, 209 aa, Homo sapiens
  MOD_RES (1)..(1): Any amino acid
XLCGQRLFQYRGRIKYSEQVYDACMETFDCLPLAALLNQQFLCVHGGMSPEITSLDDIRKLDRFTEPPAFGPVCDLLWSDPSEDYGNEKTLEHYTHNTVRGCSYFYSYPAVCEFLQNNNLLSIIRAHEAQDAGYRMYRKSQATGFPSLITIFSAPNYLDVYNNKAAVLKYENNVMNIRQFNCSPHPYWLPNFMDVFTWSLPFVGEKGKR

SEQ ID NO: 58905 - protein, 83 aa, Homo sapiens
MSAQAQMRAMLDQLMGTSRDGSMYLCLPTSICKGVSERPRIRQAEIQLVNESNSVMTEYARVTFSTVVLMMSFLELEWILENV

SEQ ID NO: 58906 - protein, 172 aa, Homo sapiens
MAISKVFELGLVAGLGHQEFARPSRGYLAFRDDSIWPQEEPAIRPRSSQRVPPMGIQHSKELNRTCCLNGGTCMLGSFCACPPSFYGRNCEHDVRKENCGSVPHDTWLPKKCSLCKCWHGQLRCFPQAFLPGCDGLVMDEHLVASRTPELPPSARTTTFMLVGICLSIQSYY

SEQ ID NO: 58907 - protein, 351 aa, Homo sapiens
MATAAQGPLSLLWGWLWSERFWLPENVSWADLEGPADGYGYPRGRHILSVFPLAAGIFFVRLLFERFIAKPCALCIGIEDSGPYQAQPNAILEKVFISITKYPDKKRLEGLSKQLDWNVRKIQCWFRHRRNQDKPPTLTKFCESMWRFTFYLCIFCYGIRFLWSSPWFWDIRQCWHNYPFQPLSSGLYHYYIMELAFYWSLMFSQFTDIKRKDFLIMFVHHLVTIGLISFSYINNMVRVGTLIMCLHDVSDFLLEAAKLANYAKYQRLCDTLFVIFSAVFMVTRLGIYPFCFSVLFYSTFANRTQEPYCPAFTLACADLLWTLIGPLLPQTVFLARSDPDSEYPAWLASQD

SEQ ID NO: 58908 - protein, 359 aa, Homo sapiens
MATPAVPVSAPPATPTPVPAAAPASVPAPTPAPAAAPVPAAAPASSSDPAAAAAATAAPGQTPASAQAPAQTPAPALPGPALPGPFPGGRVVRLHPVILASIVDSYERRNEGAARVIGTLLGTVDKHSVEVTNCFSVPHNESEDEVAVDMEFAKNMYELHKKVSPNELILGWYATGHDITEHSVLIHEYYSREAPNPIHLTVDTSLQNGRMSIKAYVSTLMGVPGRTMGVMFTPLTVKYAYYDTERIGVDLIMKTCFSPNRVIGLSSDLQQVGGASARIQDALSTVLQYAEDVLSGKVSADNTVGRFLMSLVNQVPKIVPDDFETMLNSNINVSALPEPLLAWFLPPPQHIHSNVKRVG

SEQ ID NO: 58909 - protein, 298 aa, Homo sapiens
MRLLPRLLLLLLLVFPATVLFRGGPRGLLAVAQDLTEDEETVEDSIIEDEDDEAEVEEDEPTDLVEDKEEEDVSGEPEASPSADTTILFVKGEDFPANNIVKFLVGFTNKGTEDFIVESLDASFRYPQDYQFYIQNFTALPLNTVVPPQRQATFEYSFIPAEPMGGRPFGLVINLNYKDLNGNVFQDAVFNQTVTVIEREDGLDGETIFMYMFLAGLGLLVIVGLHQLLESRKRKRPIQKVEMGTSSQNDVDMSWIPQETLNQIMQSRRDKASPRRLPRKRAQKRSVGSDERRRRETH

SEQ ID NO: 58910 - protein, 150 aa, Homo sapiens
MLQHISLLVKQVQELELKLSGQNAMGSQDSLLEITFRSGALPVLCDPTTPKPEDLHSPPLGAGLADFAHPAGSPLVDHGMFENLNTALTPKLQASRSFPHLSKPVAPGSAPLGSGEPGGPGLWVGSSQHLKNLGKAMGAKVNDFLRRKEP

SEQ ID NO: 58911 - protein, 170 aa, Homo sapiens
MVSKALLRLVSAVNRRRMKLLLGIALLAYVAWLAKRVGARLLLASTSEVYGDPEVHPQSEDYWGHVNPIGPRACYDEGKRVAETMCYAYMKQEGVEVRVARIFNTFGPRMHMNDGRVVSNFILQALQGEPLTVYGSGSQTRAFQYVSDLVNGLVALMNSNVSSPVNLVSA

SEQ ID NO: 58912 - protein, 231 aa, Homo sapiens
  MOD_RES (1)..(1): Any amino acid
XFKSSCYIDVRWFPFDVQHCKLKFGSWSYGGWSLDLQMQEADISGYIPNGEWDLVGIPGKRSERFYECCKEPYPDVTFTVTMRRRTLYYGLNLLIPCVLISALALLVFLLPADSGEKISLAQYFASTMIIVGLSVVVTVIVLQYHHHDPDGGKMPKWTRVILLNWCAWFLRMKRPGEDKVRPACQHKQRRCSLASVEMSAVAPPPASNGNLLYIGFRGLDGVHCVPTPDSG

SEQ ID NO: 58913 - protein, 22 aa, Homo sapiens
MHSMISSVDVKSEVPVGLEPIS

SEQ ID NO: 58914 - protein, 451 aa, Homo sapiens
MPAIMTMLADHAARQLLDFSQKLDINLLDNVVNCLYHGEGAQQRMAQEVLTHLKEHPDAWTRVDTILEFSQNMNTKYYGLQILENVIKTRWKILPRNQCEGIKKYVVGLIIKTSSDPTCVEKEKVYIGKLNMILVQILKQEWPKHWPTFISDIVGASRTSESLCQNNMVILKLLSEEVFDFSSGQITQVKSKHLKDSMCNEFSQIFQLCQFVMENSQNAPLVHATLETLLRFLNWIPLGYIFETKLISTLIYKFLNVPMFRNVSLKCLTEIAGVSVSQYEEQFVTLFTLTMMQLKQMLPLNTNIRLAYSNGKDDEQNFIQNLSLFLCTFLKEHDQLIEKRLNLRETLMEALHYMLLVSEVEETEIFKICLEYWNHLAAELYRESPFSTSASPLLSGSQHFDVPPRRQLYLPMLFKCSSKALCDRAFQLKSRYSCFQGTFKRFPSSNKGICR

SEQ ID NO: 58915 - protein, 64 aa, Homo sapiens
MISQFFILSSKGDPLIYKDFRGDSGGRDVAELFYRKLTGLPGDESPVVMLGVVAGACNPIYSGS

SEQ ID NO: 58916 - protein, 137 aa, Homo sapiens
MYSGNRSGGHGYWDGGGAAGAEGPAPAGTLSPAPLFSPGTYERLALLLGSIGLLGVGNNLLVLVLYYKFQRLRTPTHLLLVNISLSDLLVSLFGVTFTFVSCLRNGWVWDTVGCVWDGFSGSLFEKSSSHKCIYDAF

SEQ ID NO: 58917 - protein, 89 aa, Homo sapiens
MGLLTFRDVAIEFSLEEWQCLDTAQKNLYRNVMLENYRNLAFLGIAVSKPDLIICLEKEKEPWNMKRDEMVDEPPDGVSLCHPGWSAVA

SEQ ID NO: 58918 - protein, 915 aa, Homo sapiens
MASFSMDCSPSFCVPGLWNPFIIFRSRSSRRRLHSLGLAAMPEKRPFERLPADVSPINYSLCLKPDLLDFTFEGKLEAAAQVRQATNQIVMNCADIDIITASYAPEGDEEIHATGFNYQNEDEKVTLSFPSTLQTGTGTLKIDFVGELNDKMKGFYRSKYTTPSGEVRYAAVTQFEATDARRAFPCWDEPAIKATFDISLVVPKDRVALSNMNVIDRKPYPDDENLVEVKFARTPVMSTYLVAFVVGEYDFVETRSKDGVCVRVYTPVGKAEQGKFALEVAAKTLPFYKDYFNVPYPLPKIDLIAIADFAAGAMENWGLVTYRETALLIDPKNSCSSSRQWVALVVGHELAHQWFGNLVTMEWWTHLWLNEGFASWIEYLCVDHCFPEYDIWTQFVSADYTRAQELDALDNSHPIEVSVGHPSEVDEIFDAISYSKGASVIRMLHDYIGDKDFKKGMNMYLTKFQQKNAATEDLWESLENASGKPIAAVMNTWTKQMGFPLIYVEAEQVEDDRLLRLSQKKFCAGGSYVGEDCPQWMVPITISTSEDPNQAKLKILMDKPEMNVVLKNVKPDQWVKLNLGTVGFYRTQYSSAMLESLLPGIRDLSLPPVDRLGLQNDLFSLARAGIISTVEVLKVMEAFVNEPNYTVWSDLSCNLGILSTLLSHTDFYEEIQEFVKDVFSPIGERLGWDPKPGEGHLDALLRGLVLGKLGKAGHKATLEEARRRFKDHVEGKQILSADLRSPVYLTVLKHGDGTTLDIMLKLHKQADMQEEKNRIERVLGATLLPDLIQKVLTFALSEEVRPQDTVSVIGGVAGGSKHGRKAAWKFIKDNWEELYNRYQGGFLISRLIKLSVEGFAVDKMAGEVKAFFESHPAPSAERTIQQCCENILLNAAWLKRDAESIHQYLLQRKASPPTV

SEQ ID NO: 58919 - protein, 559 aa, Homo sapiens
MSLVPATNYIYTPLNQLKGGTIVNVYGVVKFFKPPYLSKGTDYCSVVTIVDQTNVKLTCLLFSGNYEALPIIYKNGDIVRFHRLKIQVYKKETQGITSSGFASLTFEGTLGAPIIPRTSSKYFNFTTEDHKMVEALRVWASTHMSPSWTLLKLCDVQPMQYFDLTCQLLGKAEVDGASFLLKVWDGTRTPFPSWRVLIQDLVLEGDLSHIHRLQNLTIDILVYDNHVHVARSLKVGSFLRIYSLHTKLQSMNSENQTMLSLEFHLHGGTSYGRGIRVLPESNSDVDQLKKDLESANLTANQHSDVICQSEPDDSFPSSGSVSLYEVERCQQLSATILTDHQYLERTPLCAILKQKAPQQYRIRAKLRSYKPRRLFQSVKLHCPKCHLLQEVPHEGDLDIIFQDGATKTPDVKLQNTSLYDSKIWTTKNQKGRKVAVHFVKNNGILPLSNECLLLIEALGIVPLQYVFVMTFTLDDGTGVLEAYLMDSDKFFQIPASEVLMDDDLQKSVDMIMDMFCPPGIKIDAYPWLECFIKSYNVTNGTDNQICYQIFDTTVAEDVI

SEQ ID NO: 58920 - protein, 98 aa, Homo sapiens
MPFHHCHRDPLPPPGLTPERLHARRQLYAACAVCFVFMAGEVVGGYLAHSLAIMTDAAHLLADVGSMMGSLFSLWLSTRPATRTMTFGWHRSETLGAL

SEQ ID NO: 58921 - protein, 123 aa, Homo sapiens
MAIIRERLLPFTFVGNLFMVPDDPLGRNGPTLDEFLKKPARTQGSSKAQHPSRGFAEHGKQQQGREEEKGSGGIRKTRETERLRRQLLEVFWGQDHKVDFILQREPYCRDINQLSEALLSLNF

SEQ ID NO: 58922 - protein, 89 aa, Homo sapiens
MEKDLCVKGWNWGTVKFGGQLLSFDIGDQPVFEIPLSNVSQCTTGKNEVTLEFHQNDDAEVSLMEVRFYVPPTQEDGVDPVEAFAQNVL

SEQ ID NO: 58923 - protein, 144 aa, Homo sapiens
MTAAQAAGEEAPPGVRSVKVVLVGDGGCGKTSLLMVFADGAFPEWYPEVNHFCKKVPIIVVGCKTDLRKDKSLVNKLRRNGLEPVTYHRGQEMARSVGAVAYLECSARLHDNVHAVFQEAAEVALSSRGRNFWRRITQGFCVVT

SEQ ID NO: 58924 - protein, 160 aa, Homo sapiens
  MOD_RES (1)..(1): Any amino acid
XINCTSCCLIPVSLEIQVLWAYVGLLSNPQAHVSGVRFLYQCQSIQVGYFPPTPPLLCQCICIRLLNQYSMFHHDVYVNMHAADSQQVTEVSLTTLVNFVDITQKPQPPRGQPKMDWKWPFDFFPFKVAFSRGVFSQKCSVSPILILCLLLLGVLNLETM

SEQ ID NO: 58925 - protein, 154 aa, Homo sapiens
MQPEEGTGWLLELLSEVQLQQYFLRLRDDLNVTRLSHFEYVKNEDLEKIGMGRPGQRRLWEAVKRRKALCKRKSWMSKVFSGKRLEAEFPPHHSQSTFRKTSPAPGGPAGEGPLQSLTCLIGEKDLRLLEKLGDGSFGVVRRGEWDAPSGKTVS

SEQ ID NO: 58926 - protein, 92 aa, Homo sapiens
MAELQEVQITEEKPLLPGQTPEAAKTHSVETPYGSVTFTVYGTPKPKRPAILTYHDVGLNYKSCFQPLFQFEDMQEIIQNFVRVHVDAPGME

SEQ ID NO: 58927 - protein, 147 aa, Homo sapiens
  MOD_RES (1)..(1): Any amino acid
XRCEDITQNYKYPEGSLQEKEVLERVEKEKMEREKDNGIRPPSLETASPLYLLLKAPSSLPLRGDAQISVTLVNHSEQEKAVQLAIGVQAVHYNGVLAAKLWRKKLHLTLSANLGNALWPHQTPPDTHTHMAPALGRQQPQGTPCSL

SEQ ID NO: 58928 - protein, 713 aa, Homo sapiens
MFANLKYVSLGILVFQTTSLVLTMRYSRTLKEEGPRYLSSTAVVVAELLKIMACILLVYKDSKCSLRALNRVLHDEILNKPMETLKLAIPSGIYTLQNNLLYVALSNLDAATYQVTYQLKILTTALFSVSMLSKKLGVYQWLSLVILMTGVAFVQWPSDSQLDSKELSAGSQFVGLMAVLTACFSSGFAGVYFEKILKETKQSVWIRNIQLGFFGSIFGLMGVYIYDGELVSKNGFFQGYNRLTWIVVVLQPQGIGSPSVYHAVIVIFLEFFAWGLLTAPTLVVLHETFPKHTFLMNGLIQGVKGLLSFLSAPLIGALSDVWGRKSFLLLTVFFTCAPIPLMKISPWWYFAVISVSGVFAVTFSVVFAYVADITQEHERSMAYGLVSATFAASLVTSPAIGAYLGRVYGDSLVVVLATAIALLDICFILVAVPESLPEKMRPASWGAPISWEQADPFASLKKVGQDSIVLLICITVFLSYLPEAGQYSSFFLYLRQIMKFSPESVAAFIAVLGILSIIAQTIVLSLLMRSIGNKNTILLGLGFQILQLAWYGFGSEPWMMWAAGAVAAMSSITFPAVSALVSRTADADQQGVVQGMITGIRGLCNGLGPALYGFIFYIFHVELKELPITGTDLGTNTSPQHHFEQNSIIPGPPFLFGACSVLLALLVALFIPEHTNLSLRSSSWRKHCGSHSHPHNTQAPGEAKEPLLQDTNV

SEQ ID NO: 58929 - protein, 376 aa, Homo sapiens
MPGRSCVALVLLAAAVSCAVAQHAPPWTEDCRKSTYPPSGPTYRGAVPWYTINLDLPPYKRWHELMLDKAPVLKVIVNSLKNMINTFVPSGKIMQVVDEKLPGLLGNFPGPFEEEMKGIAAVTDIPLVAEDKKGHLIHGRNMDFGVFLGWNINNDTWVITEQLKPLTVNLDFQRNNKTVFKASSFAGYVGMLTGFKPGLFSLTLNERFSINGGYLGILEWILGKKDVMWIGFLTRTVLENSTSYEEAKNLLTKTKILAPAYFILGGNQSGEGCVITRDRKESLDVYELDAKQGRWYVVQTNYDRWKHPFFLDDRRTPAKMCLNRTSQENISFETMYDVLSTKPVLNKLTVYTTLIDVTKGQFETYLRDCPDPCIGW

SEQ ID NO: 58930 - protein, 281 aa, Homo sapiens
  MOD_RES (1)..(1): Any amino acid
XAHCLGVPGARPCPDYCRNVLKGCLANQADLDAEWRNLLDSMVLITDKFWGTSGVESVIGSVHTWLAEAINALQDNRDTLTAKDPAVSLQVIQGCGNPKVNPQGPGPEEKRRRGKLAPRERPPSGTLEKLVSEAKAQLRDVQDFWISLPGTLCSEKMALSTASDDRCWNGMARGRYLPEVMGDGLANQINNPEVEVDITKPDMTIRQQIMQLKIMTNRLRSAYNGNDVDFQDASDDGSGSGSGDGCLDDLCSRKVSRKSSSSRTPLTHALPGLSEQEGQKT

SEQ ID NO: 58931 - protein, 597 aa, Homo sapiens
MPPATGGGLAESELRPRRGRCGPQAARAAGRDVAAEAVARSPKRPAWGSRRFEAVGWWALLALVTLLSFATRFHRLDEPPHICSVHSLAPGWSPLPTSLYWICPSPSRQHCSQLPSSPLVTVGKHLTARVLCLIVLPLALYTATFAVHFMVLSKSGPGDGFFSSAFQARLSGNNLHNASIPEHLAYGSVITVKNLRMAIGYLHSHRHLYPEGIGARQQQVTTYLHKDYNNLWIIKKHNTNSDPLDPSFPVEFVRHGDIIRLEHKETSRNLHSHYHEAPMTRKHYQVTGYGINGTGDSNDFWRIEVVNRKFGNRIKVLRSRIRFIHLVTGCVLGSSGKVLPKWGWEQLEVTCTPYLKETLNSIWNVEDHINPKLPNISLDVLQPSFPEILLESHMVMIRGNSGLKPKDNEFTSKPWHWPINYQGLRFSGVNDTDFRVYLLGNPVVWWLNLLSIALYLLSGSIIAVAMQRGARLPAEVAGLSQVLLRGGGQVLLGWTLHYFPFFLMGRVLYFHHYFPAMLFSSMLTGILWDTLLRLCAWGLASWPLARGIHVAGILSLLLGTAYSFYLFHPLAYGMVGPLAQDPQSPMAGLRWLDSWDF

SEQ ID NO: 58932 - protein, 101 aa, Homo sapiens
MRLTFLKKIAQLNYLEILVVLLSYTLKTTFQYWMNEYTSSIGIGVFHSGIEVYGREFAYGGHPYPFSGIFEISPGNASELGETFKFKEAVVLGSTDFLEDD

SEQ ID NO: 58933 - protein, 98 aa, Homo sapiens
MFRIEGLAPKLDPEEMKRKMREDVISSIRNFLIYVALLRVSECLPGCDCETSGELTDGHPLTLRGHRGLRTELNGSGEQGGSIYLKEIGQHMKTGHHI

SEQ ID NO: 58934 - protein, 132 aa, Homo sapiens
MEDDAPVIYGLEFQARALTPQTAETDAIRFLVGTQSLKYDNQIHIIDFDDENNIINKNVLLHQAGEIWHISASPADRGVLTTCYNRMSCGSQWEMGRKSFPWLITISCCGIYRKARARLCWPAQRPWKGRDN

SEQ ID NO: 58935 - protein, 826 aa, Homo sapiens
MDHYDSQQTNDYMQPEEDWDRDLLLDPAWEKQQRKTFTAWCNSHLRKAGTQIENIEEDFRDGLKLMLLLEVISGERLAKPERGKMRVHKISNVNKALDFIASKGVKLVSIGAEEIVDGNVKMTLGMIWTIILRFAIQDISVEETSAKEGLLLWCQRKTAPYKNVNIQNFHISWKDGLGFCALIHRHRPELIDYGKLRKDDPLTNLNTAFDVAEKYLDIPKMLDAEDIVGTARPDEKAIMTYVSSFYHAFSGAQKAETAANRICKVLAVNQENEQLMEDYEKLASDLLEWIRRTIPWLENRVPENTMHAMQQKLEDFRDYRRLHKPPKVQEKCQLEINFNTLQTKLRLSNRPAFMPSEGRMVSDINNAWGCLEQVEKGYEEWLLNEIRRLERLDHLAEKFRQKASIHEAWTDGKEAMLRQKDYETATLSEIKALLKKHEAFESDLAAHQDRVEQIAAIAQELNELDYYDSPSVNARCQKICDQWDNLGALTQKRREALERTEKLLETIDQLYLEYAKRAAPFNNWMEGAMEDLQDTFIVHTIEEIQVRQLVPRRDQALTEEHARQQHNERLRKQFGAQANVIGPWIQTKMEEIGRISIEMHGTLEDQLSHLRQYEKSIVNYKPKIDQLEGDHQLIQEALIFDNKHTNYTMEHIRVGWEQLLTTIARTINEVENQILTRDAKGISQEQMNEFRASFNHFDRKKTGMMDTDDFRACLISMGYNMGEAEFARIMSIVDPNRLGVVTFQAFIDFMSRETADTDTADQVMASFKILAGDKNYITMDELRRELPPDQAEYCIARMAPYTGPDSVPGALDYMSFSTALYGESDL

SEQ ID NO: 58936 - protein, 147 aa, Homo sapiens
LGDQEGGGESQLSSVLRRSSFSEGQTLTVTSGAKKSHIRSHSDTSIASRGAPEGGRYLCSGEGMFRRPSEGQSLISYLSEQDFGSCADLEKENAHFSISESLIAAIELMKCNMMSQCLEEEEVEEEDSDREIQELKQKIRLRRQQIR

SEQ ID NO: 58937 - protein, 60 aa, Homo sapiens
MNYITAIIEEQPKNYQVWHHRRVLVEWLRDPSQELEFIADILNQDAKNYHAWQHRQWVIQ

SEQ ID NO: 58938 - protein, 1221 aa, Homo sapiens
MAAEEGVASAASAGGSWGTAAMGRVLPMLLVPVPAEAMGQLGSRAQLRTQPEALGSLTAAGSLQVLSLTPGSRGGGRCCLEGPFWHFLWEDSRNSSTPTEKPKLLALGENYELLIYEFNLKDGRCDATILYSCSREALQKLIDDQDISISLLSLRILSFHNNTSLLFINKCVILHIIFPERDAAIRVLNCFTLPLPAQAVDMIIDTQLCRGILFVLSSLGWIYIFDVVDGTYVAHVDLALHKEDMCNEQQQEPAKISSFTSLKVSQDLDVAVIVSSSNSAVALNLNLYFRQHPGHLLCERILEDLPIQGPKGVDEDDPVNSAYNMKLAKFSFQIDRSWKAQLSSLNETIKNSKLEVSCCAPWFQDILHLESPESGNHSTSVQSWAFIPQDIMHGQYNVLQKDHAKTSDPGRSWKIMHISEQEEPIELKCVSVTGFTALFTWEVERMGYTITLWDLETQGMQCFSLGTKCIPVDSSGDQQLCFVLTENGLSLILFGLTQEEFLNRLMIHGSASTVDTLCHLNGWGRCSIPIHALEAGIENRQLDTVNFFLKSKENLFNPSSKSSVSDQFDHLSSHLYLRNVEELIPALDLLCSAIRESYSEPQSKHFSEQLLNLTLSFLNNQIKELFIHTEELDEHLQKGVNILTSYINELRTFMIKFPWKLTDAIDEYDVHENVPKVKESNIWKKLSFEEVIASAILNNKIPEAQTFFRIDSHSAQKLEELIGIGLNLVFDNLKKNNIKEASELLKNMGFDVKGQLLKICFYTTNKNIRDFLVEILKEKNYFSEKEKRTIDFVHQVEKLYLGHFQENMQIQSFPRYWIKEQDFFKHKSVLDSFLKYDCKDEFNKQDHRIVLNWALWWDQLTQESILLPRISPEEYKSYSPEALWRYLTARHDWLNIILWIGEFQTQHSYASLQQNKWPLLTVDVINQNTSCNNYMRNEILDKLARNGVFLASELEDFECFLLRLSRIGGVIQDTLPVQNYKTKEGWDFHSQFILYCLEHSLQHLLYVYLDCYKLSPENCPFLEKKELHEAHPWFEFLVQCRQVASNLTDPKLIFQASLANAQILIPTNQASVSSMLLEGHTLLALATTMYSPGGVSQVVQNEENENCLKKVDPQLLKMALTPYPKLKTALFPQCTPPSVLPSDITIYHLIQSLSPFDPSRLFGWQSANTLAIGALWEVKVGRSPEARSSRPAWPTWRNPVSTMHGVISHISLALTWLINML

SEQ ID NO: 58939 - protein, 417 aa, Homo sapiens
MAFTERVNSSGNSLYNDDRNLLRIREKERRNQEAHQEKEAFPEKIPLFGEPYKTAKGDELSSRIQNMLGNYEEVKEFLSTKSHTHRLDASENRLGKPKYPLIPDKGSSIPSSSFHTSVHHQSIHTPASGPLSVGNISHNPKMAQPRTEPMPSLHAKSCGPPDSQHLTQDRLGQEGFGSSHHKKGDRRADGDHCASVTDSAPERELSPLISLPSPVPPLSPIHSNQQTLPRTQGSSKVHGSSNNSKGYCPAKSPKDLAVKVHDKETPQDSLVAPAQPPSQTFPPPSLPSKSVAMQQKPTAYVRPMDGQDQAPSESPELKPLPEDYRQQTFEKTDLKVPAKAKLTKLKMPSQSVEQTYSNEVHCVEEILKDSQHVSSVTQNQKQYDTSSKTHSNSQQGTSSMLEDDLQLSDSEDSDSEQ

SEQ ID NO: 58940 - protein, 116 aa, Homo sapiens
  MOD_RES (1)..(1): Any amino acid
XTSDLGKQIKLKEVEGTLLQPATVDNWSQIQSFEAKPDDLLICTYPKAGTTWIQEIVDMIEQNGDVEKCQRAIIQHRHPFIEWARPPQPSVPLCSSKCQRLYGFLLPFPKDEPHAS

SEQ ID NO: 58941 - protein, 117 aa, Homo sapiens
MEKPLFPLVPLHWFGFGYTALVVSGGIVGYVKTAATSVTFVGVMGMRSYYYGKFMPVGLIAGARWSMALVAQAGVQWCDLSSLQPPPPRFKRFSCLTLLSSWDFRCAPPHPANFLYF

SEQ ID NO: 58942 - protein, 200 aa, Homo sapiens
MAKPQVVVAPVLMSKLSVNAPEFYPSGYSSSYTESYEDGCEDYPTLSEYVQDFLNHLTEQPGSFETEIEQFAETLNGCVTTDDALQELVELIYQQATSIPNFSYMGARLCNYLSHHLTISPQSGNFRQLLLQRCRTEYEVKDQAAKGDEVTRKRFHAFVLFLGELYLNLEIKGTNGQVTRADILQVGLRELLNALFSNPM

SEQ ID NO: 58943 - protein, 85 aa, Homo sapiens
MREAAAALVPPPAFAVTPAAAMEEPPPPPPPPPPPPEPETESEPECCLAASFLNFQIPCGVQIMCSCQGHHLHLRRNAVLCRGRS

SEQ ID NO: 58944 - protein, 177 aa, Homo sapiens
MGLSIFLLLCVLGLSQAATPKIFNGTECGRNSQPWQVGLFEGTSLRCGGVLIDHRWVLTAAHCSGSRYWVRLGEHSLSQLDWTEQIRHSGFSVTHPGYLGASTSHEHDLRLLRLRLPVRVTSSVQPLPLPNDCATAGTECHVSGWGITNHPRSKGPRARGQGSGWVQVWDAGREVES

SEQ ID NO: 58945 - protein, 208 aa, Homo sapiens
  MOD_RES (1)..(1): Any amino acid
XPSKTTGAPIYPGFPKVTEVHHEQKASNSSASQRSLQMFKVTMSRILRLKIQMQEKHEAVMNVKKQTQKGNSKKVVQMEQELQDLQSQLCAEQAQQQARVEQLEKTFQEEEQHLQGLEIAQGEKDLKQQLAQALQEEEKEKMQAQKEEVLSHMNDVLENELQCIICSEYFIEQRDCSEDRALRAFERLPGSASLRWSGGFSLAVTPLL

SEQ ID NO: 58946 - protein, 111 aa, Homo sapiens
MQVSTSRPAAAGLSCPDYLRSAKMTEVMMNTQPMEEIGLSPRKDGLSYQIFPDPSDFDRCCKLKDRLPSIVVEPTEGEVESGELRWPPEEFLVQEDEQDNCEETAKENKEQ

SEQ ID NO: 58947 - protein, 76 aa, Homo sapiens
MPLSDFILALKDNPYFGAGFGLVGVGTALALARKGVQLGLVAFRRHYMITLEVPARDRSYAWLLSWLTRHSTRTQH

SEQ ID NO: 58948 - protein, 216 aa, Homo sapiens
MEPFSCDTFVALPPATVDNRIIFGKNSDRLYDEVQEVVYFPAVVHDNLGERLKCTYIEIDQVPETYAVVLSRPAWLWGAEMGANEHGVCIGNEAVWGREEVCDEEALLGMDLVRLGLERADTAEKALNVIVDLLEKYGQGGNCTEGRMVFSYHNSFLIADRNEAWILETAGKYWAAEKVQEGVRNISNQLSITTKIAREHPDMRNYAKRKGWWDGK

SEQ ID NO: 58949 - protein, 229 aa, Homo sapiens
KQAWRGSATRLGPQNSGRQECYAFNGTQRFLERYIYNREELVRFDSDVGEFRAVTELGRPEAEYWNSQKDILEEERAVPDRMCRHNYELGGPMTLQRRVQPRVNVSPSKKGPLQHHNLLVCHVTDFYPGSIQVRWFLNGQEETAGVVSTNLIRNGDWTFQILVMLEMTPQQGDVYTCQVEHTSLDSPVTVEWKAQSDSARSKTLTGAGGFVLGLIICGVGIFMHRRSKK

SEQ ID NO: 58950 - protein, 196 aa, Homo sapiens
  MOD_RES (1)..(1): Any amino acid
XRNAFLESELDEKESLLVSVQRLKDEARDLRQELAVRERQQEVTRKSAPSSPTLDCEKMDSAVQASLSLPATPVGKGTENTFPSPKAIPNGFGTSPLTPSARISALNIVGDLLRKVGALESKLAACRNFAKDQASRKSYISGNVNCGVLNGNGTKFSRSGHTSFFDKGRAGTTLETLTISESSWDFLPSSIIMAHV

SEQ ID NO: 58951 - protein, 146 aa, Homo sapiens
MGCSAKARWAAGALGVAGLLCAVLGAVMIVMVPSLIKQQVLKNVRIDPSSLSFNMWKEIPIPFYLSVYFFDVMNPSEILKGEKPQVRERGPYVYREFRHKSNITFNNNDTVSFLEYRTFQFQPSKSHGSESDYIVMPNILVLVRLP

SEQ ID NO: 58952 - protein, 1312 aa, Homo sapiens [sequence omitted]

SEQ ID NO: 58953 - protein, 150 aa, Homo sapiens
MAQDSVDLSCDYQFWMQKLSVWDQASTLETQQDTCLHVAQFQEFLRKMYEALKEMDSNTVIERFPTIGQLLAKACWNPFILAYDESQKILIWCLCCLINKEPQNSGQSKLNSWIQGVLSHILSALRFDKEVALFTQGLGYAPIDYYPGLL

SEQ ID NO: 58954 - protein, 81 aa, Homo sapiens
IFNEEQYCGGSEKAEEGGETEAQKEGSEDVGNLPEAQEKNEEEGETATEETEEIAMEGAEGEAEEEEETAEGEEPGEDEDS

SEQ ID NO: 58955 - protein, 52 aa, Homo sapiens
  MOD_RES (1)..(1): Any amino acid
XGLSRHSCAARPSAGVGGSSSSLGSGSRKRPLLAPLCNGLINSYEDKSNDFV

SEQ ID NO: 58956 - protein, 81 aa, Homo sapiens
NPQTEEVSIKEIAITHHVKEGHEKADPSQFELLKVLGQGSFGKVFLVKKISGSDARQLYAMKVLKKATLKVYFLMKKVTSS

SEQ ID NO: 58957 - protein, 1882 aa, Homo sapiens
MTTMLQKSDSNASFLRAARAGNLDKVVEYLKGGIDINTCNQNGLNALHLAAKEGHVGLVQELLGRGSSVDSATKKGNTALHIASLAGQAEVVKVLVKEGANINAQSQNGFTPLYMAAQENHIDVVKYLLENGANQSTATEDGFTPLAVALQQGHNQAVAILLENDTKGKVRLPALHIAARKDDTKSAALLLQNDHNADVQSKMMVNRTTESGFTPLHIAAHYGNVNVATLLLNRGAAVDFTARNGITPLHVASKRGNTNMVKLLLDRGGQIDAKTRDGLTPLHCAARSGHDQVVELLLERGAPLLARTKNGLSPLHMAAQGDHVECVKHLLQHKAPVDDVTLDYLTALHVAAHCGHYRVTKLLLDKRANPNARALNGFTPLHIACKKNRIKVMELLVKYGASIQAITESGLTPIHVAAFMGHLNIVLLLLQNGASPDVTNIRGETALHMAARAGQVEVVRCLLRNGALVDARAREEQTPLHIASRLGKTEIVQLLLQHMAHPDAATTNGYTPLHISAREGQVDVASVLLEAGAAHSLATKKGFTPLHVAAKYGSLDVAKLLLQRRAAADSAGKNGLTPLHVAAHYDNQKVALLLLEKGASPHATAKNGYTPLHIAAKKNQMQIASTLLNYGAETNIVTKQGVTPLHLASQEGHTDMVTLLLDKGANIHMSTKSGLTSLHLAAQEDKVNVADILTKHGADQDAHTKLGYTPLIVACHYGNVKMVNFLLKQGANVNAKTKNGYTPLHQAAQQGHTHIINVLLQHGAKPNATTANGNTALAIAKRLGYISVVDTLKVVTEEVTTTTTTITEKHKLNVPETMTEVLDVSDEEGDDTMTGDGGEYLRPEDLKELGDDSLPSSQFLDGMNYLRYSLEGGRSDSLRSFSSDRSHTLSHASYLRDSAVMDDSVVIPSHQVSTLAKEAERNSYRLSWGTENLDNVALSSSPIHSGFLVSFMVDARGGAMRGCRHNGLRIIIPPRKCTAPTRVTCRLVKRHRLATMPPMVEGEGLASRLIEVGPSGAQFLGKLHLPTAPPPLNEGESLVSRILQLGPPGTKFLGPVIVEIPHFAALRGKERELVVLRSENGDSWKEHFCDYTEDELNEILNGMDEVLDSPEDLEKKRICRIITRDFPQYFAVVSRIKQDSNLIGPEGGVLSSTVVPQVQAVFPEGALTKRIRVGLQAQPMHSELVKKILGNKATFSPIVTLEPRRRKFHKPITMTIPVPKASSDVMLNGFGGDAPTLRLLCSITGGTTPAQWEDITGTTPLTFVNECVSFTTNVSARFWLIDCRQIQESVTFASQVYREIICVPYMAKFVVFAKSHDPIEARLRCFCMTDDKVDKTLEQQENFAEVARSRDVEVLEGKPIYVDCFGNLVPLTKSGQHHIFSFFAFKENRLPLFVKVRDTTQEPCGRLSFMKEPKSTRGLVHQAICNLNITLPIYTKESESDQEQEEEIDMTSEKNPQDEQERIEERLAYIADHLGFSWTELARELDFTEEQIHQIRIENPNSLQDQSHALLKYWLERDGKHATDTNLVECLTKINRMDIVHLMETNTEPLQERISHSYAEIEQTITLDHSEGFSVLQEELCTAQHKQKEEQAVSKESETCDHPPIVSEEDISVGYSTFQDGVPKTEGDSSATALFPQTHKEQVQQDFSGKMQDLPEESSLEYQQEYFVTTPGTETSETQKAMIVPSSPSKTPEEVSTPAEEEKLYLQTPTSSERGGSPIIQEPEEPSEHREESSPRKTSLVIVESADNQPETCERLDEDAAFEKELTEELGELEASSDEEAMVTTRVVRRRVIIQGDDMPEIPPETVTEEEYIDEHGHTVVKKVTRKIIRRYVSSEGTEKEEIMVQGMPQEPVNIEEGDGYSKVIKRVVLKSDTEQSEDNNE

SEQ ID NO: 58958 - protein, 56 aa, Homo sapiens
MTSCHIAEEHIQKVAIFGGTHGNELTGVFLVKHWLENGAEIQRTGLEQKNVRRFAI

SEQ ID NO: 58959 - protein, 248 aa, Homo sapiens
MAAGTSSYWEDLRKQARQLENELDLKLVSFSKLCTSYSHSSTRDGRRDSSDTTPLLNGSSQDRMFETMAIEIEQLLARLTGVNDKMAEYTNSAGVPSLNAALMHTLQRHRDILQDYTHEFHKTKANFMAIRERENLMGSVRKDIESYKSGSGVNNRRTELFLKEHDHLRNSDRLIEETISIAMATKENMTSQRGMLKSIHSKMNTLANRFPAVNSLIQRINLRKRRDSLILGGVIGICTILLLLYAFH

SEQ ID NO: 58960 - protein, 75 aa, Homo sapiens
MAEYDLTTRIAHFLDRHLVFPLLEFLSVKEIYNEKELLQGKLDLLSDTNMVDFAMDVYKNLYSDDIPHVLFCIFN

SEQ ID NO: 58961 - protein, 134 aa, Homo sapiens
AKSLDIQVPNFPADETKGFHQVPFAPIVFIERTDFKEEPEPGFKRLAWGQPVGLRHTGYVIELQHVVKGPSGCVESLEVTCRRADAGEKPKAFIHWVSQPLMCEVRLYERLFQHKNPEDPTEVPGGFLSDLNLH

SEQ ID NO: 58962 - protein, 920 aa, Homo sapiens
MAGPRGALLAWCRRQCEGYRGVEIRDLSSSFRDGLAFCAILHRHRPDLLDFDSLSKDNVFENNRLAFEVAEKELGIPALLDPNDMVSMSVPDCLSIMTYVSQYYNHFCSPGQAGVSPPRKGLAPCSPPSVAPTPVEPEDVAQGEELSSGSLSEQGTGQTPSSTCAACQQHVHLVQRYLADGRLYHRHCFRCRRCSSTLLPGAYENGPEEGTFVCAEHCARLGPGTRSGTRPGPFSQPKQQHQQQLAEDAKDVPGGGPSSSAPAGAEADGPKASPEARPQIPTKPRVPGKLQELASPPAGRPTPAPRKASESTTPAPPTPRPRSSLQQENLVEQAGSSSLVNGRLHELPVPKPRGTPKPSEGTPAPRKDPPWITLVQAEPKKKPAPLPPSSSPGPPSQDSRQVENGGTEEVAQPSPTASLESKPYNPFEEEEEDKEEEAPAAPSLATSPALGHPESTPKSLHPWYGITPTSSPKTKKRPAPRAPSASPLDNVFGSIISISHEEINWCPAVPVPELVAARAACSSPLPPHCRSGAEEGPPLFLWHSQALHASRLSHSEPPSATPSPALSVESLSSESASQTAGAELLEPPAVPKSSSEPAVHAPGTPGNPVSLSTNSSLASSGELVEPRVEQMPQASPGLAPRTRGSSGPQPAKPCSGATPTPLLLVGDRSPVPSPGSSSPQLQVKSSCKENPFNRKPSPAASPATKKATKGSKPVRPPAPGHGFPLIKRKVQADQYIPEEDIHGEMDTIERRLDALEHRGVLLEEKLRGGLNEGREDDMLVDWFKLIHEKHLLVRRESELIYVFKQQNLEQRQADVEYELRCLLNKPEKDWTEEDRAREKVLMQELVTLIEQRNAIINCLDEDRQREEEEDKMLEAMIKKKEFQREAEPEGKKKGKFKTMKMLKLLGNKRDAKSKSPRDKS

SEQ ID NO: 58963 - protein, 154 aa, Homo sapiens
MQWLMRFRTLWGIHKSFHNIHPAPSQLRCRSLSEFGAPRWNDYEVPEEFNFASYVLDYWAQKEKEGKRGPNPAFWWVNGQGDEVKWSFREMGDLTRRVANVFTQTCGLQQGDHLALMLPRVPEWWLVAVGCMRTGIIFIPATILLKAKDILYRL

SEQ ID NO: 58964 - protein, 359 aa, Homo sapiens
  MOD_RES (1)..(1): Any amino acid
XSNVTSFQRRGPRASVTNDSGPRLVSIAGTRPSVRNGQLLVSTGLPALDQLLGGGLAVGTVLLIEEDKYNIYSPLLFKYFLAEGIVNGHTLLVASAKEDPANILQQIGPVSSSRFGHYYDASKRMPQELIEASNWHGFFLPEKISSTLKVEPCSLTPGYTKLLQFIQNIIYEEGFDGSNPQKKQRNILRIGIQNLGSPLWGDDICCAENGGNSHSLTKFLYVLRGLLRTSLSACIITMPTHLIQNKAIIARVTTLSDVVVGLESFIGSERETNPLYKDYHGLIHIRQIPRLNNLICDESDVKDLAFKLKRKLFTIERLHLPPDLSDTVSRSSKMDLAESAKRLGPGCGMMAGGKKHLDF

SEQ ID NO: 58965 - protein, 94 aa, Homo sapiens
MEVAELGFPETAVSQSRICLCAVLCGHWDFADMMVIRSLRPERPVEAAGGQRSFQQKSGHGCTLPRSKQLSRLLRLSGKTNVPGVWMRRLPQVH

SEQ ID NO: 58966 - protein, 475 aa, Homo sapiens
MAFWAGGSPSVVDYFPSEDFYRCGYCKNESGSRSNGMWAHSMTVQDYQDLIDRGWRRSGKYVYKPVMNQTCCPQYTIRCRPLQFQPSKSHKKVLKKMLKFLAKGEVPKGSCEDEPMDSTMDDAVAGDFALINKLDIQCDLKTLSDDIKESLESEGKNSKKEEPQELLQSQDFVGEKLGSGEPSHSVKVHTVPKPGKGADLSKPPCRKAKEIRKERKRLKLMQQNPAGELEGFQAQGHPPSLFPPKAKSNQPKSLEDLIFESLPENASHKLEFTRFLCSSPLEAETPPNGPDCGYGSFHQQYWLDGKIIAVGVIDILPNCVSSVYLYYDPDYSFLSLGVYSALREIAFTRQLHEKTSQLSYYYMGFYIHSCPKMKYKGQYRPSDLLCPETYVWVPIEQCLPSLENSKYCRFNQDPEAVDEDRSTEPDRLQVFHKRAIMPYGVYKKQQKDPSEEAAVLQYASLVGQKCSERMLLFRN

SEQ ID NO: 58967 - protein, 96 aa, Homo sapiens
MPQNVAKTEPVSILQPQTTVNPDRIKQTLPSSPTTTKSSPSDPMTTSRANQVKIIVPNSTAGLIIGKGGATVKAVMEQSGAWVQLSQKPDGINLQE

SEQ ID NO: 58968 - protein, 1427 aa, Homo sapiens
MKSCGVSLATAAAAAAAFGDEEKKMAAGKASGESEEASPSLTAEEREALGGLDSRLFGFVRFHEDGARTKALLGKAVRCYESLILKAEGKVESDFFCQLGHFNLLLEDYPKALSAYQRYYSLQSDYWKMRNPWIQRAHCIPLDQYTTNAAFLYGLGLVYFHYNAFQWAIKAFQEVLYVDPSFCRAKEIHLRLGLMFKVNTDYESSLKHFQLALVDCNPCTLSNAEIQFHIAHLYETQRKYHSAKEAYEQLLQTENLSAQVKATVLQQLGWMHHTVDLLGDKATKESYAIQYLQKSLEADPNSGQSWYFLGRCYSSIGKVQDAFISYRQSIDKSEASADTWCSIGVLYQQQNQPMDALQAYICAVQLDHGHAAAWMDLGTLYESCNQPQDAIKCYLNATRSKSCSNTSALAARIKYLQACKPHHPNTEPVLGLSQTPISQQSLPLHMIPSSQVDDLSSPAKRKRTSSPTKNTSDNWSGGHAVSHPPVQQQAHSWCLTPQKLQHLEQLRANRNNLNPAQKLMLEQLESQFVLMQQHQMRPTGVAQVRSTGIPNGPTADSSLPTNSVSGQQPQLALTRVPSVSQPGVRPACPGQPLANGPFSAGHVPCSTSRTLGSTDTILIGNNHITGSGSNGNVPYLQRNALTLPHNRTNLTSSAEEPWKNQLSNSTQGLHKGQSSHSAGPNGERPLSSTGPSQHLQAAGSGIQNQNGHPTLPSNSVTQGAALNHLSSHTATSGGQQGITLTKESKPSGNILTVPETSRHTGETPNSTASVEGLPNHVHQMTADAVCSPSHGDSKSPGLLSSDNPQLSALLMGKANNNVGTGTCDKVNNIHPAVHTKTDNSVASSPSSAISTATPSPKSTEQTTTNSVTSLNSPHSGLHTINGEGMEESQSPMKTDLLLVNHKPSPQIIPSMSVSIYPSSAEVLKACRNLGKNGLSNSSILLDKCPPPRPPSSPYPPLPKDKLNPPTPSIYLENKRDAFFPPLHQFCTNPNNPVTVIRGLAGALKLDLGLFSTKTLVEANNEHMVEVRTQLLQPADENWDPTGTKKIWHCESNRSHTTIAKYAQYQASSFQESLREENEKRSHHKDHSDSESTSSDNSGRRRKGPFKTIKFGTNIDLSDDKKWKLQLHELTKLPAFVRVVSAGNLLSHVGHTILGMNTVQLYMKVPGSRTPGHQENNNFCSVNINIGPGDCEWFVVPEGYWGVLNDFCEKNNLNFLMGSWWPNLEDLYEANVPVYRFIQRPGDLVWINAGTVHWVQAIGWCNNIAWNVGPLTACQYKLAVERYEWNKLQSVKSIVPMVHLSWNMARNIKVSDPKLFEMIKYCLLRTLKQCQTLREALIAAGKEIIWHGRTKEEPAHYCSICEVEVFDLLFVTNESNSRKTYIVHCQDCARKTSGNLENFVVLEQYKMEDLMQVYDQFTLAPPLPSASS

SEQ ID NO: 58969 - protein, 87 aa, Homo sapiens
MEGLRRGLSRWKRYHIKVHLADEALLLPLTVRPRDTLSDLRAQLVGQGVSSWKRAFYYNARRLDDHQTVRDARLQDGSVLLLVSDPR

SEQ ID NO: 58970 - protein, 162 aa, Homo sapiens
MKVTLSALDTSESSFTPLVVIELAQDVKEETKEWLKNRIIAKKKDGVRRLLTSGIVIQVFPLHDSEALKKLEDTWYTRFALKYQPIDSIRGYFGETIALYFGFLEYFTFALIPMAVIGLPYYLFVWEDYDKYVIFASFNLIWSTVILELWKRGCANMTYRWG

SEQ ID NO: 58971 - protein, 35 aa, Homo sapiens
MQTSSSRSVHLSEWQKNYFAITSGICTGPKADAYR

SEQ ID NO: 58972 - protein, 253 aa, Homo sapiens
  MOD_RES (1)..(1): Any amino acid
XRSRMLLLQPQARYQRVAVHRVPGLHHTYDVLFLGTGDGRLHKAVSVGPRVHIIEELQIFSSGQPVQNLLLDTHRVSRPTRNPGRGLLYAASHSGVVQVPMANCSLYRSCGDCLLARDPYCAWSGSSCKHVSLYQPQLATRPWIQDIEGASAKDLCSASSVVSPSFVPTGEKPCEQVQFQPNTVNTLACPLLSNLATRLWLRNGAPVNASASCHVLPTGDLLLVGTQQLGEFQCWSLEEGFQQLVASYCPEVV

SEQ ID NO: 58973 - protein, 670 aa, Homo sapiens
MATVVVEATEPEPSGSIANPAASTSPSLSHRFLDSKFYLLVVVGEIVTEEHLRRAIGNIELGIRSWDTNLIECNLDQELKLFVSRHSARFSPEVPGQKILHHRSDVLETVVLINPSDEAVSTEVRLMITDAARHKLLVLTGQCFENTGELILQSGSFSFQNFIEIFTDQEILKGGHNKCPVNLNFFKIGELLSTTHPANKASLTLFCPEEGDWKNSNLDRHNLQDFINIKLNSASILPEMEGLSEFTEYLSESVEVPSPFDILEPPTSGGFLKLSKPCCYIFPGGRGDSALFAVNGFNMLINGGSERKSCFWKLIRHLDRVDSILLTHIGDDNLPGINSMLQRKIAELEEEQSQGSTTNSDWMKNLISPDLGVVFLNVPENLKNPEPNIKMKRSIEEACFTLQYLNKLSMKPEPLFRSVGNTIDPVILFQKMGVGKLEMYVLNPVKSSKEMQYFMQQWTGTNKDKAEFILPNGQEVDLPISYLTSVSSLIVWHPANPAEKIIRVLFPGNSTQYNILEGLEKLKHLDFLKQPLATQKDLTGQVPTPVVKQTKLKQRADSRESLKPAAKPLPSKSVRKESKEETPEVTKVNHVEKPPKVESKEKVMVKKDKPIKTETKPSVTEKEVPSKEEPSPVKAEVAEKQATDVKPKAAKEKTVKKETKVKPEDKKEEK

SEQ ID NO: 58974 - protein, 130 aa, Homo sapiens
MRSLRLFFSQGCPAADITNERPGLRRSRRVQKLGGFPDPEPHSSLSSKGSRGWADSTDGCLLSFPGGFSQSSTHTQRRSDEACTSGQLVVASRESQYKVFHFHHGGLDKLSDVFQQWKYCTEMQLKDQQV

SEQ ID NO: 58975 - protein, 213 aa, Homo sapiens
  MOD_RES (1)..(1): Any amino acid
XLLYEAKCVKVAIKDKQVKYFIHYSGWNKNAVRPRRSEKSLKTHEDIVALFPVPEGAPSVHHPLLTSSWDEWVPESRVLKYVDTNLQKQRELQKANQEQYAEGKMRGAAPGKKTSGLQQKNVEVKTKKNKQKTPGNGDGGSTSETPQPPRKKRARVDPTVENEETFMNRVEVKVKIPEELKPWLVDDWDLITRQKQLFYLPAKKNVDSILEDY

SEQ ID NO: 58976 - protein, 155 aa, Homo sapiens; identical to SEQ ID NO: 47502

SEQ ID NO: 58977 - protein, 194 aa, Homo sapiens
  MOD_RES (1)..(1): Any amino acid
XAATYVQNQSEDCLYLNLYVPTEDDIRDPGKKPVMLFLHGGSYMEGTGNMFDGSVLAAYGNVIVATLNYRLGVLGFLSTGDQAAKGNYGLLDQIQALRWLSENIAHFGGDPERITIFGSGAGASCVNLLILSHHSEGLFQKAIAQSGTAISSWSVNYQPLKYTRLLAAKVGCDREDSAEAVECLRRKPSRELVD

SEQ ID NO: 58978 - protein, 731 aa, Homo sapiens
  MOD_RES (1)..(1): Any amino acid
XKPATGLWVWVSLLVAAGTVQPSDSQSVCAGTENKLSSLSDLEQQYRALRKYYENCEVVMGNLEITSIEHNRDLSFLRSVREVTGYVLVALNQFRYLPLENLRIIRGTKLYEDRYALAIFLNYRKDGNFGLQELGLKNLTEILNGGVYVDQNKFLCYADTIHWQDIVRNPWPSNLTLVSTNGSSGCGRCHKSCTGRCWGPTENHCQTLTRTVCAEQCDGRCYGPYVSDCCHRECAGGCSGPKDTDCFACMNFNDSGACVTQCPQTFVYNPTTFQLEHNFNAKYTYGAFCVKKCPHNFVVDSSSCVRACPSSKMEVEENGIKMCKPCTDICPKACDGIGTGSLMSAQTVDSSNIDKFINCTKINGNLIFLVTGIHGDPYNAIEAIDPEKLNVFRTVREITGFLNIQSWPPNMTDFSVFSNLVTIGGRVLYSGLSLLILKQQGITSLQFQSLKEISAGNIYITDNSNLCYYHTINWTTLFSTINQRIVIRDNRKAENCTAEGMVCNHLCSSDGCWGPGPDQCLSCRRFSRGRICIESCNLYDGEFREFENGSICVECDPQCEKMEDGLLTCHGPGPDNCTKCSHFKDGPNCVEKCPDGLQGANSFIFKYADPDRECHPCHPNCTQGCIGSSIEDCIGLMDRTPLIAAGVIGGLFILVIVGLTFAVYVRRKSIKKKRALRRFLETELVEPLTPSGTAPNQAQLRILKETELKRVKVLGSGAFGTVYKGIWVPEG

SEQ ID NO: 58979 - protein, 109 aa, Homo sapiens
  MOD_RES (1)..(1): Any amino acid
XPVGSWYNVTILVKMDFKELQQVDPRLLNHMRLLHSLLVKGTAQLASKKLALKPHCLALVLPLISCVTLGHQRPATNGLHRPPPALSPWERLHHSVAAATGPATATACG

SEQ ID NO: 58980 - protein, 90 aa, Homo sapiens
MKMWLLVSHLVIISITTCLAEFTWYRRYGHGVSEEDKGFGPIFEEQPINTIYPEESLEGKVSLNCRARASPFPVYKWRMNNGDVDLTSDR

SEQ ID NO: 58981 - protein, 103 aa, Homo sapiens
MATCAEILRSEFPEIDGQVFDYVTGVLHSGSADFESVDDLVEAVGELLQEVSGDSKDDAGIRAVCQRMYNTLRLAEPQSQGNSQVLLDAPIQLSKITENYGRR

SEQ ID NO: 58982 - protein, 108 aa, Homo sapiens
MQISSEKEEDDNEKRQDPGDNWEEGGGGGGGMEKSSGPWNKTAPVQAPPAPVIVTETPEPAMTSGVYRPPGARLTTTRKTPQGPPEIYSDTQFPSLQSTAKHVESRKY

SEQ ID NO: 58983 - protein, 143 aa, Homo sapiens
MLPPQKKPWESMAKGLVLGALFTSFLLLVYSYAVPPLHAGLASTTPEAAASCSPPALEPEAVIRANGSAGECQPRRNIVFLKTHKTASSTLLNILFRFGQKHRLKFAFPNGRNDFDYPTFFARSLVQDYRPGACFNIICNHMR

SEQ ID NO: 58984 - protein, 1460 aa, Homo sapiens
MDTVLVLLLGLQALAGPSPKPQKDSVSDWAIVLITLTLVAAIVSLMYGIKKACQFRREMSLGCGCGSVTPYSSHHEGEAASQRYSCQMKASWGAGATTFQEYQKTGELSTSDHIFPLTPGLVYSIPFDHIVLHSGQRPPELPKSTEIHEQKRHCNTTRHSKPTDKPTGNSKTIDHKSSTDNHEAPPTSEENSSNQGKDPMIRNQRSVDPADSTTTHKESAGKKHITPAPKSKINCRKSTTGKSTVTRKSDKTGRPLEKSMSTLDKTSTSSHKTTTSFHNSGNSQTKQKSTSFPEKITAASKTTYKTTGTPEESEKTEDSRTTVASDKLLTKTTKNIQETISANELTQSLAEPTEHGGRTANENNTPSPAEPTENRERTANENTTLSPAEPIENRERTANENTAPFPAGPTENREMTANENTTLFPAEPTEHGERTANENTTPSPAEPTEHGERTANENTTPSPAEPTEHGERTPFANDKTTSSSAESTEHGERTPLANENTTPSPAEPTENRERTANENTTPSPAGPTENRETTANEKTTLSPVEPTENRETTANEKTTPSPAEPTENGQRTPFANEKTTSSSAEPTEHGERTPLANENTTPSPAEPTENRERTANEKTTPSPAEPTENGDRTPLANEKTTPSLAEPTENGQRTPFANEKTTSSSAEPTEHEERTPLANENTTPSPAEPTENRERTANENTTPSPAGPTENREMTANEKTTLFPAEPTENRERTANEKTTSSPAEPTENGQRTPFANEKTTSSSAEPTEHGERTPLANENTTLSPAEPTENRERTANEKTTPFPAEPTENRERTANENTTPSPAQPTENGDRTPLANEKTTPSLAEPTENGKRTPFANEKTTSSSAEPTEHAERTPLANENTTSSPAEPTENRERTANEKTTQFPAEPTENRESTANEKTTPFPAEPTENREWTANENTTLSPAEPTEHEEMTPLANEKTTLSPAEPTENGERTPFTNEKTTPSSAEPTEHGERTPLANEITTPSRAEPTEHGERIANEKATPSPAKPTEHGETTVNEDTTPSSAEPTENGERTPLANENTTTSPTESTEHGERTANEKTTPSPAEPTEHGERTPSANEKTIPSPAKPTEHEEMTPSANENTTPSPVKPTEHGEKTTLANEKITLSPEGPTEHGAKTTSANEKITPSLAKPTEHGERTTSPNDKITSSAAESTEHRDRATSANVITPAPAEPIKHAKRTTLAHEKMTQVTEKSTEHPEKTTSTTEKTTRTPEKPTLYSEKTICTKGKNTPVPEKPTENLGNTTLTTETIKAPVKSTENPEKTAAVTKTIKPSVKVTGDKSLTTTSSHLNKTEVTHQVPTGSFTLITSRTKLSSITSEATGNESHPYLNKDGSQKGIHAGQMGENDSFPAWAIVIVVLVAVILLLVFLGLIFLVSYMMRTRRTLTQNTQYNDAEDEGGPNSYPVYLMEQQNLGMGQIPSPR

SEQ ID NO: 58985 - protein, 317 aa, Homo sapiens [sequence omitted]

SEQ ID NO: 58986 - protein, 318 aa, Homo sapiens
  MOD_RES (1)..(1): Any amino acid
XIDKDEEFAGSSPQSSKSTVVKSLIDNSSEIEDEDQILENSSQKENVFKCDSLKEECIPEHMVRGSKIMEAESQKATRECEKSALTPGFSDNAIMLFSPDFTLRNTLKSTSEDSLVKQECIKEVVEKREACHCEEVKMTVASEAKIQLSDSEAKSHSSADDASAWSNIQEAPLQDDSCLNNDIPHSIPLEQGSSCNGPGQTTGHPYYLRSFLVVLKTVLENEDDMLLFDEQEKGIVTKFYQLSATGQKLYVRLFQRKLSWIKMTKLEYEEIALDLTPVIEELTNAGFLQTEPKPWLDSQYESVKAPGLCFPASCYCFR

SEQ ID NO: 58987 - protein, 76 aa, Homo sapiens
GARQHVFLVSEYLKDASKKMKNGLMFVKLVNPCSGEGAIYLFNMCLQQLFEVKVFKEKHHSWFINQSVQSGEVSAP

SEQ ID NO: 58988 - protein, 179 aa, Homo sapiens
MNLTEGPLAMAEMDPTQDYMVFEDVAIHFSQEEWGILNDVQRHLHSDVMLENFALLSSVGCWHGAKDEEAPSKQCVSVGVSQVTTLKPALSTQKAQPCETCSSLLKDILHLAEHDGTHPKRTAKLYLHQKEHLREKLTRSDEGRPSFVNDSVHLAKRNLTCMQGGKDFTGDSDLQQQAL

SEQ ID NO: 58989 - protein, 127 aa, Homo sapiens
MDAPPPHPTTGLLSEPRVRSDRDKFVIFLDVKHFSPEDLTVKVQDDFVEIHGKHNERQDDHGYISREFHRRYRLPSNVDQSALSCSLSADGMLTFCGPKIQTGLDATHAERAIPVSREEKPTSAPSS

SEQ ID NO: 58990 - protein, 246 aa, Homo sapiens
MVVMAPRTLFLLLSGALTLTETWAGSHSMRYFSAAVSRPGRGEPRFIAMGYVDDTQFVRFDSDSACPRMEPRAPWVEQEGPEYWEEETRNTKAHAQTDRMNLQTLRGYYNQSEANPPKTHVTHHPVFDYEATLRCWALGFYPAEIILTWQRDGEDQTQDVELVETRPAGDGTFQKWAAVVVPSGEEQRYMCHVQHEGLPEPLMLRWKQSSLPTIPIMGIVAGLVVLAAVVTGAAVAAVLWRKKSSD

SEQ ID NO: 58991 - protein, 345 aa, Homo sapiens
MNNQARTPAPSSARTSTSVRASTPTRTPTPLRTPTPVRTRTPIRTLTPVLTPSPAGTSPLVLTPAPAQIPTLVPTPALARIPRLVPPPAPAWIPTPVPTPVPVRNPTPVPTPARTLTPPVRVPAPAPAQLLAGIRAALPVLDSYLAPALPLDPPPEPAPELPLLPEEDPEPAPSLKLIPSVSSEAGPAPGPLPTRTPLAANSPGPTLDFTFRADPSAIGLADPPIPSPVPSPILGTIPSAISLQNCTETFPSSSENFALDKRVLIRVTYCGLSYSLRYILLKKSLEQQFPNHLLFEEDRAAQATGEFEVFVNGRLVHSKKRGDGFVNESRLQKIVSVIDEEIKKR

SEQ ID NO: 58992 - protein, 105 aa, Homo sapiens
MTLSPLLLFLPPLLLLLDVPTAAVQASPLQALDFFGNGPPVNYKTGNLYLRGPLKKSNAPLVNVTLYYEALCGGCRAFLIRELFPTWLLVMEILNVTLVPYGNAQ

SEQ ID NO: 58993 - protein, 201 aa, Homo sapiens
  MOD_RES (1)..(1): Any amino acid
XLSLASSASTISSLSSLSPKDSSGLRLWKRRWFVLSGHCLFYYKDSREESVLGSVLLPSYNIRPDGPGAPRGRRFTFTAEHPGMRTYVLAADTLEDLRGWLRALGRASRAEGDDYGQPRSPARPQPGEGPGGPGGPPEVSRGEEGRISESPEVTRLSRGRGRPRLLTPSPTTDLHSGLQMRRARSPDLFTPLSRPPSPLSL

SEQ ID NO: 58994 - protein, 52 aa, Homo sapiens
MAWIKRKFGERPPPKRLTREAMRNYLKERGDQTVLILHAKVAQKSYGNEKRC

SEQ ID NO: 58995 - protein, 70 aa, Homo sapiens
MQKVTLGLLVFLAGFPVLDANDLEDKNSPFYYDWHSLQVGGLICAGVLCAMGIIIVMSAKCKCKFGQKSG

SEQ ID NO: 58996 - protein, 77 aa, Homo sapiens
MDQPAGLQVDYVFRGVEHAVRVMVSGQVLELEVEDRMTADQWRGEFDAGFIEDLTHKTGNFKQFNIFCHMLESALTQ

SEQ ID NO: 58997 - protein, 148 aa, Homo sapiens
MSKQQPTQFINPETPGYVGFANLPNQVHRKSVKKGFEFTLMVVGESGLGKSTLINSLFLTDLYPERVIPGAAEKIERTVQIEASTVEIEERGVKLRLTVVDTPGYGDAINCRDCFKTIISYIDEQFERYLHDESGLNRRHIIDNRVHC

SEQ ID NO: 58998 - protein, 1955 aa, Homo sapiens
MEFPIGSLETNNFRRFTPESLVEIEKQIAAKQGTKKAREKHREQKDQEEKPRPQLDLKACNQLPKFYGELPAELIGEPLEDLDPFYSTHRTFMVLNKGRTISRFSATRALWLFSPFNLIRRTAIKVSVHSWFSLFITVTILVNCVCMTRTDLPEKIEYVFTVIYTFEALIKILARGFCLNEFTYLRDPWNWLDFSVITLAYVGTAIDLRGISGLRTFRVLRALKTVSVIPGLKVIVGALIHSVKKLADVTILTIFCLSVFALVGLQLFKGNLKNKCVKNDMAVNETTNYSSHRKPDIYINKRGTSDPLLCGNGSDSGHCPDGYICLKTSDNPDFNYTSFDSFAWAFLSLFRLMTQDSWERLYQQTLRTSGKIYMIFFVLVIFLGSFYLVNLILAVVTMAYEEQNQATTDEIEAKEKKFQEALEMLRKEQEVLAALGIDTTSLHSHNGSPLTSKNASERRHRIKPRVSEGSTEDNKSPRSDPYNQRRMSFLGLASGKRRASHGSVFHFRSPGRDISLPEGVTDDGVFPGDHESHRGSLLLGGGAGQQGPLPRSPLPQPSNPDSRHGEDEHQPPPTSELAPGAVDVSAFDAGQKKTFLSAEYLDEPFRAQRAMSVVSIITSVLEELEESEQKCPPCLTSLSQKYLIWDCCPMWVKLKTILFGLVTDPFAELTITLCIVVNTIFMAMEHHGMSPTFEAMLQIGNIVFTIFFTAEMVFKIIAFDPYYYFQKKWNIFDCIIVTVSLLELGVAKKGSLSVLRSFRLLRVFKLAKSWPTLNTLIKIIGNSVGALGNLTIILAIIVFVFALVGKQLLGENYRNNRKNISAPHEDWPRWHMHDFFHSFLIVFRILCGEWIENMWACMEVGQKSICLILFLTVMVLGNLVVLNLFIALLLNSFSADNLTAPEDDGEVNNLQVALARIQVFGHRTKQALCSFFSRSCPFPQPKAEPELVVKLPLSSSKAENHIAANTARGSSGGLQAPRGPRDEHSDFIANPTVWVSVPIAEGESDLDDLEDDGGEDAQSFQQEVIPKGQEQLQQVERCGDHLTPRSPGTGTSSEDLAPSLGETWKDESVPQVPAEGVDDTSSSEGSTVDCLDPEEILRKIPELADDLEEPDDCFTEGCIRHCPCCKLDTTKSPWDVGWQVRKTCYRIVEHSWFESFIIFMILLSSGSLAFEDYYLDQKPTVKALLEYTDRVFTFIFVFEMLLKWVAYGFKKYFTNAWCWLDFLIVNISLISLTAKILEYSEVAPIKALRTLRALRPLRALSRFEGMRVVVDALVGAIPSIMNVLLVCLIFWLIFSIMGVNLFAGKFWRCINYTDGEFSLVPLSIVNNKSDCKIQNSTGSFFWVNVKVNFDNVAMGYLALLQVATFKGWMDIMYAAVDSREVNMQPKWEDNVYMYLYFVIFIIFGGFFTLNLFVGVIIDNFNQQKKKLGGQDIFMTEEQKKYYNAMKKLGSKKPQKPIPRPLNKFQGFVFDIVTRQAFDITIMVLICLNMITMMVETDDQSEEKTKILGKINQFFVAVFTGECVMKMFALRQYYFTNGWNVFDFIVVVLSIASLIFSAILKSLQSYFSPTLFRVIRLARIGRILRLIRAAKGIRTLLFALMMSLPALFNIGLLLFLVMFIYSIFGMSSFPHVRWEAGIDDMFNFQTFANSMLCLFQITTSAGWDGLLSPILNTGPPYCDPNLPNSNGTRGDCGSPAVGIIFFTTYIIISFLIMVNMYIAVILENFNVATEESTEPLSEDDFDMFYETWEKFDPEATQFITFSALSDFADTLSGPLRIPKPNRNILIQMDLPLVPGDKIHCLDILFAFTKNVLGESGELDSLKANMEEKFMATNLSKSSYEPIATTLRWKQEDISATVIQKAYRSYVLHRSMALSNTPCVPRAEEEAASLPDEGFVAFTANENCVLPDKSETASATSFPPSYESVTRGLSDRVNMRTSSSIQNEDEATSMELIAPGP

SEQ ID NO: 58999 - protein, 188 aa, Homo sapiens
MVGPGPTAAAAVEERQRKLQEYLAAKGKLKSQNTKPYLKSKNNCQNQPPSKSTIRPKNDVTNHVVLPVKPKRSISIKLQPRPPNTAGSQKPKLEPPKLLGKRLTSECVSSNPYSKPSSKSFQQCEAGSSTTGELSRKPVGSLNIEQLKTTKQQLTDQGNAKSTDFGLQVEKGCSPEPFSEQDSSQNSS

SEQ ID NO: 59000 - protein, 5497 aa, Homo sapiens
MAGYLSPAAYLYVEEQEYLQAYEDVLERYKDERDKVQKKTFTKWINQHLMKVRKHVNDLYEDLRDGHNLISLLEVLSGDTLPREKGRMRFHRLQNVQIALDYLKRRQVKLVNIRNDDITDGNPKLTLGLIWTIILHFQISDIHVTGESEDMSAKERLLLWTQQATEGYAGIRCENFTTCWRDGKLFNAIIHKYRPDLIDMNTVAVQSNLANLEHAFYVAEKIGVIRLLDPEDVDVSSPDEKSVITYVSSLYDAFPKVPEGGEGIGANDVEVKWIEYQNMVNYLIQWIRHHVTTMSERTFPNNPVELKALYNQYLQFKETEIPPKETEKSKIKRLYKLLEIWIEFGRIKLLQGYHPNDIEKEWGKLIIAMLEREKALRPEVERLEMLQQIANRVQRDSVICEDKLILAGNALQSDSKRLESGVQFQNEAEIAGYILECENLLRQHVIDVQILIDGKYYQADQLVQRVAKLRDEIMALRNECSSVYSKGRILTTEQTKLMISGITQSLNSGFAQTLHPSLTSGLTQSLTPSLTSSSMTSGLSSGMTSRLTPSVTPAYTPGFPSGLVPNFSSGVEPNSLQTLKLMQIRKPLLKSSLLDQNLTEEEINMKFVQDLLNWVDEMQVQLDRTEWGSDLPSVESHLENHKNVHRAIEEFESSLKEAKISEIQMTAPLKLTYAEKLHRLESQYAKLLNTSRNQERHLDTLHNFVSRATNELIWLNEKEEEEVAYDWSERNTNIARKKDYHAELMRELDQKEENIKSVQEIAEQLLLENHPARLTIEAYRAAMQTQWSWILQLCQCVEQHIKENTAYFEFFNDAKEATDYLRNLKDAIQRKYSCDRSSSIHKLEDLVQESMEEKEELLQYKSTIANLMGKAKTIIQLKPRNSDCPLKTSIPIKAICDYRQIEITIYKDDECVLANNSHRAKWKVISPTGNEAMVPSVCFTVPPPNKEAVDLANRIEQQYQNVLTLWHESHINMKSVVSWHYLINEIDRIRASNVASIKTMLPGEHQQVLSNLQSRFEDFLEDSQESQVFSGSDITQLEKEVNVCKQYYQELLKSAEREEQEESVYNLYISEVRNIRLRLENCEDRLIRQIRTPLERDDLHESVFRITEQEKLKKELERLKDDLGTITNKCEEFFSQAAASSSVPTLRSELNVVLQNMNQVYSMSSTYIDKLKTVNLVLKNTQAAEALVKLYETKLCEEEAVIADKNNIENLISTLKQWRSEVDEKRQVFHALEDELQKAKAISDEMFKTYKERDLDFDWHKEKADQLVERWQNVHVQIDNRLRDLEGIGKSLKYYRDTYHPLDDWIQQVETTQRKIQENQPENSKTLATQLNQQKMLVSEIEMKQSKMDECQKYAEQYSATVKDYELQTMTYRAMVDSQQKSPVKRRRMQSSADLIIQEFMDLRTRYTALVTLMTQYIKFAGDSLKRLEEEEKSLEEEKKEHVEKAKELQKWVSNISKTLKDAEKAGKPPFSKQKISSEEISTKKEQLSEALQTIQLFLAKHGDKMTDEERNELEKQVKTLQESYNLLFSESLKQLQESQTSGDVKVEEKIVAERQQEYKEKLQGICDLLTQTENRLIGHQEAFMIGDGTVELKKYQSKQEELQKDMQGSAQALAEVVKNTENFLKENGEKLSQEDKALIEQKLNEAKIKCEQLNLKAEQSKKELDKVVTTAIKEETEKVAAVKQLEESKTKIENLLDWLSNVDKDSERAGTKHKQVIEQNGTHFQEGDGKSAIGEEDEVNGNLLETDVDGQVGTTQENLNQQYQKVKAQHEKIISQHQAVIIATQSAQVLLEKQGQYLSPEEKEKLQKNMKELKVHYETALAESEKKMKLTHSLQEELEKFDADYTEFEHWLQQSEQELENLEAGADDINGLMTKLKRQKSFSEDVISHKGDLRYITISGNRVLEAAKSCSKRDGGKVDTSATHREVQRKLDHATDRFRSLYSKCNVLGNNLKDLVDKYQHYEDASCGLLAGLQACEATASKHLSEPIAVDPKNLQRQLEETKALQGQISSQQVAVEKLKKTAEVLLDARGSLLPAKNDIQKTLDDIVGRYEDLSKSVNERNEKLQITLTRSLSVQDGLDEMLDWMGNVESSLKEQGQVPLNSTALQDIISKNIMLEQDIAGRQSSINAMNEKVKKFMETTDPSTASSLQAKMKDLSARFSEASHKHKETLAKMEELKTKVELFENLSEKLQTFLETKTQALTEVDVPGKDVTELSQYMQESTSEFLEHKKHLEVLHSLLKEISSHGLPSDKALVLEKTNNLSKKFKEMEDTIKEKKEAVTSCQEQLDAFQVLVKSLKSWIKETTKKVPIVQPSFGAEDLGKSLEDTKKLQEKWSLKTPEIQKVNNSGISLCNLISAVTTPAKAIAAVKSGGAVLNGEGTATNTEEFWANKGLTSIKKDMTDISHGYEDLGLLLKDKIAELNTKLSKLQKAQEESSAMMQWLQKMNKTATKWQQTPAPTDTEAVKTQVEQNKSFEAELKQNVNKVQELKDKLTELLEENPDTPEAPRWKQMLTEIDSKWQELNQLTIDRQQKLEESSNNLTQFQTVEAQLKQWLVEKELMVSVLGPLSIDPNMLNTQRQQVQILLQEFATRKPQYEQLTAAGQGILSRPGEDPSLRGIVKEQLAAVTQKWDSLTGQLSDRCDWIDQAIVKSTQYQSLLRSLSDKLSDLDNKLSSSLAVSTHPDAMNQQLETAQKMKQEIQQEKKQIKVAQALCEDLSALVKEEYLKAELSRQLEGILKSFKDVEQKAENHVQHLQSACASSHQFQQMSRDFQAWLDTKKEEQNKSHPISAKLDVLESLIKDHKDFSKTLTAQSHMYEKTIAEGENLLLKTQGSEKAALQLQLNTIKTNWDTFNKQVKERENKLKESLEKALKYKEQVETLWPWIDKCQNNLEEIKFCLDPAEGENSIAKLKSLQKEMDQHFGMVELLNNTANSLLSVCEIDKEVVTDENKSLIQKVDMVTEQLHSKKFCLENMTQKFKEFQEVSKESKRQLQCAKEQLDIHDSLGSQAYSNKYLTMLQTQQKSLQALKHQVDLAKRLAQDLVVEASDSKGTSDVLLQVETIAQEHSTLSQQVDEKCSFLETKLQGIGHFQNTIREMFSQFAEFDDELDSMAPVGRDAETLQKQKETIKAFLKKLEALMASNDNANKTCKMMLATEETSPDLVGIKRDLEALSKQCNKLLDRAQAREEQVEGTIKRLEEFYSKLKEFSILLQKAEEHEESQGPVGMETETINQQLNMFKVFQKEEIEPLQGKQQDVNWLGQGLIQSAAKSTSTQGLEHDLDDVNARWKTLNKKVAQRAAQLQEALLHCGRFQDALESLLSWMVDTEELVANQKPPSAEFKVVKAQIQEQKLLQRLLDDRKSTVEVIKREGEKIATTAEPADKVKILKQLSLLDSRWEALLNKAETRNRQLEGISVVAQQFHETLEPLNEWLTTIEKRLVNCEPIGTQASKLEEQIAQHKALEDDIINHNKHLHQAVSIGQSLKVLSSREDKDMVQSKLDFSQVWYIEIQEKSHSRSELLQQALCNAKIFGEDEVELMNWLNEVHDKLSKLSVQDYSTEGLWKQQSELRVLQEDILLRKQNVDQALLNGLELLKQTTGDEVLIIQDKLEAIKARYKDITKLSTDVAKTLEQALQLARRLHSTHEELCTWLDKVEVELLSYETQVLKGEEASQAQMRPKELKKEAKNNKALLDSLNEVSSALLELVPWRAREGLEKMVAEDNERYRLVSDTITQKVEEIDAAILRSQQFDQAADAELSWITETEKKLMSLGDIRLEQDQTSAQLQVQKTFTMEILRHKDIIDDLVKSGHKIMTACSEEEKQSMKKKLDKVLKNYDTICQINSERYLQLERAQSLVNQFWETYEELWPWLTETQSIISQLPAPALEYETLRQQQEEHRQLRELIAEHKPHIDKMNKTGPQLLELSPGEGFSIQEKYVAADTLYSQIKEDVKKRAVALDEAISQSTQFHDKIDQILESLERIVERLRQPPSISAEVEKIKEQISENKNVSVDMEKLQPLYETLKQRGEEMIARSGGTDKDISAKAVQDKLDQMVFIWENIHTLVEEREAKLLDVMELAEKFWCDHMSLIVTIKDTQDFIRDLEDPGIDPSVVKQQQEAAETIREEIDGLQEELDIVINLGSELIAACGEPDKPIVKKSIDELNSAWDSLNKAWKDRIDKLEEAMQAAVQYQDGLQAVFDWVDIAGGKLASMSPIGTDLETVKQQIEELKQFKSEAYQQQIEMERLNHQAELLLKKVTEESDKHTVQDPLMELKLIWDSLEERIINRQHKLEGALLALGQFQHALDELLAWLTHTEGLLSEQKPVGGDPKAIEIELAKHHVLQNDVLAHQSTVEAVNKAGNDLIESSAGEEASNLQNKLEVLNQRWQNVLEKTEQRKQQLDGALRQAKGFHGEIEDLQQWLTDTERHLLASKPLGGLPETAKEQLNVHMEVCAAFEAKEETYKSLMQKGQQMLARCPKSAETNIDQDINNLKEKWESVETKLNERKTKLEEALNLAMEFHNSLQDFINWLTQAEQTLNVASRPSLILDTVLFQIDEHKVFANEVNSHREQIIELDKTGTHLKYFSQKQDVVLIKNLLISVQSRWEKVVQRLVERGRSLDDARKRAKQFHEAWSKLMEWLEESEKSLDSELEIANDPDKIKTQLAQHKEFQKSLGAKHSVYDTTNRTGRSLKEKTSLADDNLKLDDMLSELRDKWDTICGKSVERQNKLEEALLFSGQFTDALQALIDWLYRVEPQLAEDQPVHGDIDLVMNLIDNHKAFQKELGKRTSSVQALKRSARELIEGSRDDSSWVKVQMQELSTRWETVCALSISKQTRLEAALRQAEEFHSVVHALLEWLAEAEQTLRFHGVLPDDEDALRTLIDQHKEFMKKLEEKRAELNKATTMGDTVLAICHPDSITTIKHWITIIRARFEEVLAWAKQHQQRLASALAGLIAKQELLEALLAWLQWAETTLTDKDKEVIPQEIEEVKALIAEHQTFMEEMTRKQPDVDKVTKTYKRRAADPSSLQSHIPVLDKGRAGRKRFPASSLYPSGSQTQIETKNPRVNLLVSKWQQVWLLALERRRKLNDALDRLEELREFANFDFDIWRKKYMRWMNHKKSRVMDFFRRIDKDQDGKITRQEFIDGILSSKFPTSRLEMSAVADIFDRDGDGYIDYYEFVAALHPNKDAYKPITDADKIEDEVTRQVAKCKCAKRFQVEQIGDNKYRFFLGNQFGDSQQLRLVRILRSTVMVRVGGGWMALDEFLVKNDPCRAKGRTNMELREKFILADGASQGMAAFRPRGRRSRPSSRGASPNRSTSVSSQAAQAASPQVPATTTPKILHPLTRNYGKPWLTNSKMSTPCKAAECSDFPVPSAEGTPIQGSKLRLPGYLSGKGFHSGEDSGLITTAAARVRTQFADSKKTPSRPGSRAGSKAGSRASSRRGSDASDFDISEIQSVCSDVETVPQTHRPTPRAGSRPSTAKPSKIPTPQRKSPASKLDKSSKR

SEQ ID NO: 59001 - protein, 148 aa, Homo sapiens
MARLQQLYLQLRIQRPPGDPGEEESTRAPLPSPLHTPGNRGQGPWELLSQTEHTGEGPSCLPLSCLPGVPPAGPLSRSLMGCLLALANLTVFLKEQRLLHPQRWRCPVPTLPGCQKPQWSQRTTCHPPRDTSGISPTGTRSRSCSTGS

SEQ ID NO: 59002 - protein, 148 aa, Homo sapiens
LLLLLAVAVRESWQTEEKTCDLDNFNPVSEERGKVQDCFYLFEMDSSLACSPEISHLSVGSILLVTFASLVAVYVVGGFLYQRLVVGAKGMEQFPHLAFWQDLGNLVADGCDFVCRSKPRNVPAAYRGVGDDQLGEESEERDDHLLPM

SEQ ID NO: 59003 - protein, 25 aa, Homo sapiens
MEVTASSRHYVDRLFDPDPQKVLQG

SEQ ID NO: 59004 - protein, 176 aa, Homo sapiens
MAAARLLPVPAGPQAKLTFEDVAVLLSQDEWDRLCPAQRGLYRNVMMETYGNVVSLGLPGSKPDIISQLERGEDPWVLDRKGAKKSQGLWSDYSDNLKYDHTTACTQQDSLSCPWECETKGESQNTDLSPKPLISEQTVILGKTPLGRIDQENNETKQSFCLSPNSVDHREVQVLS

SEQ ID NO: 59005 - protein, 116 aa, Homo sapiens
MGCVQCKDKEATKLTEERDGSLNQSSGYRYGTDPTPQHYPSFGVTSIPNYNNFHAAGGQGLTVFGGVNSSSHTGTLRTRGGTGVTLFVALYDYEARTEDDLSFHKGEKFQILNSSE

SEQ ID NO: 59006 - protein, 154 aa, Homo sapiens
MNKLQPGSVPKINRSMQNWHQLENLSNFIKAMVSYGMNPVDLFEANDLFESGNMTQVQVSLLALAGKMGTNKCASQSGMTAYGTRRHLYDPKNHILPPMDHSTISLQMGTNKCASQVGLARVPPTPLPAPLHPVVSAPPWGHLQLLSPLSVSAP

SEQ ID NO: 59007 - protein, 208 aa, Homo sapiens
MKQDASRNAAYTVDCEDYVHVVEFNPFENGDSGNLIAYGGNNYVVIGTCTFQEEEADVEGIQYKTLRTFHHGVRVDGIAWSPETRLDSLPPVIKFCTSAADMKIRLFTSDLQDKNEYKVLEGHTDFINGLVFDPKEGQEIASVSDDHTCSYPQNKRPVHMDRACLFRWSTISENLFATTGYPGKMASQFQIHHLGHPQPILMGSVAVG

SEQ ID NO: 59008 - protein, 75 aa, Homo sapiens
MDTQGTFDSQSTLRDSATVFALSTMISSIQVYNLSQNVQEDDLQHLQLFTEYGRLAMEETFLKPFQSLIFLVRDW

SEQ ID NO: 59009 - protein, 62 aa, Homo sapiens
MKKCLLPVLITCMQTAICKDRMMMIMILLVNYRPDEFIECEDPVDHVGNATASQELGYGCLK

SEQ ID NO: 59010 - protein, 74 aa, Homo sapiens
MVRPVRHKKPVNYSQFDHSDSDDDFVSATVPLNKKSRTAPKELKQDKPKPNLNNLRKEEIPVQEKTPKKSHRKK

SEQ ID NO: 59011 - protein, 464 aa, Homo sapiens
MNPAAEAEFNILLATDSYKVTHYKQYPPNTSKVYSYFECREKKTENSKLRKVKYEETVFYGLQYILNKYLKGKVVTKEKIQEAKDVYKEHFQDDVFNEKGWNYILEKYDGHLPIEIKAVPEGFVIPRGNVLFTVENTDPECYWLTNWIETILVQSWYPITVATNSREQKKILAKYLLETSGNLDGLEYKLHDFGYRGVSSQETAGIGASAHLVNFKGTDTVAGLALIKKYYGTKDPVPGYSVPAAEHSTITAWGKDHEKDAFEHIVTQFSSVPVSVVSDSYDIYNACEKIWGEDLRHLIVSRSTQAPLIIRPDSGNPLDTVLKVLEILGKKFPVTENSKGYKLLPPYLRVIQGDGVDINTLQEIVEGMKQKMWSIENIAFGSGGGLLQKLTRDLLNCSFKCSYVVTNGLGINVFKDPVADPNKRSKKGRLSLHRTPAGNFVTLEEGKGDLEEYGQVCIYADWFF

SEQ ID NO: 59012 - protein, 139 aa, Homo sapiens
MIHSLFLINSSGDIFLEKHWKSVVSRSVCDYFFEAQERATEAENVPPVIPTPHHYLLSVYRHKIFFVAVIQTEVPPLFVIEFLHRVVDTFQDYFGVCSEPVIKDNVVVVYEVLEEMLDNGFPLATESNILKELIKPPTI

SEQ ID NO: 59013 - protein, 830 aa, Homo sapiens
MVVSAGPWSSEKAEMNILEINEKLRPQLAENKQQFRNLKEMFSNSTGRLPGQPTEEIQQYKVLVHSQERELTQLREKLREGRDASRSLNEHLQALLTPDEPDKSQGQDLQEQLAEGCRLAQHLVQKLSPENDEDEDEDVQVEEDEKVLESSAPREVQKAEESKVPEDSLEECAITCSNSHGPCDSIQPHKNIKITFEEDKVNSSLVVDRESSHDGCQDALNILPVPGPTSSATNVSMVVSAGPLSSEKAEMNILEINEKLCPQLAEKKQQFRSLKEKCFVTQVACFLAKQQNKYKYEECKDLIKSMLRNERQFKEEKLAEQLKQAEELRQYKVLVHSQERELTQLREKLREGRDASRSLNEHLQALLTPDEPDKSQGQDLQEQLAEGCRLAQHLVQKLSPENDNDDDEDVQVEVAEKVQKSSSPREMQKAEEKEVPEDSLEECAITCSNSHGPYDSNQPHRKTKITFEEDKVDSTLIGSSSHVEWEDAVHIIPENESDDEEEEEKGPVSPRNLQESEEEEVPQESWDEGYSTLSIPPERLASYQSYSSTFHSLEEQQVCMAVDIGRHRWDQVKKEDQEATGPRLSRELLDEKEPEVLQDSLDRCYSTPSVYLGLTDSCQPYRSAFYVLEQQRIGLAVDMDEIEKYQEVEEDQDPSCPRLSRELLAEKEPEVLQDSLDRCYSTPSGYLELPDLGQPYRSAVYSLEEQYLGLALDVDRIKKDQEEEEDQGPPCPRLSRELLEVVEPEVLQDSLDVIQLLPVVLNSLTPASPTEVPFMHWRKNMLAFLLTWEKLKRRGRGRKEGEEDQRRKEEGEEKKGKKIKTHHAPGSAAC

SEQ ID NO: 59014 - protein, 632 aa, Homo sapiens
MTPTLAALLCLGLSLGPRTHVQAGPFPKPTLWAEPGSVISWGSPVTIWCQGSLEAQEYRLDKEGSPEPWDRNNPLEPKNKARFSIPSITEHHAGRYRCHYYSSAGWSEPSDPLELVMTGAYSKPTLSALPSPVVASGGNMTLQCGSQKGYHHFVLMKEGEHQLPRTLDSQQLHSGGFQALFPVGPVNPSHRWRFTCYYYYMNTPRVWSHPSDPLEILPSGVSRKPSLLTLQGPVLAPGQSLTLQCGSDVGYDRFVLYKEGERDFLQRPGQQPQAGLSQANFTLGPVSPSHGGQYRCYGAHNLSSEWSAPSDPLNILMAGQIYDTVSLSAQPGPTVASGENVTLLCQSWWQFDTFLLTKEGAAHPPLRLRSMYGAHKYQAEFPMSPVTSAHAGTYRCYGSYSSNPHLLSFPSEPLELMVSGHSGGSSLPPTGPPSTPGLGRYLEVLIGVSVAFVLLLFLLLFLLLRRQRHSKHRTSDQRKTDFQRPAGAAETEPKDRGLLRRSSPAADVQEENLYAAVKDTQSEDRVELDSQQSPHDEDPQAVTYAPVKHSSPRREMASPPSSLSGEFLDTKDRQVEEDRQMDTEAAASEASQDVTYAQLHSLTLRRKATEPPPSQEGEPPAEPSIYATLAIH

SEQ ID NO: 59015 - protein, 30 aa, Homo sapiens
MSRRKQAKPRSLKDPNCKLEDKTEDGEALD

SEQ ID NO: 59016 - protein, 32 aa, Homo sapiens
YNMYGWWVGELNSLVGIVPKEYLTTAFEVEER

SEQ ID NO: 59017 - protein, 88 aa, Homo sapiens
MVARVWSLMRFLIKGSVAGGAVYLVYDQELLGPSDKSQAALQKAGEVVPPAMYQFSQYVCQQTGLQIPQLPAPPKIYFPIRDSWNAGI

SEQ ID NO: 59018 - protein, 98 aa, Homo sapiens
MILLPQPPKKLGLQENGELCMNSAQCKSNCCQHSSALGLARCTSMASENSECSVKTLYGIYYKCPCERGLTCEGDKTIVGSITNTNFGICHDAGRSKQ

SEQ ID NO: 59019 - protein, 1008 aa, Homo sapiens
MDKILEGLVSSSHPLPLKRVIVRKVVESAEHWLDEAQCEAMFDLTTRLILEGQDPFQRQVGHQVLEAYARYHRPEFESFFNKTFVLGLLHQGYHSLDRKDVAILDYIHNGLKLIMSCPSVLDLFSLLQVEVLRMVCERPEPQLCARLSDLLTDFVQCIPKGKLSITFCQQLVRTIGHFQCVSTQERELREYVSQVTKVSNLLQNIWKAEPATLLPSLQEVFASISSTDASFEPSVALASLVQHIPLQMITVLIRSLTTDPNVKDASMTQALCRMIDWLSWPLAQHVDTWVIALLKGLAAVQKFTILIDVTLLKIELIVPHVVNLVHSFKNDGLPSSTAFLVQLTELIHCMMYHYSGFPDLYEPILEAIKDFPKPSEEKIKLILNQSAWTSQSNSLASCLSRLSGKSETGKTGLINLGNTCYMNSVIQALFMATDFRRQVLSLNLNGCNSLMKKLQHLFAFLAHTQREAYAPRIFFEASRPPWFTPRSQQDCSEYLRFLLDRLHEEEKILKVQASHKPSEILECSETSLQEVASKAAVLTETPRTSDGEKTLIEKMFGGKLRTHIRCLNCRSTSQKVEAFTDLSLAFCPSSSLENMSVQDPASSPSIQDGGLMQASVPGPSEEPVVYNPTTAAFICDSLVNEKTIGSPPNEFYCSENTSVPNESNKILVNKDVPQKPGGETTPSVTDLLNYFLAPEILTGDNQYYCENCASLQNAEKTMQITEEPEYLILTLLRFSYDQKYHVRRKILDNVSLPLVLELPVKRITSFSSLSESWSVDVDFTDLSENLAKKLKPSGTDEASCTKLVPYLLSSVVVHSGISSESGHYYSYARNITSTDSSYQMYHQSEALALASSQSHLLGRDSPSAVFEQDLENKEMSKEWFLFNDSRVTFTSFQSVQKITSRFPKDTAYVLLYKKQHSTNGLSGNNPTSGLWINGDPPLQKELMDAITKDNKLYLQEQELNARARALQAASASCSFRPNGFDDNDPPGSCGPTGGGGGGGFNTVGRLVF

SEQ ID NO: 59020 - protein, 83 aa, Homo sapiens
MDFDKKGGKGETEEGRRMSKAGGGRSSHGIRSSGTSSGVLMVGPNFRVGKKIGCGNFGELRLGWFQRCWGKAEGKHERLQGQG

SEQ ID NO: 59021 - protein, 96 aa, Homo sapiens
MSTVEEDSDTVTVETVNSVTLTQDTEGNLILHCPQNEADEIDSEDSIEPPHKRLCLSSEDDQSIDDSTPCISVVALPLSENDQSFEVTMTATTEVA

SEQ ID NO: 59022 - protein, 180 aa, Homo sapiens
IDTHPSPSHSSTVKDSLIELKESSAKLYINHTPPPLSKSKEREMDKKDLDKSRERSREREKKDEKDRKERKRDHSNNDREVPPDLTKRRKEENGTMGVSKHKSESPCESPYPNEKDKEKNKSKSSGKEKGSDSFKSEKMDKISSGGKKESRHDKEKIEKKEKRDSSGGKEEKKQSSDKHR

SEQ ID NO: 59023 - protein, 78 aa, Homo sapiens
MSASVVSVISRFLEEYLSSTPQRLKLLDAYLLYILLTGALQFGYCLLVGTFPFNSFLSGFISCVGSFILAGSLFEFPG

SEQ ID NO: 59024 - protein, 59 aa, Homo sapiens
  MOD_RES (1)..(1): Any amino acid
XSLAGLGAYQLYQDPRNVWGFLAATSVTFVGVMGMRSYYYGKFMPVGLIAGARNLENCI

SEQ ID NO: 59025 - protein, 908 aa, Homo sapiens
MKIIFPILSNPVFRRTVKLLLCLLWIGYSQGTTHVLRFGGIFEYVESGPMGAEELAFRFAVNTINRNRTLLPNTTLTYDTQKINLYDSFEASKKACDQLSLGVAAIFGPSHSSSANAVQSICNALGVPHIQTRWKHQVSDNKDSFYVSLYPDFSSLSRAILDLVQFFKWKTVTVVYDDSTGLIRLQELIKAPSRYNLRLKIRQLPADTKDAKPLLKEMKRGKEFHVIFDCSHEMAAGILKQALAMGMMTEYYHYIFTTLDLFALDVEPYRYSGVNMTGFRILNTENTQVSSIIEKWSMERLQAPPKPDSGLLDGFMTTDAALMYDAVHVVSVAVQQFPQMTVSSLQCNRHKPWRFGTRFMSLIKEAHWEGLTGRITFNKTNGLRTDFDLDVISLKEEGLEKIGTWDPASGLNMTESQKGKPANITDSLSNRSLIVTTILEEPYVLFKKSDKPLYGNDRFEGYCIDLLRELSTILGFTYEIRLVEDGKYGAQDDANGQWNGMVRELIDHKADLAVAPLAITYVREKVIDFSKPFMTLGISILYRKPNGTNPGVFSFLNPLSPDIWMYILLAYLGVSCVLFVIARFSPYEWYNPHPCNPDSDVVENNFTLLNSFWFGVGALMQQGSELMPKALSTRIVGGIWWFFTLIIISSYTANLAAFLTVERMESPIDSADDLAKQTKIEYGAVEDGATMTFFKKSKISTYDKMWAFMSSRRQSVLVKSNEEGIQRVLTSDYAFLMESTTIEFVTQRNCNLTQIGGLIDSKGYGVGTPMGSPYRDKITIAILQLQEEGKLHMMKEKWWRGNGCPEEESKEASALGVQNIGGIFIVLAAGLVLSVFVAVGEFLYKSKKNAQLEKRSFCSAMVEELRMSLKCQRRLKHKPQAPVIVKTEEVINMHTFNDRRLPGETQWK

SEQ ID NO: 59026 - protein, 1151 aa, Homo sapiens
MQKSVRYNEGHALYLAFLARKEGTKRGFLSKKTAEASRWHEKWFALYQNVLFYFEGEQSCRPAGMYLLEGCSCERTPAPPRAGAGQGGVRDALDKQYYFTVLFGHEGQKPLELRCEEEQDGKEWMEAIHQASYADILIEREVLMQKYIHLVQIVETEKIAANQLRHQLEDQDTEIERLKSEIIALNKTKERMRPYQSNQEDEDPDIKKIKKVQSFMRGWLCRRKWKTIVQDYICSPHAESMRKRNQIVFTMVEAESEYVHQLYILVNGFLRPLRMAASSKKPPISHDDVSSIFLNSETIMFLHEIFHQGLKARIANWPTLILADLFDILLPMLNIYQEFVRNHQYSLQVLANCKQNRDFDKLLKQYEANPACEGRMLETFLTYPMFQIPRYIITLHELLAHTPHEHVERKSLEFAKSKLEELSRVMHDEVSDTENIRKNLAIERMIVEGCDILLDTSQTFIRQGSLIQVPSVERGKLSKVRLGSLSLKKEGERQCFLFTKHFLICTRSSGGKLHLLKTGGVLSLIDCTLIEEPDASDDDSKGSGQVFGHLDFKIVVEPPDAAAFTVVLLAPSRQEKAAWMSDISQCVDNIRCNGLMTIVFEENSKVTVPHMIKSDARLHKDDTDICFSKTLNSCKVPQIRYASVERLLERLTDLRFLSIDFLNTFLHTYRIFTTAAVVLGKLSDIYKRPFTSIPVRSLELFFATSQNNRGEHLVDGKSPRLCRKFSSPPPLAVSRTSSPVRARKLSLTSPLNSKIGALDLTTSSSPTTTTQSPAASPPPHTGQIPLDLSRGLSSPEQSPGTVEENVDNPRVDLCNKLKRSIQKAVLESAPADRAGVESSPAADTTELSPCRSPSTPRHLRYRQPGGQTADNAHCSVSPASAFAIATAAAGHGSPPGFNNTERTCDKEFIIRRTATNRVLNVLRHWVSKHAQDFELNNELKMNVLNLLEEVLRDPDLLPQERKAAANILRALSQDDQDDIHLKLEDIIQMTDCMKAECFESLSAMELAEQITLLDHVIFRSIPYEEFLGQGWMKLDKNERTPYIMKTSQHFNDMSNLVASQIMNYADVSSRANAIEKWVAVADICRCLHNYNGVLEITSALNRSAIYRLKKTWAKVSKQTKALMDKLQKTVSSEGRFKNLRETLKNSSRLNT

SEQ ID NO: 59027 - protein, 218 aa, Homo sapiens [sequence omitted]

SEQ ID NO: 59028 - protein, 75 aa, Homo sapiens
MGRKDAATIKLPVDQYRKQIGKQDYKKTKPILRATKLKAEAKKTAIGIKEVGLVLAAILALLLAFYAFFYLRLTT

SEQ ID NO: 59029 - protein, 69 aa, Homo sapiens
MSKSCGNNLAAISVGISLLLLLVVCGIGCVWHWKHRVATRFTLPRFLQRRSSRRKVCTKTFLGPRIIGL

SEQ ID NO: 59030 - protein, 289 aa, Homo sapiens
MRPGLFKGQAPGSRRRPTAGLAVVRADSHKKEPRASGSARPAMLLWPLRGWAARALRCFGPGSRGSPASGPGPRRVQRRAWPPDKEQEKEKKSVICVEGNIASGKTTCLEFFSNATDVEGLMYHDASRWGLTLQTYVQLTMLDRHTRPQVSSVRLMERSIHSARYIFVENLYRSGKMPEVDYVVLSEWFDWILRNMDVSVDLIVYLRTNPETCYQRLKKRCREEEKVIPLEYLEAIHHLHEEWLIKGSLFPMAAPVLVIEADHHMERMLELFEQNRDRILTPENRKHCP

SEQ ID NO: 59031 - protein, 131 aa, Homo sapiens
MLAKAKECWEQEHEEREAEKVRYLAERIPTLQTRGLSLSALQDLCRELHAKVEVVDEERYDIEAKCLHNTREIKDLKLKVMDLRGKFKRPPLRRVRVSADAMLRALLGSKHKVSMDLRANLKSVKKEDTEK

SEQ ID NO: 59032 - protein, 185 aa, Homo sapiens
VTGSCYLKMAVITKGRLWTERSREKAAGTGPGQETPSLDSLFWESLKATASWSTKPADVMKGRSPTACGKDTGFWWTGMDKCTRAPSMTTRGTALGRCSFRTVTSTTATGSGTGVRDTGCCAAPTAPPTSSDPPIYSRRNSRRHRLLPRHHELRVGEAPPGDLFSLSTAGVFSANRVSCLAASIP

SEQ ID NO: 59033 - protein, 152 aa, Homo sapiens
MSESKSGPEYASFFAVMGASAAMVFSGGFGVDFSQATEDVGSGVALVARRILSHGVTSFCPTLVTSPPEVYHKVVPQIPVKSGGPHGAGVLGLHLEGPFISREKRGAHPEAHLRSFEADAFQDLLATYGPLDNVRIVTLAPELGRSHEVIRA

SEQ ID NO: 59034 - protein, 225 aa, Homo sapiens [sequence omitted]

SEQ ID NO: 59035 - protein, 266 aa, Homo sapiens
MMLKGITRLISRIHKLDPGRFLHMGTQARQSIAAHLDNQVPVESPRAISRTNENDPAKHGDQHEGQHYNISPQDLETVFPHGLPPRFVMQDWLILHIPDAHLWVKNCRDLLQSSYNKQRFDQPLEASTWLKNFKTTNERFLNQIKVQEKYVWNKRESTEKGSPLGEVVEQGITRVRNATDAVGIVLKELKRQSSLGMFHLLVAVDGINALWGRTTLKREDKSPIAPEELALVHNLRKMMKNDWHGGAIVSALSQTGSLFKPRKAYL

SEQ ID NO: 59036 - protein, 275 aa, Homo sapiens
MMDLVLEEDVTVPGTLSGCSGLVPSVPDDLDGINPNAGLGNGLLPNVSEETVSPTRARNMKDFENQITELKKENFNLKLRIYFLEERMQQEFHGPTEHIYKTNIELKVEVESLKRELQEREQLLIKASKAVESLAEAGGSEIQRVKEDARKKVQQVEDLLTKRILLLEKDVTAAQAELEKAFAGTETEKALRLRLESKLSEMKKMHEGDLAMALVLDEKDRLIEELKLSLKSKEALIQCLKEEKSQMACPDENVSSGELRGLCAAPREEKERETE

SEQ ID NO: 59037 - protein, 250 aa, Homo sapiens
MSRRKQTNPNKVHCDSEGDEEETTQDEVSSHTSEEDGGVVKVEKELENTEQPVGGNEVVEHEVTGNLNSDPLLELCQCPLCQLDCGSREQLIAHVYQHTAAVVSAKSYMCPVCGRALSSPGSLGRHLLIHSEDQRSNCAVCGARFTSHATFNSEKLPEVLNMESLPTVHNEGPSSAEGKDIAFSPPVYPAGILLVCNNCAAYRKLLEAQTPSVRKWALRRQNEPLEVRLQRLERERTAKKSRRDNETPEE

SEQ ID NO: 59038 - protein, 228 aa, Homo sapiens
MSSPTTSSLDTPLPGNGPPQPGAPSSSPTVKEEGPEPWPGGPDPDVPGTDEASSACSTDWVIPDPEEEPERKRKKGPAPKMLGHELCRVCGDKASGFHYNVLSCEGCKGFFRRSVVRGGARRYACRGGGTCQMDAFMRRKCQQCRLRKCKEAGMREQCVLSEEQIRKKKIRKQQQESQSQSQSPVGPQGSSSSASGPGASPGGSEAGSQGSGEGEGVQLTAAQELMIQ

SEQ ID NO: 59039 - protein, 113 aa, Homo sapiens
  MOD_RES (1)..(1): Any amino acid
XKTEKRALGSHRKAGFPEHPVAPEPLSNSCQISKEGRKQKQSLKQEEDRPKRRGPAYVMELPKLKLSGVVRLSSYSSPTLQSVLGSGTNGRVPVLRPLKCIPASKKVARNQLL

SEQ ID NO: 59040 - protein, 265 aa, Homo sapiens
MFAAEERHGNIEERMRHLEGQLEEKNQELQRARQREKMNEEHNKRLSDTVDRLLTESNERLQLHLKERMAALEEKNVLIQESETFRKNLEESLHDKERLAEEIEKLRSELDQLKMRTGSLIEPTIPRTHLDTSAELRYSVGSLVDSQSDYRTTKVIRRPRRGRMGVRRDEPKVKSLGDHEWNRTQQIGVLSSHPFESDTEMSDIDDDDRETIFSSMDLLSPSGHSDAQTLAMMLQEQLDAINKEIRLIQEEKESTELRAEEIENR

SEQ ID NO: 59041 - protein, 1125 aa, Homo sapiens
MKGARWRRVPWVSLSCLCLCLLPHVVPGVSLFPYGADAGDLEFVRRTVDFTSPLFKPATGFPLGSSLRDSLYFTDNGQIIFPESDYQIFSYPNPLPTGFTGRDPVALVAPFWDDADFSTGRGTTFYQEYETFYGEHSLLVQQAESWIRKMTNNGGYKARWALKVTWVNAHAYPAQWTLGSNTYQAILSTDGSRSYALFLYQSGGMQWDVAQRSGNPVLMGFSSGDGYFENSPLMSQPVWERYRPDRFLNSNSGLQGLQFYRLHREERPNYRLECLQWLKSQPRWPSWGWNQVSCPCSWQQGRRDLRFQPVSIGRWGLGSRQLCSFTSWRGGVCCSYGPWGEFREGWHVQRPWQLAQELEPQSWCCRWNDKPYLCALYQQRRPHVGCATYRPPQPAWMFGDPHITTLDGVSYTFNGLGDFLLVGAQDGNSSFLLQGRTAQTGSAQATNFIAFAAQYRSSSLGPVTVQWLLEPHDAIRVLLDNQTVTFQPDHEDGGGQETFNATGVLLSRNGSEVSASFDGWATVSVIALSNILHASASLPPEYQNRTEGLLGVWNNNPEDDFRMPNGSTIPPGSPEEMLFHFGMTWQINGTGLLGKRNDQLPSNFTPVFYSQLQKNSSWAEHLISNCDGDSSCIYDTLALRNASIGLHTREVSKNYEQANATLNQYPPSINGGRVIEAYKGQTTLIQYTSNAEDANFTLRDSCTDLELFENGTLLWTPKSLEPFTLEILARSAKIGLASALQPRTVVCHCNAESQCLYNQTSRVGNSSLEVAGCKCDGGTFGRYCEGSEDACEEPCFPSVHCVPGKGCEACPPNLTGDGRHCAALGSSFLCQNQSCPVNYCYNQGHCYISQTLGCQPMCTCPPAFTDSRCFLAGNNFSPTVNLELPLRVIQLLLSEEENASMAEVNASVAYRLGTLDMRAFLRNSQVERIDSAAPASGSPIQHWMVISEFQYRPRGPVIDFLNNQLLAAVVEAFLYHVPRRSEEPRNDVVFQPISGEDVRDVTALNVSTLKAYFRCDGYKGYDLVYSPQSGFTCVSPCSRGYCDHGGQCQHLPSGPRCSCVSFSIYTAWGEHCEHLSMKLDAFFGIFFGALGGLLLLGVGTFVVLRFWGCSGARFSYFLNSAEALP

SEQ ID NO: 59042 - protein, 789 aa, Homo sapiens
MGTKMADLDSPPKLSGVQQPSEGVGGGRCSEISAELIRSLTELQELEAVYERLCGEEKVVERELDALLEQQNTIESKMVTLHRMGPNLQLIEGDAKQLAGMITFTCNLAENVSSKVRQLDLAKNRLYQAIQRADDILDLKFCMDGVQTALRSEDYEQAAAHTHRYLCLDKSVIELSRQGKEGSMIDANLKLLQEAEQRLKAIVAEKFAIATKEGDLPQVERFFKIFPLLGLHEEGLRKFSEYLCKQVASKAEENLLMVLGTDMSDRRAAVIFADTLTLLFEGIARIVETHQPIVETYYGPGRLYTLIKYLQVECDRQVEKVVDKFIKQRDYHQQFRHVQNNLMRNSTTEKIEPRELDPILTEVTLMNARSELYLRFLKKRISSDFEVGDSMASEEVKQEHQKCLDKLLNNCLLSCTMQELIGLYVTMEEYFMRETVNKAVALDTYEKGQLTSSMVDDVFYIVKKCIGRALSSSSIDCLCAMINLATTELESDFRDVLCNKLRMGFPATTFQDIQRGVTSAVNIMHSSLQQGKFDTKGIESTDEAKMSFLVTLNNVEVCSENISTLKKTLESDCTKLFSQGIGGEQAQAKFDSCLSDLAAVSNKFRDLLQEGLTELNSTAIKPQVQPWINSFFSVSHNIEEEEFNDYEANDPWVQQFILNLEQQMAEFKASLSPVIYDSLTGLMTSLVAVELEKVVLKSTFNRLGGLQFDKELRSLIAYLTTVTTWTIRDKFARLSQMATILNLERVTEILDYWGPNSGPLTWRLTPAEVRQVLALRIDFRSEDIKRLRL

SEQ ID NO: 59043 - protein, 198 aa, Homo sapiens
MATSADSPSSPLGAEDLLSDSSEPPGLNQVSSEVTSQLYASLRLSRQAEATARAQLYLPSTSPPHEGLDGFAQELSRSLSVGLEKNLKKKDGSKHIFEMESVRGQLQTMLQTSRDTAYRDPLIPGAGSERREEDSFDSDSTATLLNTRPLQDLSPSSSAQALEELFPRYTSLRPGPPLNPPDFQGLRDALDSEHTRRK

SEQ ID NO: 59044 - protein, 30 aa, Homo sapiens
MNPIAMARSRGPIQSSGPTIQDYLNRPRPT

SEQ ID NO: 59045 - protein, 150 aa, Homo sapiens
MSRKPISIVKSRLHQNCSEQIKPINDTHSLNDTMWCSWAPFDKDNYKELLGGVDNAFLIAYAIGMFISGVFGERLPLRYYLSAGMLLSGLFTSLFGLGYFWNIHELWYFVVIQVCNGLVQTTGWPSVVTCVGNWFGKGKRGFIMGIWNSH

SEQ ID NO: 59046 - protein, 158 aa, Homo sapiens
  MOD_RES (1)..(1): Any amino acid
XPPEDDSKEGAGEQKTEHMTRTLRGVMRVGLVAKGLLLKGDLDLELVLLCKEKPTTALLDKVADNLAIQLAAVTEDKYEILQSVDDAAIVIKNTKEPPLSLTIHLTSPVVREEMEKVLAGGQSQRAEVLCHCDPGLEGPVHSRAHLGSPPRLASRAPV

SEQ ID NO: 59047 - protein, 101 aa, Homo sapiens
MATRQRESSITSCCSTSSCDADDEGVRGTCEDASLCKRTAISSARQHSPPHCPTLGGKSFHLGHSDRLDSEVLLPRAHGNLLQSPGFAEWEEVCSKHWLLA

SEQ ID NO: 59048 - protein, 138 aa, Homo sapiens
MEGDCLSCMKYLMFVFNFFIFFFLFILIIFLAELSAAILAFIFRENLTREFFTKELTKHYQGNNDTDVFSATWNSVMITFGCCGVNGPEDFKFASVFRLLTLDSEEVPEACCRREPQSRDGVLLSREECLLGRSLFLN

SEQ ID NO: 59049 - protein, 310 aa, Homo sapiens
MAPSSPRPALPALLVLLGALFPVSEAQVHLALGDQRLNPTVTYGNDSFSAKASVSVTAEDEGTQRLTCAVILGNQSQETLQTVTIYSFPAPNVILTKPEVSEGTEVTVKCEAHPRAKVTLNGVPAQPLGPRAQLLLKATPEDNGRSFSCSATLEVAGQLIHKNQTRELRVLYGPRLDERDCPGNWTWPENSQQTPMCQAWGNPLPELKCLKDGTFPLPIGESVTVTRDLEGTYLCRARSTQGEVTRKVTVNVLSPRYEIVIITVVAAAVIMGTAGLSTYLYNRQRKIKKYRLQQAQKGTPMKPNTQATPP

SEQ ID NO: 59050 - protein, 75 aa, Homo sapiens
MSVPGPYQAATGPSSAPSAPPSYEETVAVNSYYPTPPAPMPGPTTGLVTGPDGKGMNPPSYYTQPAPIPNNNPSA

SEQ ID NO: 59051 - protein, 572 aa, Homo sapiens
MSAESGPGTRLRNLPVMGDGLETSQMSTTQAQAQPQPANAASTNPPPPETSNPNKPKRQTNQLQYLLRVVLKTLWKHQFAWPFQQPVDAVKLNLPDYYKIIKTPMDMGTIKKRLENNYYWNAQECIQDFNTMFTNCYIYNKPGDDIVLMAEALEKLFLQKINELPTEETEIMIVQAKGRGRGRKETGTAKPGVSTVPNTTQASTPPQTQTPQPNPPPVQATPHPFPAVTPDLIVQTPVMTVVPPQPLQTPPPVPPQPQPPPAPAPQPVQSHPPIIAATPQPVKTKKGVKRKADTTTPTTIDPIHEPPSLPPEPKTTKLGQRRESSRPVKPPKKDVPDSQQHPAPEKSSKVSEQLKCCSGILKEMFAKKHAAYAWPFYKPVDVEALGLHDYCDIIKHPMDMSTIKSKLEAREYRDAQEFGADVRLMFSNCYKYNPPDHEVVAMARKLQDVFEMRFAKMPDEPEEPVVAVSSPAVPPPTKVVAPPSSSDSSSDSSSDSDSSTDDSEEERAQRLAELQEQLKAVHEQLAALSQPQQNKPKKKEKDKKEKKKEKHKRKEEVEENKKSKAKEPPPKK

SEQ ID NO: 59052 - protein, 114 aa, Homo sapiens
MQALVLLLCIGALLGHSSCQNPASPPEEGSPDPDSTGALVEEEDPFFKVPVNKLAAAVSNFGYDLYRVRSSTSPTTNVLLSPLSVATALSALSLGLMPLTYFRKISKDENSLAT

SEQ ID NO: 59053 - protein, 884 aa, Homo sapiens [sequence omitted]

SEQ ID NO: 59054 - protein, 269 aa, Homo sapiens
  MOD_RES (1)..(1): Any amino acid
XLRLWSLWWVFNSAGYYLVVYYVHILWNEVDPTTNSARVYNGAADAASTLLGAITSFAAGFVKIRWARWSKLLIAGVTATQAGLVFLLAHTRHPSSIWLCYAAFVLFRGSYQFLVPIATFQIASSLSKELCALVFGVNTFFATIVKTIITFIVSDVRGLGLPVRKQALRMSRPRLGLCLPGPFPPQSAAPARAGMAASSAEDPGSERGPWRRAGTVAARGDPGGERGPWRREGTLAARGDPGGERGPWWREGTLAAKPRMQWVTRATAP

SEQ ID NO: 59055 - protein, 136 aa, Homo sapiens
MLSDHSIRSFDDLQRLLHGDPGEEDGAELDLNMTRSHSGGELESLARGRRSLGSLTIAEPAMIAECKTRTEVFEISRRLIDRTNANFLVWPPCVEVQRCSGCCNNRNVQCRPTQVQLRPVQVRKIEIVRKKPIFKK

SEQ ID NO: 59056 - protein, 48 aa, Homo sapiens
MDPLKLLLKTLGISVEHLVEGLRKCVNELGPEASEAVKKLLEALSHLV

SEQ ID NO: 59057 - protein, 1055 aa, Homo sapiens
MASLEEPLAPRPQGPLPAAGDEPGCGPGKLRPEPRLSAAGGGSAAGPGPAPEWPGRGRAERAAPPRPPLSSAGRPSPAGGPGALSARGGGCGWVAARAPLALAFSSRVPSSSPSFFYFWPPPPPPPPSFLPSSSAFHLPVRLPGREGAAAAAAAGGGGDAGGGGGGGQEAAPLSVPTSSSHRGGGGSGGGRRRLFLSPALQGLLLPARAGPRPPPPPRLPLGQAARRAGSPGFPGAGPGGGGQTPRRPQGASFALAAAAALLFGSDMEDGPSNNASCFRRLTECFLSPSLTDEKVKAYLSLHPQVLDEFVSESVSAETVEKWLKRKNNKSEDESAPKEVSRYQDTNMQGVVYELNSYIEQRLDTGGDNQLLLYELSSIIKIATKADGFALYFLGECNNSLCIFTPPGIKEGKPRLIPAGPITQGTTVSAYVAKSRKTLLVEDILGDERFPRGTGLESGTRIQSVLCLPIVTAIGDLIGILELYRHWGKEAFCLSHQEVATANLAWASVAIHQVQVCRGLAKQTELNDFLLDVSKTYFDNIVAIDSLLEHIMIYAKNLVNADRCALFQVDHKNKELYSDLFDIGEEKEGKPVFKKTKEIRFSIEKGIAGQVARTGEVLNIPDAYADPRFNREVDLYTGYTTRNILCMPIVSRGSVIGVVQMVNKISGSAFSKTDENNFKMFAVFCALALHCANMYHRIRHSECIYRVTMEKLSYHSICTSEEWQGLMQFTLPVRLCKEIELFHFDIGPFENMWPGIFVYMVHRSCGTSCFELEKLCRFIMSVKKNYRRVPYHNWKHAVTVAHCMYAILQNNHTLFTDLERKGLLIACLCHDLDHRGFSNSYLQKFDHPLAALYSTSTMEQHHFSQTVSILQLEGHNIFSTLSSSEYEQVLEIIRKAIIATDLALYFGNRKQLEEMYQTGSLNLNNQSHRDRVIGLMMTACDLCSVTKLWPVTKLTANDIYAEFWAEGDEMKKLGIQPIPMMDRDKKDEVPQGQLGFYNAVAIPCYTTLTQILPPTEPLLKACRDNLSQWEKVIRGEETATWISSPSVAQKAAASED

SEQ ID NO: 59058 - protein, 782 aa, Homo sapiens
MYPQGRHPAPHQPGQPGFKFTVAESCDRIKDEFQFLQAQYHSLKVEYDKLANEKTEMQRHYVMYYEMSYGLNIEMHKQTEIAKRLNTILAQIMPFLSQEHQQQVAQAVERAKQVTMTELNAIIGVRGLPNLPLTQQQLQAQHLSHATHGPPVQLPPHPSGLQPPGIPPVTGSSSGLLALGALGSQAHLTVKDEKNHHELDHRERESSANNSVSPSESLRASEKHRGSADYSMEAKKRKAEEKDSLSRYDSDGDKSDDLVVDVSNEDPATPRVSPAHSPPENGLDKARSLKKDAPTSPASVASSSSTPSSKTKDLGHNDKSSTPGLKSNTPTPRNDAPTPGTSTTPGLRSMPGKPPGMDPIGIMASALRTPISITSSYAAPFAMMSHHEMNGSLTSPGAYAGLHNIPPQMSAAAAAAAAAYGRSPMVSFGAVGFDPHPPMRATGLPSSLASIPGGKPAYSFHVSADGQMQPVPFPHDALAGPGIPRHARQINTLSHGEVVCAVTISNPTRHVYTGGKGCVKIWDISQPGSKSPISQLDCLNRDNYIRSCKLLPDGRTLIVGGEASTLTIWDLASPTPRIKAELTSSAPACYALAISPDAKVCFSCCSDGNIAVWDLHNQTLVRQFQGHTDGASCIDISHDGTKLWTGGLDNTVRSWDLREGRQLQQHDFTSQIFSLGYCPTGEWLAVGMESSNVEVLHHTKPDKYQLHLHESCVLSLKFAYCGKWFVSTGKDNLLNAWRTPYGASIFQSKESSSVLSCDISADDKYIVTGSGDKKATVYEVIY

SEQ ID NO: 59059 - protein, 363 aa, Homo sapiens [sequence omitted]

SEQ ID NO: 59060 - protein, 67 aa, Homo sapiens
  MOD_RES (1)..(1): Any amino acid
XKATSQLLLETDWESILQICDLIRQGDTHKICCEFHQEESQRQEPTRRLVCPGGHGICGKELWPDSS

SEQ ID NO: 59061 - protein, 184 aa, Homo sapiens
MAKFRRRTCIILALFILFIFSLMMGLKMLRPNTATFGAPFGLDLLPELHQRTIHLGKNFDFQKSDRINSETNTKNLKSVEITMKPSKASELNLDELPPLNNYLHVFYYSWYGNPQFDGKYIHWNHPVLEHWDPRIAKNYPQGRHNPPDDIGSSFYPELGSYSSRDPSVIETHMRQMRSASIALV

SEQ ID NO: 59062 - protein, 830 aa, Homo sapiens
MSKRGMSSRAKGDKAEALAALQAANEDLRAKLTDIQIELQQEKSKVSKVEREKNQELRQVREHEQHKTAVLLTELKTKLHEEKMKELQAVRETLLRQHEAELLRVIKIKDNENQRLQALLSALRDGGPEKVKTVLLSEAKEEAKKGFEVEKVKMQQEISELKGAKRQVEEALTLVIQADKIKAAEIRSVYHLHQEEITRIKKECEREIRRLMEEIKFKDRAVFVLERELGVQAGHAQRLQLQKEALDEQLSQVREADRHPGSPRRELPHAAGAGDASDHSGSPQLDEKDARRFQLKIAELSAIIRKLEDRNALLSEERNELLKRVREAESQYKPLLDKNKRLSRKNEDLSHALRRMENKLKFVTQENIEMRQRAGIIRRPSSLNDLDQSQDEREVDFLKLQIVEQQNLIDELSKTLETAGYVKSVLERDKLLRFRKQRKKMAKLPKPVVVETFFGYDEEASLESDGSSVSYQTDRTDQTPCTPDDDLEEGMAKEETELRFRQLTMEYQALQRAYALLQEQVGGTLDAEREVKTREQLQAEVQRAQARIEDLEKALAEQGQDMKWIEEKQALYRRNQELVEKIKQMETEEARLRHEVQDARDQNELLEFRILELEERERKSPAISFHHTPFVDGKSPLQVYCEAEGVTDIVVAELMKKLDILGDNAVSNLTNEEQVVVIQARTVLTLAEKWLQQIEETEAALQRKMVDLESEKELFSKQKGYLDEELDYRKQALDQANKQEAGAKVAELLSEEEREKLKVAVEQWKRQVMSELRERDAQILRERMELLQLAQQRIKELEERIEAQKRQIKELEEKFLFLFLFFSLAFILWS

SEQ ID NO: 59063 - protein, 310 aa, Homo sapiens
ATLLSHPQQRPPFLRQAIKIRRRRVRDLQDPPPQMAPEIQPPSHHFSPEQDALYTVLHRLGHPEPNHVTEASELLRYLQEAFHVEPEEHQQTLQRVRELEKPIFCLKATVKQAKGILGKDVSGFSDPYCLLGIEQGVGVPGGSPGSRHRQKAVVRHTIPEEETHRTQVITQTLNPVWDETFILEFEDITNASFHLDMWDLDTVESVRQKLGELTDLHGLRRIFKEARKDKGQDDFLGNVVLRLQDLRCREDQWYPLEPRTETYPDRGQCHLQFQLIHKRRATSASRSQPSYTVHLHLLQQLVSHEVTQHE

SEQ ID NO: 59064 - protein, 51 aa, Homo sapiens
MARHGLPLLPLLSLLVGAWLKLGILSGRKSIGQKLRCLDGALSLRTLSLMS

SEQ ID NO: 59065 - protein, 381 aa, Homo sapiens
MVAEVCSMPAASAVKKPFDLRSKMGKWCHHRFPCCRGSGKSNMGTSGDHDDSFMKTLRSKMGKCCHHCFPCCRGSGTSNVGTSGDHDNSFMKTLRSKMGKWCCHCFPCCRGSGKSNVGTWGDYDDSAFMEPRYHVRREDLDKLHRAAWWGKVPRKDLIVMLRDTDMNKRDKQKRTALHLASANGNSEVVQLLLDRRCQLNVLDNKKRTALIKAVQCQEDECVLMLLEHGADGNIQDEYGNTALHYAIYNEDKLMAKALLLYGADIESKNKCGLTPLLLGVHEQKQEVVKFLIKKKANLNALDRYGRTALILAVCCGSASIVNLLLEQNVDVSSQDLSGQTAREYAVSSHHHVICELLSDYKEKQMLKISSENSNPGKEAEE

SEQ ID NO: 59066 - protein, 288 aa, Homo sapiens
LVGVGGGDVEDVTPRPGGCQISGRGARGCNGIPGAAAWEAALPRRRPRRHPSVNPRSRAAGSPRTRGRRTEERPSGSRLGDRGRGRALPGGRLGGRGRGRAPERVGGRGRGRGTAAPRAAPAARGSRPGPAGTMAAGSITTLPALPEDGGSGAFPPGHFKDPKRLYCKNGGFFLRIHPDGRVDGVREKSDPHIKLQLQAEERGVVSIKGVCANRYLAMKEDGRLLASKCVTDECFFFERLESNNYNTYRSRKYTSWYVALKRTGQYKLGSKTGPGQKAILFLPMSAKS

SEQ ID NO: 59067 - protein, 268 aa, Homo sapiens [sequence omitted]

SEQ ID NO: 59068 - protein, 274 aa, Homo sapiens
MAERQEEQRGSPPLRAEGKADAEVKLILYHWTHSFSSQKVRLVIAEKALKCEEHDVSLPLSEHNEPWFMRLNSTGEVPVLIHGENIICEATQIIDYLEQTFLDERTPRLMPDKESMYYPRVQHYRELLDSLPMDAYTHGCILHPELTVDSMIPAYATTRIRSQIGNTESELKKLAEENPDLQEAYIAKQKRLKSKLLDHDNVKYLKKILDELEKVLDQVETELQRRNEETPEMGSLSPWLECSGMIIVCCSLDLLGSSNPSTSASQVAETTETE

SEQ ID NO: 59069 - protein, 360 aa, Homo sapiens
FKSTREALNNKNIKPLLSTFSQVPGSENEKKCTLDQAFRGILEEEIINHSSCENVLAIISLAIGGVTEGICTASTPFVLLGDVLDCLPLDQCDTIFTFVEKNVATWKSNTFYSAGKNYLLRMCNDLLRRLSKSQNTVFCGRIQLFLARLFPLSEKSGLNLQSQFNLENVTVFNTNEQESTLGQKHTEDREEGMDVEEGEMGDEEAPTTCSIPIDYNLYRKFWSLQDYFRNPVQCYEKISWKTFLKYSEEVLAVFKSYKLDDTQASRKKMEELKTGGEHVYFAKFLTSEKLMDLQLSDSNFRRHILLQYLILFQYLKGQVKFKSSNYVLTDEQSLWIEDTTKSVYQVSSTRNKPMIEKMEI

SEQ ID NO: 59070 - protein, 116 aa, Homo sapiens
MAGCAARAPPGSEARLSLATFLLGASVLALPLLTRAGLQGRTGLALYVAGLNALLLLLYRPPRYQIAIRACFLGFVFGCGTLLSFSQSSWSHFGWSHLVHPHSHCRIFPYTMISVP

SEQ ID NO: 59071 - protein, 620 aa, Homo sapiens [sequence omitted]

SEQ ID NO: 59072 - protein, 156 aa, Homo sapiens
SPWDKGTKPRTKTVLSLFDEEEDKMEDQNIIQAPQKEVGKGRDPDAHPKSTGVFQDEELLFSHKLQKDNDPDVDLFAGTKKTKLLEPSVGSLFGDDEDDDLFSSAKSQPLVQEKKRVVKKDHSVDSFKNQKHPESIQGSKEKGIWKPETPQVRNPL

SEQ ID NO: 59073 - protein, 133 aa, Homo sapiens
MRQRLLPSVTSLLLVALLFPGSSQARHVNHSATEALGELRERAPGQGTNGFQLLRHAVKRDLLPPRTPPYQGDVPLGIRNTICRMQQGICRLFFCHSGEKKRDISSDPWNRCCVSNTDEEGKEKPEMDGRSGI

SEQ ID NO: 59074 - protein, 151 aa, Homo sapiens
MGDPGSEEGPLRPVLEYIDLVSSDDEEPSTSYTDRMPESKVPSSENHRPEMCSSCNVPLPIGDSSSFSGSCSSSPERIVSQTSSVENPLENQKNDQNNSDTKISETETLKSSQNFQTLPSSPLLVPQESLASSEVKENLRIDSSSASQHGR

SEQ ID NO: 59075 - protein, 151 aa, Homo sapiens
  MOD_RES (1)..(1): Any amino acid
XEHLAALQFEEIATQFRLELIKTKALALLEDLVTKVVDVYKLMEKWLGERYLNEMASTEKLTDVARYHIETSTKIQNELYLSQEDFFINGNIKVFPDPPPSIRPPPVEKEEDGTLTIEQLDSLRDQFLDMAPKGLNFSMHIISARLMPRPH

SEQ ID NO: 59076 - protein, 65 aa, Homo sapiens
EFRKNLKGVNGGKDFEQDILEDMYHAINYDLDLFTMTWGPTIAALSYVFDKSLEETIIQKAISGF

SEQ ID NO: 59077 - protein, 95 aa, Homo sapiens
MSSSMWYIMQSIQSKYSLSERLIRTIAAIRSFPHDNVEDLIRGGADVNCTHGTLKPLHCACMVSDADCVELLLEKGAELLSYLHLYHQDSLGVAC

SEQ ID NO: 59078 - protein, 187 aa, Homo sapiens
MFSSSAKIVKPNGEKPDEFESGISQALLELEMNSDLKAQLRELNITAAKEIEVGGGRKAIIIFVPVPQLKSFQKIQVRLVRELEKKFSGKHVVFIAQRRILPKPTRKSRTKNKQKRPRSRTLTAVHDAILEDLVFPSEIVGKRIRVKLDGSRLIKVHLDKAQQNNVEHKVIGQHFIMERFSHSESGF

SEQ ID NO: 59079 - protein, 712 aa, Homo sapiens
CFRPECDYWESRGAAVAEGSHRGAPWNIAGLVLRTWGSHRGAPGRTLRYQMPRGCHLGTPSWSRRNTPRTGQLERGPQQGRTGHVRPGRSAGGSLLQQESVQQGCSPVGSCPCQQYARSQQPQETAKNDAQSRSWAGLNAGVSLKNTKISSSEWPLRLLSEGADVNAKHRLGWTALMVAAINRNNSVVQVLLAAGADPNLGDDFSSVYKTAKEQGIHSLEDGGQDGASRHITNQWTSALEFRRWLGLPAGVLITREDDFNNRLNNRASFKGCTALHYAVLADDYRTVKELLDGGANPLQRNEMGHTPLDYAREGEVMKLLRTSEAKYQEKQRKREAEERRRFPLEQRLKEHIIGQESAIATVGAAIRRKENGWYDEEHPLVFLFLGSSGIGKTELAKQTAKYMHKDAKKGFIRLDMSEFQERHEVAKFIGSPPGYVGHEEGGQLTKKLKQCPNAVVLFDEVDKAHPDVLTIMLQLFDEGRLTDGKGKTIDCKDAIFIMTSNVASDEIAQHALQLRQEALEMSRNRIAENLGDVQISDKITISKNFKENVIRPILKAHFRRDEFLGRINEIVYFLPFCHSELIQLVNKELNFWAKRAKQRHNITLLWDREVADVLVDGYNVHYGARSIKHEVERRVVNQLAAAYEQDLLPGGCTLRITVEDSDKQLLKSPELPSPQAEKRLPKLRLEIIDKDSKTRRLDIRAPLHPEKVCNTI

SEQ ID NO: 59080 - protein, 143 aa, Homo sapiens
VRELEAELDAEQKKHAEALKGVRKHERRVKELAYQVGDRVSLGSGPGAGPAQASPESPLPAQAEEDRKNLARMQDLVDKLQSKVKSYKRQFEEAEQQANTNLAKYRKAQHELDDAEERADMAETQANKLRARTRDALGPKHKE

SEQ ID NO: 59081 - protein, 296 aa, Homo sapiens
  MOD_RES (1)..(1): Any amino acid
XKTTRSSSQYIESFWQSSQSQNFTAHDKQPSVLSSGYQKTPQEWAPQTARIRTRMQKVTGQPQNASFVKRNRWWLLPLIAALASGSFWFFSTPEVETTAVQEFQNQMNQLKNKYQGQDEKLWKRSQTFLEKHLNSSHPRSQPAILLLTAARDAEEALRCLSEQIADAYSSFRSVRAIRIDGTDKATQDSDTVKLEVDQELSNGFKNGQNAAVVHRFESFPAGSTLIFYKYCDHENAAFKDVALVLTVLLEEETLGTSLGLKEVEEKVRDFLKVKFTNSNTPNSYNHMDPDKLNGLW

SEQ ID NO: 59082 - protein, 93 aa, Homo sapiens
MAAETQTLNFGPEWLRALSSGGSITSPPLSPALPKYKLADYRYGREEMLALFLKDNKIPSDLLDKEFLPILQEEPLPPLALVPFTEEEQRNFS

SEQ ID NO: 59083 - protein, 236 aa, Homo sapiens
RNFYYITMLRDPVSRYLSEWKHVQRGATWKTSLHMCDGRSPTPDELPTCYPGDDWSGVSLREFMDCTYNLANNRQVRMLADLSLVGCYNLTFMNESERNTILLQSAKNNLKNMAFFGLTEFQRKTQFLFERTFNLKFISPFTQFNITRASNVEINEGARQRIEDLNFLDMQLYEYAKDLFQQRYHHTKQLEHQRDRQKRREERRLQREHRDHQWPKEDGAAEGTVTEDYNSQVVRW

SEQ ID NO: 59084 - protein, 106 aa, Homo sapiens
DLVAGKTRVTLTNHKKSVRAVVLHPRHYTFASGSPDNIKQWKFPDGSFIQNLSGHNAIINTLTVNSDGVLVSGDRRNSSSQLETRNYQEKEILMNVEFFLSLFFSF

SEQ ID NO: 59085 - protein, 162 aa, Homo sapiens
MSGHKCSYPWDLQDRYAQDKSVVNKMQQKYWETKQAFIKATGKKEDEHVVASDADLDAKLELFHSIQRTCLDLSKAIVLYQKRICFLSQEENELGKFLRSQGFQDKTRAGKMMQATGKALCFSSQQRLALRNPLCRFHQEVETFRHRAISDTWLTVNRMEQC

SEQ ID NO: 59086 - protein, 209 aa, Homo sapiens
MASLSRPSLPSCLCSFLLLLLLQVSSSYAGQFRVIGPRHPIRALVGDEVELPCRISPGKNATGMEVGWYRPPFSRVVHLYRNGKDQDGDQAPEYRGRTELLKDAIGEGKVTLRIRNVRFSDEGGFTCFFRDHSYQEEAAMELKVEGKLRAEIENLHRTFDPHFLRVPCWKITLFVIVPVLGPLVALIICYNWLHRRLAGQFLEELRNPF

SEQ ID NO: 59087 - protein, 926 aa, Homo sapiens
MEALTTQLGPGREGSSSPNSKQELQPYSGSSALKPNQVGETSLYGVPIVSLVIDGQERLCLAQISNTLLKNYSYNEIHNRRVALGITCVQCTPVQLEILRRAGAMPISSRRCGMITKREAERLCKSFLGEHKPPKLPENFAFDVVHECAWGSRGSFIPARYNSSRAKCIKCGYCSMYFSPNKFIFHSHRTPDAKYTQPDAANFNSWRRHLKLSDKSATDELSHAWEDVKAMFNGGTRKRTFSLQGGGGGGANGGSGGQGKGGAGGGGGGGPGCGAEMAPGPPPHKSLRCGEDEAAGPPGPPPPHPQRGLGLATGASGPAGPGGPGGGAGVRSYPVIPVPSKGFGLLQKLPPPLFPHPYGFPTAFGLCPKKDDPVLGAGEPKGGPGTGSGGGGAGTGGGAGGPGASHLPPGAGAGPGGGAMFWGHQPSGAAKDAAAVAAAAAAATVYPTFPMFWPAAGSLPVPSYPAAQSQAKAVAAAVAAAAAAAAAAAGSGAPEPLDGAEPAKESGLGAEERCPSALSRGPLDEDGTDEALPPPLAPLPPPPPPPARKGSYVSAFRPVVKDTESIAKLYGSAREAYGAGPARGPGPGAGSGGYVSPDFLSEGSSSYNSASPDVDTADEPEVDVESNRFPDDEDAQEETEPSAPSAGGGPDGEQPTGPPSATSSGADGPANSPDGGSPRPRRRLGPPPAGRPAFGDLAAEDLVRRPERSPPSGGGGYELREPCGPLGGPAPAKVFAPERDEHVKSAAVALGPAASYVCTPEAHEPDKEDNHSPADDLETRKSYPDQRSISQPSPANTDRGEDGLTLDVTGTHLVEKDIENLAREELQKLLLEQMELRKKLEREFQSLKDNFQDQMKRELAYREEMVQQLQIVRDTLCNELDQERKARYAIQQKLKEAHDALHHFSCKMLTPRHCTGNCSFKPPLLP

SEQ ID NO: 59088 - protein, 177 aa, Homo sapiens
  MOD_RES (1)..(1): Any amino acid
XELSESVQKGFQMLADPRSFDSNAFTLLLRAAFQSLLDAQADEAVLDHPDLKHIDPVVLKHCHAAAATYILEAGKHRADKSTLSTYLEDCKFDRERIELFCTEYQNNKNSLEILLGRTLIPHPIQRLVLVAAWNNYRTWWGNLKMLRKAWKEQLSCNLGKLTIRPSAEENQKRLAFS

SEQ ID NO: 59089 - protein, 550 aa, Homo sapiens
MSEFRIHHDVNELLSLLRVHGGDGAEVYIDLLQKNRTPYVTTTVSAHSAKVKIAEFSRTPEDFLKKYDELKSKNTRNLDPLVYLLSKLTEDKETLQYLQQNAKERAELAAAAVGSSTTSINVPAAASKISMQELEELRKQLGSVATGSTLQQSLELKRKMLRDKQNKKNSGQHLPIFPAWVYERPALIGDFLIGAGISTDTALPIGTLPLASQESAVVEDLLYVLVGVDGRYVSAQPLAGRQSRTFLVDPNLDLSIRELVHRILPVAASYSAVTRFIEEKSSFEYGQVNHALAAAMRTLVKEHLILVSQLEQLHRQGLLSLQKLWFYIQPAMRTMDILASLATSVDKGECLGGSTLSLLHDRSFSYTGDSQAQELCLYLTKAASAPYFEVLEKWIYRGIIHDPYSEFMVEEHELRKERIQEDYNDKYWDQRYTIVQQQIPSFLQKMADKILSTGKYLNVVRECGHDVTCPVAKEIIYTLKERAYVEQIEKAFNYASKVLLDFLMEEKELVAHLRATSSCTSWTSRRRSSGSRWRTSRPLAWKRSWSWRCA

SEQ ID NO: 59090 - protein, 37 aa, Homo sapiens
  MOD_RES (1)..(1): Any amino acid
XLPAALRLRRQGWEPPNLSLLFDFTLGYHQGQRMEPR

SEQ ID NO: 59091 - protein, 279 aa, Homo sapiens [sequence omitted]

SEQ ID NO: 59092 - protein, 455 aa, Homo sapiens
MWLKVFTTFLSFATGACSGLKVTVPSHTVHGVRGQALYLPVHYGFHTPASDIQIIWLFERPHTMPKYLLGSVNKSVVPDLEYQHKFTMMPPNASLLINPLQFPDEGNYIVKVNIQGNGTLSASQKIQVTVDDPVTKPVVQIHPPSGAVEYVGNMTLTCHVEGGTRLAYQWLKNGRPVHTSSTYSFSPQNNTLHIAPVTKEDIGNYSCLVRNPVSEMESDIIMPIIYYGPYGLQVNSDKGLKVGEVFTVDLGEAILFDCSADSHPPNTYSWIRRTDNTTYIIKHGPRLEVASEKVAQKTMDYVCCAYNNITGRQDETHFTVIITSVGLEKLAQKGKSLSPLASITGISLFLIISMCLLFLWKKYQPYKGQKQNTGKLKHFQAMKMLWMTSEYMNLLLFQMFLVFPGSQAGLFQPLIVYRGKICTVQCMKLFSTSLPSSKTIQSELSWAKQYIRVKF

SEQ ID NO: 59093 - protein, 355 aa, Homo sapiens
MWLLVSVILISRISSVGGEESCSVAPRMVFSGMISAHCNIPLLGSSDSSASASQVAGITGVHHHTWLIFVFLVEMGFRHVGQAGLKLLTSSDPPTSASQSAGITAMFCDFPKINHGILYDEEKYKPFSQVPTGEVFYYSCEYNFVSPSKSFWTRITCAEEGWSPTPKCLRLCFFPFVENGHSESSGQTHLEGDTVQIICNTGYRLQNNENNISCVERGWSTPPKCRSTISAEKCGPPPPIDNGDITSFLLSVYAPGSSVEYQCQNLYQLEGNNQITCRNGQWSEPPKCLDPCVISQEIMEKYNIKLKWTNQQKLYSRTGDIVEFVCKSGYHPTKSHSFRAMCQNGKLVYPSCEEK

SEQ ID NO: 59094 - protein, 18 aa, Homo sapiens
MYTSHEDIGYDFEDGPKD

SEQ ID NO: 59095 - protein, 175 aa, Homo sapiens
MAEAATPGTTATTSGAGAAAATAAAASPTPIPTVTAPSLGAGGGGGGSDGSGGGWTKQVTCRYFMHGVCKEGDNCRYSHDLSDSPYSVVCKYFQRGYCIYGDRCSRALRPMRRTWSSHLPCSAARTWCVGSAWRWSMRKPTPVSAASGSSPTATTPTVSSAFASGGVLSNLRARS

SEQ ID NO: 59096 - protein, 56 aa, Homo sapiens
MQGEAHPSASLIDRTIKMRKETEARKVVLAWGLLNVSMAGMIYTEMTGKLISSYYN

SEQ ID NO: 59097 - protein, 185 aa, Homo sapiens
  MOD_RES (1)..(1): Any amino acid
XKMRWSGLNAIQFYVPWNYHEPQPGVYNFNGSRDLIAFLNEAALANLLVILRPGPYICAEWEMGGLPSWLLRKPEIHLRTSDPDFLAAVDSWFKVLLPKIYPWLYHNGGNIISIQVENEYGSYRACDFSYMRHLAGLFRALLGEKILLFTTDGPEGLKCGSLRGLYTTVDFGPGLKQGLGVESGE

SEQ ID NO: 59098 - protein, 249 aa, Homo sapiens
  MOD_RES (1)..(1): Any amino acid
XFSVVMMSIWPYLQKIDPTADTSFLGWVIASYSLGQMVASPIFGLWSNYRPRKEPLIVSILISVAANCLYAYLHIPASHNKYYMLVARGLLGIGAGNVAVVRSYTAGATSLQERTSSMANISMCQALGFILGPVFQTCFTFLGEKGVTWDVIKLQINMYTTPVLLSAFLGILNIILILAILREHRVDDSGRQCKSINFEEASTDEAQVPQGNIDQVAVVAINVLFFVTLFIFALFETIGERAILLGGLI

SEQ ID NO: 59099 - protein, 94 aa, Homo sapiens
MSEQGDLNQAIAEEGGTEQETATPENGIVKSESLDEEEKLELQRRLEAQNQERRKSKSGAGKGKLTRSLAVCEESSARPGGESLQDQESIHLQL

SEQ ID NO: 59100 - protein, 323 aa, Homo sapiens
MDSKHQCLKLNDGHFMPVLGFGTYAPPEVPRSKALEVTKLAIEAGFRHIDSAHLYNNEEQVGLAIRSKIADGSVKREDIFYTSKLWSTFHRPELVRPALENSLKKAQLDYVDLYLIHSPMSLKPGEELSPTDENGKVIFDIVDLCTTWEAMEKCKDAGLAKSIGVSNFNRRQLEMILNKPGLKYKPVCNQVECHPYFNRSKLLDFCKSKDIVLVAYSALGSQRDKRWVDPNSPVLLEDPVLCALAKKHKRTPALIALRYQLQRGVVVLAKSYNEQRIRQNVQVFEFQLTAEDMKAIDGLDRNLHYFNSDSFASHPNYPYSDEY

SEQ ID NO: 59101 - protein, 28 aa, Homo sapiens
MRPPQCLLHTPSLASPLLLLLLWLLGGG

SEQ ID NO: 59102 - protein, 141 aa, Homo sapiens
MVPPPPGEESQTVILPPGWQSYLSPQGRRYYVNTTTNETTWERPSSSPGIPASPGSHRSSLPPTVNGYHASGTPAHPPETAHMSVRKSTGDSQNLGSSSPSKKQSKENTITINCVTFPHPDTMPEQQLLKPTEWSYCDYFW

SEQ ID NO: 59103 - protein, 86 aa, Homo sapiens
MRGMKLLGALLALAALLQGAVSLKIAAFNIQTFGETKMSNATLVSYIVQILSRYDIALVQEVRDSHLTAVGKLLDNLNQWVTVAGS

SEQ ID NO: 59104 - protein, 60 aa, Homo sapiens
MLLPSDVARLVLDRVSPCCPGSSAVVQSWFAAASTSWAQAILPPPPPEQLELQVHTTKPS

SEQ ID NO: 59105 - protein, 85 aa, Homo sapiens
  MOD_RES (1)..(1): Any amino acid
XSSWIPRGNYIESNRDDCTVSLIYAVHLKKSGYVFFEYQYVDNNIFFEFFIQNDQCQEMDTTTDKWVKLTDNGEWGSHSDSSLNA

SEQ ID NO: 59106 - protein, 383 aa, Homo sapiens
METCTCGEITIDILFSHWPFYVPKLVENCVCLLRNLSYQVHREIPQAERYQEAAPNVANNTGPHAASCFGAKKGKGKKPIEDPANDTVDFPKRTSPARGYELLFQPEVVRIYISLLKESKTPAILEASAGAIQNLCAGRWTYGRYIRSALRQEKALSAIADLLTNEHERVVKAASGALRNLAVDARNKELIGKHAIPNLVKNLPGGQQNSSWNFSEDTVISILNTINEVIAENLEAAKKLRETQGIEKLVLINKSGNRSEKEVRAAALVLQTIWGYKELRKPLEKEGWKKSDFQVNLNNASRSQSSHSYDDSTLPLIDRNQKSDKKPDREEIQMSNMGSNTKSLDNNYSTPNERGDHNRTLDRSGDLGDMEPLKGTTPLMQKI

SEQ ID NO: 59107 - protein, 92 aa, Homo sapiens
MIPPGECTYAGRKRRRPLQKQRPAVGAEKSNPSKRHRDRLNAELDHLASLLPFPPDIISKLDKLSVLRLSVSYLRVKSFFQGVGSGRCRRCG

SEQ ID NO: 59108 - protein, 179 aa, Homo sapiens
  MOD_RES (1)..(1): Any amino acid
XEILTKPLSNHEKVVRPALIYSLFPNVPPTIYFGTRDERVEKLPWEQRKLLRWKMSTVTPNIVKQTIGRSHFKISKRNDDWLGCWGHHMKSPSFRSIREHQKLNHFPGSFQIGRKDRLWRNLSRMQSRFGKKEFSFFPQSFILPQDAKLLRKAWESSSRQKWIVKPVSTQTLPHQRQQV

SEQ ID NO: 59109 - protein, 87 aa, Homo sapiens
MAELQMLLEEEIPGGRRALFDSYTNLERVADYCENNYIQSADKQRALEETKAYTTQSLASVAYLINTLANNVLQMLDIQVILYSSTA

SEQ ID NO: 59110 - protein, 177 aa, Homo sapiens
  MOD_RES (1)..(1): Any amino acid
XHMQTQSSPFARGNVFGEPPTELQIKQQELYKNFLRFQIEEKKQREEAERERLRIAEEKEERRLAEQRARIQQEYEEEQEKKREKEEEQRLKNEEHIRLAEERQKEAERKKKEEEEKYNLQLQHYCERDNLIGEETKHMRQPSPIVPALQNKIASKLQRPPSVDSIIRSFIHAMVWR

SEQ ID NO: 59111 - protein, 104 aa, Homo sapiens
MALLLALSLLVLWTSPAPTLSGTNDAEDCCLSVTQKPIPGYIVRNFHYLLIKDGCRVPAVVFTTLRGRQLCAPPDQPWVERIIQRLQRTSAKASLALPGPVSSL

SEQ ID NO: 59112 - protein, 475 aa, Homo sapiens
MDHPSREKDERQRTTKPMAQRSAHCSRPSGSSSSSGVLMVGPNFRVGKKIGCGNFGELRLGKNLYTNEYVAIKLEPIKSRAPQLHLEYRFYKQLGSAGEGLPQVYYFGPCGKYNAMVLELLGPSLEDLFDLCDRTFTLKTVLMIAIQLLSRMEYVHSKNLIYRDVKPENFLIGRQGNKKEHVIHIIDFGLAKEYIDPETKKHIPYREHKSLTGTARYMSINTHLGKEQSRRDDLEALGHMFMYFLRGSLPWQGLKADTLKERYQKIGDTKRNTPIEALCENFPEEMATYLRYVRRLDFFEKPDYEYLRTLFTDLFEKKGYTFDYAYDWVGRPIPTPVGSVHVDSGASAITRESHTHRDRPSQQQPLRNQNVSSERRGEWEIQPSRQTNTSYLTSHLAADRHGGSVQVVSSTNGELNVDDPTGAHSNAPITAHAEVEVVEEAKCIMFHKPWHWSQSSAVKMKFVVFLNMNVNFKCI

SEQ ID NO: 59113 - protein, 1827 aa, Homo sapiens
MTTMLQKSDSNASFLRAARAGNLDKVVEYLKGGIDINTCNQNGLNALHLAAKEGHVGLVQELLGRGSSVDSATKKGNTALHIASLAGQAEVVKVLVKEGANINAQSQNGFTPLYMAAQENHIDVVKYLLENGANQSTATEDGFTPLAVALQQGHNQAVAILLENDTKGKVRLPALHIAARKDDTKSAALLLQNDHNADVQSKMMVNRTTESGFTPLHIAAHYGNVNVATLLLNRGAAVDFTARNGITPLHVASKRGNTNMVKLLLDRGGQIDAKTRDGLTPLHCAARSGHDQVVELLLERGAPLLARTKNGLSPLHMAAQGDHVECVKHLLQHKAPVDDVTLDYLTALHVAAHCGHYRVTKLLLDKRANPNARALNGFTPLHIACKKNRIKVMELLVKYGASIQAITESGLTPIHVAAFMGHLNIVLLLLQNGASPDVTNIRGETALHMAARAGQVEVVRCLLRNGALVDARAREEQTPLHIASRLGKTEIVQLLLQHMAHPDAATTNGYTPLHISAREGQVDVASVLLEAGAAHSLATKKGFTPLHVAAKYGSLDVAKLLLQRRAAADSAGKNGLTPLHVAAHYDNQKVALLLLEKGASPHATAKNGYTPLHIAAKKNQMQIASTLLNYGAETNIVTKQGVTPLHLASQEGHTDMVTLLLDKGANIHMSTKSGLTSLHLAAQEDKVNVADILTKHGADQDAHTKLGYTPLIVACHYGNVKMVNFLLKQGANVNAKTKNGYTPLHQAAQQGHTHIINVLLQHGAKPNATTANGNTALAIAKRLGYISVVDTLKVVTEEVTTTTTTITEKHKLNVPETMTEVLDVSDEEGDDTMTGDGGEYLRPEDLKELGDDSLPSSQFLDGMNYLRYSLEGGRSDSLRSFSSDRSHTLSHASYLRDSAVMDDSVVIPSHQVSTLAKEAERNSYRLSWGTENLDNVALSSSPIHSGFLVSFMVDARGGAMRGCRHNGLRIIIPPRKCTAPTRVTCRLVKRHRLATMPPMVEGEGLASRLIEVGPSGAQFLGKLHLPTAPPPLNEGESLVSRILQLGPPGTKFLGPVIVEIPHFAALRGKERELVVLRSENGDSWKEHFCDYTEDELNEILNGMDEVLDSPEDLEKKRICRIITRDFPQYFAVVSRIKQDSNLIGPEGGVLSSTVVPQVQAVFPEGALTKRIRVGLQAQPMHSELVKKILGNKATFSPIVTLEPRRRKFHKPITMTIPVPKASSDVMLNGFGGDAPTLRLLCSITGGTTPAQWEDITGTTPLTFVNECVSFTTNVSARFWLIDCRQIQESVTFASQVYREIICVPYMAKFVVFAKSHDPIEARLRCFCMTDDKVDKTLEQQENFAEVARSRDVEVLEGKPIYVDCFGNLVPLTKSGQHHIFSFFAFKENRLPLFVKVRDTTQEPCGRLSFMKEPKSTRGLVHQAICNLNITLPIYTKESESDQEQEEEIDMTSEKNPQDEQERIEERLAYIADHLGFSWTELARELDFTEEQIHQIRIENPNSLQDQSHALLKYWLERDGKHATDTNLVECLTKINRMDIVHLMETNTEPLQERISHSYAEIEQTITLDHSEGFSVLQEELCTAQHKQKEEQAVSKESETCDHPPIVSEEDISVGYSTFQDGVPKTEGDSSATALFPQTHKEQVQQDFSGKMQDLPEESSLEYQQEYFVTTPGTETSETQKAMIVPSSPSKTPEEVSTPAEEEKLYLQTPTSSERGGSPIIQEPEEPSEHREESSPRKTSLVIVESADNQPETCERLDEDAAFEKELTEELGELEASSDEEAMVTTRVVRRRVIIQGDDMPEIPPETVTEEEYIDEHGHTVVKKDNNE

SEQ ID NO: 59114 - protein, 149 aa, Homo sapiens
MAPEENAGTELLLQGFERRFLAVRTLRSFPWQSLEAKLRDSSDSELLRDILQKTVRHPVCVKHPPSVKYAWCFLSELIKKSSGGSVTLSKSTAIISHGTTGLVTWDAALYLAEWAIENPAAFINRRAVLPRSHRVAGRGPAEAGCLPGA

SEQ ID NO: 59115 - protein, 119 aa, Homo sapiens
MSEVSCKKRDDYLEWPEYFMAVAFLSAQRSKDPNSQVGACIVNSENKIVGIGYNGMPNGCSDDVLPWRRTAENKLDTKYPYVCHAELNAIMNKNSTDVKGCSMYVALFPCNECAKLIIQ

SEQ ID NO: 59116 - protein, 370 aa, Homo sapiens
MFSMTTEALNNFALGCTNLLMTMIPQIDLKQIFLCPNCRLYMIPVGAFIFSLGNMQNQSFVTEFVLLGLSQNPNVQEIVFVVFLFVYIATVGGNMLIVVTILSSPALLVSPMYFFLGFLSFLDACFSSVITPKMIVDSLYVTKTISFEGCMMQLFAEHFFAGVEVIVLTAMAYDRYVAICKPLHYSSIMNRRLCGILMGVAWTGGLLHSMIQILFTFQLPFCGPNVINHFMCDLYPLLELACTDTHIFGLMVVINSGFICIINFSLLLVSYAVILLSLRTHSSEGRWKALSTCGSHIAVVILFFVPCIFVYTRPPSAFSLDKMAAIFYIILNPLLNPLIYTFRNKEVKQAMRRIWNRLMVVSDEKENIKL

SEQ ID NO: 59117 - protein, 441 aa, Homo sapiens
MASSTASNSNRSTPACSPILRKRSRSPTPQNQDGDTMVEKGSDHSSDKSPSTPEQGVQRSCSSQSGRSGGKNSKKSQSWYNVLSPTYKQRNEDFRKLFKQLPDTERLIVDYSCALQRDILLQGRLYLSENWICFYSNIFRWETLLTVRLKDICSMTKEKTARLIPNAIQVCTDSEKHFFTSFGARDRTYMMMFRLWQNALLEKPLCPKELWHFVHQCYGNELGLTSDDEDYVPPDDDFNTMGYCEEIPVEENEVNDSSSKSSIETKPDASPQLPKKSITNSTLTSTGSSEAPVSFDGLPLEEEALEGDGSLEKELAIDNIMGEKIEMIAPVNSPSLDFNDNEDIPTELSDSSDTHDEGEVQAFYEDLSGRQYVNEVFNFSVDKLYDLLFTNSPFQRDFMEQRRFSDIIFHPWKKEENGNQSRVILYTITLTNPLAPKTATV

SEQ ID NO: 59118 - protein, 170 aa, Homo sapiens
MPRVKAAQAGRQSSAKRHLAEQFAVGEIITDMAKKEWKVGLPIGQGGFGCIYLADMNSSESVGSDAPCVVKVEPSDNGPLFTELKFYQRAAKPEQIQKWIRTRKLKYLGVPKYWGSGLHDKNGKRFMIMDRFGSDLQKIYEANAKRFSRKTVLQLSLRIVSGYSGIYSRA

SEQ ID NO: 59119 - protein, 149 aa, Homo sapiens
  MOD_RES (1)..(1): Any amino acid
XQLNRIEEGLDQINKDMRETEKTLTELNKCCGLCVCPCNRTKNFESGKAYKTTWGDGGENSPCNVVSKQPGPVTNGQLQQPTTGAASGGYIKRITNDAREDEMEENLTQVGSILGNLKDMALNIGNEIDAQNPQIKRITDKQADRSGNH

SEQ ID NO: 59120 - protein, 135 aa, Homo sapiens
MSSMAYSLYLFTRGEGPLKTSQDLIHQLEVFAAEGLKLTSSVQAFSKQLKDDDKLMLLLEINKLIPLCHQLQTVTKTSLQNKVFLKVDKCITKTRSMMALLVQLLSLCYKLLKKLQMENNGWVSVTNKDTMDSKT

SEQ ID NO: 59121 - protein, 143 aa, Homo sapiens
MRGRDGGTEKAKGSLCPPTPQAVIQNPFSNGGSPAAEAVSGEARFAYFPASSVGDTTAVSVQTTDQSLQAGGQFYVMMTPQDVLQTGTQRTIAPRTHPYSPKIDGTRTPRDERRRAQHNEVERRRRDKINNWIVQLSKIIPDC

SEQ ID NO: 59122 - protein, 632 aa, Homo sapiens
MATKARVMYDFAAEPGNNELTVNEGEIITITNPDVGGGWLEGRNIKGERGLVPTDYVEILPSDGKDQFSCGNSVADQAFLDSLSASTAQASSSAASNNHQVGSGNDPWSAWSASKSGNWESSEGWGAQPEGAGAQRNTNTPNNWDTAFGHPQAYQGPATGDDDDWDEDWDGPKSSSYFKDSESADAGGAQRGNSRASSSSMKIPLNKFPGFAKPGTEQYLLAKQLAKPKEKIPIIVGDYGPMWVYPTSTFDCVVADPRKGSKMYGLKSYIEYQLTPTNTNRSVNHRYKHFDWLYERLLVKFGSAIPIPSLPDKQVTGRFEEEFIKMRMERLQAWMTRMCRHPVISESEVFQQFLNFRDEKEWKTGKRKAERDELAGVMIFSTMEPEAPDLDLVEIEQKCEAVGKFTKAMDDGVKELLTVGQEHWKRCTGPLPKEYQKIGKALQSLATVFSSSGYQGETDLNDAITEAGKTYEEIASLVAEQPKKDLHFLMECNHEYKGFLGCFPDIIGTHKGAIEKVKESDKLVATSKITLQDKQNMVKRVSIMSYALQAEMNHFHSNRIYDYNSVIRLYLEQQVQFYETLLPPVTASLCLCAPGTVLNEMRSPSRPWDSVGSWNRSLAPHRKPKAAFAFCE

SEQ ID NO: 59123 - protein, 135 aa, Homo sapiens
MMEDDGQPRTLYVGNLSRDVTEVLILQLFSQIGPCKSCKMITEHTSNDPYCFVEFYEHRDAAAALAAMNGRKILGKEVKVNWATTPSSQKKDTSNHFHVFVGDLSPEITTEDIKSAFAPFGKISIAHKNGQDLEG

SEQ ID NO: 59124 - protein, 223 aa, Homo sapiens
MWELRSIAFSRAVFAEFLATLLFVFFGLGSALNWPQALPSVLQIAMAFGLGIGTLVQALGHISGAHINPAVTVACLVGCHVSVLRAAFYVAAQLLGAVAGAALLHEITPADIRGDLAVNALSNSTTAGQAVTVELFLTLQLVLCIFASTDERRGENPGTPALSIGFSVALGHLLGIHYTGCSMNPARSLAPAVVTGKFDDHWVFWIGPLVGSPEPGRSPALRL

SEQ ID NO: 59125 - protein, 85 aa, Homo sapiens
MGGDHGYQLAVTKAENPTTAAPADTYPATGPADDEAPDAETTAAATTATTAAPTTATTAASTTARKDIPVLPKWVGDLPNGRVCP

SEQ ID NO: 59126 - protein, 1860 aa, Homo sapiens
MATGGGPFEDGMNDQDLPNWSNENVDDRLNNMDWGAQQKKANRSSEKNKKKFGVESDKRVTNDISPESSPGVGRRRTKTPHTFPHSRYMSQMSVPEQAELEKLKQRINFSDLDQRSIGSDSQGRATAANNKRQLSENRKPFNFLPMQINTNKSKDASTNPPNRETIGSAQCKELFASALSNDLLQNCQVSEEDGRGEPAMESSQIVSRLVQIRDYITKASSMREDLVEKNERSANVERLTHLIDHLKEQEKSYMKFLKKILARDPQQEPMEEIENLKKQHDLLKRMLQQQEQLRALQGRQAALLALQHKAEQAIAVMDDSVVAETAGSLSGVSITSELNEELNDLIQRFHNQLRDSQPPAVPDNRRQAESLSLTREVSQSRKPSASERLPDEKVELFSKMRVLQEKKQKMDKLLGELHTLRDQHLNNSSSSPQRSVDQRSTSAPSASVGLAPVVNGESNSLTSSVPYPTASLVSQNESENEGHLNPSEKLQKLNEVRKRLNELRELVHYYEQTSDMMTDAVNENRKDEETEESEYDSEHENSEPVTNIRNPQVASTWNEVNSHSNAQCVSNNRDGRTVNSNCEINNRSAANIRALNMPPSLADCRYNREGEQEIHVAQGEDDEEEEEEAEEEGVSGASLSSHRSSLVDEHPEDAEFEQKINRLMAAKQKLRQLQDLVAMVQDDDAAQGVISASASNLDDFYPAEEDTKQNSNNTRGNANKTQKDTGVNEKAREKFYEAKLQQQQRELKQLQEERKKLIDIQEKIQALQTACPDLQLSAASVGNCPTKKYMPAVTSTPTVNQHETSTSKSVFEPEDSSIVDNELWSEMRRHEMLREELRQRRKQLEALMAEHQRRQGLAETASPVAVSLRSDGSENLCTPQQSRTEKTMATWGGSTQCALDEEGDEDGYLSEGIVRTDEEEEEEQDASSNDNFSVCPSNSVNHNSYNGKETKNRWKNNCPFSADENYRPLAKTRQQNISMQRQENLRWVSELSYVEEKEQWQEQINQLKKQLDFSVSICQTLMQDQQTLSCLLQTLLTGPYSVMPSNVASPQVHFIMHQLNQCYTQLTWQQNNVQRLKQMLNELMRQQNQHPEKPGGKERGSSASHPPSPSLFCPFSFPTQPVNLFNIPGFTNFSSFAPGMNFSPLFPSNFGDFSQNISTPSEQQQPLAQNSSGKTEYMAFPKPFESSSSIGAEKPRNKKLPEEEVESSRTPWLYEQEGEVEKPFIKTGFSVSVEKSTSSNRKNQLDTNGRRRQFDEESLESFSSMPDPVDPTTVTKTFKTRKASAQASLASKDKTPKSKSKKRNSTQLKSRVKNIKTGSDFSMFEALRDTIYSEVATLISQNESRPHFLIELFHELQLLNTDYLRQRALYALQDIVSRHISESHEKGENVKSVNSGTWIASNSELTPSESLATTDDETFEKNFERETHKISEQNDADNASVLSVSSNFEPFATDDLGNTVIHLDQALARMREYERMKTEAESNSNMRCTCRIIEDGDGAGAGTTVNNLEETPVIENRSSQQPVSEVSTIPCPRIDTQQLDRQIKAIMKEVIPFLKEHMDEVCSSQLLTSVRRMVLTLTQQNDESKEFVKFFHKQLGSILQDSLAKFAGRKLKDCGEDLLVEISEVLFNELAFFKLMQDLDNNSITVKQRCKRKIEATGVIQSCAKEAKRILEDHGSPAGEIDDEDKDKDETETVKQTQTSEVYDGPKNVRSDISDQEEDEESEGCPVSINLSKAETQALTNYGSGEDENEDEEMEEFEEGPVDVQTSLQANTEATEENEHDEQEAESGNISQKSDEEDFVKVEDLPLKLTIYSEADLRKKMVEEEQKNHLSGEICEMQTEELAGNSETLKEPETVGAQSI

SEQ ID NO: 59127 - protein, 125 aa, Homo sapiens
MVLPQGLLTFRDVAIEFSQEEWKCLDPAQRTLYRDVMLENYRNLVSLGIFSKCEIKELPPKKESNTGEIFQTVMLERHESHDIQDFCFRETQKNGLPLMPSRSWTVLLPSWLTATSLPDSPASAC

SEQ ID NO: 59128 - protein, 181 aa, Homo sapiens
MDCLCIVTTKKYRYQDEDTPPQEHISPQITNEVIGPELVHVSEKNLSEIENVHGFVSHSHISPIKRWGFTMFHRLVLNSWAQAISACLGHLKCWDYRQILPQYWSTQIAWKHQLTLMAQMQIMNMKKSHLKGEIQGLVSALQEVRTTHTLEMTQVFSLPKLSQGEQPPKMEDCGSMTVYYE

SEQ ID NO: 59129 - protein, 152 aa, Homo sapiens [sequence omitted]

SEQ ID NO: 59130 - protein, 250 aa, Homo sapiens
MVCSPVTLRIAPPDRRFSRSAIPEQIISSTLSSPSSNAPDPCAKETVLSALKEKKKKRTVEEEDQIFLDGQENKRRPSLSLSPRLVQWCNFGSLHPLPPRFKRFSCLSLPSRWITGVHCCTQLIFVFLVETRFHHVCQASLELLTSSDPPTLASQSAGIMGVSHGARPTCLALTPFCFLPSCLVDGLTDASSAFKVPRPGPDTLQFTVDVFHFANDSRNMIYITCHLKVTLAEQDPDELNKACSFSKPSN

SEQ ID NO: 59131 - protein, 232 aa, Homo sapiens
  MOD_RES (1)..(1): Any amino acid
XDTAASGYGTQNIRLSRDAVKDFDCCCLSLQPCHDPVVTPDGYLYEREAILEYILHQKKEIARQMKAYEKQRGTRREEQKELQRAASQDHVRGFLEKESAIVSRPLNPFTAKALSGTSPDDVQPGPSVGPPSKDKDKVLPSFWIPSLTPEAKATKLEKPWGCGHPRMRGEADSEGHGGPCDWRQTHRPRHHRAAAGRYRLRGLRSEAASGEITAGDAGLSVCGRPNKPAWVR

SEQ ID NO: 59132 - protein, 176 aa, Homo sapiens
MTHEEHHAAKTLGIGKAIAVLTSGGDAQGMNAAVRSTVRIGLIQGNRVLVVHDGFEGLAKGQIEEAGWSYVGGWTGQGGSKLGTKRTLPKKSFEQISANITKFNIQGLVIIGGFEAYTGGLELMEGRKQFDELCIPFVVIPATVSNNVPGSDFSVGADTALNTICTTCDRIKQSAA

SEQ ID NO: 59133 - protein, 167 aa, Homo sapiens
MGAGEQNRQSAHCVQGICGYLEGDEEGEEGEVRSTQVREWKEQGSKTFMCTGRPGWLTVSLRVGKYKKTHKNIMINLMDILEVDTKKQIVRVEPLVTMGQVTALLTSIGWTLPVLPELDDLTVGGLIMGTGIESSSHKYGLFQHICTAYELVLADGSFVRCTPSENS

SEQ ID NO: 59134 - protein, 125 aa, Homo sapiens
MAKSLLKTASLSGRTKLLHQTGLSLYSTSHGFYEEEVKKTLQQFPGGSIDLQKEDNGIGILTLNNPSRMNAFSGVMMLQLLEKVIELENWTEGKGLIVRGAKNTFSSGSDLNAVKSLGTPEGDFL

SEQ ID NO: 59135 - protein, 400 aa, Homo sapiens
MAVSVTPIRDTKWLTLEVCREFQRGTCSRPDTECKFAHPSKSCQVENGRVIACFDSLKGRCSRENCKYLHPPPHLKTQLEINGRNNLIQQKNMAMLAQQMQLANAMMPGAPLQPVPMFSVAPSLATNASAAAFNPYLGPVSPSLVPAEILPTAPMLVTGNPGVPVPAAAAAAAQKLMRTDRLEVCREYQRGNCNRGENDCRFAHPADSTMIDTNDNTVTVCMDYIKGRCSREKCKYFHPPAHLQAKIKAAQYQVNQAAAAQAAATAAAMTQSAVKSLKRPLEATFDLGIPQAVLPPLPKRPALEKTNGATAVFNTGIFQYQQALANMQLQQHTAFLPPGSILCMTPATSVVPMVHGATPATVSAATTSATSVPFAATATANQIPIISAEHLTSHKYVTQM

SEQ ID NO: 59136 - protein, 476 aa, Homo sapiens
MSRESDVEAQQSHGSSACSQPHGSVTQSQGSSSQSQGISSSSTSTMPNSSQSSHSSSGTLSSLETVSTQELYSIPEDQEPEDQEPEEPTPAPWARLWALQDGFANLECVNDNYWFGRDKSCEYCFDEPLLKRTDKYRTYSKKHFRIFREENLSCPYRIWFNGACGEVKLAFERKTCKKVAIKIISKRKFAIGSAREADPALNVETEIEILKKLNHPCIIKIKNFFDAEDYYIVLELMEGGELFDKVVGNKRLKEATCKLYFYQMLLAVQYLHENGIIHRDLKPENVLLSSQEEDCLIKITDFGHSKILGETSLMRTLCGTPTYLAPEVLVSVGTAGYNRAVDCWSLGVILFICLSGYPPFSEHRTQVSLKDQITSGKYNFIPEVWAEVSEKALDLVKKLLVVDPKARFTTEEALRHPWLQDEDMKRKFQDLLSEENESTALPQVLAQPSTSRKRPREGEAEGAETTKRPAVCAAVL

SEQ ID NO: 59137 - protein, 43 aa, Homo sapiens
GLDDVENSMLYYNQAVILYHLRQYTEAISVGEKLYQFIEPFDW

SEQ ID NO: 59138 - protein, 89 aa, Homo sapiens
MSLKLQASNVTNKNDPKSINSRVFIGNLNTALVKKSDVETIFSKYGRVAGCSVHKGYAFVQYSNERHARAAVLGENGRVLAGQTLDINM

SEQ ID NO: 59139 - protein, 147 aa, Homo sapiens
MYSGNRSGGHGYWDGGGAAGAEGPAPAGTLSPAPLFSPGTYERLALLLGSIGLLGVGNNLLVLVLYYKFQRLRTPTHLLLVNISLSDLLVSLFGVTFTFVSCLRNGWVWDTVGCVWDGFSGSLFAVVTRRCYFLKWRTIFPQSLMWL

SEQ ID NO: 59140 - protein, 154 aa, Homo sapiens
  MOD_RES (1)..(1): Any amino acid
XRLLEPSDMTESDPDADRTTLNHADHSSKIVQHRLLSRQEELKERARVLLEQARRDAALKAGNKHNTNTATPFCNRQLSDQQDEERRRQLRERARQLIAEARSGVKMSELPSYGEMAAEKLKERSKASGDENDNIEIDTNEEIPEGFVVGGGDE

SEQ ID NO: 59141 - protein, 78 aa, Homo sapiens
MSNMENSFDDVSCLSPQNLGSSSPSKKQSKENTITINCVTFPHPDTMPEQQLLKPTEWSYCDYFWAEDPLTPMLCLPL

SEQ ID NO: 59142 - protein, 177 aa, Homo sapiens
MKNWGVIGGIAAALAAGIYVIWGPITERKKRRKGLVPGLVNLGNTCFMNSLLQGLSACPAFIRWLEEFTSQYSRDQKEPPSHQYLSLTLLHLLKALSCQEVTDDEVLDASCLLDVLRMYRWQISSFEEQDAHELFHVITSSLEDERDRQPRVTHLFDVHSLEQQSEITPKQITCRTR

SEQ ID NO: 59143 - protein, 221 aa, Homo sapiens
MMNHSMSSGSGSLRTNQKRSLYVRAMFDYDKSKDSGLPSQGLSFKYGDILHVINASDDEWWQARRVMLEGDSEEMGVIPSKRRVERKERARLKTVKFNAKPGVIDSKGSFNDKRKKSFIFSRKFPFYKNKEQSEQETSDPERGQEDLILSYEPVTRQEINYTRPVIILGPMKDRINDDLISEFPDKFGSCVPHTTRPKRDYEVDGRDYHFVISREQMEKDI

SEQ ID NO: 59144 - protein, 130 aa, Homo sapiens
MTFEDVAVYFSQEEWGLLDTAQRALYRHVMLENFTLVTSLGLSTSRPRVVIQLERGEEPWVPSGKDMTLARNTYGRLNSGEWELRWGELRTNLWPSPCPCFSDSGNTSSSPASYLTPFSSIISLSWRLLP

SEQ ID NO: 59145 - protein, 512 aa, Homo sapiens
MVARGEIARFWSLESLHLVSSDGGTEPSALVDDNGSEEDFSYEDLCQASPRYLQPGGEQLAINELISDGNVVCAEALWDHVTMDDQELGFKAGDVIQVLEASNKDWWWGRSEDKEAWFPASFVRGYIRQCRKHTGMFTVAQLATIFGNIEDIYKFQRKFLKDLEKQYNKEEPHLSEIGSCFLQNQEGFAIYSEYCNNHPGACLELANLMKQGKYRHFFEACRLLQQMIDIAIDGFLLTPVQKICKYPLQLAELLKYTTQEHGDYSNIKAAYEAMKNVACLINERKRKLESIDKIARWQVSIVGWEGLDILDRSSELIHSGELTKITKQGKSQQRTFFLFDHQLVSCKKDLLRRDMLYYKGRLDMDEMELVDLGDGRDKDCNLSVKNAFKLVSRTTDEVYLFCAKKQEDKARWLQACADERRRVQEDKEMGMEISENQKKLAMLNAQKAGHGKSKGYNRCPVAPPHQGLHPIHQRHITMPTSVPQQQVFGLAEPKRKSSLFWHTFNRLTPFRK

SEQ ID NO: 59146 - protein, 859 aa, Homo sapiens
MDFTLGDWEQLGLEQGDTFWDTALDNCQDLFLLDPPRPNLTSHPDGSEDLEPLAGGSPEATSPDVTETKNSPLMEDFFEEGFSQEIIEMLSKDGFWNSNFGEACIEDTWLDSLLGDPESLLRSDIATNGESPTECKSHELKRGLSPVSTVSTGEDSMVHNVSEKTLTPAKSKEYRGEFFSYSDHSQQDSVQEGEKPYQCSECGKSFSGSYRLTQHWITHTREKPTVHQECEQGFDRNASLSVYPKTHTGYKFYVCNEYGTTFSQSTYLWHQKTHTGEKPCKSQDSDHPPSHDTQPGEHQKTHTDSKSYNCNECGKAFTRIFHLTRHQKIHTRKRYECSKCQATFNLRKHLIQHQKTHAAKTTSECQECGKIFRHSSLLIEHQALHAGEEPYKCNERGKSFRHNSTLKIHQRVHSGEKPYKCSECGKAFHRHTHLNEHRRIHTGYRPHKCQECVRSFSRPSHLMRHQAIHTAEKPYSCAECKETFSDNNRLVQHQKMHTVKTPYECQECGERFICGSTLKCHESVHAREKQGFFVSGKILDQNPEQKEKCFKCNKCEKTFSCSKYLTQHERIHTRGVKPFECDQCGKAFGQSTRLIHHQRIHSRVRLYKWGEQGKAISSASLIKLQSFHTKEHPFKCNECGKTFSHSAHLSKHQLIHAGENPFKCSKCDRVFTQRNYLVQHERTHARKKPLVCNECGKTFRQSSCLSKHQRIHSGEKPYVCDYCGKAFGLSAELVRHQRIHTGEKPYVCQECGKAFTQSSCLSIHRRVHTGEKPYRCGECGKAFAQKANLTQHQRIHTGEKPYSCNVCGKAFVLSAHLNQHLRVHTQETLYQCQRCQKAFRCHSSLSRHQRVHNKQQYCL

SEQ ID NO: 59147 - protein, 115 aa, Homo sapiens
  MOD_RES (1)..(1): Any amino acid
XMRDRTHELRQGDDSSDEEDKERVALVVHPGTARLGSPDEEFFHKVRTIRQTIVKLGNKVQELEKQQVTILATPLPEESMKQELQNLRDEIKQLGREIRLQLKGELLGPQTDPSL

SEQ ID NO: 59148 - protein, 4491 aa, Homo sapiens
MMPAQYALTSSLVLLVLLSTARAGPFSSRSNVTLPAPRPPPQPGGHTVGAGVGSPSSQLYEHTVEGGEKQVVFTHRINLPPSTGCGCPPGTEPPVLASEVQALRVRLEILEELVKGLKEQCTGGCCPASAQAGTGQTDVRTLCSLHGVFDLSRCTCSCEPGWGGPTCSDPTDAEIPPSSPPSASGSCPDDCNDQGRCVRGRCVCFPGYTGPSCGWPSCPGDCQGRGRCVQGVCVCRAGFSGPDCSQRSCPRGCSQRGRCEGGRCVCDPGYTGDDCGMRSCPRGCSQRGRCENGRCVCNPGYTGEDCGVRSCPRGCSQRGRCKDGRCVCDPGYTGEDCGTRSCPWDCGEGGRCVDGRCVCWPGYTGEDCSTRTCPRDCRGRGRCEDGECICDTGYSGDDCGVRSCPGDCNQRGRCEDGRCVCWPGYTGTDCGSRACPRDCRGRGRCENGVCVCNAGYSGEDCGVRSCPGDCRGRGRCESGRCMCWPGYTGRDCGTRACPGDCRGRGRCVDGRCVCNPGFTGEDCGSRRCPGDCRGHGLCEDGVCVCDAGYSGEDCSTRSCPGGCRGRGQCLDGRCVCEDGYSGEDCGVRQCPNDCSQHGVCQDGVCICWEGYVSEDCSIRTCPSNCHGRGRCEEGRCLCDPGYTGPTCATRMCPADCRGRGRCVQGVCLCHVGYGGEDCGQEEPPASACPGGCGPRELCRAGQCVCVEGFRGPDCAIQTCPGDCRGRGECHDGSCVCKDGYAGEDCGEEVPTIEGMRMHLLEETTVRTEWTPAPGPVDAYEIQFIPTTEGASPPFTARVPSSASAYDQRGLAPGQEYQVTVRALRGTSWGLPASKTITTMIDGPQDLRVVAVTPTTLELGWLRPQAEVDRFVVSYVSAGNQRVRLEVPPEADGTLLTDLMPGVEYVVTVTAERGRAVSYPASVRANTAPGHYSYPEVRPPAPPPKSRPRPAPAPRPPRPPWPSRPAEEREEESPPRPSLSQPPRRPWGNLTAELSRFRGTVQDLERHLRAHGYPLRANQTYTSVARHIHEYLQRRLLAAAPAGSPAPPPRHPRPTASPDPGTRKRDSNQGIYGLSPEGVDRVAASRHPKPEVLGSSADGALLVSLDGLRGQFERVVLRWRPQPPAEGPGGELTVPGTTRTVSLPDLRPGTTYHVEVHGVRAGQTSKSYAFITTTGSSPLGLLGTTDEPPPSGPSTTQGAQAPLLQQRPQELGELRVLGRDETGRLRVVWTAQPDTFAYFQLRMRVPEGPGAHEEVLPGDVRQALVPPPPPGTPYELSLHGVPPGGKPSDPIIYQGIMDKDEEKPGKSSGPPRLGELTVTDRTSDSLLLRWTVPEGEFDSFVIQYKDRDGQPQVVPVEGPQRSAVITSLDPGRKYKFVLYGFVGKKRHGPLVAEAKILPQSDPSPGTPPHLGNLWVTDPTPDSLHLSWTVPEGQFDTFMVQYRDRDGRPQVVPVEGPERSFVVSSLDPDHKYRFTLFGIANKKRYGPLTADGTTAPERKEEPPRPEFLEQPLLGELTVTGVTPDSLRLSWTVAQGPFDSFMVQYKDAQGQPQAVPVAGDENEVTVPGLDPDRKYKMNLYGLRGRQRVGPESVVAKTAPQEDVDETPSPTELGTEAPESPEEPLLGELTVTGSSPDSLSLFWTVPQGSFDSFTVQYKDRDGRPRAVRVGGKESEVTVGGLEPGHKYKMHLYGLHEGQRVGPVSAVGVTAPQQEETPPATESPLEPRLGELTVTDVTPNSVGLSWTVPEGQFDSFIVQYKDKDGQPQVVPVAADQREVTVYNLEPERKYKMNMYGLHDGQRMGPLSVVIVTAPLPPAPATEASKPPLEPRLGELTVTDITPDSVGLSWTVPEGEFDSFVVQYKDRDGQPQVVPVAADQREVTIPDLEPSRKYKFLLFGIQDGKRRSPVSVEAKTVARGDASPGAPPRLGELWVTDPTPDSLRLSWTVPEGQFDSFVVQFKDKDGPQVVPVEGHERSVTVTPLDAGRKYRFLLYGLLGKKRHGPLTADGTTEARSAMDDTGTKRPPKPRLGEELQVTTVTQNSVGLSWTVPEGQFDSFVVQYKDRDGQPQVVPVEGSLREVSVPGLDPAHRYKLLLYGLHHGKRVGPISAVAITAGREETETETTAPTPPAPEPHLGELTVEEATSHTLHLSWMVTEGEFDSFEIQYTDRDGQLQMVRIGGDRNDITLSGLESDHRYLVTLYGFSDGKHVGPVHVEALTVPEEEKPSEPPTATPEPPIKPRLGELTVTDATPDSLSLSWTVPEGQFDHFLVQYRNGDGQPKAVRVPGHEEGVTISGLEPDHKYKMNLYGFHGGQRMGPVSVVGVTAAEEETPSPTEPSMEAPEPAEEPLLGELTVTGSSPDSLSLSWTVPQGRFDSFTVQYKDRDGRPQVVRVGGEESEVTVGGLEPGRKYKMHLYGLHEGRRVGPVSAVGVTAPEEESPDAPLAKLRLGQMTVRDITSDSLSLSWTVPEGQFDHFLVQFKNGDGQPKAVRVPGHEDGVTISGLEPDHKYKMNLYGFHGGQRVGPVSAVGLTAPGKDEEMAPASTEPPTPEPPIKPRLEELTVTDATPDSLSLSWTVPEGQFDHFLVQYKNGDGQPKATRVPGHEDRVTISGLEPDNKYKMNLYGFHGGQRVGPVSAIGVTAAEEETPSPTEPSMEAPEPPEEPLLGELTVTGSSPDSLSLSWTVPQGRFDSFTVQYKDRDGRPQVVRVGGEESEVTVGGLEPGRKYKMHLYGLHEGRRVGPVSTVGVTAPQEDVDETPSPTEPGTEAPGPPEEPLLGELTVTGSSPDSLSLSWTVPQGRFDSFTVQYKDRDGRPQAVRVGGQESKVTVRGLEPGRKYKMHLYGLHEGRRLGPVSAVGVTEDEAETTQAVPTMTPEPPIKPRLGELTMTDATPDSLSLSWTVPEGQFDHFLVQYRNGDGQPKAVRVPGHEDGVTISGLEPDHKYKMNLYGFHGGQRVGPISVIGVTAAEEETPSPTELSTEAPEPPEEPLLGELTVTGSSPDSLSLSWTIPQGHFDSFTVQYKDRDGRPQVMRVRGEESEVTVGGLEPGRKYKMHLYGLHEGRRVGPVSTVGVTAPEDEAETTQAVPTTTPEPPNKPRLGELTVTDATPDSLSLSWMVPEGQFDHFLVQYRNGDGQPKVVRVPGHEDGVTISGLEPDHKYKMNLYGFHGGQRVGPISVIGVTAAEEETPAPTEPSTEAPEPPEEPLLGELTVTGSSPDSLSLSWTIPQGRFDSFTVQYKDRDGRPQVVRVRGEESEVTVGGLEPGCKYKMHLYGLHEGQRVGPVSAVGVTAPKDEAETTQAVPTMTPEPPIKPRLGELTVTDATPDSLSLSWMVPEGQFDHFLVQYRNGDGQPKAVRVPGHEDGVTISGLEPDHKYKMNLYGFHGGQRVGPVSAIGVTEEETPSPTEPSTEAPEAPEEPLLGELTVTGSSPDSLSLSWTVPQGRFDSFTVQYKDRDGQPQVVRVRGEESEVTVGGLEPGRKYKMHLYGLHEGQRVGPVSTVGITAPLPTPLPVEPRLGELAVAAVTSDSVGLSWTVAQGPFDSFLVQYRDAQGQPQAVPVSGDLRAVAVSGLDPARKYKFLLFGLQNGKRHGPVPVEARTAPDTKPSPRLGELTVTDATPDSVGLSWTVPEGEFDSFVVQYKDKDGRLQVVPVAANQREVTVQGLEPSRKYRFLLYGLSGRKRLGPISADSTTAPLEKELPPHLGELTVAEETSSSLRLSWTVAQGPFDSFVVQYRDTDGQPRAVPVAADQRTVTVEDLEPGKKYKFLLYGLLGGKRLGPVSALGMTAPEEDTPAPELAPEAPEPPEEPRLGVLTVTDTTPDSMRLSWSVAQGPFDSFVVQYEDTNGQPQALLVDGDQSKILISGLEPSTPYRFLLYGLHEGKRLGPLSAEGTTGLAPAGQTSEESRPRLSQLSVTDVTTSSLRLNWEAPPGAFDSFLLRFGVPSPSTLEPHPRPLLQRELMVPGTRHSAVLRDLRSGTLYSLTLYGLRGPHKADSIQGTARTLSPVLESPRDLQFSEIRETSAKVNWMPPPSRADSFKVSYQLADGGEPQSVQVDGQARTQKLQGLIPGARYEVTVVSVRGFEESEPLTGFLTTVPDGPTQLRALNLTEGFAVLHWKPPQNPVDTYDVQVTAPGAPPLQAETPGSAVDYPLHDLVLHTNYTATVRGLRGPNLTSPASITFTTGLEAPRDLEAKEVTPRTALLTWTEPPVRPAGYLLSFHTPGGQNQEILLPGGITSHQLLGLFPSTSYNARLQAMWGQSLLPPVSTSFTTGGLRIPFPRDCGEEMQNGAGASRTSTIFLNGNRERPLNVFCDMETDGGGWLVFQRRMDGQTDFWRDWEDYAHGFGNISGEFWLGNEALHSLTQAGDYSMRVDLRAGDEAVFAQYDSFHVDSAAEYYRLHLEGYHGTAGDSMSYHSGSVFSARDRDPNSLLISCAVSYRGAWWYRNCHYANLNGLYGSTVDHQGVSWYHWKGFEFSVPFTEMKLRPRNFRSPAGGG

SEQ ID NO: 59149 - protein, 471 aa, Homo sapiens
MRPVSVWQWSPWGLLLCLLCSSCLGSPSPSTGPEKKAGSQGLRFRLAGFPRKPYEGRVEIQRAGEWGTICDDDFTLQAAHILCRELGFTEATGWTHSAKYGPGTGRIWLDNLSCSGTEQSVTECASRGWGNSDCTHDEDAGVICKDQRLPGFSDSNVIEVEHHLQVEEVRIRPAVGWGRRPLPVTEGLVEVRLPDGWSQVCDKGWSAHNSHVVCGMLGFPSEKRVNAAFYRLLAQRQQHSFGLHGVACVGTEAHLSLCSLEFYRANDTARCPGGGPAVVSCVPGPVYAASSGQKKQQQSKPQGEARVRLKGGAHPGEGRVEVLKASTWGTVCDRKWDLHAASVVCRELGFGSAREALSGARMGQDVSKRYECANFGEQGITVGCWDLYRHDIDCQWIDITDVKPGNYILQVVINPNFEVAESDFTNNAMKCNCKYDGHRIWVHNCHIGDAFSEEANRRFERYPGQTSNQII

SEQ ID NO: 59150 - protein, 203 aa, Homo sapiens
MDFSVKVDIEKEVTCPICLELLTEPLSLDCGHSFCQACITAKIKESVIISRGESSCPVCQTRFQPGNLRPNRHLANIVERVKEVKMSPQEGQKRDVCEHHGKKLQIFCKEDGKVICWVCELSQEHQGHQTFRINEVVKECQEKLQVALQRLIKEDQEAEKLEDDIRQERTAWKNYIQIERQKILKGFNEMRVILDNEEQRELQ

SEQ ID NO: 59151 - protein, 87 aa, Homo sapiens
MATAEPSGRALRLSTPGPRPSGARDRAPGAAGPPSGQIGNRALRLGERTPAAVEKRGPYMVTRAPSIQAKLQKHRDLAKAVLRRKGQ

SEQ ID NO: 59152 - protein, 124 aa, Homo sapiens
MPLKTRTALSDDPDSSTSTLGNMLELPGTSSSSTSQELPFCQPKKKSTPLKYEVGDLIWAKFKRRPWWPCRICSDPLINTHSKMKVSNRRPYRQYYVEAFGDPSERAWVAGKAIVMFEGRHQFE

SEQ ID NO: 59153 - protein, 277 aa, Homo sapiens
MWFLTVGDGSTSSDDYDSKKRKQRAGGEPWGAKKPRHDLPPYRVHLTPYTVDSPICDFLELQRRYRSLLVPSDFLSVHLSWLSAFPLSQPFSLHHPSRIQVSSEKEAAPDAGAEPITADSDPAYSSKVLLLSSPGLEELYRCCMLFVDDMAEPRETPEHPLKQIKFLLGRKEEEAVLVGGEWSPSLDGLDPQADPQVLVRTAIRCAQAQTGIDLSGCTKWWRFAEFQYLQPGPPRRLQTVVVYLPDVWTIMPTLEEWEALCQQKAAEAAPPTQEAQG

SEQ ID NO: 59154 - protein, 2439 aa, Homo sapiens
MVQRWLLLSCCGALLSAGLANTSYTSPGLQRLKDSPQTAPDKGQCSTWGAGHFSTFDHHVYDFSGTCNYIFAATCKDAFPTFSVQLRRGPDGSISRIIVELGASVVTVSEAIISVKDIGVISLPYTSNGLQITPFGQSVRLVAKQLELELEVVWGPDSHLMVLVERKYMGQMCGLCGNFDGKVTNEFVSEEGKFLEPHKFAALQKLDDPGEICTFQDIPSTHVRQAQHARICTQLLTLVAPECSVSKEPFVLSCQADVAAAPQPGPQNSSCATLSEYSRQCSMVGQPVRRWRSPGLCSVGQCPANQVYQECGSACVKTCSNPQHSCSSSCTFGCFCPEGTVLNDLSNNHTCVPVTQCPCVLHGAMYAPGEVTIAACQTCRCTLGRWVCTERPCPGHCSLEGGSFVTTFDARPYRFHGTCTYILLQSPQLPEDGALMAVYDKSGVSHSETSLVAVVYLSRQDKIVISQDEVVTNNGEAKWLPYKTRNITVFRQTSTHLQMATSFGLELVVQLRPIFQAYVTVGPQFRGQTRGLCGNFNGDTTDDFTTSMGIAEGTASLFVDSWRAGNCPAALERETDPCSMSQLNKVCAETHCSMLLRTGTVFERCHATVNPAPFYKRCVYQACNYEETFPHICAALGDYVHACSLRGVLLWGWRSSVDNCTIPCTGNTTFSYNSQACERTCLSLSDRATECHHSAVPVDGCNCPDGTYLNQKGECVRKAQCPCILEGYKFILAEQSTVINGITCHCINGRLSCPQRPQMFLASCQAPKTFKSCSQSSENKFGAACAPTCQMLATGVACVPTKCEPGCVCAEGLYENADGQCVPPEECPCEFSGVSYPGGAELHTDCRTCSCSRGRWACQQGTHCPSTCTLYGEGHVITFDGQRFVFDGNCEYILATDVCGVNDSQPTFKILTENVICGNSGVTCSRAIKIFLGGLSVVLADRNYTVTGEEPHVQLGVTPGALSLVVDISIPGRYNLTLIWNRHMTILIRIARASQDPLCGLCGNFNGNMKDDFETRSRYVASSELELVNSWKESPLCGDVSFVTDPCSLNAFRRSWAERKCSVINSQTFATCHSKVYHLPYYEACVRDACGCDSGGDCECLCDAVAAYAQACLDKGVCVDWRTPAFCPIYCGFYNTHTQDGHGEYQYTQEANCTWHYQPCLCPSQPQSVPGSNIEGCYNCSQDEYFDHEEGVCVPCMPPTTPQPPTTPQLPTTGSRPTQVWPMTGTSTTIGLLSSTGPSPSSNHTPASPTQTPLLPATLTSSKPTASSGEPPRPTTAVTPQATSGLPPTATLRSTATKPTVTQATTRATASTASPATTSTAQSTTRTTMTLPTPATSGTSPTLPKSTNQELPGTTATQTTGPRPTPASTTGPTTPQPGQPTRPTATETTQTRTTTEYTTPQTPHTTHSPPTAGSPVPSTGPVTATSFHATTTYPTPSHPETTLPTHVPPFSTSLVTPSTHTVITPTHAQMATSASNHSAPTGTIPPPTTLKATGSTHTAPPITPTTSGTSQAHSSFSTNKTPTSLHSHTSSTHHPEVTPTSTTTITPNPTSTRTRTPVAHTNSATSSRPPPPFTTHSPPTGSSPFSSTGPMTATSFKTTTTYPTPSHPQTTLPTHVPPFSTSLVTPSTHTVITPTHAQMATSASIHSMPTGTIPPPTTLKATGSTHTAPTMTPTTSGTSQALSSLNTAKTSTSLHSHTSSTHHAEATSTSTTNITPNPTSTGTPPMTVTTSGTSQSRSSFSTAKTSTSLHSHTSSTHHPEVTSTSTTSITPNHTSTGTRTPVAHTTSATSSRLPTPFTTHSPPTGTTPISSTGPVTATSFQTTTTYPTPSHPHTTLPTHVPSFSTSLVTPSTHTVIIPTHTQMATSASIHSMPTGTIPPPTTIKATGSTHTAPPMTPTTSGTSQSPSSFSTAKTSTSLPYHTSSTHHPEVTPTSTTNITPKHTSTGTRTPVAHTTSASSSRLPTPFTTHSPPTGSSPFSSTGPMTATSFQTTTTYPTPSHPQTTLPTHVPPFSTSLVTPSTHTVIITTHTQMATSASIHSTPTGTVPPPTTLKATGSTHTAPPMTVTTSGTSQTHSSFSTATASSSFISSSSWLPQNSSSRPPSSPITTQLPHLSSATTPVSTTNQLSSSFSPSPSAPSTVSSYVPSSHSSPQTSSPSVGTSSSFVSAPVHSTTLSSGSHSSLSTHPTTASVSASPLFPSSPAASTTIRATLPHTISSPFTLSALLPISTVTVSPTPSSHLASSTIAFPSTPRTTASTHTAPAFSSQSTTSRSTSLTTRVPTSGFVSLTSGVTGIPTSPVTNLTTRHPGPTLSPTTRFLTSSLTAHGSTPASAPVSSLGTPTPTSPGVCSVREQQEEITFKGCMANVTVTRCEGACISAASFNIITQQVDARCSCCRPLHSYEQQLELPCPDPSTPGRRLVLTLQVFSHCVCSSVACGD

SEQ ID NO: 59155 - protein, 90 aa, Homo sapiens
MDAQCSAKVNARKRRKEAPGPNGATEEDGVPSKVQRCAVSLQPLEATNLLSDSVDLPVLDIHTNDIIRAYGNQLLFLMKLKLTLVSPMSG

SEQ ID NO: 59156 - protein, 182 aa, Homo sapiens
MVPSSPAVEKQVPVEPGPDPELRSWRHLVCYLCFYGFMAQIRPGESFITPYLLGPDKNFTREQVTNEITPVLSYSYLAVLVPVFLLTDYLRYTPVLLLQGLSFVSVWLLLLLGHSVAHMQLMELFYSVTMAARIAYSSYIFSLVRPARYQRVAGYSRAAVLLGVFTSSVLGQLLVTVGRVSF

SEQ ID NO: 59157 - protein, 819 aa, Homo sapiens
ALLQVTISLSKVELSVGESKFFTCTAIGEPESIDWYNPQGEKIISTQRVVVQKEGVRSRLTIYNANIEDAGIYRCQATDAKGQTQEATVVLEIYQKLTFREVVSPQEFKQGEDAEVVCRVSSSPAPAVSWLYHNEEVTTISDNRFAMLANNNLQILNINKSDEGIYRCEGRVEARGEIDFRDIIVIVNVPPAISMPQKSFNATAERGEEMTFSCRASGSPEPAISWFRNGKLIEENEKYILKGSNTELTVRNIINSDGGPYVCRATNKAGEDEKQAFLQVFVQPHIIQLKNETTYENGQVTLVCDAEGEPIPEITWKRAVDGFTFTEGDKSLDGRIEVKGQHGSSSLHIKDVKLSDSGRYDCEAASRIGGHQKSMYLDIEYAPKFISNQTIYYSWEGNPINISCDVKSNPPASIHWRRDKLVLPAKNTTNLKTYSTGRKMILEIAPTSDNDFGRYNCTATNHIGTRFQEYILALADVPSSPYGVKIIELSQTTAKVSFNKPDSHGGVPIHHYQVDVKEVASEIWKIVRSHGVQTMVVLNNLEPNTTYEIRVAAVNGKGQGDYSKIEIFQTLPVREPSPPSIHGQPSSGKSFKLSITKQDDGGAPILEYIVKYRSKDKEDQWLEKKVQGNKDHIILEHLQWTMGYEVQITAANRLGYSEPTVYEFSMPPKPNIIKDTLFNGLGLGAVIGLGVAALLLILVVTDVSCFFIRQCGLLMCITRRMCGKKSGSSGKSKELEEGKAAYLKDGSKEPIVEMRTEDERVTNHEDGSPVNEPNETTPLTEPEKLPLKEEDGKEALNPETIEIKVSNDIIQSKEDDSKA

SEQ ID NO: 59158 - protein, 122 aa, Homo sapiens
SHVSADSNRGYSRGGRKVPNLQESRYREPGTESIGKGSLWCIDPEYRQNLIQALKKTPYHPHPHVFNTPPTCPQAYQSTSGPPIWPGSTFFKRNGALLQDPDIDAASAMMLLNTPPEIQAGC

SEQ ID NO: 59159 - protein, 356 aa, Homo sapiens [sequence omitted]

SEQ ID NO: 59160 - protein, 109 aa, Homo sapiens
AAADSAQWLSVKEETIFLHDGLIRVTDLAELPSEILGAPEAADTDLEILTFETKNPSELAERLRSVCGNQSNAYARLLEYRLNALRGLWNAQRQLALEEQHERESSGGI

SEQ ID NO: 59161 - protein, 82 aa, Homo sapiens
MALSCTLNRYLLLMAQEHLEFRLPEIKSLLLLFGGQFASSQETYGKSPFWILSIPSEDIARNLMKRTVCAKFHFYIRTLHIK

SEQ ID NO: 59162 - protein, 62 aa, Homo sapiens
MPGRSCVALVLLAAAVSCAVAQHAPPWTEDCRKSTYPPSGPTYRGAVPWYTINLDLPPYKRC

SEQ ID NO: 59163 - protein, 105 aa, Homo sapiens
MVGYDPKPDGRNNTKFQVAVAGSVSGLVTRALISPFDVIKIRFQLQHERLSRSDPSAKYHGILQASRQILQEEGPTAFWKGHVPAQILSIGYGAVQFLSFEMLTE

SEQ ID NO: 59164 - protein, 60 aa, Homo sapiens
MAVVATLRLSAQGTVTFEDVAVKFTQEEWNLLSEAQRCLYRDVTLENLALMSSLAGHCDL

SEQ ID NO: 59165 - protein, 126 aa, Homo sapiens
  MOD_RES (1)..(1): Any amino acid
XPLRVHITSLLPTPEDNLEIVLHRWENNSCVEKKVLGEKTENPKKFKINYTVANEATLLDTDYDNFLFLCLQDTTTPIQSMMCQYLARVLVEDDEIMQGFIRAFRPLPRHLWYLLDLKQMEEPCRF

SEQ ID NO: 59166 - protein, 12 aa, Homo sapiens
MALDPYTELRKQ

SEQ ID NO: 59167 - protein, 114 aa, Homo sapiens
MSLWLGAPVPDIPPAQTLRWSCGSQAHRMQAARPREAAAASSERKPGCPTLLGVLQGWGWRLQSPQPCSPGQSPLQNPQRSVHKSGKRGQPPKCWGTSYAACVGTRPRASTTMF

SEQ ID NO: 59168 - protein, 276 aa, Homo sapiens
  MOD_RES (1)..(1): Any amino acid
XAVKRVKQCKDYYEILGVSRGASDEDLKKAYRRLALKFHPDKNHAPGATEAFKAIGTAYAVLSNPEKRKQYDQFGDDKSQAARHGHGHGDFHRGFEADISPEDLFNMFFGGGFPSSNVHVYSNGRMRYTYQQRQDRRDNQGDGGLGVFVQLMPILILILVSALSQLMVSSPPYSLSPRPSVGHIHRRVTDHLGVVYYVGDTFSEEYTGSSLKTVERNVEDDYIANLRNNCWKEKQQKEGLLYRARYFGDTDMYHRAQKMGTPSCSRLSEVQASLHG

SEQ ID NO: 59169 - protein, 589 aa, Homo sapiens
MMQESATETISNSSMNQNGMSTLSSQLDAGSRDGRSSGDTSSEVSTVELLHLQQQQALQAARQLLLQQQTSGLKSPKSSDKQRPLQVPVSVAMMTPQVITPQQMQQILQQQVLSPQQLQALLQQQQAVMLQQQQQQQQQQQQQQQQQQQQQQQQQQQQQQQQQQQQQQQQHPGKQAKEQQQQQQQQQQQLAAQQLVFQQQLLQMQQLQQQQHLLSLQRQGLISIPPGQAALPVQSLPQAGLSPAEIQQLWKEVTGVHSMEDNGIKHGGLDLTTNNSSSTTSSNTSKASPPITHHSIVNGQSSVLSARRDSSSHEETGASHTLYGHGVCKWPGCESICEDFGQFLKHLNNEHALDDRSTAQCRVQMQVVQQLEIQLSKERERLQAMMTHLHMRPSEPKPSPKPLNLVSSVTMSKNMLETSPQSLPQTPTTPTAPVTPITQGPSVITPASVPNVGAIRRRHSDKYNIPMSSEIAPNYEFYKNADVRPPFTYATLIRQAIMESSDRQLTLNEIYSWFTRTFAYFRRNAATWKNAVRHNLSLHKCFVRVENVKGAVWTVDEVEYQKRRSQKITGSPTLVKNIPTSLGYGAALN

SEQ ID NO: 59170 - protein, 458 aa, Homo sapiens
MRWLWPLAVSLAVILAVGLSRVSGGAPLHLGRHRAETQEQQSRSKRGTEDEEAKGVQQYVPEEWAEYPRPIHPAGLQPTKPLVATSPNPGKDGGTPDSGQELRGNLTGAPGQRLQIQNPLYPVTESSYSAYAIMLLALVVFAVGIVGNLSVMCIVWHSYYLKSAWNSILASLALWDFLVLFFCLPIVIFNEITKQRLLGDVSCRAVPFMEVSSLGVTTFSLCALGIDRFHVATSTLPKVRPIERCQSILAKLPAPTMGTLDSCIMKPSASLPESLYSLVMTYQNARMWWYFGCYFCLPILFTVTCQLVTWRVRGPPGRKSECRASKHEQCESQLNSTVVGLTVVYAFCTLPENVCNIVVAYLSTELTRQTLDLLGLINQFSTFFKGAITPVLLLCICRPLGQAFLDCCCCCCCEECGGASEASAANGSDNKLKTEVSSSIYFHKPRESPPLLPLGTPC

SEQ ID NO: 59171 - protein, 312 aa, Homo sapiens
MSMSPTVIILACLGFFLDQSVWAHVGGQDKPFCSAWPSAVVPQGGHVTLRCHYRRGFNIFTLYKKDGVPVPELYNRIFWNSFLISPVTPAHAGTYRCRGFHPHSPTEWSAPSNPLVIMVTGLYEKPSLTARLGPTVRAGENVTLSCSSQSSFDIYHLSREGEAHELRLPAVPSINGTFQADFPLGPATHGETYRCFGSFHGSPYEWSDPSDPLPVSVTGNPSSSWPSPTEPSFKTGIARHLHAVIRYSVAIILFTILPFFLLHRWCSKKKSKPHEAEARELRALCGSRMGARRCCCNEPRACGTQNSEQGGL

SEQ ID NO: 59172 - protein, 319 aa, Homo sapiens
  MOD_RES (1)..(1): Any amino acid
XQLDTGLEYANSYNFAKKENNSPEHLKDEVSIIQSMGYRNRAKRLLQSEPENPSLETSLSVQLSNLGTVRTLRTKQRIQPQKTSVYIELAACEFSETDVTNTEHHQPSNNDLNTTEKRAAERHPEKYQGSSVSNLHVEPCGTNTHASSLQHENSSLLLTKDRMNVEKAEFCNKSKQPGLARSQHNRWAGSKETCNDRRTPSTEKKVDLNADPLCERKEWNKQKLPCSENPRDTEDVPWITLNSSIQKVNEWFSRSDELLGSDDSHDGESESNAKVADVLDVLNEVDEYSGSSEKIDLLASDPHEALICKSERVHSKSVE

SEQ ID NO: 59173 - protein, 716 aa, Homo sapiens
MLMWPQPHLPTHPHLPTHPHLPTHPHLPTHPHLPTHPHLPTHPMMSKETRQSKLAEAKEQLTDHHPQTNPSVGTAASDTKKKKINNGTSPETTTSGGCHSPEDEQKASHQHQEALRRELEAQVHTIRILTCQKTELQMALYYSQHAVKQLEGEARDLISRLHDSWKFAGELEQALSAVTTQKKKADRYIEELTKERDALSLELYRNTITDEELKEKNAKLQEKLQLVESEKSEIQLNVKELKRKLERAKLLLPQQQLQAEADHLGKELQSVSAKLQAQVEENELWNRLNQQQEEKMWRQEEKIQEWEEKIQEQEEKIREQEEKIREQEEKMRRQEEMMWEKEEKMRRQEEMMWEKEEKIRELEEKMHEQEKIREQEEKRQEEEKIREQEKRQEQEAKMWRQEEKIREQEEKIREQEKKMWRQEEKIHEQEKIREEEKRQEQEEMWRQEEKIREQEEIWRQKEKMHEQEEKIRKQEEKVWRQEEKMHDQEEKIREQEEKVWRQEEKIREQEEMWREEEKMHEQEKIWEEEKRQEQEDKMWRQEEKIREQEEKVWRQEEKIREQEEKRQEQEEKMWKQEEKIREQEEKIREQEEKIREQEEKIREQEEMMQEQEEKMGEQEEKMGEQEEKMQEQEEKMRRQEEKIREQEKKIREQEEKIREQEEMMQEQEEKMWEQEEKMCEQEEKMQEQEEKMRRQEEKMWEQEVRLRQQEEKMQEH

SEQ ID NO: 59174 - protein, 10 aa, Homo sapiens
MGQLYEDNHE

SEQ ID NO: 59175 - protein, 209 aa, Homo sapiens
MSSDSEWDRSACSDSKLPSSVRSTLLELFGQIEREFENLYIENLELRREIDTLNERLAAEGQAIDGAELSKGQLKTKASHSTSQLSQKLKTTYKASTSKIVSSFKTTTSRAACQLVKEYIGHRDGIWDVSVAKTQPVVLGTASADHTALLWSIETGKCLVKYAGHVGSVNSIKFHPSEQLALTASGDQTAHIWRYAVQLPTPQPVADTS

SEQ ID NO: 59176 - protein, 44 aa, Homo sapiens
MEADIITNLRCRLKEAEEERLKAAQVMNKKNIPFKEKLNSRVEC

SEQ ID NO: 59177 - protein, 437 aa, Homo sapiens
GDSANLTCRAFFGYSGDVSPLIYWMKGEKFIEDLDENRVWESDIRILKEHLGEQEVSISLIVDSVEEGDLGNYSCYVENGNGRRHASVLLHKRELMYTVELAGGLGAILLLLVCLVTIYKCYKIEIMLFYRNHFGAEELDGDNKDYDAYLSYTKVDPDQWNQETGEEERFALEILPDMLEKHYGYKLFIPDRDLIPTGTYIEDVARCVDQSKRLIIVMTPNYVVRRGWSIFELETRLRNMLVTGEIKVILIECSELRGIMNYQEVEALKHTIKLLTVIKWHGPKCNKLNSKFWKRLQYEMPFKRIEPITHEQALDVSEQGPFGELQTVSAISMAAATSTALATAHPDLRSTFHNTYHSQMRQKHYYRSYEYDVPPTGTLPLTSIGNQHTYCNIPMTLINGQRPQTKSSREQNPDEAHTNSAILPLLPRETSISSVIW

SEQ ID NO: 59178 - protein, 213 aa, Homo sapiens
  MOD_RES (1)..(1): Any amino acid
XEIFFAFGSPIGMFLTVRGLKRIDPNYRFPTCKGFFNIYHPFDPVAYRIEPMVVPGVEFEPMLIPHHKGRKRMHLELREGLTRMSMDLKNNLLGSLRMAWKSFTRAPYPALQASETPEETEAEPESTSEKPSDVNTEETSVAVKEEVLPINVGMLNGGQRIDYVLQEKPIESFNEYLFALQSHLCYWESEDTVLLVLKEIYQTQGIFLDQPLQ

SEQ ID NO: 59179 - protein, 116 aa, Homo sapiens
  MOD_RES (1)..(1): Any amino acid
XPSGYEWGRQNTDKGNNPKGYLPSHYERVQMLLSDRFLGFFMVPAQSSWNYNFMGGGGLLCGSGGPVCLTVSLPPASASRGRSLSPSRQAADIQQFGLFPSVCACVVDLLMACHPE

SEQ ID NO: 59180 - protein, 90 aa, Homo sapiens
MEAVVFVFSLLDCCALIFLSVYFIITLSDLECDYINARSCCSKLNKWVIPELIGHTIVTVLLLMSLHWFIFLLNLPVATWNIYRGSNCPC

SEQ ID NO: 59181 - protein, 55 aa, Homo sapiens
MQAAGPLFRSKDKVEQTPRSQQDPAGPGLPAQSDRLANHQEDDVDLEALVNDMNA

SEQ ID NO: 59182 - protein, 220 aa, Homo sapiens
MKATWIRLLKRAKGGRLKNSDICGSADSYTSRPSDSDVSLEEDREAVRREAERQAQAQLEKAKTKPVAFAVRTNVSYSAAHEDDVPVPGMAISFEAKDFLHVKEKFNNDWWIGRLVKEGCEIGFIPSPVKLENMRLQHEQRAKQGKFYSSKSGGNSSSSLGDIVPSSRKSTPPSSAKQKQKSVQNLQMNKTSGKLQACFGGLLQSTLLRMMWYLPCDQWS

SEQ ID NO: 59183 - protein, 106 aa, Homo sapiens
MADERKDEAKAPHWTSAPLTEASAHSHPPEIKDQGGAGEGLVRSANGFPYREDEEGAFGEHGSQGTYSNTKENGINGELTSADRETAEEVSARIVQVVTAEAVAVL

SEQ ID NO: 59184 - protein, 67 aa, Homo sapiens
MNEVSVIKEGWLHKRGEYIKTWRPRYFLLKSDGSFIGYKERPEAPDQTLPPLNNFSVAECQLMKTER

SEQ ID NO: 59185 - protein, 177 aa, Homo sapiens
MEYLGGGSALDLLKPGPLEETYIATILREILKGLDYLHSERKIHRDIKAANVLLSEQGDVKLADFGVAGQLTDTQIKRNTFVGTPFWMAPEVIKQSAYDFKADIWSLGITAIELAKGEPPNSDLHPMRVLFLIPKNSPPTLEGQHSKPFKEFVEACLNKDPRFRPTAKELLKHKFIT

SEQ ID NO: 59186 - protein, 71 aa, Homo sapiens
MKRSLQALYCQLLSFLLILALTEALAFAIQEPSPRESLQVLPSGTPPGTMVTAPHSSTRHTSVVMLTPNPD

SEQ ID NO: 59187 - protein, 110 aa, Homo sapiens
MDHHIPMHALPEEIQKMLPEEKVCKYCGVSYLILHEFKAMEEKVKAMEKEMKFYQGSVDREKRLQEKLHSLSQELEQYKIDNKSKTERLSMFFFSIIYLVERQLQEINTL

SEQ ID NO: 59188 - protein, 140 aa, Homo sapiens
  MOD_RES (1)..(1): Any amino acid
XSLSMLSTRLTLLLMVATPALMGVGTLMGSGLRKLSRQCQEQIARAMGVADEALGNVRTVRAFAMEQREEERYGAELEACRCRAEELGRGIALFQGLSNIAFNCMVLGTLFIGGSLVAGQQLTGGDLMSFLVASQTVQRL

SEQ ID NO: 59189 - protein, 7 aa, Homo sapiens
MEKAPPQ

SEQ ID NO: 59190 - protein, 17 aa, Homo sapiens
MASACGAPGPGGALGSQ

SEQ ID NO: 59191 - protein, 483 aa, Homo sapiens
METLESELTCPICLELFEDPLLLPCAHSLCFNCAHRILVSHCATNESVESITAFQCPTCRHVITLSQRGLDGLKRNVTLQNIIDRFQKASVSGPNSPSETRRERAFDANTMTSAEKVLCQFCDQDPAQDAVKTCVTCEVSYCDECLKATHPNKKPFTGHRLIEPIPDSHIRGLMCLEHEDEKVNMYCVTDDQLICALCKLVGRHRDHQVAALSERYDKLKQNLESNLTNLIKRNTELETLLAKLIQTCQHVEVNASRQEAKLTEECDLLIEIIQQRRQIIGTKIKEGKVMRLRKLAQQIANCKQCIERSASLISQAEHSLKENDHARFLQTAKNITERVSMATASSQVLIPEINLNDTFDTFALDFSREKKLLECLDYLTAPNPPTIREELCTASYDTITVHWTSDDEFSVVSYELQYTIFTGQANVVSLCNSADSWMIVPNIKQNHYTVHGLQSGTKYIFMVKAINQAGSRSSEPGKLKTNS

SEQ ID NO: 59192 - protein, 151 aa, Homo sapiens
MTTETFVKDIKPGLKNLNLIFIVLETGRVTKTKDGHEVRTCKVADKTGSINISVWDDVGNLIQPGDIIRLTKGYASVFKGCLTLYTGRGGDLQKIGEFCMVYSEVPNFSEPNPEYSTQQAPNKAVQNDSNPSASQPTTGPSAASPASENQN

SEQ ID NO: 59193 - protein, 1021 aa, Homo sapiens
MWRCGGRQGLCVLRRLSGGHAHHRAWRWNSNRACERALQYKLGDKIHGFTVNQVTSVPELFLTAVKLTHDDTGARYLHLAREDTNNLFSVQFRTTPMDSTGVPHILEHTVLCGSQKYPCRDPFFKMLNRSLSTFMNAFTGLSESPLGVFGCHLFPMFTRAGFLEGWRLEHENPSDPQTPLVFKGVVFNEMKGAFTDNERIFSQHLQNRLLPDHTYSVVSGGDPLCIPELTWEQLKQFHATHYHPSNARFFTYGNFPLEQHLKQIHEEALSKFQKIEPSTVVPAQTPWDKPREFQITCGPDSFATDPSKQTTISVSFLLPDITDTFEAFTLSLLSSLLTSGPNSPFYKALIESGLGTDFSPDVGYNGYTREAYFSVGLQGIAEKDIETVRSLIDRTIDEVVEKGFEDDRIEALLHKIEIQMKHQSTSFGLMLTSYIASCWNHDGDPVELLKLGNQLAKFRQCLQENPKFLQEKVKQYFKNNQHKLTLSMRPDDKYHEKQAQVEATKLKQKVEALSPGDRQQIYEKGLELRSQQSKPQDASCLPALKVSDIEPTIPVTELDVVLTAGDIPVQYCAQPTNGMVYFRAFSSLNTLPEELRPYVPLFCSVLTKLGCGLLDYREQAQQIELKTGGMSASPHVLPDDSHMDTYEQGVLFSSLCLDRNLPDMMQLWSEIFNNPCFEEEEHFKVLVKMTAQELANGIPDSGHLYASIRAGRTLTPAGDLQETFSGMDQVRLMKRIAEMTDIKPILRKLPRIKKHLLNGDNMRCSVNATPQQMPQTEKAVEDFLRSIGRSKKERRPVRPHTVEKPVPSSSGGDAHVPHGSQVIRKLVMEPTFKPWQMKTHFLMPFPVNYVGECIRTVPYTDPDHASLKILARLMTAKFLHTEIREKGGAYGGGAKLSHNGIFTLYSYRDPNTIETLQSFGKAVDWAKSGKFTQQDIDEAKLSVFSTVDAPVAPSDKGMDHFLYGLSDEMKQAHREQLFAVSHDKLLAVSDRYLGTGKSTHGLAILGPENPKIAKDPSWIIQ

SEQ ID NO: 59194 - protein, 216 aa, Homo sapiens
MLPQIPFLLLVSLNLVHGVFYAERYQMPTGIKGPLPNTKTQFFIPYTIKSKGIAVRGEQGTPGPPGPAGPRGHPGPSGPPGKPGYGSPGLQGEPGLPGPPGPSAVGKPGVPGLPGKPGERGPYGPKGDVGPAGLPGPRGPPGPPGIPGPAGISVPGKPGQQGPTGAPGPRGFPGEKGAPGVPGMNGQKGEMGYGAPGRPGERGLPGPQGPTGPSGP

SEQ ID NO: 59195 - protein, 248 aa, Homo sapiens
  MOD_RES (1)..(1): Any amino acid
XSKYQCVKLNDGHFMPVLGFGTYAPAEVGLAIRSKIADGSVKREDIFYTSKLWCNSHRPELVRPALERSLKNLQLDYVDLYLIHFPVSVKPGEEVIPKDENGKILFDTVDLCATWEAVEKCKDAGLAKSIGVSNFNRRQLEMILNKPGLKYKPVCNQVECHPYFNQRKLLDFCKSKDIVLVAYSALGSHREEPWVDPNSPVLLEDPVLCALAKKHKRTPALIALRYQLQRGVVVLAKSYNEQRIRQNV

SEQ ID NO: 59196 - protein, 122 aa, Homo sapiens
MAEAAAAAGGTGLGAGASYGSAADRDRDPDPDRAGRRLRVLSGHLLGRPREALSTNECKARRAASAATAAPTATPAAQESGTIPKKRQEVMKWNGWGYNDSKFIFNKKGQIELTGKRALIYS

SEQ ID NO: 59197 - protein, 106 aa, Homo sapiens
MLHFLQIEDLWQPYVELFSLTLKKLVMLKEMDKDLNSVVIAVKLQGSKRILRSNEIVLPASGLVETELQLTFSLQYPHFLKRDANKLQIMLQRRKRYKNRTILGYK

SEQ ID NO: 59198 - protein, 147 aa, Homo sapiens
MAVFRSGLLVLTTPLASLAPRLASILTSAARLVNHTLYVHLQPGMSLEGPAQPQSSPVQATFEVLDFITHLYAGADVHRHLDVRILLTNIRTKSTFLPPLPTSVQNLAHPPEVVLTDFQTLDGSQYNPVKQQLVRYATSCYSCCPRL

SEQ ID NO: 59199 - protein, 204 aa, Homo sapiens
  MOD_RES (1)..(1): Any amino acid
XSDQKAVIHSKSSPEISLRFESGPGAVIHSLLAEKNGFLQCHIENFSTEFLTSSLMNIQHFLEDETVATVMPMKIQVSNTKINLKDDSPRSSTVSLEPAPVTVHIDHLVVERSDDGSFHIRDSHMLNTGNDLKENVKSDSVLLTSGKYDLKKQRSVTQATQTSPGVPWPSQSANFPEFSFDFTREQLNKRFFNQDFGTTKMEEI

SEQ ID NO: 59200 - protein, 147 aa, Homo sapiens
MSVGVSTSAPLSPTSGTSVGMSTFSIMDYVVFVLLLVLSLAIGLYHACRGWGRHTVGELLMADRKMGCLPVALSLLATFQSAVAILGVPSEIYRFGTQYWFLGCCYFLGLLIPAHIFIPVFYRLHLTSAYEYLELRFNKTVRVCGTV

SEQ ID NO: 59201 - protein, 177 aa, Homo sapiens
MGFWCRMSENQEQEEVITVRVQDPRVQNEGSWNSYVDYKIFLHTNSKAFTAKTSCVRRRYREFVWLRKQLQRNAGLVPVPELPGKSTFFGTSDEFIEKRRQGLQHFLEKVLQSVVLLSDSQLHLFLQSQLSVPEIEACVQGRSTMTVSDAILRYAMSNCGWAQEERQSSSHLAKGDQ

SEQ ID NO: 59202 - protein, 171 aa, Homo sapiens
MSSHKGSVVAQGNGAPASNREADTVELAELGPLLEEKGKRVIANPPKAEEEQTCPVPQEEEEEVRVLTLPLQAHHAMEKMEEFVYKVWEGRWRVIPYDVLPDWLKDNDYLLHGHRPPMPSFRACFKSIFRIHTETGNIWTHLLATAHLPLHRLCPGHFCHHCGAVGPVCHS

SEQ ID NO: 59203 - protein, 316 aa, Homo sapiens
MVLQELRDSNSSKFQVSEFILMGFPGIHSWQHWLSLPLALLYLLALSANILILIIINKEAALHQPMYYFLGILAMADIGLATTIMPKILAILWFNAKTISLLECFAQMYAIHCFVAMESSTFVCMAIDRYVAICRPLRYPSIITESFVFKANGFMALRNSLCLISVPLLAAQRHYCSQNQIEHCLCSNLGVTSLSCDDRRINSINQVLLAWTLMGSDLGLIILSYALILYSVLKLNSPEAASKALSTCTSHLILILFFYTVIIVISITRSTGMRVPLIPVLLNVLHNVIPPALNPMVYALKNKELRQGLYKVLRLE

SEQ ID NO: 59204 - protein, 216 aa, Homo sapiens
MKNISRYLTDIKPLPPNIKDRLIKIMSMQGQITDSNISEILHPEVQTLDLRSCDISDAALLHLSNCRKLKKLNLNASKGNRVSVTSEGIKAVASSCSYLHEASLKRCCNLTDEGVVALALNCQLLKIIDLGGCLSITDVSLHALGKNCPFLQCVDFSATQVSDSGVIALVSGPCAKKLEEIHMGHCVNLTDGAVEAVLTYCPQIRILLFHGCPLIT

SEQ ID NO: 59205 - protein, 166 aa, Homo sapiens
MNHIVQTFSPVNSGQPPNYEMLKEEQEVAMLGVPHNPAPPMSTVIHIRSETSVPDHVVWSLFNTLFMNTCCLGFIAFAYSVKGQEDGWRRDRGPGLCLHRQVPEHLGPDFGHLHDHSAHHHPSVGRPGPAIDQEASLRPGALPVTCIPRTLSSIPRPAPRGQELCP

SEQ ID NO: 59206 - protein, 130 aa, Homo sapiens
MTTEEAMPEKAKCPTLEITKQDFFQEAKTLIAQHYEKINENKVQGTSINVFRKKHQKPKSGKYIPLEIDKKVTRDVVQEHRAALRRICFPKELSKSEHLQEPPQRISFKEPHIFSRRERCRPIDLITKGM

SEQ ID NO: 59207 - protein, 84 aa, Homo sapiens
EFRKNLKGVNGGKDFEQDILEDMYHAINLLRTCPVYLEATLKPILQPRQYSIWPIVMVTSCGRAGRISWRPCCSSSEPNYCPRL

SEQ ID NO: 59208 - protein, 576 aa, Homo sapiens
MYDNMSTMVYIKEDKLEKLTQDEIISKTKQVIQGLEALKNEHNSILQSLLETLKCLKKDDESNLVEEKSNMIRKSLEMLELGLSEAQVMMALSNHLNAVESEKQKLRAQVRRLCQENQWLRDELANTQQKLQKSEQSVAQLEEEKKHLEFMNQLKKYDDDISPSEDKDTDSTKEPLDDLFPNDEDDPGQGIQQQHSSAAAAAQQGGYEIPARLRTLHNLVIQYASQGRYEVAVPLCKQALEDLEKTSGHDHPDVATMLNILALVYRDQNKYKDAANLLNDALAIREKTLGKDHPAVAATLNNLAVLYGKRGKYKEAEPLCKRALEIREKVLGKDHPDVAKQLNNLALLCQNQGKYEEVEYYYQRALEIYQTKLGPDDPNVAKTKNNLASCYLKQGKFKQAETLYKEILTRAHEREFGSVDDENKPIWMHAEEREECKGKQKDGTSFGEYGGWYKACKVDSPTVTTTLKNLGALYRRQGKFEAAETLEEAAMRSRKQRSISEIPKKILSANGSNHFPLPGSQGLDNVHKQRVAEVLNDPENMEKRRSRESLNVDVVKYESGPDGGEEMRKMKLGLVN

SEQ ID NO: 59209 - protein, 41 aa, Homo sapiens
QGVSLLPQQSRGRVLVCSPLNLGSPWMEGSLSLPFFFSLFL

SEQ ID NO: 59210 - protein, 90 aa, Homo sapiens
MSAHMSGLEIMDEDQLIKDVLDKFLNCHEQTYDEEFLNTFTHLSQDLLLLPGEVEQDVSTSIPSCIPFVAQPPTCEVKPKPSVKRMDKQT

SEQ ID NO: 59211 - protein, 18 aa, Homo sapiens
MLSRLFRMHGLFVASHPW

SEQ ID NO: 59212 - protein, 113 aa, Homo sapiens
MDEALETQLKTSRGRFSATESLPTLELLSQVDMDCRVHMRPIGLTWVLQLTLAWILLEACGGSRPLQARSQQHHGLAADLGKGKLHLAGDPQASVPKPYLNIQDPSSQGSPLP

SEQ ID NO: 59213 - protein, 317 aa, Homo sapiens
MVLLHVKRGDESQFLLQAPGSTELEELTVQVARVYNGRLKVQRLCSEMEELAEHGIFLPPNMQGLTDDQIEELKLKDEWGEKCVPSGGAVFKKDDIGRRNGQAPNEKMKQVLKKTIEEAKAIISKKQVEAGVCVTMEMVKDALDQLRGAVMIVYPMGLPPYDPIRMEFENKEDLSGTQAGLNVIKEAEAQLWWAAKELRRTKKLSDYVGKNEKTKIIAKIQQALEPAFGKISPLSADEETIPKYAGHKNQSATLLGQRSSSNNSAPPKPMSLKIERISSWKTPPQENRDKNLSRRRQDRRATPTGRPTPCAERRGGV

SEQ ID NO: 59214 - protein, 117 aa, Homo sapiens
MALVRGGWLWRQSSILRRWKRNWFALWLDGTLGYYHDETAQDEEDRVLIHFNVRDIKIGPECHDVQPPEGRSRDGLLTVNLREGGRLHLCAETKDDALAWKTALLEANSTPVRVYSP

SEQ ID NO: 59215 - protein, 1052 aa, Homo sapiens
MLPSSSWGKRKLRGRLGWVRSDARGVMWARQEGLHHPHPHAVIRCPSSSSSSVSCSGDSEEEDMGLLEVSVSDIKPPAPELGPMPEGLSPQQVVRRHILGSIVQSEGSYVESLKRILQDYRNPLMEMEPKALSARKCQVVFFRVKEILHCHSMFQIALSSRVAEWDSTEKIGDLFVASFSKSMVLDVYSDYVNNFTSAMSIIKKACLTKPAFLEFLKRRQVCSPDRVTLYGLMVKPIQRFPQFILLLQDMLKNTPRGHPDRLSLQLALTELETLAEKLNEQKRLADQVAEIQQLTKSVSDRSSLNKLLTSGQRQLLLCETLTETVYGDRGQLIKSKERRVFLLNDMLVCANINFKGQLEISSLVPLGPKYVVKWNTALPQVQVVEVGQDGGTYDKDNVLIQHSGAKKASASGQAQNKVYLGPPRLFQELQDLQKDLAVVEQITLLISTLHGTYQNLNMTVAQDWCLALQRLMRVKEEEIHSANKCRLRLLLPGKPDKSGRPISFMVVFITPNPLSKISWVNRLHLAKIGLREENQPGWLCPDEDKKSKAPFWCPILACCIPAFSSRALSLQLGALVHSPVNCPLLGFSAVSTSLPQGYLWVGGGQEGAGGQVEIFSLNRPSPRTVKSFPLAAPVLCMEYIPELEEEAESRDESPTVADPSATVHPTICLGLQDGSILLYSSVDTGTQCLVSCRSPGLQPVLCLRHSPFHLLAGLQDGTLAAYPRTSGGVLWDLESPPVCLTVGPGPVRTLLSLEDAVWASCGPRVTVLEATTLQPQQSFEAHQDEAVSVTHMVKAGSGVWMAFSSGTSIRLFHTETLEHLQEINIATRTTFLLPGQKHLCVTSLLICQGLLWVGTDQGVIVLLPVPRLEGIPKITGKGMVSLNGHCGPVAFLAVATSILAPDILRSDQEEAEGPRAEEDKPDGQAHEPMPDSHVGRELTRKKGILLQYRLRSTAHLPGPLLSMREPAPADGAALEHSEEDGSIYEMADDPDIWVRSRPCARDAHRKEICSVAIISGGQGYRNFGSALGSSGRQAPCGETDSTLLIWQVPLML

SEQ ID NO: 59216 - protein, 638 aa, Homo sapiens
MKSVHSSPQNTSHTIMTFYPTMEEFADFNTYVAYMESQGAHRAGLAKVIPPKEWKARQMYDDIEDILIATPLQQVTSGQGGVFTQYHKKKKAMRVGQYRHLANSKKYQTPPHQNFADLEQRYWKSHPGNPPIYGADISGSLFEESTKQWNLGHLGTILDLLEQECGVVIEGVNTPYLYFGMWKTTFAWHTEDMDLYSINYLHFGEPKTWYVVPPEHGQRLECLARELFPGNSRGCEGFLRHKVALISPTVLKKNGIPFNRMTQEAGEFMVTFPYGYHAGFNHGFNCAEAINFATPRWIDYGKVASQCSCGEARVTFSMDAFVRILQPESYELWKHRQDLTVVDYMEPRVAESQEPSNWREDIALRRAALGLRHLRNHITSCPTRTVAPRLCYNPKGGGTDAVPGSAIQALETSAWVLPPSTGRWGPCRGCGRGRGRGRGRGRRPRELGTEETTVQSAAKRRLSVGTGSRAPGRKPQLQFADEALTDKPAPLSGGLPHFAKASGCCCAPDLQPLGPPLDPDEPMHPGPCLLSLDSTASSLPLVVPMTPPSVTVPLITLSRDTGGDWKSPVNLAKVVAMDHSYASRVPVPTKFSRISWAPDSSAGAKARQRYATEFGDIFLQCMINPLDPWPLNMVSNVK

SEQ ID NO: 59217 - protein, 65 aa, Homo sapiens
  MOD_RES (1)..(1): Any amino acid
XFDKQVDVSYIAKHYNMSKSKVDNQFYSVEVGDSTFTVLKRYQNLKPIGSGAQGIVWTSEYGWEV

SEQ ID NO: 59218 - protein, 100 aa, Homo sapiens
MGLLECCARCLVGAPFASLVATGLCFFGVALFCGCGHEALTGTEKLIETYFSKNYQDYEYLINVIHAFQYVIYGTASFFFLYGALLLAEGFYTTGAVRQI

SEQ ID NO: 59219 - protein, 414 aa, Homo sapiens
KEENTIILQQLLPLRTKVAKLLGYSTHADFVLEMNTAKSTSRVTAFLDDLSQKLKPLGEAEREFILNLKKKECKDRGFEYDGKINAWDLYYYMTQTEELKYSIDQEFLKEYFPIEVVTEGLLNTYQELLGLSFEQMTDAHVWNKSVTLYTVKDKATGEVLGQFYLDLYPREGKYNHAACFGLQPGCLLPDGSRMMAVAALVVNFSQPVAGRPSLLRHDETDFARFSGTNVETDFVEVPSQMLENWVWDVDSLRRLSKHYKDGSPIADDLLEKLVASRLVNTGLLTLRQIVLSKVDQSLHTNTSLDAASEYAKYCSEILGVAATPGTNMPATFGHLAGGYDGQYYGYLWSEVFSMDMFYSCFKKEGIMNPEVGMKYRNLILKPGGSLDGMDMLHNFLKREPNQKAFLMSRGLHAP

SEQ ID NO: 59220 - protein, 244 aa, Homo sapiens
MIDHLVTMKISHWDGVIRELAARALHNLAQQAPEFSATQVFPRLLSMTLSPDLHMRHGSILACAEVAYALYKLAAQENRPVTDHLDEQAVQGLKQIHQQLYDRQLYRGLGGQLMRQAVCVLIEKLSLSKMPFRGDTVIDGWQWLINDTLRHLHLISSHSRQQMKDAAVSALAALCSEYYMKEPGEADPAIQEELITQYLAELRNPEEMTRCGFSLALGALPGFLLKGRLQQVLTGLRAVTHTSP

SEQ ID NO: 59221 - protein, 115 aa, Homo sapiens
TTLARNCHELEKMDLEECVQITDSTLIQLSIHCPRLQVLSLSHCELITDDGIRHLGNGACAHDQLEVIELDNCPLITDASLEHLKSCHSLERIELYDCQQITRAGIKRLRVKMAT

SEQ ID NO: 59222 - protein, 56 aa, Homo sapiens
MVMEKPSPLLVGREFVRQYYTLLNQAPDMLHRVSPCCPDWSAVVRSGLTATSTSPV

SEQ ID NO: 59223 - protein, 173 aa, Homo sapiens
MGKKGKKEKKGRGAEKTAAKMEKKVSKRSRKEEPGVCRRIRPDLGVECSAAAAHGFPNRGQFYGLPCARHSSLGFTPHEQEDLEALIAHFQTLDAKRTQTVELPCPPPSPRLNASLSVHPEKDELILFGGEYFNGQKTFLYNELYVYNTRKDTWTKVDIPSPPPRRCAHQAVV

SEQ ID NO: 59224 - protein, 111 aa, Homo sapiens
MAATLGPLGSWQQWRRCLSARDGSRMLLLLLLLGSGQGPQQVGAGQTFEYLKREHSLSKPYQAMFPERLGVAGALQNPWTRKEESAWGWLGNLVHKGSDAASGYSPTSQPW

SEQ ID NO: 59225 - protein, 1149 aa, Homo sapiens
MAQFPTPFGGSLDIWAITVEERAKHDQQFHSLKPISGFITGDQARNFFFQSGLPQPVLAQIWALADMNNDGRMDQVEFSIAMKLIKLKLQGYQLPSALPPVMKQQPVAISSAPAFGMGGIASMPPLTAVAPVPMGSIPVVGMSPTLVSSVPTAAVPPLANGAPPVIQPLPAFAHPAATLPKSSSFSRSGPGSQLNTKLQKAQSFDVASVPPVAEWAVPQSSRLKYRQLFNSHDKTMSGHLTGPQARTILMQSSLPQAQLASIWNLSDIDQDGKLTAEEFILAMHLIDVAMSGQPLPPVLPPEYIPPSFRRVRSGSGISVISSTSVDQRLPEEPVLEDEQQQLEKKLPVTFEDKKRENFERGNLELEKRRQALLEQQRKEQERLAQLERAEQERKERERQEQERKRQLELEKQLEKQRELERQREEERRKEIERREAAKRELERQRQLEWERNRRQELLNQRNKEQEDIVVLKAKKKTLEFELEALNDKKHQLEGKLQDIRCRLTTQRQEIESTNKSRELRIAEITHLQQQLQESQQMLGRLIPEKQILNDQLKQVQQNSLHRDSLVTLKRALEAKELARQHLRDQLDEVEKETRSKLQEIDIFNNQLKELREIHNKQQLQKQKSMEAERLKQKEQERKIIELEKQKEEAQRRAQERDKQWLEHVQQEDEHQRPRKLHEEEKLKREESVKKKDGEEKGKQEAQDKLGRLFHQHQEPAKPAVQAPWSTAEKGPLTISAQENVKVVYYRALYPFESRSHDEITIQPGDIVMVKGEWVDESQTGEPGWLGGELKGKTGWFPANYAEKIPENEVPAPVKPVTDSTSAPAPKLALRETPAPLAVTSSEPSTTPNNWADFSSTWPTSTNEKPETDNWDAWAAQPSLTVPSAGQLRQRSAFTPATATGSSPSPVLGQGEKVEGLQAQALYPWRAKKDNHLNFNKNDVITVLEQQDMWWFGEVQGQKGWFPKSYVKLISGPIRKSTSMDSGSSESPASLKRVASPAAKPVVSGEEIAQVIASYTATGPEQLTLAPGQLILIRKKNPGGWWEGELQARGKKRQIGWFPANYVKLLSPGTSKITPTEPPKSTALAAVCQVIGMYDYTAQNDDELAFNKGQIINVLNKEDPDWWKGEVNGQVGLFPSNYVKLTTDMDPSQQ

SEQ ID NO: 59226 - protein, 50 aa, Homo sapiens
MLIHQPFLHRQYLPMPAFMEHLQRRLNQDGWINSLLKGNLILNKPKQITS

SEQ ID NO: 59227 - protein, 70 aa, Homo sapiens
MASPFSGALQLTDLDDFIGPSQIQAHVLSMGSATLVSVVVTPPVHVKGEGVHQACQSGKKGGKWRGQDSH

SEQ ID NO: 59228 - protein, 13 aa, Homo sapiens
MDFNGLADPYVKL

SEQ ID NO: 59229 - protein, 86 aa, Homo sapiens
MWLSQRVLPPLPFPADAWEPSEVLGIFSQHRSHATTSESLTWTSTGTSDARTGVILQDAGIGFILVIDRRRDKWTSVKASVLRIAN

SEQ ID NO: 59230 - protein, 1185 aa, Homo sapiens
  MOD_RES (1)..(1): Any amino acid
XSSSSSSSSSSVHEPKMDALIIPVTMEVPCDSRGQRMWWAFLASSMVTFFGGLFIILLWRTLKYLWTVCCHCGGKTKEAQKINNGSSQADGTLKPVDEKEEAVAAEVGWMTSVKDWAGVMISAQTLTGRVLVVLVFALSIGALVIYFIDSSNPIESCQNFYKDFTLQIDMAFNVFFLLYFGLRFIAANDKLWFWLEVNSVVDFFTVPPVFVSVYLNRSWLGLRFLRALRLIQFSEILQFLNILKTSNSIKLVNLLSIFISTWLTAAGFIHLVENSGDPWENFQNNQALTYWECVYLLMVTMSTVGYGDVYAKTTLGRLFMVFFILGGLAMFASYVPEIIELIGNRKKYGGSYSAVSGRKHIVVCGHITLESVSNFLKDFLHKDRDDVNVEIVFLHNISPNLELEALFKRHFTQVEFYQGSVLNPHDLARVKIESADACLILANKYCADPDAEDASNIMRVISIKNYHPKIRIITQMLQYHNKAHLLNIPSWNWKEGDDAICLAELKLGFIAQSCLAQGLSTMLANLFSMRSFIKIEEDTWQKYYLEGVSNEMYTEYLSSAFVGLSFPTVCELCFVKLKLLMIAIEYKSANRESRILINPGNHLKIQEGTLGFFIASDAKEVKRAFFYCKACHDDITDPKRIKKCGCKRLIYFEDEQPSTLSPKKKQRNGGMRNSPNTSPKLMRHDPLLIPGNDQIDNMDSNVKKYDSTGMFHWCAPKEIEKVILTRSEAAMTVLSGHVVVCIFGDVSSALIGLRNLVMPLRASNFHYHELKHIVFVGSIEYLKREWETLHNFPKVSILPGTPLSRADLRAVNINLCDMCVILSANQNNIDDTSLQDKECILASLNIKSMQFDDSIGVLQANSQGFTPPGMDRSSPDNSPVHGMLRQPSITTGVNIPIITELVNDTNVQFLDQDDDDDPDTELYLTQPFACGTAFAVSVLDSLMSATYFNDNILTLIRTLVTGGATPELEALIAEENALRGGYSTPQTLANRDRCRVAQLALLDGPFADLGDGGCYGDLFCKALKTYNMLCFGIYRLRDAHLSTPSQCTKRYVITNPPYEFELVPTDLIFCLMQFDHNAGQSRASLSHSSHSSQSSSKKSSSVHSIPSTANRQNRPKSRESRDKQNATRMNRMGQAEKKWFTDEPDNAYPRNIQIKPMSTHMANQINQYKSTSSLIPPIREVEDEC

SEQ ID NO: 59231 - protein, 360 aa, Homo sapiens
LPLPGLPAEGSPPPKTYVSCLKSLLSSPTKDSKPNISAHHISLASCLALTTPSEELPDRAGILVEDATCVTCMSDSSQSVPLVASPGHCSDSFSTSGLEDSCTETSSSPRDKAITPPLPESTVPFSNGVLKGELSDLGAEDGWTMDAEADHSGGSDRNSMDSVDSCCSLKKTESFQNAQAGSNPKKVDLIIWEIEVPKHLVGRLIGKQGRYVSFLKQTSGAKIYISTLPYTQSVQICHIEGSQHHVDKALNLIGKKFKELNLTNIYAPPLPSLALPSLPMTSWLMLPDGITVEVIVVNQVNAGHLFVQQHTHPTFHALRSLDQQMYLCYSQPGIPTLPTPVESLTLSPCRFREQKSFWTV

SEQ ID NO: 59232 - protein, 1428 aa, Homo sapiens
MSTPTDPGAMPHPGPSPGPGPSPGPILGPSPGPGPSPGSVHSMMGPSPGPPSVSHPMPTMGSTDFPQEGMHQMHKPIDGIHDKGIVEDIHCGSMKGTGMRPPHPGMGPPQSPMDQHSQGYMSPHPSPLGAPEHVSSPMSGGGPTPPQMPPSQPGALIPGDPQAMSQPNRGPSPFSPVQLHQLRAQILAYKMLARGQPLPETLQLAVQGKRTLPGLQQQQQQQQQQQQQQQQQQQQQQQPQQQPPQPQTQQQQQPALVNYNRPSGPGPELSGPSTPQKLPVPAPGGRPSPAPPAAAQPPAAAVPGPSVPQPAPGQPSPVLQLQQKQSRISPIQKPQGLDPVEILQEREYRLQARIAHRIQELENLPGSLPPDLRTKATVELKALRLLNFQRQLRQEVVACMRRDTTLETALNSKAYKRSKRQTLREARMTEKLEKQQKIEQERKRRQKHQEYLNSILQHAKDFKEYHRSVAGKIQKLSKAVATWHANTEREQKKETERIEKERMRRLMAEDEEGYRKLIDQKKDRRLAYLLQQTDEYVANLTNLVWEHKQAQAAKEKKKRRRRKKKAEENAEGGESALGPDGEPIDESSQMSDLPVKVTHTETGKVLFGPEAPKASQLDAWLEMNPGYEVAPRSDSEESDSDYEEEDEEEESSRQETEEKILLDPNSEEVSEKDAKQIIETAKQDVDDEYSMQYSARGSQSYYTVAHAISERVEKQSALLINGTLKHYQLQGLEWMVSLYNNNLNGILADEMGLGKTIQTIALITYLMEHKRLNGPYLIIVPLSTLSNWTYEFDKWAPSVVKISYKGTPAMRRSLVPQLRSGKFNVLLTTYEYIIKDKHILAKIRWKYMIVDEGHRMKNHHCKLTQVLNTHYVAPRRILLTGTPLQNKLPELWALLNFLLPTIFKSCSTFEQWFNAPFAMTGERVDLNEEETILIIRRLHKVLRPFLLRRLKKEVESQLPEKVEYVIKCDMSALQKILYRHMQAKGILLTDGSEKDKKGKGGAKTLMNTIMQLRKICNHPYMFQHIEESFAEHLGYSNGVINGAELYRASGKFELLDRILPKLRATNHRVLLFCQMTSLMTIMEDYFAFRNFLYLRLDGTTKSEDRAALLKKFNEPGSQYFIFLLSTRAGGLGLNLQAADTVVIFDSDWNPHQDLQAQDRAHRIGQQNEVRVLRLCTVNSVEEKILAAAKYKLNVDQKVIQAGMFDQKSSSHERRAFLQAILEHEEENEEEDEVPDDETLNQMIARREEEFDLFMRMDMDRRREDARNPKRKPRLMEEDELPSWIIKDDAEVERLTCEEEEEKIFGRGSRQRRDVDYSDALTEKQWLRAIEDGNLEEMEEEVRLKKRKRRRNVDKDPAKEDVEKAKKRRGRPPAEKLSPNPPKLTKQMNAIIDTVINYKDRCNVEKVPSNSQLEIEGNRKGFVIISTGA

SEQ ID NO: 59233 - protein, 223 aa, Homo sapiens
MVWKVAVFLSVALGIGAVPIDDPEDGGKHWVVIVAGSNGWYNYRHQADACHAYQIIHRNGIPDEQIVVMMYDDIAYSEDNPTPGIVINRPNGTDVYQGVPKDYTGEDVTPQNFLAVLRGDAEAVKGIGSGKVLKSGPQDHVFIYFTDHGSTGILVFPNEDLHVKDLNETIHYMYKHKMYRKMVFYIEACESGSMMNHLPDNINGRWLGRRPRPGLASRLLRHR

SEQ ID NO: 59234 - protein, 75 aa, Homo sapiens
MREIVLTQIGQCGNQIGAKVAGTCPALCSWIWSRAPWTLCARGPSGRSSGQTTSSSVSVGPETTGPRDTTPKARS

SEQ ID NO: 59235 - protein, 224 aa, Homo sapiens
MSWKKALRIPGGLRAATVTLMLSMLSTPVAEGRDSPEDFVYQFKGMCYFTNGTERVRLVSRSIYNREEIVRFDSDVGEFRAVTLLGLPAAEYWNSQKDILERKRAAVDRVCRHNYQLELRTTLQRRVEPTVTISPSRTEALNHHNLLVCSVTDFYPAQIKVRWFRNGQEETAGVVSTPLIRNGDWTFQILVMLEMTPQRGDVYTCHVEHPSLQSPITVEWRLLH

SEQ ID NO: 59236 - protein, 39 aa, Homo sapiens
MLGAVEGPRWKQAEDIRDIYDFRDVLGTLSPGGGKDDRH

SEQ ID NO: 59237 - protein, 150 aa, Homo sapiens
MSQWYELQQLDSKFLEQVHQLYDDSFPMEIRQYLAQWLEKQDWEHAANDVSFATIRFHDLLSQLDDQYSRFSLENNFLLQHNIRKSKRNLQDNFQEDPIQMSMIIYSCLKEERKILENAQRFNQAQSGNIQSTVMLDKQKELDSKVRNVK

SEQ ID NO: 59238 - protein, 177 aa, Homo sapiens
MACLSPSQLQKFQQDGFLVLEGFLSAEECVAMQQRIGEIVAEMDVPLHCRTEFSTQEEEQLRAQGSTDYFLSSGDKIRFFFEKGVFDEKGNFLVPPEKSINKIGHALHAHDPVFKSITHSFKVQTLARSLGLQMPVVVQSMYIFKQPHFGGEVSPHQDASFLYTEPLGRVLGVWIAV

SEQ ID NO: 59239 - protein, 116 aa, Homo sapiens
MFQTAWRQEPVTFEDVAVYFTQNEWASLDSVQRALYREVMLENYANVASLAFPFTTPVLVSQLEQGELPWGLDPWEPMGREALRGICPGDEARTEKEGLTPKDHVSKETESFRLMV

SEQ ID NO: 59240 - protein, 112 aa, Homo sapiens
MGSKGVYQYHWQSHNVKHSGVDDMVLLSKITENSIVENLKKRYMDDYIFTYIGSVLISVNPFKQMPYFGEKEIEMYQGAAQYENPPHIYALADNMYRNMIIDRENQCVIIST

SEQ ID NO: 59241 - protein, 82 aa, Homo sapiens
  MOD_RES (1)..(1): Any amino acid
XTLMDALSVAAVPHSSTYVPVLDKHVVSKVFDECFPDQPQIGHLGNEVFPLAHVCNDTNKMTLINPQGAKLNIYKRKVEQAI

SEQ ID NO: 59242 - protein, 161 aa, Homo sapiens
MAAATGAVAASAASGQAEGKKITDLRVIDLKSELKRRNLDITGVKTVLISRLKQAIEEEGGDPDNIELTVSTDTPNKKPTKGKGKKHEADELSGDASVEDDAFIKEIEAQEGEDDTFLTAQDGEEEENEKEGSLAEADHTAHEEMEAHTTVKEAEDDNISV

SEQ ID NO: 59243 - protein, 209 aa, Homo sapiens
MCTHYTQIVWATTNKIGCAVNTCRKMTVWGEVWENAVYFVCNYSPKGNWIGEAPYKNGRPCSECPPSYGGSCRNNLCYREETYTPKPETDEMNEVETAPIPEENHVWLQPRVMRPTKPKKTSAVNYMTQVVRCDTKMKDRCKGSTCNRYQCPAGCLNHKAKIFGTLFYESSSSICRAAIHYGILDDKGGLVDITRNGKVPFFVKSERHG

SEQ ID NO: 59244 - protein, 565 aa, Homo sapiens
MRKKDKQSIRDVRDIFGVSESPPRDTCGNHTNQLDGTKEERELPRVIKTNDASLNSTTLSDASQDKEGSFAVPRSDSVAILETIPVLPVHSNGSPEPGQPVQNAISDDDFLEKNIPPEAEELSFEVSYSEMVTEALKRNKLKKSEIKKEDYVLTKFNVQKTRFGLTEAGDLSAEDMKKIRHLSLIELTAFFDAFGIQLKRNKTEKVKGRDNGIFGVPLTVLLDGDRKKDPGVKVPLVLQKFFEKVEESGLESEGIFRLSGCTAKVKQYREELDAKFNADKFKWDKMCHREAAVMLKAFFRELPTSLFPVEYIPAFISLMERGPHVKVQFQALHLMVMALPDANRDAAQALMTFFNKVIANESKNRMSLWNISTVMAPNLFFSRSKHSDYEELLLANTAAHIIRLMLKYQKILWKVPSFLITQVRRMNEATMLLKKQLPSVRKLLRRKTLERETASPKTSKVLQKSPSARRMSDVPEGVIRVHAPLLSKVSMAIQLNNQTKAKDILAKFQYENSHGSSECIKIQNQRLYEIGGNIGEHCLDPDAYILDVYRINPQAEWVIKPQQSS

SEQ ID NO: 59245 - protein, 349 aa, Homo sapiens
  MOD_RES (1)..(1): Any amino acid
XLYKNRLGSGGRGRCIKQGENWYSPTEFEAMAGRASSKDWKRSIRYAGRPLQCLIQDGILNPHAASCTCAACCDDMTLSGPVRLFVPYKRRKKENELPTTPVKKDSPKNITLLPATAATTFTVTPSGQITTSGALTFDRASTVEATAVISESPAQGDVFAGATVQEASVQPPCRASHPEPHYPGYQDSCQIAPFPEAALPTSHPKIVLTSLPALAVPPPTPTKAAPPALVNGLELSEPRSWLYLEEMVNSLLNTAQQLKTLFEQAKHASTYREAATNQAKIHADAERKEQSCVNCGREAMSECTGCHKVNYCSTFCQRKRWSLTMLTSLVSISWLRAILPCQPPKVLGL

SEQ ID NO: 59246 - protein, 289 aa, Homo sapiens
MACAGLLTVCLLRPPAPQPQPQTPRHPQLAPDPGPAGHTLFQDVFRRADKNDDGKLSFEEFQNYFADGVLSLGELQELFSGIDGHLTDNLETEKLCDYFSEHLGVYRPVLAALESLNRAVLAAMDATKLEYERASKVDQFVTRFLLRETVSQLQALQSSLEGASDTLEAQAHGWRSDAESVEAQSRLCGSRRAGRRALRSVSRSSTWSPGSSDTGRSSEAEMQWRLQVNRLQELIDQLECKHILMAQRQVQVAEEGLQDFHRALRCYVDFTGAQSHCLHVSAQKMLDGA

SEQ ID NO: 59247 - protein, 165 aa, Homo sapiens
MLRRRGSPGMGVHVGAALGALWFCLTGALEVQVPEDPVVALVGTDATLCCSFSPEPGFSLAQLNLIWQLTDTKQLVHSFAEGQDQGSAYANRTALFPDLLAQGNASLRLQRVRVADEGSFTCFVSIRDFGSAAVSLQVAAPYSKPSMTLEPNKDLRPGDTVTITC

SEQ ID NO: 59248 - protein, 549 aa, Homo sapiens
MVCRPVFPCRRRFCPRPFLVGLVVAICLFYQTLTLRGSRKLTAAAPGAVPHTSTETQASRCKKGFSQDKQCFLLSGNAQETRKVKESMETHFGSHGRRAILYRPPFYSKTELQLHQHILTQHGYTVVIAEERLNAGLGPGLLEQGDLGSWDLLICLSSKKAEGTPCISKEVMCQLGLHQKANRLPEIQQPLCRKEGLCQIVRRFPELQLPVSPSVCLDQGMQLKPSTSSHLLKTVKPRVWKPGDWSREQLNETTVLAPHETIFRAEDLSVILKAYVLVTSLTPLRAFIHSTGTVWNPPKKKRFTVKLQTFFETFLRASSPQQAFDIMKEAIGKLLLAAEVFSETSTLGPKTFHRCRFCFQLLTFDIGYGSFMYPVVLQVHEHLNFQDYDNMDFEDQNTEEFLLNDTFNFLFPNESSLSIFSEIFQRLYRSDVFKGENYQKELNQCLSLEEINSIMTFIKELGSLGQFQLLFPSTTPGIQSLMHEFYDVANPVGNPGSVLTQYWSLLNVFEQFQFMNKKTQPHPLEWNSFTEDKNIEKPQVPFDAIENKK

SEQ ID NO: 59249 - protein, 237 aa, Homo sapiens
MLVRLVSNFQPQGRILASPVRVPSSHTGAMEVAEPSSPTEEEEEEEEHSAEPRPRTRSNPEGAEDRAVGAQASVGSRSEGEGEAASADDGSLNTSGAGPKSWQVPPPAPEVQIRTPRVNCPEKVIICLDLSEEMSLPKLESFNGSKTNALNVSQKMIEMFVRTKHKIDKSHEFALVVVNDDTAWLSGLTSDPRELCSCLYDLETASCSTFNLEGLFSLIQQKTELPVTENVQTIPPP

SEQ ID NO: 59250 - protein, 133 aa, Homo sapiens
MPPSKPHPPVVGKVTHHSIELYWDLEKKAKRQGPQEQWFRFSIEEEDPKMHTYGIIYTGYATKHVVEGLEPRTLYRFRLKVTSPSGECEYSPLVSVSTTSSIWLGGEPISSEHLHRAVSVNDEDLLVRILQGG

SEQ ID NO: 59251 - protein, 269 aa, Homo sapiens
MAPEENAGTELLLQSFERRFLAARTLRSFPWQSLEAKLRDSSDSELLRDILHKPSGGSVTLSESTAIISYGTTGLVTWDAALYLAEWAIENPAVFTNRTVLELGSGAGLTGLAICKMCRPRAYIFSDCHSRVLEQLRGNVLLNGLSLEADITAKLDSPRVTVAQLDWDVATVHQLSAFQPDVVIAADVLYCPEAIMSLVGVLRRLAACREHQRAPEVYVAFTVRNPETCQLFTTELGRAGIRWEVEPRHEQKLFPYEEHLEMAMLNLTL

SEQ ID NO: 59252 - protein, 441 aa, Homo sapiens
MDFRTACEETKTGICLLQDGNQEPFKVRLHLAKDILMIQEQDVICVSGEPFYSGERTVTIRRQTVGGFGLSIKGGAEHNIPVVVSKISKEQRAELSGLLFIGDAILQINGINVRKCRHEEVVQVLRNAGEEVTLTVSFLKRAPAFLKLPLNEDCACAPSDQSSGTSSPLCDSGLHLNYHPNNTDTLSCSSWPTSPGLRWEKRWCDLRLIPLLHSRFSQYVPGTDLSRQNAFQVIAVDGVCTGIIQCLSAEDCVDWLQAIATNISNLTKHNDSDLLDRRKQCFTVQSESGEDLYFSVELESDLAQWERAFQTATFLEVERIQCKTYACVLESHLMGLTIDFSTGFICFDAATKAVLWRYKFSQLKGSSDDGKSKIKFLFQNPDTKQIEAKELEFSNLFAVLHCIHSFFAAKVACLDPLFLGNQATASTAASSATTSKAKYTT

SEQ ID NO: 59253 - protein, 160 aa, Homo sapiens
MEKQPQNSRRGLAPREVPPAVGLLLIMALMNTLLYLCLDHFFIAPRQSTVDPTHCPYGHFRIGQMKNCSPWLSCEELRTEVRQLKRVGEGAVKRMEFHSCSPRLECNGVILALCNLHLLGFKLLFCLSLLSSWDYRHAPPCPANFVFLVEVLGFRFRHVG

SEQ ID NO: 59254 - protein, 898 aa, Homo sapiens
SAHHTEVLPTAQRLADEILLLGSEINLVNGAPDPTAGAGIEDANCWHLDEEQIQEQVKQLLSNGGYYGASQQLRSMFSKVREMLRMRDSNGARMLILMTEQFLQDTRLALWRQQGAGMTDKCRQLWDELGALWVCVVLSPHCKPEERAGWLQLLSRWDKLDVCPLEEGNYSFDGPSLQPTMAPAPGSEEEEEVAATSPRHTVFGRALLAGELHWNDAYLQRILASDSYGPSLTGSVGGDKPTFDPQGRPLWLGEPFPTACARVDTLRAHGYPRQALRLASAIINTLRLQQRHQLESYKQQKKELLQKGSTCITNTEGWVGHPLDPIGCLCRALLEACRLEEETLTLYPDSGPEKRKVAYQHVPVPGSPGESYLVLALEVALLGLGQQRALPEGLYAQDKVVRNEEQLLALLEEVELDERLVQVLRKQAGLLLEGGPFSGFGEVLFRESVPMHTCARYLFTALLPHDPDLAYRLALRAMRLPILETAFPAGEPHPSPLDSIMSNRFPRWFILGHLETRQCELASTMLTAAKGDPKWLHTVLGSIQQNIHSPALLFKLAQDACKTATPVSAPPDTTLLGIALELGLQVMRMTLNVMTWRRREMVRWLVSCATEIGPQALMNIMQNWYSLFTPVEAATIVAVTGTTHATLLRLQLDTSRREELWACARTLALQCAMKDPQNCALPALTLCEKNHSAFEAAYQIVLDAAAGGLGHAHLFTVARYMEHRGLPLRAYKLATLALAQLSIAFNQDSHPAVNDVLWACSLSHSLGRHELSAIVPLIIRSIHCAPMLSDILRRWTLSAPGLGPLGARRAAKPLGADRAPLCQLLDAAVTAYITTSHSRLTHISPRHYGDFIEFLGKARETFLLAPDGHLQFSQFLENLKQTYKGKKKLMLLVRERFG

SEQ ID NO: 59255 - protein, 610 aa, Homo sapiens
MGDVVEKSLEGPLAPSTDEPSQKTGDLVEILNGEKVKFDDAGLSLILQNGLETLRMENALTDVILCVDIQEFSCHRVVLAAASNYFRAMFCNDLKEKYEKRIIIKGVDAETMHTLLDYTYTSKALITKQNVQRVLEAANLFQFLRMVDACASFLTEALNPENCVGILRLADTHSLDSLKKQVQSYIIQNFVQILNSEEFLDLPVDTLHHILKSDDLYVTEEAQVFETVMSWVRHKPSERLCLLPYVLENVRLPLLDPWYFVETVEADPLIRQCPEVFPLLQEARMYHLSGNEIISERTKPRMHEFQSEVFMIIGGCTKDERFVAEVTCLDPLRRSRLEVAKLPLTEHELESENKKWVEFACVTLKNEVYISGGKETQHDVWKYNSSINKWIQIEYLNIGRWRHKMVVLGGKVYVIGGFDGLQRINNVETYDPFHNCWSEAAPLLVHVSSFAATSHKKKLYVIGGGPNGKLATDKTQCYDPSTNKWSLKAAMPVEAKCINAVSFRDRIYVVGGAMRALYAYSPLEDSWCLVTQLSHERASCGIAPCNNRLYITGGRDEKNEVIATVLCWDPEAQKLTEECVLPRGVSHHGSVTIRKSYTHIRRIVPGAVSV

SEQ ID NO: 59256 - protein, 110 aa, Homo sapiens
MAGGMKVAVSPAVGPGPWGSGVGGGGTVRLLLILSGCLVYGTAETDVNVVMLQESQVCEKRASQQFCYTNVLIPKWHDIWTRIQIRVNSSRLVRVTQVENEEKLKELEQI

SEQ ID NO: 59257 - protein, 183 aa, Homo sapiens
  MOD_RES (1)..(1): Any amino acid
XDSCALGDHGCEHSCVSSEDSFVCQCFEGYILREDGKTCRRKDVCQAIDHGCEHICVNSDDSYTCECLEGFRLAEDGKRCRKCTEGPIDLVFVIDGSKSLGEENFEVVKQFVTGIIDSLTISPKAARVGLLQYSTQVHTEFTLRNFNSAKDMKKAVAHMKYMGKGSMTGLALKHMFERSFTQG

SEQ ID NO: 59258 - protein, 108 aa, Homo sapiens
MGARLGRRAGPEAGSEAGAAAGCGPAPYERRVRWLREIQSTLRERRPERARQLLRLLRQDLGLERTLLPDILYRDVAFLNPVDPISHDLLVNLARDLQCPKKLPRTPC

SEQ ID NO: 59259 - protein, 332 aa, Homo sapiens
  MOD_RES (1)..(1): Any amino acid
XGLLGALHLVMTLVVAAARAEKEAFVQSESIIEVLRFDDGGLLQTETTLGLSSYQQKSISLYRGNCRPIRFEPPMLDFHEQPVGMPKMEKVYLHNPSSEETITLVSISATTSHFHASFFQNRKILPGGNTSFDVVFLARVVGNVENTLFINTSNHGVFTYQVFGVGVPNPYRLRPFLGARVPVNSSFSPIINIHNPHSEPLQVVEMYSSGGDLHLELPTGQQGGTRKLWEIPPYETKGVMRASFSSREADNHTAFIRIKTNASDSTEFIILPVEVEVTTAPGIYSSTEMLDFGTLRTQDLPKVLNLHLLNSGTKDVPITHRRQKSHLSFLGK

SEQ ID NO: 59260 - protein, 62 aa, Homo sapiens
MMGRSPGFAMQHIVGVPHVLVRRGLLGRDLFMTRTLCSPGPSQPGEKRPEEVALGLHHRLPA

SEQ ID NO: 59261 - protein, 144 aa, Homo sapiens
ALEMDRKSVEGRPMFVSPCVDKSKNPDFKVFRYSTSLEKHKLFISGLPFSCTKEELEEICKAHGTVKDLRLVTNRAGKPKGLAYVEYENESQASQAVMKMDGMTIKENIIKVAISNPPQRKVPEKPETRKAPGGPMLLPQTYGA

SEQ ID NO: 59262 - protein, 176 aa, Homo sapiens
MSSPTTSSLDTPLPGNGPPQPGAPSSSPTVKEEGPEPWPGGPDPDVPGTDEASSACSTDWVIPDPEEEPERKRKKGPAPKMLGHELCRVCGDKASGFHYNVLSCEGCKGFFRRSVASFLKNRSGRRRFGNSSRSHSHSRSHLWGRRAAAAQPLGLGLPLVDLRQAARAPGKARVSS

SEQ ID NO: 59263 - protein, 403 aa, Homo sapiens
MAPISLSWLLRLATFCHLTVLLAGTSLNSGQHHGVTKCNITCSKMTSKIPVALLIHYQQNQASCGKRAIILETRQHRLFCADPKEQWVKDAMQHLDRQAAALTRNGGTFEKQIGEVKPRTTPAAGGMDESVVLEPEATGESSSLEPTPSSQEAQRALGTSPELPTGVTGSSGTRLPPTPKAQDGGPVGTELFRVPPVSTAATWQSSAPHQPGPSLWAEAKTSEAPSTQDPSTQASTASSPAPEENAPSEGQRVWGQGQSPRPENSLEREEMGPVPAHTDAFQDWGPGSMAHVSVVPVSSEGTPSREPVASGSWTPKAEEPIHATMDPQRLGVLITPVPDAQAATRRQAVGLLAFLGLLFCLGVAMFTYQSLQGCPRKMAGEMAEGLRYIPRSCGSNSYVLVPV

SEQ ID NO: 59264 - protein, 115 aa, Homo sapiens
MGEHGLELASMIPALRELGSATPEEYNTVVQKPRQILCQFIDRILTDVNVVAVELVKKTDSQPTSVMLLDFIQHIMKSSPLMFVNVSGSHEAKGSCIVLVGPTLCSFENGKYGNH

SEQ ID NO: 59265 - protein, 296 aa, Homo sapiens
MADPKYADLPGIARNEPDVYETSDLPEDDQAEFDAEELTSTSVEHIIVNPNAAYDKFKDKRVGTKGLDFSDRIGKTKRTGYESGEYEMLGEGLGVKETPQQKYQRLLHEVQELTTEVEKIKTTVKESATEEKLTPVLLAKQLAALKQQLVASHLEKLLGPDAAINLTDPDGALAKRLLLQLEATKNSKGGSGGKTTGTPPDSSLVTYELHSRPEQDKFSQAAKVAELEKRLTELETAVRCDQDAQNPLSAGLQGACLMVNCRAVASKGERPRPCSFGSSGGSATECPGKGERDCQA

SEQ ID NO: 59266 - protein, 75 aa, Homo sapiens
MSPQKRVKNVQAQNRTSQGSSSFQTTLSAWKVKQDPSNSKNISKHGQNNPVGDYEHADDQAEEDALQMAVGYFEK

SEQ ID NO: 59267 - protein, 714 aa, Homo sapiens
MLGICRGRRKFLAASLSLLCIPAITWIYLFSGSFEDGKPVSLSPLESQAHSPRYTASSQRERESLEVRMREVEEENRALRRQLSLAQGRAPSHRRGNHSKTYSMEEGTGDSENLRAGIVAGNSSECGQQPVVEKCETIHVAIVCAGYNASRDVVTLVKSVLFHRRNPLHFHLIADSIAEQILATLFQTWMVPAVRVDFYNADELKSEVSWIPNKHYSGIYGLMKLVLTKTLPANLERVIVLDTDITFATDIAELWAVFHKFKGQQVLGLVENQSDWYLGNLWKNHRPWPALGRGYNTGVILLLLDKLRKMKWEQMWRLTAERELMGMLSTSLADQVIHWNSPKKLRVKNKHVEFFRNLYLTFLEYDGNLLRRELFGCPSEADVNSENLQKQLSELDEDDLCYEFRRERFTVHRTHLYFLHYEYEPAADSTDVTLVAQLSMDRLQMLEAICKHWEGPISLALYLSDAEAQQFLRYAQGSEVLMSRHNVGYHIVYKEGQFYPVNLLRNVAMKHISTPYMFLSDIDFLPMYGLYEYLRKSVIQLDLANTKKAMIVPAFETLRYRLSFPKSKAELLSMLDMGTLFTFRYHVWTKGHAPTNFAKWRTATTPYRVEWEADFEPYVVVRRDCPEYDRRFVGFGWNKVAHIMELDVQEYEFIVLPNAYMIHMPHAPSFDITKFRSNKQYRICLKTLKEEFQQDMSRRYGFAALKYLTAENNS

SEQ ID NO: 59268 - protein, 67 aa, Homo sapiens
MDLCQKNETDLENAENNEIQFTEETEPTYTCPDGKSEKNHVYCLLDVSDITLEQDEKAKEFIIGTGW

SEQ ID NO: 59269 - protein, 314 aa, Homo sapiens
TLYTPAQTHPEQPGSEASTQPIAGTQTVPQTDEAAQTDSQPLHPSDPTEKQQPKRLHVSNIPFRFRDPDLRQMFGQFGKILDVEIIFNERGSKGFGFVTFETSSDADRAREKLNGTIVEGRKIEVNNATARVMTNKKTGNPYTNGWKLNPVVGAVYGPEFYAVTGFPYPTTGTAVAYRGAHLRGRGRAVYNTFRAAPPPPPIPTYGAALEQTLVKMPVPWAGLAPCPLPPQQTPEPAYPTSPAFPPLSCPFASRVVYQDGFYGAEIYGGYAAYRYAQPAAAAAAYSDSYGRVYAAADPYHHTIGPAATYSIGTM

SEQ ID NO: 59270 - protein, 50 aa, Homo sapiens
MATVTATTKVPEIRDVTRIERIGAHSHIRGLGLDDALEPRQLPDVVEMPW

SEQ ID NO: 59271 - protein, 906 aa, Homo sapiens
MQAAVAVSVPFLLLCVLGTCPPARCGQAGDASLMELEKRKENRFVERQSIVPLRLIYRSGGEDESRHDALDTRVRGDLGGPQLTHVDQASFQVDAFGTSFILDVVLNHDLLSSEYIERHIEHGGKTVEVKGGEHCYYQGHIRGNPDSFVALSTCHGLHGMFYDGNHTYLIEPEENDTTQEDFHFHSVYKSRLFEFSLDDLPSEFQQVNITPSKFILKPRPKRSKRQLRRYPRNVEEETKYIELMIVNDHLMFKKHRLSVVHTNTYAKSVVNMADLIYKDQLKTRIVLVAMETWATDNKFAISENPLITLREFMKYRRDFIKEKSDAVHLFSGSQFESSRSGAAYIGGICSLLKGGGVNEFGKTDLMAVTLAQSLAHNIGIISDKRKLASGECKCEDTWSGCIMGDTGYYLPKKFTQCNIEEYHDFLNSGGGACLFNKPSKLLDPPECGNGFIETGEECDCGTPAECVLEGAECCKKCTLTQDSQCSDGLCCKKCKFQPMGTVCREAVNDCDIRETCSGNSSQCAPNIHKMDGYSCDGVQGICFGGRCKTRDRQCKYIWGQKVTASDKYCYEKLNIEGTEKGNCGKDKDTWIQCNKRDVLCGYLLCTNIGNIPRLGELDGEITSTLVVQQGRTLNCSGGHVKLEEDVDLGYVEDGTPCGPQMMCLEHRCLPVASFNFSTCLSSKEGTICSGNGVCSNELKCVCNRHWIGSDCNTYFPHNDDAKTGITLSGNGVAGTNIIIGIIAGTILVLALILGITAWGYKNYREQRQLPQGDYVKKPGDGDSFYSDIPPGVSTNSASSSKKRSAFLSHFQISTCSITHYSISQNISLFCSRSNGLSHSWSERIPDTKHISDICENGRPRSNSWQGNLGGNKKKIRGKRFRPRSNSTEREPQAPEPGHSLAQTVPS

SEQ ID NO: 59272 - protein, 48 aa, Homo sapiens
MAKLNYVEGDYKEALNIYARVGLDDLPLTAVPPYRLRVIAEAYATKGL

SEQ ID NO: 59273 - protein, 108 aa, Homo sapiens
  MOD_RES (1)..(1): Any amino acid
XLLYLTIIFLHIYKRKNVLKEAYSHNLWDGARKTVATLWDGHAAVWHGYEVHGMEKIPEDGPALIIFYHGAIPIDFYYFMAKIFIHKGRTCRVVADHFVFKIPGLMED

SEQ ID NO: 59274 - protein, 183 aa, Homo sapiens
LASDEITTVRKNLESRGVEVDPSLIKDTWHQVYRRHFLKTALNHCNLCRRGFYYYQRHFVDSELECNDVVLFWRIQRMLAITANTLRQQLTNTEVRRLEKNVKEVLEDFAEDGEKKIKLLTGKRVQLAEDLKKLQGTGLSTVAHACNPSTLGGQDGWKTRNVLFPQLGLNTTHQATTWRRTQH

SEQ ID NO: 59275 - protein, 2431 aa, Homo sapiens
MKGTDSGSCCRRRCDFGCCCRASRRAHYTPYRSGDATRTPQSPRQTPSRERRRPEPAGSWAAAAEEEEAAAAATPWMRDYFAEDDGEMVPRTSHTAAFLSDTKDRGPPVQSQIWRSGEKVPFVQTYSLRAFEKPPQVQTQALRDFEKHLNDLKKENFSLKLRIYFLEERMQQKYEASREDIYKRNIELKVEVESLKRELQDKKQHLDKTWADVENLNSQNEAELRRQFEERQQETEHVYELLENKIQLLQEESRLAKNEAARMAALVEAEKECNLELSEKLKGVTKNWEDVPGDQVKPDQYTEALAQRDKRIEELNQSLAAQERLVEQLSREKQQLLHLLEEPTSMEVQPMTEELLKQQKLNSHETTITQQSVSDSHLAELQEKIQQTEATNKILQEKLNEMSYELKCAQESSQKQDGTIQNLKETLKSRERETEELYQVIEGQNDTMAKLREMLHQSQLGQLHSSEGTSPAQQQVALLDLQSALFCSQLEIQKLQRVVRQKERQLADAKQCVQFVEAAAHESEQQKEASWKHNQELRKALQQLQEELQNKSQQLRAWEAEKYNEIRTQEQNIQHLNHSLSHKEQLLQEFRELLQYRDNSDKTLEANEMLLEKLRQRIHDKAVALERAIDEKFSALEEKEKELRQLRLAVRERDHDLERLRDVLSSNEATMQSMESLLRAKGLEVEQLSTTCQNLQWLKEEMETKFSRWQKEQESIIQQLQTSLHDRNKEVEDLSATLLCKLGPGQSEIAEELCQRLQRKERMLQDLLSDRNKQVLEHEMEIQGLLQSVSTREQESQAAAEKLVQALMERNSELQALRQYLGGRDSLMSQAPISNQQAEVTPTGRLGKQTDQGSMQIPSRDDSTSLTAKEDVSIPRSTLGDLDTVAGLEKELSNAKEELELMAKKERESQMELSALQSMMAVQEEELQVQAADMESLTRNIQIKEDLIKDLQMQLVDPEDIPAMERLTQEVLLLREKVASVESQGQEISGNRRQQLLLMLEGLVDERSRLNEALQAERQLYSSLVKFHAHPESSERDRTLQVELEGAQVLRSRLEEVLGRSLERLNRLETLAAIGGAAAGDDTEDTSTEFTDSIEEEAAHHSHQQLVKVALEKSLATVETQNPSFSPPSPMGGDSNRCLQEEMLHLRAEFHQHLEEKRKAEEELKELKAQIEEAGFSSVSHIRNTMLSLCLENAELKEQMGEAMSDGWEIEEDKEKGEVMVETVVTKEGLSESSLQAEFRKLQGKLKNAHNIINLLKEQLVLSSKEGNSKLTPELLVHLTSTIERINTELVGSPGKHQHQEEGNVTVRPFPRPQSLDLGATFTVDAHQLDNQSQPRDPGPQSAFSLPGSTQHLRSQLSQCKQRYQDLQEKLLLSEATVFAQANELEKYRVMLSESLVKQDSKQIQVDLQDLGYETCGRSENEAEREETTSPECEEHNSLKEMVLMEGLCSEQGRRGSTLASSSERKPLENQLGKQEEFRVYGKSENILVLRKDIKDLKAQLQNANKVIQNLKSRVRSLSVTSDYSSSLERPRKLRAVGTLEGSSPHSVPDEDEGWLSDGTGAFYSPGLQAKKDLESLIQRVSQLEAQLPKNGLEEKLAEELRSASWPGKYDSLIQDQARELSYLRQKIREGRGICYLITRHAKDTVKSFEDLLRSNDIDYYLGQSFREQLAQGSQLTERLTSKLSTKDHKSEKDQAGLEPLALRLSRELQEKEKVIEVLQAKLDARSLTPSSSHALSDSHRSPSSTSFLSDELEACSDMDIVSEYTHYEEKKASPSHSGFHFHSIPKLASLPQAPLPSAPSSFLPFSPTGPLLLGCCETPVVSLAEAQQELQMLQKQLGESASTVPPASTATLLSNDLEADSSYYLNSAQPHSPPRGTIELGRILEPGYLGSSGKWDVMRPQKGSVSGDLSSGSSVYQLNSKPTGADLLEEHLGEIRNLRQRLEESICINDRLREQLEHRLTSTARGRGSTSNFYSQGLESIPQLCNENRVLREDNRRLQAQLSHVSREHSQETESLREALLSSRSHLQELEKELEHQKVERQQLLEDLREKQQEVLHFREERLSLQENDSRLQHKLVLLQQQCEEKQQLFESLQSELQIYEALYGNSKKGLKAYSLDACHQIPLSSDLSHLVAEVRALRGQLEQSIQGNNCLRLQLQQQLESGAGKASLSPSSINQNFPASTDPGNKQLLLQDSAVSPPVRDVGMNSPALVFPSSASSTPGSETPIINRANGLGLDTSPVMKTPPKLEGDATDGSFANKHGRHVIGHIDDYSALRQQIAEGKLLVKKIVSLVRSACSFPGLEAQGTEVLGSKGIHELRSSTSALHHALEESASLLTMFWRAALPSTHIPVLPGKVGESTERELLELRTKVSKQERLLQSTTEHLKNANQQKESMEQFIVSQLTRTHDVLKKARTNLEVKSLRALPCTPAL

SEQ ID NO: 59276 - protein, 53 aa, Homo sapiens
MDFEDDYTHSACRNTYQGFNGMDRDYGPGSYGGLTFKDIYLKILLLSASKAYG

SEQ ID NO: 59277 - protein, 88 aa, Homo sapiens
MLVIPALREAEAGGPLEVRSSRPACSKWLGRKVERARPVARWGCCWSTHLRSMTVPTSGSGAHCSGTSRMVPCPCHSGSSARRSGADS

SEQ ID NO: 59278 - protein, 238 aa, Homo sapiens
PCRPVLTSVALNANFVSWKSRTKYTITPVKMRKSGGRDHTGRIRVHGIGGGHKQRYRMIDFLRFRPEETKSGPFEEKVIQVRYDPCRSADIALVAGGSRKRWIIATENMQAGDTILNSNHIGRMAVAAREGDAHPLGALPVGTLINNVESEPGRGAQYIRAAGTCGVLLRKVNGTAIIQLPSKRQMQVLETCVATVGRVSNVDHNKRVIGKVPGWWENSATGNSGCPWGPAYMPILMS

SEQ ID NO: 59279 - protein, 437 aa, Homo sapiens
MSLFGTTSGFGTSGTSMFGSATTDNHNPMKDIEVTSSPDDSIGCLSFSPPTLPGNFLIAGSWANDVRCWEVQDSGQTIPKAQQMHTGPVLDVCWSDDGSKVFTASCDKTAKMWDLSSNQAIQIAQHDAPVKTIHWIKAPNYSCVMTGSWDKTLKFWDTRSSNPMMVLQLPERCYCADVIYPMAVVATAERGLIVYQLENQPSEFRRIESPLKHQHRCVAIFKDKQNKPTGFALGSIEGRVAIHYINPPNPAKDNFTFKCHRSNGTNTSAPQDIYAVNGIAFHPVHGTLATVGSDGRFSFWDKDARTKLKTSEQLDQPISACCFNHNGNIFAYASSYDWSKVRTPGPALGAPRQQSQALGSEGLGLSCDSSQDSRVSLGRSPSPPCKGKLQDFLKWLWGFSTAFGQNPAHRKCSASVSHYGLLCSWAQKHRQAGGCTL

SEQ ID NO: 59280 - protein, 101 aa, Homo sapiens
MELQTLQEALKVEIQVHQKLVAQMKQDPQNADLKKQLHELQAKITALSEKQKRVVEQLRKNLIVKQEQPDKFQIQPLPQSENKLQTAQQQPLQQLQQQQQY

SEQ ID NO: 59281 - protein, 115 aa, Homo sapiens
MAAETQTLNFGPEWLRALSSGGSITSPPLSPALPKYKLADYRYGREEMLALFLKDNKIPSDLLDKEFLPILQEEPLPPLALVPFTEEEQRNFSMSVNSAAVLRLTGRGGGGTVVG

SEQ ID NO: 59282 - protein, 197 aa, Homo sapiens
  MOD_RES (1)..(1): Any amino acid
XMETGMIYVVQGIYGYHHYMQDRIDDNGWGCAYRSLQTICSWFKHQGYTERSIPTHREIQQALVDAGDKPATFVGSRQWIGSIEVQLVLNQLIGITSKILFVSQGSEIASQGRELANHFQSEGTPVMIGGGVLAHTILGVAWNEITGQIKFLILDPHYTGAEDLQVILEKHLEFEVYKRFFDWCMYLTEYSSNILVL

SEQ ID NO: 59283 - protein, 62 aa, Homo sapiens
KGIGMGMTVPISFAVFPNEDGSLQKKLKVWFRIPNQFQSDPPAPSDKSVKIEEREGITVYSI

SEQ ID NO: 59284 - protein, 68 aa, Homo sapiens
MTHALEWPSLTAQWLPDVTRPEGKDFSIHRLVLGTHTSDEQNHLVIASVQLPNDDAQFDASHYDSEKG

SEQ ID NO: 59285 - protein, 239 aa, Homo sapiens
  MOD_RES (1)..(1): Any amino acid
XKEAAIVDPVQPQKVVDAARKHGVKLTTVLTTHHHWDHAGGNEKLVKLESGLKVYGGDDRIGALTHKITHLSTLQVGSLNVKCLATPCHTSGHICYFVSKPGGSEPPAVFTGDTLFVAGCGKFYEGTADEMCKALLEVLGRLPPDTRVYCGHEYTINNLKFARHVEPGNAAIREKLAWAKEKYSIGEPTVPSTLAEEFTYNPFMRVREKTVQQHAGETDPVTTMRAVRREKDQFKMPRD

SEQ ID NO: 59286 - protein, 122 aa, Homo sapiens
MGTIHLFRKPQRSFFGKLLREFRLVAADRRSWKILLFGVINLICTGFLLMWCSSTNSIALTAYTYLTIFDLFSLMTCLISYWVTLRKPSPVYSFGPAFLCMSCSVSQTTFLHQSEMMLLSRP

SEQ ID NO: 59287 - protein, 136 aa, Homo sapiens
MSDEGSRGSRLPLALPPASQGCSSGGGGGGSSAGGSGNSRPPRNLQGLLQMAITAGSEEPDPPPEPMSEERRQWLQEAMSAAFRGQREEVEQMKSCLRVLSQPMPPTAGEAEQAADQQEREGALELLADLCENMDN

SEQ ID NO: 59288 - protein, 214 aa, Homo sapiens
  MOD_RES (1)..(1): Any amino acid
XRQVMAALVVSGAAEQGGRDGPGRGRAPRGRVANQIPPEILKNPQLQAAIRVLPSNYNFEIPKTIWRIQQAQAKKVALQMPEGLLLFACTIVDILESSHGHLGPRLPGAVRLCGHPDRHYTPPGLSPPHLSPSHCPCPGQHHSVCVDLAGSRPGAESRVSCECPTVQAPVPWRDPGLHIPPTVQRGGGRCVSWRWPLPSGVCHDCQPQCPRLPV

SEQ ID NO: 59289 - protein, 11 aa, Homo sapiens
  MOD_RES (1)..(1): Any amino acid
XLTEQGKKVRY

SEQ ID NO: 59290 - protein, 72 aa, Homo sapiens
MGDREQLLQRARLAEQAERYDDMASAMKAVAGKIPPSVQVEAACLLSQHFGAPPAPTPGCSGIPFCGGDRAE

SEQ ID NO: 59291 - protein, 20 aa, Homo sapiens
IVKSESGYGFNVRGQEPREC

SEQ ID NO: 59292 - protein, 136 aa, Homo sapiens
  MOD_RES (1)..(1): Any amino acid
XEIRKDTLKAILLELECHFTWNLLKEDIDLFEVEDTIGQQLEFLTTKSRLALYNLLAYVKHLKGQNKDALECLEQAEEIIQQEHSDKEEVRSLVTWGNYAWVYYHMDQLEEAQKYTDGTLLQGTNDPNQEGHTQQT

SEQ ID NO: 59293 - protein, 811 aa, Homo sapiens
MQRPSVSRAENYQLLWDTIASLKQCEQAMQHAFIPASPAPIIVNTDTLDTIPYVNGTEIEYEFEEITLERGNSGLGFSIAGGTDNPHIGDDPGIFITKIIPGGAAAEDGRLRVNDCILRVNEVDVSEVSHSKAVEALKEAGSIVRLYVRRRRPILETVVEIKLFKGPKGLGFSIAGGVGNQHIPGDNSIYVTKIIDGGAAQKDGRLQVGDRLLMVNNYSLEEVTHEEAVAILKNTSEVVYLKVGKPTTIYMTDPYGPPDITHSYSPPMENHLLSGNNGTLEYKTSLPPISPGRYSPIPKHMLVDDDYTRPPEPVYSTVNKLCDKPASPRHYSPVECDKSFLLSAPYSHYHLGLLPDSEMTSHSQHSTATRQPSMTLQRAVSLEGEPRKVVLHKGSTGLGFNIVGGEDGEGIFVSFILAGGPADLSGELQRGDQILSVNGIDLRGASHEQAAAALKGAGQTVTIIAQYQPEDYARFEAKIHDLREQMMNHSMSSGSGSLRTNQKRSLYVRAMFDYDKSKDSGLPSQGLSFKYGDILHVINASDDEWWQARRVMLEGDSEEMGVIPSKRRVERKERARLKTVKFNAKPGVIDSKGSFNDKRKKSFIFSRKFPFYKNKEQSEQETSDPERGQEDLILSYEPVTRQEINYTRPVIILGPMKDRINDDLISEFPDKFGSCVPHTTRPKRDYEVDGRDYHFVISREQMEKDIQEHKFIEAGQYNDNLYGTSVQSVRFVAERGKHCILDVSGNAIKRLQVAQLYPIAIFIKPRSLEPLMEMNKRLTEEQAKKTYDRAIKLEQEFGEYFTGKFTFTLVV

SEQ ID NO: 59294 - protein, 850 aa, Homo sapiens
MAERKGTAKVDFLKKIEKEIQQKWDTERVFEVNASNLEKQTSKGKYFVTFPYPYMNGRLHLGHTFSLSKCEFAVGYQRLKGKCCLFPFGLHCTGMPIKACADKLKREIELYGCPPDFPDEEEEEEETSVKTEDIIIKDKAKGKKSKAAAKAGSSKYQWGIMKSLGLSDEEIVKFSEAEHWLDYFPPLAIQDLKRMGLKVDWRRSFITTDVNPYYDSFVRWQFLTLRERNKIKFGKRYTIYSPKDGQPCMDHDRQTGEGVGPQEYTLLKLKVLEPYPSKLSGLKGKNIFLVAATLRPETMFGQTNCWVRPDMKYIGFETVNGDIFICTQKAARNMSYQGFTKDNGVVPVVKELMGEEILGASLSAPLTSYKVIYVLPMLTIKEDKGTGVVTSVPSDSPDDIAALRDLKKKQALRAKYGIRDDMVLPFEPVPVIEIPGFGNLSAVTICDELKIQSQNDREKLAEAKEKIYLKGFYEGIMLVDGFKGQKVQDVKKTIQKKMIDAGDALIYMEPEKQVMSRSSDECVVALCDQWYLDYGEENWKKQTSQCLKNLETFCEETRRNFEATLGWLQEHACSRTYGLGTHLPWDEQWLIESLSDSTIYMAFYTVAHLLQGGNLHGQAESPLGIRPQQMTKEVWDYVFFKEAPFPKTQIAKEKLDQLKQEFEFWYPVDLRVSGKDLVPNHLSYYLYNHVAMWPEQSDKWPTAVRANGHLLLNSEKMSKSTGNFLTLTQAIDKFSADGMRLALADAGDTVEDANFVEAMADAGILRLYTWVEWVKEMVANWDSLRSGPASTFNDRVFARPQKISTVNWLWKGCTENLCSGLLKFRHFSSLHSVHICVSTSGHSWESLTQL

SEQ ID NO: 59295 - protein, 971 aa, Homo sapiens
MGGMGTPGDLHAACPSTTRRDALCLGPEFEFDLRHSAGCPGDLGFFPLDPDTEAGGSGCLPTWLPLRRLARGRLEVTADLAERRRIRSAIRELQRQELEREEEALASKRFRAERQDNKENWLHSQQREAEQRAALARLAGQLESMNDVEELTALLRSAGEYEERKLIRAAIRRVRAQEIEAATLAGRLYSGRPNSGSREDSKGLAAHRLEQCEVPEREEQEQQAEVSKPTPTPEGTSQDVTTVTLLLRAPPGSTSSSPASPSSSPTPASPEPPLEPAEAQCLTAEVPGSPEPPPSPPKTTSPEPQESPTLPSTEGQVVNKLLSGPKETPAAQSPTRGPSDTKRADVAGPRPCQRSLSVLSPRQPAQNRESTPLASGPSSFQRAGSVRDRVHKFTSDSPMAARLQDGTPQAALSPLTPARLLGPSLTSTTPASSSSGSSSRGPSDTSSRFSKEQRGVAQPLAQLRSCPQEEGPRGRGLAARPLENRAGGPVARSEEPGAPLPVAVGTAEPGGSMKTTFTIEIKDGRGQASTGRVLLPTGNQRAELTLGLRAPPTLLSTSSGGKSTITRVNSPGTLARLGSVTHVTSFSHAPPSSRGGCSIKMEAEPAEPLAAAVEAANGAEQTRVNKAPEGRSPLSAEELMTIEDEGVLDKMLDQSTDFEERKLIRAALRELRQRKRDQRDKERERRLQEARGRPGEGRGNTATETTTRHSQRAADGSAVSTVTKTERLVHSNDGTRTARTTTVESSFVRRSENGSGSTMMQTKTFSSSSSSKKMGSIFDREDQASPRAGSLAALEKRQAEKKKELMKAQSLPKTSASQARKAMIEKLEKEGAAGSPGGPRAAVQRSTSFGVPNANSIKQMLLDWCRAKTRGYEHVDIQNFSSSWSDGMAFCALVHNFFPEAFDYGQLSPQNRRQNFEVAFSSAETHADCPQLLDTEDMVRLREPDWKCVYTYIQEFYRCLVQKGLVKTKKS

SEQ ID NO: 59296 - protein, 1100 aa, Homo sapiens
MEPNDSTSTAVEEPDSLEVLVKTLDSQTRTFIVGAQMNVKEFKEHIAASVSIPSEKQRLIYQGRVLQDDKKLQEYNVGGKVIHLVERAPPQTHLPSGASSGTGSASATHGGGSPPGTRGPGASVHDRNANSYVMVGTFNLPSDGSAVDVHINMEQAPIQSEPRVRLVMAQHMIRDIQTLLSRMECRGGPQPQHSQPPPQPPAVTPEPVALSSQTSEPVESEAPPREPMEAEEVEERAPAQNPELTPGPAPAGPTPAPETNAPNHPSPAEYVEVLQELQRLESRLQPFLQRYYEVLGAAATTDYNNNHEGREEDQRLINLVGESLRLLGNTFVALSDLRCNLACTPPRHLHVVRPMSHYTTPMVLQQAAIPIQINVGTTVTMTGNGTRPPPTPNAEAPPPGPGQASSVAPSSTNVESSAEGAPPPGPAPPPATSHPRVIRISHQSVEPVVMMHMNIQGQQVPGFPTAPTRVVIARPTPPQARPSHPGGPPVSGTLQGAGLGTNASLAQMVSGLVGQLLMQPVLVAQGTPGMAPPPAPATASASAGTTNTATTAGPAPGGPAQPPPTPQPSMADLQFSQLLGNLLGPAGPGAGGSGVASPTITVAMPGVPAFLQGMTDFLQATQTAPPPPPPPPPPPPAPEQQTMPPPGSPSGGAGSPGGLGLESLSPEFFTSVVQGVLSSLLGSLGARAGSSESIAAFIQRLSGSSNIFEPGADGALGFFGALLSLLCQNFSMVDVVMLLHGHFQPLQRLQPQLRSFFHQHYLGGQEPTPSNIRMATHTLITGLEEYVRESFSLVQVQPGVDIIRTNLEFLQEQFNSIAAHVLHCTDSGFGARLLELCNQGLFECLALNLHCLGGQQMELAAVINGRIRRMSRGVNPSLVSWLTTMMGLRLQVVLEHMPVGPDAILRYVRRVGDPPQPLPEEPMEVQGAERASPEPQRENASPAPGTTAEEAMSRGPPPAPEGGSRDEQDGASAETEPWAAAVPPEWVPIIQQDIQSQRKVKPQPPLSDAYLSGMPAKRRKTMQGEGPQLLLSEAVSRAAKAAGARPLTSPESLSRDLEAPEVQESYRQQLRSDIQKRLQEDPNYSPQRFPNAQRAFADDP

SEQ ID NO: 59297 - protein, 112 aa, Homo sapiens
  MOD_RES (1)..(1): Any amino acid
XLPVKIEQVVCCRLTPLQTELYKRFLRQAKPAEELLEGKMSVSSLSSITSLKKLCNHPALIYDKCVEEEDGFVGALDLFPPGYSSKALEPQLSGTYTSAWMARCPLRSEPRL

SEQ ID NO: 59298 - protein, 266 aa, Homo sapiens
RAILFLGEKEAALQLQTLPDVQKLDPFLADLHQASSLLQASIEEFEKADPPGGMQEATRCLSKSKELMEAVLRDPGLLGLQREGGATLARLQHDASRLDFSPDVRSHLAAATALYSLVDEQLHVLVTASNSLLGKLELRVRLGRLEAAIHQVSDWMEQEGRRCLQSLTPKDGSLETVEKAHAEFENFFLQAAAQYRRGLELSKQAAQLGATARGAGEAERAEFPELAAFASTQRAFQAELTHFYMAAERQRTDLETLLHLHRFCKR

SEQ ID NO: 59299 - protein, 110 aa, Homo sapiens
MAENSVLTSTTGRTSLADSSIFDSKVTEISKENLLIGSTSYVEEEMPQIETRVILVQEAGKQEELIKALKTIKIMEVPVIKIKESCPGKSDEKLIKSVINMDIKVGFVKM

SEQ ID NO: 59300 - protein, 131 aa, Homo sapiens
MNAMLETPELPAVFDGVKLAAVAAVLYVIVRCLNLKSPTAPPDLYFQDSGLSRFLLKSCPLLTKEYIPPLIWGKSGHIQTALYGKMGRVRSPHPYGHRKFITMSDGATSTFDLFEPLAEHCVGDDITMVIC

SEQ ID NO: 59301 - protein, 284 aa, Homo sapiens
MSGEDEQQEQTIAEDLVVTKYKMGGDIANRVLRSLVEASSSGVSVLSLCEKGDAMIMEETGKIFKKEKEMKKGIAFPTSISVNNCVCHFSPLKSDQDYILKEGDLVKIDLGVHVDGFIANVAHTFVVDVAQGTQVTGRKADVIKAAHLCAEAALRLVKPGNQNTQVTEAWNKVAHSFNCTPIEGMLSHQLKQHVIDGEKTIIQNPTDQQKKDHEKAEFEVHEVYAVDVLVSSGEGKAKDAGQRTTIYKRDPSKQYGLKMKTSRAFFSEVERRFDAMFLNTLKMT

SEQ ID NO: 59302 - protein, 454 aa, Homo sapiens
MEDYLQGCRAALQESRPLHVVLGNEACDLDSTVSALALAFYLAKKVHIPESILIFRDEIDLHALYQAGQLTLILVDHHILSKSDTALEEAVAEVLDHRPIEPKHCPPCHVSVELVGSCATLVTERILQGAPEILDRQTAALLHGTIILDCVNMDLKIGKATPKDSKYVEKLEALFPDLPKRNDIFDSLQKAKFDVSGLTTEQMLRKDQKTIYRQGVKVAISAIYMDLEAFLQRSNLLADLHAFCQAHSYDVLVAMTIFFNTHNEPVRQLAIFCPHVALQTTGQSLAMLPRLVSNSWTQVIHQPQLPRVLELQICEVLERSHSPPLKLTPASSTHPNLHAYLQGNTQVSRKKLLPLLQEALSAYFDSMKIPSGQPETADVSREQVDKELDRASNSLISGLSQDEEDPPLPPTPMNSLVDECPLDQGLPKLSAEAVFEKCSQISLSQSTTASLSKK

SEQ ID NO: 59303 - protein, 101 aa, Homo sapiens
MAQHPCQDQEQKVEMTSKQQRSTSIEETMRPQEKQVTITETLWDQVLTVFKDIQKESTTDLSVQAAKARRCLTVPLRKCDNTNRKLYLLELVSARILYVVV

SEQ ID NO: 59304 - protein, 232 aa, Homo sapiens
MARHGLPLLPLLSLLVGAWLKLGNGQATSMVQLQGGRFLMGTNSPDSRDGDGPVREATVKPFAIDIFPVTNKDFRDFVREKKYRTEAEMFGWSFVFEDFVSDELRNKATQPMKSVLWWLPVEKAFWRQGKFPKGDKAEDGFHGVSPVNAFPAQNNYGLYDLLGNVWEWTASPYQAAEQDMRVLRGASWIDTADGSANHRARVTTRMGNTPDSASDNLGFRCAADAGRPPGEL

SEQ ID NO: 59305 - protein, 17 aa, Homo sapiens
MVGGGQPCGWASVLTGL

SEQ ID NO: 59306 - protein, 340 aa, Homo sapiens
MNKMALASFMKGRTVIGTPDEETMDIELPKKYHEMVGVIFSDTFSYRLKFNWGYRIPVIKEHSEYTEHCWAMHGEIFCYLAKYWLKGFVAFQAAINAAIIEVTTNHSVMEELTSVIGINMKIPPFISKGEIMNEWFHFTCLVSFSSFIYFASLNVARERGKFKKLMTVMGLRESAFWLSWGLTYICFIFIMSIFMALVITSIPIVFHTGFMVIFTLYSLYGLSLIALAFLMSVLIRKPMLAGLAGFLFTVFWGCLGFTVLYRQLPLSLGWVLSLLSPFAFTAGMAQITHLDNYLSGVIFPDPSGDSYKMIATFFILAFDTLFYLIFTLYFERVLPESEML

SEQ ID NO: 59307 - protein, 283 aa, Homo sapiens
  MOD_RES (1)..(1): Any amino acid
XDIRKAREKYQGEELAKELARIKLRMDNTEVLTSDIIINLLLSYRDIQDYDAMVKLVETLEMLPTCDLADQHNIKFHYAFALNRRNSTGDREKALQIMLQVLQSCDHPGPDMFCLCGRIYKDIFLDSDCKDDTSRDSAIEWYRKGFELQSSLYSGINLAVLLIVAGQQFETSLELRKIGVRLNSLLGRKGSLEKMNNYWDVGQFFSVSMLAHDVGKAVQAAERLFKLKPPVWYLRSLVQNLLLIRRFKKTIIEHSPRQERLNFWLDIIFEATNEVTNGLRFPL

SEQ ID NO: 59308 - protein, 180 aa, Homo sapiens
MRCSPGGVWLALAASLLHVSLQGEFQRKLYKELVKNYNPLERPVANDSQPLTVYFSLSLLQIMDVDEKNQVLTTNIWLQMSWTDHYLQWNVSEYPGVKTVRFPDGQIWKPDILLYNSYDQQQEVLAYGMHCWSPQFGPTSSSMFPVVHWRVLWQRWLQAYSRVPATSMYAGFPLMCSTAN

SEQ ID NO: 59309 - protein, 286 aa, Homo sapiens
MVHAEAFSRPLSRNEVVGLIFRLTIFGAVTYFTIKWMVDAIDPTRKQKVEAQKQAEKLMKQIGVKNVKLSEYEMSIAAHLVDPLNMHVTWSDIAGLDDVITDLKDTVILPIKKKHLFENSRLLQPPKGVLLYGPPGCGKTLIAKATAKEAGCRFINLQPSTLTDKWYGESQKLAAAVFSLAIKLQPSIIFIDEIDSFLRNRSSSDHEATAMMKAQFMSLWDGLDTDHSCQVIVMGATNRPQDLDSAIMRRMPTRFHINQPALKQREAILKLILKNENEYILVLFYS

SEQ ID NO: 59310 - protein, 398 aa, Homo sapiens
METGGRARTGTPQPAAPGVWRARPAGGGGGGASSWLLDGNSWLLCYGFLYLALYAQVSQSKPCERTGSCFSGRCVNSTCLCDPGWVGDQCQHCQGRFKLTEPSGYLTDGPINYKYKTKCTWLIEGYPNAVLRLRFNHFATECSWDHMYVYDGDSIYAPLIAVLSGLIVPEIRGNETVPEVVTTSGYALLHFFSDAAYNLTGFNIFYSINSCPNNCSGHGKCTTSVSVPSQVYCECDKYWKGEACDIPYCKANCGSPDHGYCDLTGEKLCVCNDSWQGPDCSLNVPSTESYWILPNVKPFSPSVGRASHKAVLHGKFMWVIGGYTFNYSSFQMVLKKTSLCMEAELKQMMAMSQMNYGFLTYIVSHGVQKLLLFLDMVSSMLWRDIQHILWSWIVEMLS

SEQ ID NO: 59311 - protein, 226 aa, Homo sapiens
MDQKILSLAAEKTADKLQEFLQTLREGDLTNLLQNQAVKGKVAGALLRAIFKGSPCSEEAGTLRRRKIYTCCIQLVESGDLQKEIASEIIGLLMLEAHHFPGPLLVELANEFISAVREGSLVNGKSLELLPIILTALATKKENLAYGKGVLSGEECKKQLINTLCSGRWDQQYVIQLTSMFKDVPLTAEEVEFVVEKALSMFSKMNLQEIPPLVYQLLVLSSKVQM

SEQ ID NO: 59312 - protein, 37 aa, Homo sapiens
  MOD_RES (1)..(1): Any amino acid
XAPDVDFKAFEEQLQSWCQAAGEGVTLEFAQEPHSGA

SEQ ID NO: 59313 - protein, 561 aa, Homo sapiens
MGEEDYYLELCERPVQFEKANPVNCVFFDEANKQVFAVRSGGATGVVVKGPDDRNPISFRMDDKGEVKCIKFSLENKILAVQRTSKTVVLPEKRSLKLLKSHNLNVNWYMYCPESAVILLSTTVLENVLQPFHFRAGTMSKLPKFEIELPAAPKSTKPSLSERDIAMATIYGQLYVLFLRHHSRTSNSTGAEVVLYHLPREGACKKMHILKLNRTGKFALNVVDNLVVVHHQDTETSVIFDIKLRGEFDGSVTFHHPVLPARSIQPYQIPITGPAAVTSQSPVPCKLYSSSWIVFQPDIIISASQGYLWNLQVKLEPIVNLLPDKGRLMDFLLQRKECKMVILSVCSQMLSESDRASLPVIATVFDKLNHEYKKYLDAEQSYAMAVEAGQSRSSPLLKRPVRTQAVLDQSDVYTHVLSAFVEKKEMPHKFVIAVLMEYIRSLNQFQIAVQHYLHELVIKTLVQHNLFYMLHQFLQYHVLSDSKPLACLLLSLESFYPPAHQLSLDMLKMLQSRLKTTCFSIQYSAFLNSETSVCEGAPISHQGNTVKNMLLFSNRFLETKL

SEQ ID NO: 59314 - protein, 47 aa, Homo sapiens
MKDEAGERDREVSSLNSKLLSLQLDIKNLHDVCKRQRKTLQDNQLCM

SEQ ID NO: 59315 - protein, 858 aa, Homo sapiens
MEYEWKPDEQGLQQILQLLKESQSPDTTIQRTVQQKLEQLNQYPDFNNYLIFVLTKLKSEDEPTRSLSGLILKNNVKAHFQNFPNGVTDFIKSECLNNIGDSSPLIRATVGILITTIASKGELQNWPDLLPKLCSLLDSEDYNTCEGAFGALQKICEDSAEILDSDVLDRPLNIMIPKFLQFFKHSSPKIRSHAVACVNQFIISRTQALMLHIDSFIENLFALAGDEEPEVRKNVCRALVMLLEVRMDRLLPHMHNIVEYMLQRTQDQDENVALEACEFWLTLAEQPICKDVLVRHLPKLIPVLVNGMKYSDIDIILLKGDVEEDETIPDSEQDIRPRFHRSRTVAQQHDEDGIEEEDDDDDEIDDDDTISDWNLRKCSAAALDVLANVYRDELLPHILPLLKELLFHHEWVVKESGILVLGAIAEGCMQGMIPYLPELIPHLIQCLSDKKALVRSITCWTLSRYAHWVVSQPPDTYLKPLMTELLKRILDSNKRVQEAACSAFATLEEEACTELVPYLAYILDTLVFAFSKYQHKNLLILYDAIGTLADSVGHHLNKPEYIQMLMPPLIQKWNMLKDEDKDLFPLLECLSSVATALQSGFLPYCEPVYQRCVNLVQKTLAQAMLNNAQPDQYEAPDKDFMIVALDLLSGLAEGLGGNIEQLVARSNILTLMYQCMQDKMPEVRQSSFALLGDLTKACFQHVKPCIADFMPILGTNLNPEFISVCNNATWAIGEISIQMAITIGRLGYVCPQEVAPMLQQFIRPWCTSLRNIRDNEEKDSAFRGICTMISVNPSGVIQDFIFFCDAVASWINPKDDLRDMFCKILHGFKNQVGDENWRRFSDQFPLPLKERLAAFYGV

SEQ ID NO: 59316 - protein, 120 aa, Homo sapiens
MKKEGTTLGLTVSGGIDKDGKPRVSNLRQGGIAARSDQLDVGDYIKAVNGINLAKFRHDEIISLLKNVGERVVLEVEYELPPVSVQGSSVIFRTVEVTLHKEGNTFGFVIRGGAHDDRNK

SEQ ID NO: 59317 - protein, 40 aa, Homo sapiens
MLGSGFKAERLRVNLRLVINRLKLLEKKKTELAQKARKEI

SEQ ID NO: 59318 - protein, 1024 aa, Homo sapiens
SASLDQTVRVWDISGLRKKNLSPGAVESDVRGITGVDLFGTTDAVVKHVLEGHDRGVNWAAFHPTMPLIVSGADDRQVKIWRMNESKAWEVDTCRGHYNNVSCAVFHPRQELILSNSEDKSIRVWDMSKRTGVQTFRRDHDRFWVLAAHPNLNLFAAGHDGGMIVFKLERERPAYAVHGNMLHYVKDRFLRQLDFNSSKDVAVMQLRSGSKFPVFNMSYNPAENAVLLCTRASNLENSTYDLYTIPKDADSQNPDAPEGKRSSGLTAVWVARNRFAVLDRMHSLLIKNLKNEITKKVQVPNCDEIFYAGTGNLLLRDADSITLFDVQQKRTLASVKISKVKYVIWSADMSHVALLAKHAIVICNRKLDALCNIHENIRVKSGAWDESGVFIYTTSNHIKYAVTTGDHGIIRTLDLPIYVTRVKGNNVYCLDRECRPRVLTIDPTEFKFKLALINRKYDEIALEAAKALDDKNCWEKLGEVALLQGNHQIVEMCYQRTKNFDKLSFLYLITGNLEKLRKMMKIAEIRKDMSGHYQNALYLGDVSERVRILKNCGQKSLAYLTAATHGLDEEAESLKETFDPEKETIPDIDPNAKLLQPPAPIMPLDTNWPLLTVSKGFFEGTIASKGKGGALAADIDIDTVGTEGWGEDAELQLDEDGFVEATEGLGDDALGKGQEEGGGWDVEEDLELPPELDISPGAAGGAEDGFFVPPTKGTSPTQIWCNNSQLPVDHILAGSFETAMRLLHDQVGVIQFGPYKQLFLQTYARGRTTYQALPCLPSMYGYPNRNWKDAGLKNGVPAVGLKLNDLIQRLQLCYQLTTVGKFEEAVEKFRSILLSVPLLVVDNKQEIAEAQQLITICREYIVGLSVETERKKLPKETLEQQKRICEMAAYFTHSNLQPVHMILVLRTALNLFFKLKNFKTAATFARRLLELGPKPEVAQQTRKILSACEKNPTDAYQLNYDMHNPFDICAASYRPIYRGKPVEKCPLSGACYSPEFKGQICRVTTVTEIGKDVIGLRISPLQFR

SEQ ID NO: 59319 - protein, 1487 aa, Homo sapiens
MRILKRFLACIQLLCVCRLDWANGYYRQQRKLVEEIGWSYTGALNQKNWGKKYPTCNSPKQSPINIDEDLTQVNVNLKKLKFQGWDKTSLENTFIHNTGKTVEINLTNDYRVSGGVSEMVFKASKITFHWGKCNMSSDGSEHSLEGQKFPLEMQIYCFDADRFSSFEEAVKGKGKLRALSILFEVGTEENLDFKAIIDGVESVSRFGKQAALDPFILLNLLPNSTDKYYIYNGSLTSPPCTDTVDWIVFKDTVSISESQLAVFCEVLTMQQSGYVMLMDYLQNNFREQQYKFSRQVFSSYTGKEEIHEAVCSSEPENVQADPENYTSLLVTWERPRVVYDTMIEKFAVLYQQLDGEDQTKHEFLTDGYQDLGAILNNLLPNMSYVLQIVAICTNGLYGKYSDQLIVDMPTDNPELDLFPELIGTEEIIKEEEEGKDIEEGAIVNPGRDSATNQIRKKEPQISTTTHYNRIGTKYNEAKTNRSPTRGSEFSGKGDVPNTSLNSTSQPVTKLATEKDISLTSQTVTELPPHTVEGTSASLNDGSKTVLRSPHMNLSGTAESLNTVSITEYEEESLLTSFKLDTGAEDSSGSSPATSAIPFISENISQGYIFSSENPETITYDVLIPESARNASEDSTSSGSEESLKDPSMEGNVWFPSSTDITAQPDVGSGRESFLQTNYTEIRVDESEKTTKSFSAGPVMSQGPSVTDLEMPHYSTFAYFPTEVTPHAFTPSSRQQDLVSTVNVVYSQTTQPVYNEASNSSHESRIGLAEGLESEKKAVIPLVIVSALTFICLVVLVGILIYWRKCFQTAHFYLEDSTSPRVISTPPTPIFPISDDVGAIPIKHFPKHVADLHASSGFTEEFEEVQSCTVDLGITADSSNHPDNKHKNRYINIVAYDHSRVKLAQLAEKDGKLTDYINANYVDGYNRPKAYIAAQGPLKSTAEDFWRMIWEHNVEVIVMITNLVEKGRRKCDQYWPADGSEEYGNFLVTQKSVQVLAYYTVRNFTLRNTKIKKGSQKGRPSGRVVTQYHYTQWPDMGVPEYSLPVLTFVRKAAYAKRHAVGPVVVHCSAGVGRTGTYIVLDSMLQQIQHEGTVNIFGFLKHIRSQRNYLVQTEEQYVFIHDTLVEAILSKETEVLDSHIHAYVNALLIPGPAGKTKLEKQFQGLTLSPRLECRGTISAHCNLPLPGLTDPPTSASRVARTILLSQSNIQQSDYSAALKQCNREKNRTSSIIPVERSRVGISSLSGEGTDYINASYIMGYYQSNEFIITQHPLLHTIKDFWRMIWDHNAQLVVMIPDGQNMAEDEFVYWPNKDEPINCESFKVTLMAEEHKCLSNEEKLIIQDFILEATQDDYVLEVRHFQCPKWPNPDSPISKTFELISVIKEEAANRDGPMIVHDEHGGVTAGTFCALTTLMHQLEKENSVDVYQVAKMINLMRPGVFADIEQYQFLYKVILSLVSTRQEENPSTSLDSNGAALPDGNIAESLESLV

SEQ ID NO: 59320 - protein, 63 aa, Homo sapiens
MAASGEPQRQWQEEVAAVVVVGSCMTDLVRRMCMRICYVHFCCQPTPQLQNCSSLCVITCQEN

SEQ ID NO: 59321 - protein, 232 aa, Homo sapiens
MEKLFCCFPNSMVVEHPEFLKAGKEPGLQIWRVEKFDLVPVPTNLYGDFFTGDAYVILKTVQLRNGNLQYDLHYWLGNECSQDESGAAAIFTVQLDDYLNGRAVQHREVQGFESATFLGYFKSGLKYKKGGVASGFKHVVPNEVVVQRLFQVKGRRVVRATEVPVSWESFNNGDCFILDLGNNIHQWCGSNSNRYERLKATQVSKGIRDNERSGRARVHVSEEGTEPEAMLQ

SEQ ID NO: 59322 - protein, 1387 aa, Homo sapiens
PVPCRVIPAMGKTSFRIIFLPTEEGSIESSLFINTSSYGVLSYHVSGIGTRRISTEGSAKQLPNAYFLLPKVQSIQLSQMQAETTNTSLLQVQLECSLHNKVCQQLKGCYLESDDVLRLQMSIMVTMENFSKEFEENTQHLLDHLSIVYVATDESETSDDSAVNMYILHSGNSLIWIQDIRHFSQRDALSLQFEPVLLPTSTTNFTKIASFTCKAATSCDSGIIEDVKKTTHTPTLKACLFSSVAQGYFRMDSSATQFHIETHENTSGLWSIWYRNHFDRSVVLNDVFLSKETKHMLKILNFTGPLFLPPGCWNIFSLKLAVKDIAINLFTNVFLTTNIGAIFAIPLQIYSAPTKEGSLGFEVIAHCGMHYFMGKSKAGNPNWNGSLSLDQSTWNVDSELANKLYERWKKYKNGDVCKFGTDMQMINFTTGEFQLTEACPYLGTHSEESRFGILHLHLQPLEMKRVGVVFTPADYGKVTSLILIRNNLTVIDMIGVEGFGARELLKVGGRLPGAGGSLRFKVPESTLMDCRRQLKDSKQILSITKNFKVENIGPLPITVSSLKINGYNCQGYGFEVLDCHQFSLDPNTSRDISIVFTPDFTSSWVIRDLSLVTAADLEFRFTLNVTLPHHLLPLCADVVPGPSWEESFWRLTVFFVSLSLLGVILIAFQQAQYILMEFMKTRQRQNASSSSQQNNGPMDVISPHSYKSNCKNFLDTYGPSDKGRGKNCLPVNTPQSRIQNAAKRSPATYGHSQKKHKCSVYYSKHKTSTAAASSTSTTTEEKQTSPLGSSLPAAKEDICTDAMRENWISLRYASGINVNLQKNLTLPKNLLNKEENTLKNTIVFSNPSSECSMKEGIQTCMFPKETDIKTSENTAEFKERELCPLKTSKKLPENHLPRNSPQYHQPDLPEISRKNNGNNQQVPVKNEVDHCENLKKVDTKPSSEKKIHKTSREDMFSEKQDIPFVEQEDPYRKKKLQEKREGNLQNLNWSKSRTCRKNKKRGVAPVSRPPEQSDLKLVCSDFERSELSSDINVRSWCIQESTREVCKADAEIASSLPAAQREAEGYYQKPEKKCVDKFCSDSSSDCGSSSGSVRASRGSWGSWSSTSSSDGDKKPMVDAQHFLPAGDSVSQNDFPSEAPISLNLSHNICNPMTVNSLPQYAEPSCPSLPAGPTGVEEDKGLYSPGDLWPTPPVCVTSSLNCTLENGVPCVIQESAPVHNSFIDWSATCEGQFSSAYCPLELNDYNAFPEENMNYANGFPCPADVQTDFIDHNSQSTWNTPPNMPAAWGHASFISSPPYLTSTRSLSPMSGLFGSIWAPQSDVYENCCPINPTTEHSTHMENQAVVCKEYYPGFNPFRAYMNLDIWTTTANRNANFPLSRDSSYCGNV

SEQ ID NO: 59323 - protein, 214 aa, Homo sapiens
  MOD_RES (1)..(1): Any amino acid
XLETADKQSVHIVENEIQASIDQIFSRLERLEILSSKEPPNKRQNARLRVDQLKYDVQHLQTALRNFQHRRHAREQQERQREELLSRTFTTNDSDTTIPMDESLQFNSSLQKVHNGMDDLILDGHNILDGLRTQRLTLKGTQKKILDIANMLGLSNTVMRLIEKRAFQDKYFMIETRSHHVAQNGPELLSSRDPPASASRSAGIIGEETEAQRG

SEQ ID NO: 59324 - protein, 101 aa, Homo sapiens
GMVWNTDLVETLELQNLMLCALQTIYGAEARKESRGAHAREDYKSNKKRDGVSGLRCGLMSTITPSPSRGNRRSPLRSTGGSTPCPMWTLALGRSLWNIDP

SEQ ID NO: 59325 - protein, 257 aa, Homo sapiens
  MOD_RES (1)..(1): Any amino acid
XSAITVAISWLQGDDAAVRSHFTKVERIPKALEVTESPLVKAIFHACRAMHASLPGKADGQQSSFCHCERASGHLWSSLNVSGATSDPALNHVVQLLTCDLLLSLRTALWQKQASASQAVGETYHASGAELAGFQRDLGSLRRLAHSFRPAYRKAASRALGLHPGHLSTSPTRCVQGFLVTSWEKQAFCLSLLSSCSCCSARFPAWLRVRVRDNRGCFSGVFLHEATVRLMAGASPTRTHQLLEHSLRRRTTQSTKH

SEQ ID NO: 59326 - protein, 231 aa, Homo sapiens
MASTSRLDALPRVTCPNHPDAILVEDYRAGDMICPECDRVIDVGSEWRTFSNDKATKDPSRVGDSQNPLLSDGDLSTMIGKGTGAASFDEFGNSKYQNRRTMSSSDRAMMNAFKEITTMADRINLPRNIVDRTNNLFKQVYEQKSLKGRANDAIASACLYIACRQEGVPRTFKEICAVSRISKKEIGRCFKLILKALETSVDLITTGDFMSRFCSNLCLPKQVQMAATHIA

SEQ ID NO: 59327 - protein, 677 aa, Homo sapiens
MAERKQSGKAAEDEEVPAFFKNLGSGSPKPRQKFCGMFCPVEGSSENKTIDFDSLSVGRGSGQVVAQQRDVAHLGPDPQPPYSRQGRRAGGEPSVESGRKVEIRRASGKEALQNINDQSDRLLIKGGKIVNDDQSFYADIYMEDGLIKQIGENLIVPGGVKTIEAHSRMVIPGGIDVHTRFQMPDQGMTSADDFFQGTKAALAGGTTMIIDHVVPEPGTSLLAAFDQWREWADSKSCCDYSLHVDISEWHKGIQEEMEALVKDHGVNSFLVYMAFKDRFQLTDCQIYEVLSVIRDIGAIAQVHAENGDIIAEEQQRILDLGITGPEGHVLSRPEEVEAEAVNRAITIANQTNCPLYITKVMSKSSAEVIAQARKKGTVVYGEPITASLGTDGSHYWSKNWAKAAAFVTSPPLSPDPTTPDFLNSLLSCGDLQVTGSAHCTFNTAQKAVGKDNFTLIPEGTNGTEERMSVIWDKAVVTGKMDENQFVAVTSTNAAKVFNLYPRKGRIAVGSDADLVIWDPDSVKTISAKTHNSSLEYNIFEGMECRGSPLVVISQGKIVLEDGTLHVTEGSGRYIPRKPFPDFVYKRIKARSRLAELRGVPRGLYDGPVCEVSVTPKTVTPASSAKTSPAKQQAPPVRNLHQSGFSLSGAQIDDNIPRRTTQRIVAPPGGRANITSLG

SEQ ID NO: 59328 - protein, 126 aa, Homo sapiens
MAPQRRAATKAPEGNGAAERRNRSSTKKDRAPREVQRLWQRPWLRTAGLGAGFVLTALLLWSSLGADDGVAEVLARRGEVVAGRFIEVPCSEDYDSHRRLHSPKVRQRCHRCRHHQGGSGADSQRS

SEQ ID NO: 59329 - protein, 178 aa, Homo sapiens
MDMAWQMMQLLLLALVTAAGSAQPRSARARTDLLNVCMNAKHHKTQPSPEDELYGQCSPWKKNACCTASTSQELHKDTSRLYNFNWDHCGKMEPTCKRHFIQDSCLYECSPNLGPWIRQVNQSWRKERILNVPLCKEDCERWWEDCRTSYTCKSNWHKGWNWTSGINECPAGALCSTF

SEQ ID NO: 59330 - protein, 62 aa, Homo sapiens
MKGLNHPNIVKLFEVIETEKTLYLVMEYASAGEVFDYLVSHGRMKEKEARAKFRQIVSAVHY

SEQ ID NO: 59331 - protein, 81 aa, Homo sapiens
MHKEEHEVAVLGPPPSTILPRSTVINIHSETSVPDHVVWSLFNTLFLNWCCLGFIAFAYSVKPSKKLHPHLPDWHPGSPRK

SEQ ID NO: 59332 - protein, 780 aa, Homo sapiens
MLGESVPAAVEQEQLGEVKLEEEEAVSPEDPRRPESRLRPEVAHQLFRCFQYQEDMGPRASLSRLRELCGHWLRPALHTKKQILELLVLEQFLSVLPPHLLGRLQGQPLRDGEEVVLLLEGIHREPSHAGPLDFSCNAGKSCPRADVTLEEKGCASQVPSHSPKKELPAEEPSVLGPSDEPPRPQPRAAQPAEPGQWRLPPSSKQPLSPGPQKTFQALQESSPQGPSPWPEESSRDQELAAVLECLTFEDVPENKAWPAHPLGFGSRTPDKEEFKQEEPKGAAWPTPILAESQADSPGVPGEPCAQSLGRGAAASGPGEDGSLLGSSEILEVKVAEGVPEPNPELQFICADCGVSFPQLSRLKAHQLRSHPAGRSFLCLCCGKSFGRSSILKLHMRTHTDERPHACHLCGHRFRQSSHLSKHLLTHSSEPAFLCAECGRGFQRRASLVQHLLAHAQDQKPPCAPESKAEAPPLTDVLCSHCGQSFQRRSSLKRHLRIHARDKDRRSSEGSGSRRRDSDRRPFVCSDCGKAFRRSEHLVAHRRVHTGERPFSCQACGRSFTQSSQLVSHQRVHTGEKPYACPQCGKRFVRRASLARHLLTHGGPRPHHCTQCGKSFGQTQDLARHQRSHTGEKPCRCSECGEGFSQSAHLARHQRIHTGEKPHACDTCGHRFRNSSNLARHRRSHTGERPYSCQTCGRSFRRNAHLRRHLATHAEPGQEQAEPPQECVECGKSFSRSCNLLRHLLVHTGARPYSCTQCGRSFSRNSHLLRHLRTHARETLY

SEQ ID NO: 59333 - protein, 1488 aa, Homo sapiens
MAEARKRRELLPLIYHHLLRAGYVRAAREVKEQSGQKCFLAQPVTLLDIYTHWQQTSELGRKRKAEEDAALQAKKTRVSDPISTSESSEEEEEAEAETAKATPRLASTNSSVLGADLPSSMKEKAKAETEKAGKTGNSMPHPATGKTVANLLSGKSPRKSAEPSANTTLVSETEEEGSVPAFGAAAKPGMVSAGQADSSSEDTSSSSDETDVEGKPSVKPAQVKASSVSTKESPARKAAPAPGKVGDVTPQVKGGALPPAKRAKKPEEESESSEEGSESEEEAPAGTRSQVKASEKILQVRAASAPAKGTPGKGATPAPPGKAGAVASQTKAGKPEEDSESSSEESSDSEEETPAAKALLQAKASGKTSQVGAASAPAKESPRKGAAPAPPGKTGPAVAKAQAGKREEDSQSSSEESDSEEEAPAQAKPSGKAPQVRAASAPAKESPRKGAAPAPPRKTGPAAAQVQVGKQEEDSRSSSEESDSDREALAAMNAAQVKPLGKSPQVKPASTMGMGPLGKGAGPVPPGKVGPATPSAQVGKWEEDSESSSEESSDSSDGEVPTAVAPAQEKSLGNILQAKPTSSPAKGPPQKAGPVAVQVKAEKPMDNSESSEESSDSADSEEAPAAMTAAQAKPALKIPQTKACPKKTNTTASAKVAPVRVGTQAPRKAGTATSPAGSSPAVAGGTQRPAEDSSSSEESDSEEEKTGLAVTVGQAKSVGKGLQVKAASVPVKGSLGQGTAPVLPGKTGPTVTQVKAEKQEDSESSEEESDSEEAAASPAQVKTSVKKTQAKANPAAARAPSAKGTISAPGKVVTAAAQAKQRSPSKVKPPVRNPQNSTVLARGPASVPSVGKAVATAAQAQTGPEEDSGSSEEESDSEEEAETLAQVKPSGKTHQIRAALAPAKESPRKGAAPTPPGKTGPSAAQAGKQDDSGSSSEESDSDGEAPAAVTSAQKDSNSKPARSKTLAPAPPERNTEGSSESSEEELPLTQVIKPPLIFVDPNRSPAGPAATPAQAQAASTPRKARASESTARSSSSESEDEDVIPATQCLTPGIRTNVVTMPTAHPRIAPKASMAGASSSKESSRISDGKKQEGPATQVDSAVGTLPATSPQSTSVQAKGTNKLRKPKLPEVQQATKAPESSDDSEDSSDSSSGSEEDGEGPQGAKSAHTLVGPTPSRTETLVEETAAESSEDDVVAPSQSLLSGYMTPGLTPANSQASKATPKLDSSPSVSSTLAAKDDPDGKQEAKPQQAAGMLSPKTGGKEAASGTTPQKSRKPKKGAGNPQASTLALQSNITQCLLGQPWPLNEAQVQASVVKVLTELLEQERKKVVDTTKESSRKGWESRKRKLSGDQPAARTPRSKKKKKLGAGEGGEASVSPEKTSTTSKGKAKRDKASGDVKEKKGKGSLGSQGAKDEPEEELQKGMGTVEGGDQSNPKSKKEKKKSDKRKKDKEKKEKKKKAKKASTKDSESPSQKKKKKKKKTAEQTV

SEQ ID NO: 59334 - protein, 39 aa, Homo sapiens
MSAKLGKSSSLLTQTSEECNGILTEKMEEEEQTCDPDSS

SEQ ID NO: 59335 - protein, 291 aa, Homo sapiens
MTENKTVSSSSTRDDQTNIGLTCQEVKALREKAWSRTNEGNAMSQSLVLYGASKENSEGFHESKMTNTEGVNKGIYFSYPCRRHSCAVVNIPAPCVNKMISHIQDVESKIQEHLKRFETSFEEWSRTSSTKDLKEDWSVTTPVKEVKPGEKRDEKCPELKQEMETLLSEAIRLIKSLETDRADAEEALKQQRSRKNMINMKIDSWSVWKLQELPLAVQKEHEAYLSDVIELQWHLEDKANQLQHFEKQKTELEEANAKIQADIDYMNEHGPLLDSKQNQELQDLKNHYKKK

SEQ ID NO: 59336 - protein, 54 aa, Homo sapiens
MNQEKLAKLQAQVRIGGKVFLTNSYLFFHVGEYEYQLSYSLYFLKPKEELVVSN

SEQ ID NO: 59337 - protein, 39 aa, Homo sapiens
  MOD_RES (1)..(1): Any amino acid
XRAMALFFVLCWIQEMGFHHVGQAGHELLTSMDPPASAS

SEQ ID NO: 59338 - protein, 109 aa, Homo sapiens
MEGGGGIPLETLKEESQSRHVLPASFEVNSLQKSNWGFLLTGLVGGTLVAVYAVATPFVTPALRKVCLPFVPATTKQIENVVKMLRCRRGSLVDIGSGDGRIVSSAKTF

SEQ ID NO: 59339 - protein, 315 aa, Homo sapiens
MPHIDNDVKLDFKDVLLRPKRSTLKSRSEVDLTRSFSFRNSKQTYSGVPIIAANMDTVGTFEMAKVLCKFSLFTAVHKHYSLVQWQEFAGQNPDCLEHLAASSGTGSSDFEQLEQILEAIPQAGNVVTGEMVEELILSGADIIKVGIGPGSVCTTRKKTGVGYPQLSAVMECADAAHGLKGHIISDGGCSCPGDVAKAFGAGADFVMLGGMLAGHSESGGELIERDGKKYKLFYGMSSEMAMKKYAGGVAEYRASEGKTVEVPFKGDVEHTIRDILGGIRSTCTYVGAAKLKELSRRTTFIRVTQQVNPIFSEAC

SEQ ID NO: 59340 - protein, 279 aa, Homo sapiens
MTALDLFLTNQFSEALSYLKPRTKESMYHSLTYATILEMQAMMTFDPQDILLAGNMMKEAQMLCQRHRRKSSVTDSFSSLVNRPTLGQFTEEEIHAEVCYAECLLQRAALTFLQDENMVSFIKGGIKVRNSYQTYKELDSLVQSSQYCKGENHPHFEGGVKLGVGAFNLTLSMLPTRILRLLEFVGFSGNKDYGLLQLEEGASGHSFRSVLCVMLLLCYHTFLTFVLGTGNVNIEEAEKLLKPYLNRYPKGAIFLFFAGRIEVIKGNIDAAIRRFEECC

SEQ ID NO: 59341 - protein, 137 aa, Homo sapiens
MAELSEEALLSVLPTIRVPKAGDRVHKDECAFSFDTPESEGGLYICMNTFLGFGKQYVERHFNKTGQRVYLHLRRTRRPKEEDPATGTGDPPRKKPTRLAIGVEGGFDLSEEKFELDEDVKYTQRVDYIMQLPVPMD

SEQ ID NO: 59342 - protein, 153 aa, Homo sapiens
MSDEEARQSGGSSQAGVVTVSDVQELMRRKEEIEAQIKANYDVLESQKGIGMNEPLVDCEGYPRSDVDLYQVRTARHNIICLQNDHKAVMKQVEEALHQLHARDKEKQARDMAEAHKEAMSRKLGQSESQGPPRAFAKVNSISPGSPASIAVI

SEQ ID NO: 59343 - protein, 628 aa, Homo sapiens
MPSWALFMVTSCLLLAPQNLAQVSSQDSEPLKCFSRTFEDLTCFWDEEEAAPSGTYQLLYAYPREKPRACPLSSQSMPHFGTRYVCQFPDQEEVRLFFPLHLWVKNVFLNQTRTQRVLFVDSVGLPAPPSIIKAMGGSQPGELQISWEEPAPEISDFLRYELRYGPRDPKNSTGPTVIQLIATETCCPALQRPHSASALDQSPCAQPTMPWQDGPKQTSPSREASALTAEGGSCLISGLQPGNSYWLQLRSEPDGISLGGSWGSWSLPVTVDLPGDAVALGLQCFTLDLKNVTCQWQQQDHASSQGFFYHSRARCCPRDRYPIWENCEEEEKTNPGLQTPQFSRCHFKSRNDSIIHILVEVTTAPGTVHSYLGSPFWIHQAVRLPTPNLHWREISSGHLELEWQHPSSWAAQETCYQLRYTGEGHQDWKVLEPPLGARGGTLELRPRSRYRLQLRARLNGPTYQGPWSSWSDPTRVETATETAWISLVTALHLVLGLSAVLGLLLLRWQFPAHYRRLRHALWPSLPDLHRVLGQYLRDTAALSPPKATVSDTCEEVEPSLLEILPKSSERTPLPLCSSQAQMDYRRLQPSCLGTMPLSVCPPMAESGSCCTTHIANHSYLPLSYWQQP

SEQ ID NO: 59344 - protein, 273 aa, Homo sapiens
MLMCLKGSGPSGGSGGGANGTSFSYTFHGDPHAMFAEFFGGRNPFDTFFGQRNGEEGMDIDDPFSGFPMGMGGFTNVNFGRSRSAQEPARKKQDPPVTHDLRVSLEEIYSGCTKKMKISHKRLNPDGKSIRNEDKILTIEVKKGWKEGTKITFPKEGDQTSNNIPADIVFVLKDKPHNIFKRDGSDVIYPARISLREALCGCTVNVPTLDGRTIPVVFKDVIRPGMRRKVPGEGLPLPKTPEKRGDLIIEFEVIFPERIPQTSRTVLEQVLPI

SEQ ID NO: 59345 - protein, 308 aa, Homo sapiens
MAESSDKLYRVEYAKSGRASCKKCSESIPKDSLRMAIMVQSPMFDGKVPHWYHFSCFWKVGHSIRHPDVEVDGFSELRWDDQQKVKKTAEAGGVTGKGQDGIGSKAEKTLGDFAAEYAKSNRSTCKGCMEKIEKGQVRLSKKMVDPEKPQLGMIDRWYHPGCFVKNREELGFRPEYSASQLKGFSLLATEDKEALKKQLPGVKSEGKRKGDEVDGVDEVAKKKSKKEKDKDSKLEKALKAQNDLIWNIKDELKKVCSTNDLKELLIFNKQQVPSGESAILDRVADGMVFGALLPCEECSGQLISHYPT

SEQ ID NO: 59346 - protein, 264 aa, Homo sapiens
  MOD_RES (1)..(1): Any amino acid
XEMEEKAAPLLKEEMAHHALLRESWEAAQETWEDKRRGLTLPPGFKAQNGIAIMVYTNSSNTLYWELNQAVRTGGGSRELYMRHFPFKALHFYLIRALQLLRGSGGCSRGPGEVVFRGVGSLRFEPKRLGDSVRLGQFASSSLDKAVAHRFGNATLFSLTTCFGAPIQAFSVFPKEREVLIPPHEVFLVTRFSQDGAQSLVTLWSYNQTCSHFNCAYLGGEKRRGCVSAPGVQLGSQSEGASSLPPWKTLLLAPGEFQLSGVGP

SEQ ID NO: 59347 - protein, 160 aa, Homo sapiens
MAIRAQHSNAAQTQTGEANRGWTGQESLSDSDPEMWELLQREKDRQCRGLELIASENFCSRAALEALGSCLNNKYSEGYPGKRYYGGAEVVDEIELLCQRRALEAFDLDPAQWGVNVQPYSGSPANLAVYTALLQPHDRIMGLDLPDGGHLTHGYMSDVK

SEQ ID NO: 59348 - protein, 128 aa, Homo sapiens
MAKVLTPELYAELRAKSTPSGFTLDDVIQTGVDNPGHPYIMTVGCVAGDEESYEVFKDLFDPIIEDRHGGYKPSDEHKTDLNPDNLQGGDDLDPNYVLSSRVRTGRSIRGFCLPPHCSRGERRAIEKL

SEQ ID NO: 59349 - protein, 67 aa, Homo sapiens
KGNPGNAQKGEAGERGPGGIPGYKGDKQYSREDREVEHNNEKYVACLLPSPALLQQSSLTHHGTCSH

SEQ ID NO: 59350 - protein, 427 aa, Homo sapiens
MSLMVVSMACVGLFLVQRAGPHMGGQDKPFLSAWPSAVVPRGGHVTLRCHYHHRFNNFMLYKEDGIHIPIFHGRIFQESFNMSPVTTAHAGNYTCRGSHPHSPTGWLAPSNPVVIMVTGNHRKPSLLAHPGPLVKSGERVILQCWSDIMFEHFFLHKEGISKDPSRLVGQIHDGVSKANFSIGPMMLALAGTYRCYGSVTHTSYQLSAPSDPLDIVVTGPYEKPSLSAQPGPKVQAGESVTLSCSSRSSYDMYHLSREGGAHERRLPAVRKVNRTFQADFPLGPATHGGTYRCFGSFRHSPYELSDPSDPLLVSVTGNPRHLHVLIGTSVVIILFILLLFFLLHLWYSNKKNAAVMDQEPAGNRTANSEDSDEQDPQEVTYAQLDHCVFTQRKITRPSQRPKTPPTDTILYTELPNAKPRSKVVSCP

SEQ ID NO: 59351 - protein, 95 aa, Homo sapiens
MEAVPGYLSLHQSAESLTLKWTPNQLMNGTLGDSELEKSVYWDYALVVPFSQVVCIHCHQQKSGGTLVLVSQDGIQRPPLHFPQGGHLLSFLSCL

SEQ ID NO: 59352 - protein, 545 aa, Homo sapiens
  MOD_RES (1)..(1): Any amino acid
XVIFARRSVRCVCRRLLEGPCDFYASAAELCRVGSWHSPINCPWVEVSRRTLWGSVETPVQIKEFGAVSKVDFSPQPPYNYAVTASSRIHIYGRYSQEPIKTFSRFKDTAYCATFRQDGRLLVAGSEDGGVQLFDISGRAPLRQFEGHTKAVHTVDFTADKYHVVSGADDYTVKLWDIPNSKEILTFKEHSDYVRCGCASKLNPDLFITGSYDHTVKMFDARTSESVLSVEHGQPVESVLLFPSGGLLVSAGGRYVKVWDMLKGGQLLVSLKNHHKTVTCLCLSSSGQRLLSGSLDRKVKVYSTTSYKVVHSFDYAASILSLALAHEDETIVVGMTNGILSVKHRKSEAKKESLPRRRRPAYRTFIKGKNYMKQRDDILINRPAKKHLELYDRDLKHFRISKALDRVLDPTCTIKTPEITVSIIKELNRRGVLANALAGRDEKEISHVLNFLIRNLSQPRFAPVLINAAEIIIDIYLPVIGQSPVVDKKFLLLQGLVEKEIDYQRELLETLGMMDMLFATMRRKEGTSVLEHTSDGFPENKKIES

SEQ ID NO: 59353 - protein, 484 aa, Homo sapiens
MIASQFLSALTLVLLIKESGAWSYNTSTEAMTYDEASAYCQQRYTHLVAIQNKEEIEYLNSILSYSPSYYWIGIRKVNNVWVWVGTQKPLTEEAKNWAPGEPNNRQKDEDCVEIYIKREKDVGMWNDERCSKKKLALCYTAACTNTSCSGHGECVETINNYTCKCDPGFSGLKCEQIVNCTALESPEHGSLVCSHPLGNFSYNSSCSISCDRGYLPSSMETMQCMSSGEWSAPIPACNVVECDAVTNPANGFVECFQNPGSFPWNTTCTFDCEEGFELMGAQSLQCTSSGNWDNEKPTCKAVTCRAVRQPQNGSVRCSHSPAGEFTFKSSCNFTCEEGFMLQGPAQVECTTQGQWTQQIPVCEVVKCSSLAVPGKINMSCSGEPVFGTVCKFACPEGWTLNGSAARTCGATGHWSGLLPTCEAPTESNIPLVAGLSAAGLSLLTLAPFLLWLRKCLRKAKKFVPASSCQSLESDGSYQKPSYIL

SEQ ID NO: 59354 - protein, 161 aa, Homo sapiens
MAKIAKTHEDIEAQIREIQGKKAALDEAQGVGLDSTGYYDQEIYGGSDSRFAGYVTSIAATELEDDDDDYSSSTSLLGQKKPGYHAPVALLNDIPQSTEQYDPFAEHRPPKIADREDEYKKHRRTMIISPERLDPFADVLLYASPVCILKGAVQHILSRLW

SEQ ID NO: 59355 - protein, 1119 aa, Homo sapiens
MGNAHSKSGDRHSALPGRPELSFYGSFPRKWSENVFLDNELLTSKILSVLRPQSERGFRAGDLRYPTHFLSTNSVLASVTASLKEHPRGTLLSDGSPALSRNVGMTVSQKGGPQPTPSPAGPGTQLGPITGEMDEADSAFLKFKQTADDSLSLTSPNTESIFVEDPYTASLRSEIESDGHEFEAESWSLAVDAAYAKKQKREVVKRQDVLYELMQTEVHHVRTLKIMLKVYSRALQEELQFSSKAIGRLFPCADDLLETHSHFLARLKERRQESLEEGSDRNYVIQKIGDLLVQQFSGENGERMKEKYGVFCSGHNEAVSHYKLLLQQNKKFQNLIKKIGNFSIVRRLGVQECILLVTQRITKYPVLVERIIQNTEAGTEDYEDLTQALNLIKDIISQVDAKVSECEKGQRLREIAGKMDLKSSSKLKNGLTFRKEDMLQRQLHLEGMLCWKTTSGRLKDILAILLTDVLLLLQEKDQKYVFASVDSKPPVISLQKLIVREVANEEKAMFLISASLQGPEMYEIYTSSKEDRNAWMAHIQRAVESCPDEEEGPFSLPEEERKVVEARATRLRDFQERLSMKDQLIAQSLLEKQQIYLEMAEMGGLEDLPQPRGLFRGGDPSETLQGELILKSAMSEIEGIQSLICRQLGSANGQAEDGGSSTGPPRRAETFAGYDCTNSPTKNGSFKKKVSSTDPRPRDWRGPPNSPDLKLSDSDIPGSSEESPQVVEAPGTESDPRLPTVLESELVQRIQTLSQLLLNLQAVIAHQDSYVETQRAAIQEREKQFRLQSTRGNLLLEQERQRNFEKQREERAALEKLQSQLRHEQQRWERERQWQHQELERAGARLQEREGEARQLRERLEQERAELERQRQAYQHDLERLREAQRAVERERERLELLRRLKKQNTAPGALPPDTLAEAQPPSHPPSFNGEGLEGPRVSMLPSGVGPEYAERPEVARRDSAPTENRLAKSDVPIQLLSATNQFQRQAAVQQQIPTKLAASTKGGKDKGGKSRGSQRWESSASFDLKQQLLLNKLMGKDESTSRNRRSLSPILPGRHSPAPPPDPGFPAPSPPPADSPSEGFSLKAGGTALLPGPPAPSPLPATPLSAKEDASKEDVIFF

SEQ ID NO: 59356 - protein, 115 aa, Homo sapiens
MSFFPELYFNVDNGYLEGLVRGLKAGVLSQADYLNLVQCETLEDLKLHLQSTDYGNFLANEASPLTVSVIDDRLKEKMVVEFRHMRNHAYEPLASFLDFITCLTLTLEEFPLGLI

SEQ ID NO: 59357 - protein, 168 aa, Homo sapiens
DFLGIAWSDAVLHHEDLIGKPGGVSLSKIERSTDQVIKPVNLEALSKWTGHIPGDVVRDMAQIAPMLAQLGYDPYANPPNYGNPDPFVINNTQRVSVHLYLWKCTLGDMGLLQMWKLQPPEEMFSLSIPGHLICSCLMDTVNYMIACISILLGLQGSSKPTGSLSLIL

SEQ ID NO: 59358 - protein, 643 aa, Homo sapiens
MSENLDNEGPKPMESCGQESSSALSCPTVSVPPAAPAALEEVEKEGAGAATGPGPQPGLYSYIRDDLFTSEIFKLELQNVPRHASFSDVRRFLGRFGLQPHKTKLFGQPPCAFVTFRSAAERDKALRVLHGALWKGRPLSVRLARPKADPMARRRRQEGESEPPVTRVADVVTPLWTVPYAEQLERKQLECEQVLQKLAKEIGSTNRALLPWLLEQRHKHNKACCPLEGVRPSPQQTEYRNKCEFLVGVGVDGEDNTVGCRLGKYKGGTCAVAAPFDTVHIPEATKQVVKAFQEFIRSTPYSAYDPETYTGHWKQLTVRTSRRHQAMAIAYFHPQKLSPEELAELKTSLAQHFTAGPGRASGVTCLYFVEEGQRKTPSQEGLPLEHVAGDRCIHEDLLGLTFRISPHAFFQVNTPAAEVLYTVIQDWAQLDAGSMVLDVCCGTGTIGLALARGPMYSPPWVGRHHAFLFQKVKRVIGVELCPEAVEDARVNAQDNELSNVEFHCGRAEDLVPTLVSRLASQHLVAILDPPRAGLHSKVILAIRRAKNLRRLLYVSCNPRAAMGNFVDLCRAPSNRVKGIPFRPVKAVAVDLFPQTPHCEMLILFERVEHPNGTGVLGPHSPPAQPTPGPPDNTLQETGTFPSS

SEQ ID NO: 59359 - protein, 612 aa, Homo sapiens
MAAAAAATAAAAASIRERQTVALKRMLNFNVPHIKNSTGEPVWKVLIYDRFGQDIISPLLSVKELRDMGITLHLLLHSDRDPIPDVPAVYFVMPTEENIDRMCQDLRNQLYESYYLNFISAISRSKLEDIANAALAASAVTQVAKVFDQYLNFITLEDDMFVLCNQNKELVSYRGAVPIIRCSRGTAAEMVAVKLDKKLRENLRDARNSLFTGDTLGAGQFSFQRPLLVLVDRNIDLATPLHHTWTYQALVHDVLDFHLNRVNLEESSGVENSPAGARPKRKNKKSYDLTPVDKFWQKHKGSPFPEVAESVQQELESYRAQEDEVKRLKSIMGLEGEDEGAISMLSDNTAKLTSAVSSLPELLEKKRLIDLHTNVATAVLEHIKARKLDVYFEYEEKIMSKTTLDKSLLDIISDPDAGTPEDKMRLFLIYYISTQQAPSEADLEQYKKALTDAGCNLNPLQYIKQWKAFTKMASAPASYGSTTTKPMGLLSRVMNTGSQFVMEGVKNLVLKQQNLPVTRILDNLMEMKSNPETDDYRYFDPKMLRGNDSSVPRNKNPFQEAIVFVVGGGNYIEYQNLVDYIKGKQGKHILYGCSELFNATQFIKQLSQLGQK

SEQ ID NO: 59360 - protein, 624 aa, Homo sapiens
MISSVCVSSYRGRKSGNKPPSKTCLKEEMAKGEASEKIIINVGGTRHETYRSTLRTLPGTRLAWLADPDGGGRPETDGGGVGSSGSSGGGGCEFFFDRHPGVFAYVLNYYRTGKLHCPADVCGPLFEEELTFWGIDETDVEPCCWMTYRQHRDAEEALDIFESPDGGGSGAGPSDEAGDDERELALQRLGPHEGGAGHGAGSGGCRGWQPRMWALFEDPYSSRAARVVAFASLFFILVSITTFCLETHEAFNIDRNVTEILRVGNITSVHFRREVETEPILTYIEGVCVLWFTLEFLVRIVCCPDTLDFVKNLLNIIDFVAILPFYLEVGLSGLSSKAARDVLGFLRVVRFVRILRIFKLTRHFVGLRVLGHTLRASTNEFLLLIIFLALGVLIFATMIYYAERIGARPSDPRGNDHTDFKNIPIGFWWAVVTMTTLGYGDMYPKTWSGMLVGALCALAGVLTIAMPVPVIVNNFGMYYSLAMAKQKLPKKRKKHVPRPAQLESPMYCKSEETSPRDSTCSDTSPPAREEGMIERKRADSKQNGDANAVLSDEEGAGLTQPLASSPTPEERRALRRSTTRDRNKKAAACFLLSTGDYACADGSVRKEGNVEPKACVPVSHTCAL

SEQ ID NO: 59361 - protein, 125 aa, Homo sapiens
MLDKAPVLKVIVNSLKNMINTFVPSGKIMQVVDEKLPGLLGNFPGPFEEEMKGIAAVTDIPLGEIISFNIFYELFTICTSIVAEDKKGHLIHGRNMDFGVFLGWNINNDTWVITEQLKPLTVNLD

SEQ ID NO: 59362 - protein, 157 aa, Homo sapiens
MTVTKNQNIILQSISRSEEFDQDGDCSHSTLVNEEEDPSGGRQDWQPRTEGVEITVTFPRDVSPPQEMSQEDLKEKNLINSSLQEWAQAHAVSHPNEIETVELRKKKLTMRPLVLQKEESSRELCNVNLGFLLPRSCLELNISKSVTREDAPHFLKE

SEQ ID NO: 59363 - protein, 307 aa, Homo sapiens
  MOD_RES (1)..(1): Any amino acid
XASQRCLRQAEELREQLEREKEALGQQERERARQRQRAELEELRQQLEESSSALTRALRAEFEKGREEQERRHQMELNTLKQQLELERQAWEAGRTRKEEAWLLNREQELREEIRKGRDKEIELVIHRLEADMALAKEESEKAAESRIKRLRDKYEAELSELEQSERKLQERCSELKGQLGEAEGENLRLQGLVRQKERALEDAQAVNEQLSSERSNLAQVIRQEFEDRLAASEEETRQAKAELATLQARQQLELEEVHRRVKTALARKEEAVSSLRTQHEVSPCGQPCWTSGLGAGLTLWVCCRLR

SEQ ID NO: 59364 - protein, 246 aa, Homo sapiens
MSQRQVLQVFEQYQKARTQFVQMVAELATRPQNIETLQNAGEPGARTPVAPRALSPRRLRPAALPVELLGSRSVGTGVRKSIHSFQRVFGGQAERVKLPDGCGRCALSLFPSSLHTGVMSLLRTLLLDVVPTIQQTAALALGRLANYNDDLAEAVVKCDILPQLVYSLAEQNRFYKKAAAFVLRAVGKHSPQLAQAIVDCGALDTLVICLEDFDPGVKEAAAWALRYIARHNAELSQAVVDAGAVP

SEQ ID NO: 59365 - protein, 134 aa, Homo sapiens
MAVVKTPSRGLKNAKEPFNNASPHLLKNLVEEPKKRKEVPNHLLESKVYAKLVNNKVIQARPGIIHFGGYQVEKQHQQILFTEKAHWHDVPWNCLRHYLVEISLPAPSLCLLTAFSAIHHVDHSSLLPQTPGLK

SEQ ID NO: 59366 - protein, 124 aa, Homo sapiens
MFKVFRLFNFIKVGPFQIASLFPMYVVGYIEPSKFQKIIYMNMISVTLSFILMFGNSMYLSSYYSSSLLMTWAIILKRNEIQKLGVSKLNFWLIQGSAWWCGTIILKFLTSKILGVSDHIRLSD

SEQ ID NO: 59367 - protein, 136 aa, Homo sapiens
MPEQSNDYRVVVFGAGGVGKSSLVLRFVKGTFRDTYIPTIEDTYRQVISCDKSVCTLQITDTTGSHQFPAMQRLSISKGHAFILVFSVTSKQSLEELGPIYKLIVQIKGSVEDIPVMLVGNKCDETQREVDTREAQ

SEQ ID NO: 59368 - protein, 44 aa, Homo sapiens
  MOD_RES (1)..(1): Any amino acid
XALAVLSAKQQEIDLLQKAQVEAKKEHEGAVRLLENTLDSMQVF

SEQ ID NO: 59369 - protein, 590 aa, Homo sapiens
MLAFAARTVVKPLGFLKPFSLMKASSRFKAHQDALPRLPVPPLQQSLDHYLKALQPIVSEEEWAHTKQLVDEFQASGGVGERLQKGLERRARKTENWLSEWWLKTAYLQYRQPVVIYSSPGVMLPKQDFVDLQGQLRFAAKLIEGVLDFKVMIDNETLPVEYLGGKPLCMNQYYQILSSCRVPGPKQDTVSNFSKTKKPPTHITVVHNYQFFELDVYHSDGTPLTADQIFVQLEKIWNSSLQTNKEPVGILTSNHRNSWAKAYNTLIKDKVNRDSVRSIQKSIFTVCLDATMPRVSEDVYRSHVAGQMLHGGGSRLNSGNRWFDKTLQFIVAEDGSCGLVYEHAAAEGPPIVTLLDYVIEYTKKPELVRSPLVPLPMPKKLRFNITPEIKSDIEKAKQNLSIMIQDLDITVMVFHHFGKDFPKSEKLSPDAFIQMALQLAYYRIYGQACATYESASLRMFHLGRTDTIRSASMDSLTFVKAMDDSSVTEHQKVELLRKAVQAHRGYTDRAIRGEAFDRHLLGLKLQAIEDLVSMPDIFMDTSYAIAMHFHLSTSQLRGDQRRPPGALPGEGAPGHACPAAEPPPGQALSP

SEQ ID NO: 59370 - protein, 1989 aa, Homo sapiens
MDEVEQDQHEARLKELFDSFDTTGTGSLGQEELTDLCHMLSLEEVAPVLQQTLLQDNLLGRVHFDQFKEALILILSRTLSNEEHFQEPDCSLEAQPKYVRGGKRYGRRSLPEFQESVEEFPEVTVIEPLDEEARPSHIPAGDCSEHWKTQRSEEYEAEGQLRFWNPDDLNASQSGSSPPQDWIEEKLQEVCEDLGITRDGHLNRKKLVSICEQYGLQNVDGEMLEEVFHNLDPDGTMSVEDFFYGLFKNGKSLTPSASTPYRQLKRHLSMQSFDESGRRTTTSSAMTSTIGFRVFSCLDDGMGHASVERILDTWQEEGIENSQEILKALDFSLDGNINLTELTLALENELLVTKNSIHQAALASFKAEIRHLLERVDQVVREKEKLRSDLDKAEKLKSLMASEVDDHHAAIERRNEYNLRKLDEEYKERIAALKNELRKEREQILQQAGKQRLELEQEIEKAKTEENYIRDRLALSLKENSRLENELLENAEKLAEYENLTNKLQRNLENVLAEKFGDLDPSSAEFFLQEERLTQMRNEYERQCRVLQDQVDELQSELEEYRAQGRVLRLPLKNSPSEEVEANSGGIEPEHGLGSEECNPLNMSIEAELVIEQMKEQHHRDICCLRLELEDKVRHYEKQLDETVVSCKKAQENMKQRHENETHTLEKQISDLKNEIAELQGQAAVLKEAHHEATCRHEEEKKQLQVKLEEEKTHLQEKLRLQHEMELKARLTQAQASFEREREGLQSSAWTEEKVRGLTQELEQFHQEQLTSLVEKHTLEKEELRKELLEKHQRELQEGREKMETECNRRTSQIEAQFQSDCQKVTERCESALQSLEGRYRQELKDLQEQQREEKSQWEFEKDELTQECAEAQELLKETLKREKTTSLVLTQEREMLEKTYKEHLNSMVVERQQLLQDLEDLRNVSETQQSLLSDQILELKSSHKRELREREEVLCQAGASEQLASQRLERLEMEHDQERQEMMSKLLAMENIHKATCETADRERAEMSTEISRLQSKIKEMQQATSPLSMLQSGCQVIGEEEVEGDGALSLLQQGEQLLEENGDVLLSLQRAHEQAVKENVKMATEISRLQQRLQKLEPGLVMSSCLDEPATEFFGNTAEQTEQFLQQNRTKQVEGVTRRHVLSDLEDDEVRDLGSTGTSSVQRQEVKIEESEASVEGFSELENSEETRTESWELKNQISQLQEQLMMLCADCDRASEKKQDLLFDVSVLKKKLKMLERIPEASPKYKLLYEDVSRENDCLQEELRMMETRYDEALENNKELTAEVFRLQDELKKMEEVTETFLSLEKSYDEVKIENEGLNVLVLRLQGKIEKLQESVVQRCDCCLWEASLENLEIEPDGNILQLNQTLEECVPRVRSVHHVIEECKQENQYLEGNTQLLEKVKAHEIAWLHGTIQTHQERPRVQNQVILEENTTLLGFQDKHFQHQATIAELELEKTKLQELTRKLKERVTILVKQKDVLSHGEKEEELKAMMHDLQITCSEMQQKVELLRYESEKLQQENSILRNEITTLNEEDSISNLKLGTLNGSQEEMWQKTETVKQENAAVQKMVENLKKQISELKIKNQQLDLENTELSQKNSQNQEKLQELNQRLTEMLCQKEKEPGNSALEEREQEKFNLKEELERCKVQSSTLVSSLEAELSEVKIQTHIVQQENHLLKDELEKMKQLHRCPDLSDFQQKISSVLSYNEKLLKEKEALSEELNSCVDKLAKSSLLEHRIATMKQEQKSWEHQSASLKSQLVASQEKVQNLEDTVQNVNLQMSRMKSDLRVTQQEKEALKQEVMSLHKQLQNAGGKSWAPEIATHPSGLHNQQKRLSWDKLDHLMNEEQQLLWQENERLQTMVQNTKAELTHSREKVRQLESNLLPKHQKHLNPSGTMNPTEQEKLSLKRECDQFQKEQSPANRKVSQMNSLEQELETIHLENEGLKKKQVKLDEQLMENSVVGSSREGCSSLPEIVCEDAAPEVHCDA

SEQ ID NO: 59371 - protein, 94 aa, Homo sapiens
MTVLQEPVQAAIWQALNHYAYRDAVFLAERLYAEGLQKGNKSYLVECLISRKAMMILLLSLVIQLALLFHCWDMYIARQIGLPKDQNVTKRALV

SEQ ID NO: 59372 - protein, 94 aa, Homo sapiens
  MOD_RES (1)..(1): Any amino acid
XSCEGSFDTAFDWIRKERNQYGEVMVRFSTYFFRNSWYWLYENRNNRTRYGDPIQILTGWPGIPTHNIDAFVHIWTWKRDERYFFQGEKAPKDQ

SEQ ID NO: 59373 - protein, 47 aa, Homo sapiens
MDDKAFTKELDQWVEQLNECKQLNENQVRTLCEKAKEILTKESNVQE

SEQ ID NO: 59374 - protein, 125 aa, Homo sapiens
AHLPLGQSNSCGSVLPPSLAAMAKDSESRRMLRGKSKKGRMNSSAGAISNSKSSSIKGYNHQQMSEGHRQKSEFYNRTASESNVYLNSFHYPDHSYKDQAFDTLSLDSSDSMETSISACSPDNIS

SEQ ID NO: 59375 - protein, 60 aa, Homo sapiens
MELLNTNSRFLHDNIVEYAKRLSATLPEKLSVCYFTNSGSEANDLALRLARQFRGHQDVI

SEQ ID NO: 59376 - protein, 106 aa, Homo sapiens
MFPWMRPQAAPGRRRGRQTYSRFQTLELEKEFLFNPYLTRKRRIEVSHALALTERQVKIWFQNRRMKWKKENNKDKFPVSRQEVKDGETKKEAQELEEDRAEGLTN

SEQ ID NO: 59377 - protein, 146 aa, Homo sapiens
MDSELKEEIPVHEEFILCGGAETQVLKCGPWTDLFHDQSVKRPKLLIFIIPGERKSLGNPGFSAFYVPFAKALYSLTNRRFPVWTISHAGHALAPKDKKILTTSEDSNAQEIKDIYGLNGQIEHKLAFLRTHVPKDMKLVLIGHSI

SEQ ID NO: 59378 - protein, 1313 aa, Homo sapiens
MDSQELKTLINYYCQERYFHHVLLVASEGIKRYGSDPVFRFYHAYGTLMEGKTQEALREFEAIKNKQDVSLCSLLALIYAHKMSPNPDREAILESDARVKEQRKGAGEKALYHAGLFLWHIGRHDKAREYIDRMIKISDGSKQGHVLKAWLDITRGKEPYTKKALKYFEEGLQDGNDTFALLGKAQCLEMRQNYSGALETVNQIIVNFPSFLPAFVKKMKLQLALQDWDQTVETAQRLLLQDSQNVEALRMQALYYVCREGDIEKASTKLENLGNTLDAMEPQNAQLFYNITLAFSRTCGRSQLILQKIQTLLERAFSLNPQQSEFATELGYQMILQGRVKEALKWYKTAMTLDETSVSALVGFIQCQLIEGQLQDADQQLEFLNEIQQSIGKSAELIYLHAVLAMKKNKRQEEVINLLNDVLDTHFSQLEGLPLGIQYFEKLNPDFLLEIVMEYLSFCPMQPASPGQPLCPLLRRCISVLETVVRTVPGLLQTVFLIAKVKYLSGDIEAAFNNLQHCLEHNPSYADAHLLLAQVYLSQEKVKLCSQSLELCLSYDFKVRDYPLYHLIKAQSQKKMGEIADAIKTLHMAMSLPGMKRIGASTKSKDRKTEVDTSHRLSIFLELIDVHRLNGEQHEATKVLQDAIHEFSGTSEEVRVTIANADLALAQGDIERALSILQNVTAEQPYFIEAREKMADIYLKHRKDKMLYITCFREIAERMANPRSFLLLGDAYMNILEPEEAIVAYEQALNQNPKDGTLASKMGKALIKTHNYSMAITYYEAALKTGQKNYLCYDLAELLLKLKWYDKAEKVLQHALAHEPVNELSALMEDGRCQVLLAKVYSKMEKLGDAITALQQARELQARVLKRVQMEQPDAVPAQKHLAAEICAEIAKHSVAQRDYEKAIKFYREALVHCETDNKIMLELARLYLAQDDPDSCLRQCALLLQSDQDNEAATMMMADLMFRKQDYEQAVFHLQQLLEHNYMTLSRLIDLLRRCGKLEDVPRFFSMAEKRNSRAKLEPGFQYCKGLYLWYTGEPNDALRHFNKARKDRDWGQNALYNMIEICLNPDNETVGGEVFENLDGDLGNSTEKQESVQLAVRTAEKLLKELKPQTVQGHVQLRIMENYCLMATKQKSNVEQALNTFTEIAASEKEHIPALLGMATAYMILKQTPRARNQLKRIAKMNWNAIDAEEFEKSWLLLADIYIQSAKYDMAEDLLKRCLRHNRSCCKAYEYMGYIMEKEQAYTDAALNYEMAWKYSNRTNPAVGYKLAFNYLKAKRYVDSIDICHQVLEAHPTYPKIRKDILDKARASLRP

SEQ ID NO: 59379 - protein, 159 aa, Homo sapiens
MLPKRRRARVGSPSGDAASSTPPSTRFPGVAIYLVEPRMGRSRRAFLTGLARSKGFRVLDACSSEATHVVMEETSAEEAVSWQERRMAAAPPGCTPPALLDISWLTESLGAGQPVPVECRHRLEEALEILAEAAGFEGSEGRLLTFCRAASVLKALPSP

SEQ ID NO: 59380 - protein, 168 aa, Homo sapiens
MAAPRVFPLSCAVQQYAWGKMGSNSEVARLLASSDPLAQIAEDKPYAELWMGTHPRGDAKILDNRISQKTLSQWIAENQDSLGSKELAEKLHLQAPQHYPDANHKPEMAIALTPFQGLCGFRPVEEIVTFLKKVPEFQFLIGDEAATHLKQTMSHDSQAVASSLQSCF

SEQ ID NO: 59381 - protein, 134 aa, Homo sapiens
MQIDVDPQEDPQNAPDVNYVVENPSLDLEQYAASYSGLMRIERLQFIADHCPTLRVEALKMALSFVQRTFNVDMYEEIHRKLSEATRELQNAPDAIPESGVEPPALDTAWVEATRKKALLKLEKLDTDLKNYKG

SEQ ID NO: 59382 - protein, 130 aa, Homo sapiens
FRVGFVVAERVLYMPSMGYCILFVHGLSKLCTWLNRCGATTLIVSTVLLLLLFSWKTVKQNEIWLSRESLFRSGVQTLPHNAKVHYNYANFLKDQGRNKEAIYHYRTALNNNKAWDYLCWRFRKTLTDLP

SEQ ID NO: 59383 - protein, 268 aa, Homo sapiens
  MOD_RES (1)..(1): Any amino acid
XMLWSHEPGGRGGSFGSRGDQRKEHCNFSISDRLCFAILYSRPKSASNVHYFSIDNELEYENFYADFGPLNLAMVYRYCCKINKKLKSITMLRKKIVHFTGSDQRKQANAAFLVGCYMVIYLGRTPEEAYRILIFGETSYIPFRDAAYGSCNFYITLLDCFHAVKKAMQYGFLNFNSFNLDEYEHYEKAENGDLNWIIPDRFIAFCGPHSRARLESGYHQHSPETYIQYFKNHNVTTIIRLNKRMYDAKRFTDAGFDHHDLFFADGST

SEQ ID NO: 59384 - protein, 75 aa, Homo sapiens
MHSLATAAPVPTTLAQVDREKIYQWINELSSPETRENALLELSKKRESVPDLAPMLWHSFGTIAALLQVIVMQVI

SEQ ID NO: 59385 - protein, 288 aa, Homo sapiens
MSEGVDLIDIYADEEFNQDPEFNNTDQIDLYDDVLTATSQPSDDRSSSTEPPPPVRQEPSPKPNNKTPAILYTYSGLRNRRAAVYVGSFSWWTTDQQLIQVIRSIGVYDVVELKFAENRANGQSKGYAEVVVASENSVHKLLELLPGKVLNGEKVDVRPATRQNLSQFEAQARKRIPPRAHSRDSSDSADGRATPSENLVPSSARVDKPPSVLPYFNRPPSALPLMGLPPPPIPPPPPLSSSFGVPPPPPGIHYQHLMPPPPRLPPHLAVPPPGAIPPALHLNPAFFP

SEQ ID NO: 59386 - protein, 59 aa, Homo sapiens
MSETVICSSRATVMLYDDGNKRWLPAGTGPQAFSRVQIYHNPTANSFRVVGRKMQPDQQ

SEQ ID NO: 59387 - protein, 56 aa, Homo sapiens
  MOD_RES (1)..(1): Any amino acid
XASAKTCDGVQCAFEELVEKIIQTPGLWESENQNKGVKLSHREEGQGGGACFFRSN

SEQ ID NO: 59388 - protein, 119 aa, Homo sapiens
  MOD_RES (1)..(1): Any amino acid
XVSLKEDIDMLQNALAENDTPYYDVSRNARHADGVFTSDFSKLLGQLSAKKYLESLMGKRVSSNISEDPVPVKRHSDAVFTDNYTRLRKQMAVKKYLNSILNGKRSEGESPDFPEELEK

SEQ ID NO: 59389 - protein, 392 aa, Homo sapiens
MDAMKRGLCCVLLLCGAVFVSPSQEIHARFRRGARSYQVICRDEKTQMIYQQHQSWLRPVLRSNRVEYCWCNSGRAQCHSVPVKSCSEPRCFNGGTCQQALYFSDFVCQCPEGFAGKCCEIDTRATCYEDQGISYRGTWSTAESGAECTNWNSSALAQKPYSGRRPDAIRLGLGNHNYCRNPDRDSKPWCYVFKAGKYSSEFCSTPACSEGNSDCYFGNGSAYRGTHSLTESGASCLPWNSMILIGKVYTAQNPSAQALGLGKHNYCRNPDGDAKPWCHVLKNRRLTWEYCDVPSCSTCGLRQYSQPQFRIKGGLFADIASHPWQAAIFAKHRRSPGERFLCGGILISSCWILSAAHCFQERLFLHQVSAPPPDGDLGQNIPGGPWRGGAEI

SEQ ID NO: 59390 - protein, 129 aa, Homo sapiens
MFEEKASSPSGKMGGEEKPIGAGEEKQKEGGKKKNKEGSGDGGRAELNPWPEYIYTRLEMYNILKAEHDSILAEKAEKDSKPIKVTLPDGKQVDAESWKTTPYQIACGISQGLADNTVIAKVNNVVWDL

SEQ ID NO: 59391 - protein, 99 aa, Homo sapiens
MQTASGGPQPRLSAVEVEAEAGRLRKACSLLRLRMREELSAAPMDWMQEYRCLLTLEGLQAMVGQCLHRLQELRAAVAEQPPRPCPVGRPPGASPSCGG

SEQ ID NO: 59392 - protein, 1325 aa, Homo sapiens
MSSEEDKSVEQPQPPPPPPEEPGAPAPSPAAADKRPRGRPRKDGASPFQRARKKPRSRGKTAVEDEDSMDGLETTETETIVETEIKEQSAEEDAEAEVDNSKQLIPTLQRSVSEESANSLVSVGVEAKISEQLCAFCYCGEKSSLGQGDLKQFRITPGFILPWRNQPSNKKDIDDNSNGTYEKMQNSAPRKQRGQRKERSPQQNIVSCVSVSTQTASDDQAGKLWDELSLVGLPDAIDIQALFDSTGTCWAHHRCVEWSLGVCQMEEPLLVNVDKAVVSGSTERCAFCKHLGATIKCCEEKCTQMYHYPCAAGAGTFQDFSHIFLLCPEHIDQAPERSKEDANCAVCDSPGDLLDQFFCTTCGQHYHGMCLDIAVTPLKRAGWQCPECKVCQNCKQSGEDSKMLVCDTCDKGYHTFCLQPVMKSVPTNGWKCKNCRICIECGTRSSSQWHHNCLICDNCYQQQDNLCPFCGKCYHPELQKDMLHCNMCKRWVHLECDKPTDHELDTQLKEEYICMYCKHLGAEMDRLQPGEEVEIAELTTDYNNEMEVEGPEDQMVFSEQAANKDVNGQESTPGIVPDAVQVHTEEQQKSHPSESLDTDSLLIAVSSQHTVNTELEKQISNEVDSEDLKMSSEVKHICGEDQIEDKMEVTENIEVVTHQITVQQEQLQLLEEPETVVSREESRPPKLVMESVTLPLETLVSPHEESISLCPEEQLVIERLQGEKEQKENSELSTGLMDSEMTPTIEGCVKDVSYQGGKSIKLSSETESSFSSSADISKADVSSSPTPSSDLPSHDMLHNYPSALSSSAGNIMPTTYISVTPKIGMGKPAITKRKFSPGRPRSKQGAWSTHNTVSPPSWSPDISEGREIFKPRQLPGSAIWSIKVGRGSGFPGKRRPRGAGLSGRGGRGRSKLKSGIGAVVLPGVSTADISSNKDDEENSMHNTVVLFSSSDKFTLNQDMCVVCGSFGQGAEGRLLACSQCGQCYHPYCVSIKITKVVLSKGWRCLECTVCEACGKATDPGRLLLCDDCDISYHTYCLDPPLQTVPKGGWKCKWCVWCRHCGATSAGLRCEWQNNYTQCAPCASLSSCPVCYRNYREEDLILQCRQCDRWMHAVCQNLNTEEEVENVADIGFDCSMCRPYMPASNVPSSDCCESSLVAQIVTKVKELDPPKTYTQDGVCLTESGMTQLQSLTVTVPRRKRSKPKLKLKIINQNSVAVLQTPPDIQSEHSRDGEMDDSREGELMDCDGKSESSPEREAVDDETKGVEGTDGVKKRKRKPYRPGIGGFMVRQRSRTGQGKTKRSVIRKDSSGSISEQLPCRDDGIVLT

SEQ ID NO: 59393 - protein, 111 aa, Homo sapiens
  MOD_RES (1)..(1): Any amino acid
XKIGLDTEGETCGNAEKLAEYICSRESSALPLLFPCGNLKREILPKALKDKGIAMESITVYQTVAHPGIQGNLNSYYSQQFPTRILPHWSRGCQHQPGTTPVLKPPWWPVA

SEQ ID NO: 59394 - protein, 616 aa, Homo sapiens
MAATDLSYGLYRDPVCLQEKTEVERVVADCLTNCYQDSVTFDDLAVDFTPEEWTLLDPTQRNLYRDVMLENYKNLATVGYQLFKPSLISWLEQEESRTVQRGDFQASEWKVQLKTKELALQQDVLGEPTSSGIQMIGSHNGGEVSDVKQCGDVSSEHSCLKTHVRTQNSENTFECYLYGVDFLTLHKKTSTGEQRSVFSQCGKAFSLNPDVVCQRTCTGEKAFDCSDSGKSFINHSHLQGHLRTHNGESLHEWKECGRGFIHSTDLAVRIQTHRSEKPYKCKECGKGFRYSAYLNIHMGTHTGDNPYECKECGKAFTRSCQLTQHRKTHTGEKPYKCKDCGRAFTVSSCLSQHMKIHVGEKPYECKECGIAFTRSSQLTEHLKTHTAKDPFECKICGKSFRNSSCLSDHFRIHTGIKPYKCKDCGKAFTQNSDLTKHARTHSGERPYECKECGKAFARSSRLSEHTRTHTGEKPFECVKCGKAFAISSNLSGHLRIHTGEKPFECLECGKAFTHSSSLNNHMRTHSAKKPFTCMECGKAFKFPTCVNLHMRIHTGEKPYKCKQCGKSFSYSNSFQLHERTHTGEKPYECKECGKAFSSSSSFRNHERRHADERLSA

SEQ ID NO: 59395 - protein, 94 aa, Homo sapiens
MSEEEQGSGTTTGCGLPSLLQEYGTRIGKTPVYDLLKAEGQAHQPNFTFRVTVGDTSCTGQGPSKKAAKHKAAEVALKHLKGGSMLEPALEDSR

SEQ ID NO: 59396 - protein, 134 aa, Homo sapiens
MEVVTFGDVAVHFSREEWQCLDPGQRALYREVMLENHSSVAGLAGFLVFKPELISRLEQGEEPWVLDLQGAEGTEAPRTSKTAVEAGNLKPGGQQAGPCPPVKALGKDPVLPLRAAGGFLAVLGFLGLWMRPSL

SEQ ID NO: 59397 - protein, 23 aa, Homo sapiens
  MOD_RES (1)..(1): Any amino acid
XLNEFTTYGSEESSDSVRVAHRS

SEQ ID NO: 59398 - protein, 174 aa, Homo sapiens; identical to SEQ ID NO: 47355

SEQ ID NO: 59399 - protein, 767 aa, Homo sapiens
MAALSGGGGGGAEPGQALFNGDMEPEAGAGAGAAASSAADPAIPEEVWNIKQMIKLTQEHIEALLDKFGGEHNPPSIYLEAYEEYTSKLDALQQREQQLLESLGNGTDFSVSSSASMDTVTSSSSSSLSVLPSSLSVFQNPTDVARSNPKSPQKPIVRVFLPNKQRTVVPARCGVTVRDSLKKALMMRGLIPECCAVYRIQDGEKKPIGWDTDISWLTGEELHVEVLENVPLTTHNFVRKTFFTLAFCDFCRKLLFQGFRCQTCGYKFHQRCSTEVPLMCVNYDQLDLLFVSKFFEHHPIPQEEASLAETALTSGSSPSAPASDSIGPQILTSPSPSKSIPIPQPFRPADEDHRNQFGQRDRSSSAPNVHINTIEPVNIDDLIRDQGFRGDGGSTTGLSATPPASLPGSLTNVKALQKSPGPQRERKSSSSSEDRNRMKTLGRRDSSDDWEIPDGQITVGQRIGSGSFGTVYKGKWHGDVAVKMLNVTAPTPQQLQAFKNEVGVLRKTRHVNILLFMGYSTKPQLAIVTQWCEGSSLYHHLHIIETKFEMIKLIDIARQTAQGMDYLHAKSIIHRDLKSNNIFLHEDLTVKIGDFGLATVKSRWSGSHQFEQLSGSILWMAPEVIRMQDKNPYSFQSDVYAFGIVLYELMTGQLPYSNINNRDQIIFMVGRGYLSPDLSKVRSNCPKAMKRLMAECLKKKRDERPLFPQILASIELLARSLPKIHRSASEPSLNRAGFQTEDFSLYACASPKTPIQAGGYGEFAAFK

SEQ ID NO: 59400 - protein, 105 aa, Homo sapiens
MSSEEDKSVEQPQPPPPPPEEPGAPAPSPAAADKRPRGRPRKDGASPFQRARKKPRSRGKTAVEDEDSMDGLETTETETIVETGIRWGLGIYSPWIRWHHCNFHL

SEQ ID NO: 59401 - protein, 28 aa, Homo sapiens
MKPKLMYQELKVPAEEPANELPMNEIEA

SEQ ID NO: 59402 - protein, 76 aa, Homo sapiens
  MOD_RES (1)..(1): Any amino acid
XAPTEGACGPVKPTLVCSSAVGSWSYSQQRRQRVCSGEGLPKADLMAFSPSLPPCPMVDVDGEDQSIGGDHSRKGI

SEQ ID NO: 59403 - protein, 33 aa, Homo sapiens
NSSAPLAEDIDPENPLPETDSQPIPPSGGPFSE

SEQ ID NO: 59404 - protein, 41 aa, Homo sapiens
MWLFTVNQVLRKMQRRHSSNTDNIPPESCDQGWPLWGTGGH

SEQ ID NO: 59405 - protein, 117 aa, Homo sapiens
LDSILSNYTRSGSLLFRKLVCAFFDDKTLANSLPNGKRKRGLNDNRKGLDQNIVGAIKVFTEKYCTANHVDKLPGPRDWVQILQDQIKLARRRLKRGSEIADSDERLDGIALPPTGK

SEQ ID NO: 59406 - protein, 197 aa, Homo sapiens
  MOD_RES (1)..(1): Any amino acid
XFGNILSCKRQGLHCPTIWLQRSSCFGLPKHWDYRHEPQHPIVVCDENGSKGYAFVHFETQEAADKAIEKMNGMLLNDRKVFVGRFKSRKEREAELGAKAKEFTNVYIKNFGEEVDDESLKELFSQFGKTLSVKVMRDPNGKSKGFGFVSYEKHEDANKAVEEMNGKEISGKIIFVGRAQKKVERQAELKRKFEQLK

SEQ ID NO: 59407 - protein, 165 aa, Homo sapiens
MSRVPSPPPPAEMSSGPVAESWCYTQIKVVKFSYMWTINNFSFCREEMGEVIKSSTFSSGANDKLKWCLRVNPKGLDEESKDYLSLYLLLVSCPKSEVRAKFKFSILNAKGEETKAMESQRAYRFVQGKDWGFKKFIRRDFLLDEANGLLPDDKLTLFCEILIKS

SEQ ID NO: 59408 - protein, 173 aa, Homo sapiens
  MOD_RES (1)..(1): Any amino acid
XKKLKGTEDELDKYSEDLKDAQEKLELTEKKASDAEGDVAALNRRIQLVEEELDRAQERLATALQKLEEAEKAADESERGMKVIENRAMKDEEKMEIQEMQLKEAKHIAEEADRKYEEVARKLVILEGELERAEERAEVSELKCGDLEEELKNVTNNLKSLEAASEKRRGLTM

SEQ ID NO: 59409 - protein, 115 aa, Homo sapiens
MAHLRGFANQHSRVDPEELFTKLDRIGKGSFGEVYKGIDNHTKEVVAIKIIDLEEAEDEIEDIQQEITVLSQCDSPYITRYFGSYLKVPVVGRRGPCWCCARLSSMSEGLSDMPE

SEQ ID NO: 59410 - protein, 1964 aa, Homo sapiens
MEFPIGSLETNNFRRFTPESLVEIEKQIAAKQGTKKAREKHREQKDQEEKPRPQLDLKACNQLPKFYGELPAELIGEPLEDLDPFYSTHRTFMVLNKGRTISRFSATRALWLFSPFNLIRRTAIKVSVHSWFSLFITVTILVNCVCMTRTDLPEKIEYVFTVIYTFEALIKILARGFCLNEFTYLRDPWNWLDFSVITLAYVGTAIDLRGISGLRTFRVLRALKTVSVIPGLKVIVGALIHSVKKLADVTILTIFCLSVFALVGLQLFKGNLKNKCVKNDMAVNETTNYSSHRKREWSLFHRDQDIYINKRGTSDPLLCGNGSDSGHCPDGYICLKTSDNPDFNYTSFDSFAWAFLSLFRLMTQDSWERLYQQTLRTSGKIYMIFFVLVIFLGSFYLVNLILAVVTMAYEEQNQATTDEIEAKEKKFQEALEMLRKEQEVLAALGIDTTSLHSHNGSPLTSKNASERRHRIKPRVSEGSTEDNKSPRSDPYNQRRMSFLGLASGKRRASHGSVFHFRSPGRDISLPEGVTDDGVFPGDHESHRGSLLLGGGAGQQGPLPRSPLPQPSNPDSRHGEDEHQPPPTSELAPGAVDVSAFDAGQKKTFLSAEYLDEPFRAQRAMSVVSIITSVLEELEESEQKCPPCLTSLSQKYLIWDCCPMWVKLKTILFGLVTDPFAELTITLCIVVNTIFMAMEHHGMSPTFEAMLQIGNIVFTIFFTAEMVFKIIAFDPYYYFQKKWNIFDCIIVTVSLLELGVAKKGSLSVLRSFRLLRVFKLAKSWPTLNTLIKIIGNSVGALGNLTIILAIIVFVFALVGKQLLGENYRNNRKNISAPHEDWPRWHMHDFFHSFLIVFRILCGEWIENMWACMEVGQKSICLILFLTVMVLGNLVVLNLFIALLLNSFSADNLTAPEDDGEVNNLQVALARIQVFGHRTKQALCSFFSRSCPFPQPKAEPELVVKLPLSSSKAENHIAANTARGSSGGLQAPRGPRDEHSDFIANPTVWVSVPIAEGESDLDDLEDDGGEDAQSFQQEVIPKGQEQLQQVERCGDHLTPRSPGTGTSSEDLAPSLGETWKDESVPQVPAEGVDDTSSSEGSTVDCLDPEEILRKIPELADDLEEPDDCFTEGCIRHCPCCKLDTTKSPWDVGWQVRKTCYRIVEHSWFESFIIFMILLSSGSLAFEDYYLDQKPTVKALLEYTDRVFTFIFVFEMLLKWVAYGFKKYFTNAWCWLDFLIVNISLISLTAKILEYSEVAPIKALRTLRALRPLRALSRFEGMRVVVDALVGAIPSIMNVLLVCLIFWLIFSIMGVNLFAGKFWRCINYTDGEFSLVPLSIVNNKSDCKIQNSTGSFFWVNVKVNFDNVAMGYLALLQVATFKGWMDIMYAAVDSREVNMQPKWEDNVYMYLYFVIFIIFGGFFTLNLFVGVIIDNFNQQKKKLGGQDIFMTEEQKKYYNAMKKLGSKKPQKPIPRPLNKFQGFVFDIVTRQAFDITIMVLICLNMITMMVETDDQSEEKTKILGKINQFFVAVFTGECVMKMFALRQYYFTNGWNVFDFIVVVLSIASLIFSAILKSLQSYFSPTLFRVIRLARIGRILRLIRAAKGIRTLLFALMMSLPALFNIGLLLFLVMFIYSIFGMSSFPHVRWEAGIDDMFNFQTFANSMLCLFQITTSAGWDGLLSPILNTGPPYCDPNLPNSNGTRGDCGSPAVGIIFFTTYIIISFLIMVNMYIAVILENFNVATEESTEPLSEDDFDMFYETWEKFDPEATQFITFSALSDFADTLSGPLRIPKPNRNILIQMDLPLVPGDKIHCLDILFAFTKNVLGESGELDSLKANMEEKFMATNLSKSSYEPIATTLRWKQEDISATVIQKAYRSYVLHRSMALSNTPCVPRAEEEAASLPDEGFVAFTANENCVLPDKSETASATSFPPSYESVTRGLSDRVNMRTSSSIQNEDEATSMELIAPGP

SEQ ID NO: 59411 - protein, 132 aa, Homo sapiens
MDSEGGSLLLDEDSEVFKMLQENREGRAAPRQSSSFRLLQEALEAEERGGTPAFLPSSLSPQSSLPASRALATPPKLHTCEKCSTSIANQAVRIQEGRYRHPGCYTCADCGLNLKMRGHFWMGLARAWHGAA

SEQ ID NO: 59412 - protein, 87 aa, Homo sapiens
  MOD_RES (1)..(1): Any amino acid
XLPSVSAGLGEPRPPDVEDMSSSDSDSDWDGGSRLSPFLPHDHLGLAVFSMLCCFWPVGIAAFCLAQKHPQCLTYSRCYVSAFGIHA

SEQ ID NO: 59413 - protein, 25 aa, Homo sapiens
MNIDDKLEGLFLKCGGIDEMQSSRT

SEQ ID NO: 59414 - protein, 286 aa, Homo sapiens
MEPPDAPAQARGAPRLLLLAVLLAAHPDAQAEVRLSVPPLVEVMRGKSVILDCTPTGTHDHYMLEWFLVTMHDTRGRSPPYQLDSQGRLVLAEAQVGDERDYVCVVRAGAAGTAEATARLNVFAKPEATEVSPNKGTLSVMEDSAQEIATCNSRNGNPAPKITWYRNGQRLEVPVEMNPEGYMTSRTVREASGLLSLTSTLYLRLRKDDRDASFHCAAHYSLPEGRHGRLDSPTFHLTLHYPTEHVQFWVGSPSTPAGWVREGDTVQLLCRGDGSPSPEYTLFRLQ

SEQ ID NO: 59415 - protein, 980 aa, Homo sapiens
MTSPQLEWTLQTLLEQLNEDELKSFKSLLWAFPLEDVLQKTPWSEVEEADGKKLAEILVNTSSENWIRNATVNILEEMNLTELCKMAKAEMMEDGQVQEIDNPELGDAEEDSELAKPGEKEGWRNSMEKQSLVWKNTFWQGDIDNFHDDVTLRNQRFIPFLNPRTPRKLTPYTVVLHGPAGVGKTTLAKKCMLDWTDCNLSPTLRYAFYLSCKELSRMGPCSFAELISKDWPELQDDIPSILAQAQRILFVVDGLDELKVPPGALIQDICGDWEKKKPVPVLLGSLLKRKMLPRAALLVTTRPRALRDLQLLAQQPIYVRVEGFLEEDRRAYFLRHFGDEDQAMRAFELMRSNAALFQLGSAPAVCWIVCTTLKLQMEKGEDPVPTCLTRTGLFLRFLCSRFPQGAQLRGALRTLSLLAAQGLWAQMSVFHREDLERLGVQESDLRLFLDGDILRQDRVSKGCYSFIHLSFQQFLTALFYTLEKEEGEDRDGHAWDIGDVQKLLSGEERLKNPDLIQVGHFLFGLANEKRAKELEATFGCRMSPDIKQELLQCKAHLHANKPLSVTDLKEVLGCLYESQEEELAKVVVAPFKEISIHLTNTSEVMHCSFSLKHCQDLQKLSLQVAKGVFLENYMDFELDIEFERCTYLTIPNWARQDLRSLRLWTDFCSLFSSNSNLKFLEVKQSFLSDSSVRILCDHVTRSTCHLQKVEIKNVTPDTAYRDFCLAFIGKKTLTHLTLAGHIEWERTMMLMLCDLLRNHKCNLQYLRLGGHCATPEQWAEFFYVLKANQSLKHLRLSANVLLDEGAMLLYKTMTRPKHFLQMLSLENCRLTEASCKDLAAVLVVSKKLTHLCLAKNPIGDTGVKFLCEGLSYPDCKLQTLVLQQCSITKLGCRYLSEALQEACSLTNLDLSINQIARGLWILCQALENPNCNLKHLRLKTYETNLEIKKLLEEVKEKNPKLTIDCNASGATAPPCCDFFC

SEQ ID NO: 59416 - protein, 58 aa, Homo sapiens
MASGVTVNDEVIKVFNDMKVRKSSTQEEIKKRKKAVLFCLSDDKRQIIVEEAKQILGS

SEQ ID NO: 59417 - protein, 281 aa, Homo sapiens
LVHVKKNGQHVASSPIPVVISQSEIGDASRVRVSGQGLHEGHTFEPAEFIIDTRDAGYGGLSLSIEGPSKVDINTEDLEDGTCRVTYCPTEPGNYIINIKFADQHVPEISIQDMTAQVTSPSGKTHEAEIVEGENHTYCIRFVPAEMGTHTVSVKYKGQHVPGSPFQFTVGPLGEGGAHKVRAGGPGLERAEAGVPAEFSIWTREAGAGGLAIAVEGPSKAEISFEDRKDGSCGVAYVVQEPGDYEVSVKFNEEHIPDSPFVVPVASPSGDARRLTVSSLQ

SEQ ID NO: 59418 - protein, 161 aa, Homo sapiens
MGQPSLTWMLMVVVASWFITTAATDTSEARTKYNCPARWSWRTPQRGGDTEQGWCSECHSNATCTEDEAVTTCTCQEGFTGDGLTCVDLDECAIPGAHNCSANSSCVNTPGSFSCVCPEGFRLSPGLGCTDVDECAEPGLSHCHALATCVNVVGSYLCVCP

SEQ ID NO: 59419 - protein, 102 aa, Homo sapiens
MRVSGVLRLLALIFAIVTTWMFIRSYMSFSMKTIRLPRWLAASPTKEIQVKKYKCGLIKPCPANYFAFKICSGAANVVGPTMCFEDRMIMSPVKNNVGRGLN

SEQ ID NO: 59420 - protein, 479 aa, Homo sapiens
  MOD_RES (1)..(1): Any amino acid
XVDMKSEGQATVIQQLEQTIEDLRTKIAELERQYPALDTEVASGHQGLENGVTASGDVCLEALRDSSTSLIWEKIEEPSIDCHEFEELFSKTAVKERKKPISDTISKTKAKQVVKLLSNKRSQAVGILMSSLHLDMKDIQHAVVNLDNSVVDLETLQALYENRAQSDELEKIEKHGRSSKDKENAKSLDKPEQFLYELSLIPNFSERVFCILFQSTFSESICSIRRKLELLQKLCETLKNGPGVMQVLGLVLAFGNYMNGGNKTRGQADGFGLDILPKLKDVKSSDNSRSLLSYIVSYYLRNFDEDAGKEQCLFPLPEPQDLFQASQMKFEDFQKDLRKLKKDLKACEVEAGKVYQVSSKEHMQPFKENMEQFIIQAKIDQEAEENSLTETHKCFLETTAYFFMKPKLGEKEVSPNAFFSIWHEFSSDFKDFWKKENKLLLQERVKEAEEVCRQKKGKSLYKIKPRHDSGIKAKISMKT

SEQ ID NO: 59421 - protein, 84 aa, Homo sapiens
MAQSKLDCRSPVGLDCCNCCLDLAHRSGLQRGSSGENNNPGSPTVSNFRQLQEKLVFENLNTDKLNSIMRQDSLEPVLRDPCYL

SEQ ID NO: 59422 - protein, 136 aa, Homo sapiens
MLDCGIHPGLEGMDALPYIDLIDPAEIDLLLISHFHLDHCGALPWFLQKTSFKGRTFMTHATKAIYRWLLSDYVKVSNISADDMLYTETDLEESMDKIETINFHEVKEVAGIKFWCYHAGHVLGAAMFMIEIAGVK

SEQ ID NO: 59423 - protein, 363 aa, Homo sapiens
MFSDCWLCPSLGSSGIQMYLCNREHYGYLPIPLKPHQTLQEDIENLIHVQIEAMIDRPPMEPSQYVSVVPKYPDKMGFDEIFMINLKRRKDRRDRMLRTLYEQEIEVKIVEAVDGKALNTSQLKALNIEMLPGYRDPYSSRPLTRGEIGCFLSHYSVWKEVIDRELEKTLVIEDDVRFEHQFKKKLMKLMDNIDQAQLDWELIYIGRKRMQVKEPEKAVPNVANLVEADYSYWTLGYVISLEGAQKLVGANPFGKMLPVDEFLPVMYNKHPVAEYKEYYESRDLKAFSAEPLLIYPTHYTGQPGYLSDTETSTIWDNETVATDWDRTHAWKSRKQSRIYSNAKNTEALPPPTSLDTVPSRDEL

SEQ ID NO: 59424 - protein, 146 aa, Homo sapiens
MSAAPAYSEDKGGSAGPGEPEYGHDPASGGIFSSDYKRHDDLKEMLDTNKDSLKLEAMKRIVAMIARGKNASDLFPAVVKNVACKNIEVKKLVYVYLVRYAEEQQDLALLSISTFQRGLKVRGLSLPPRAWASLALYRRSRPGERP

SEQ ID NO: 59425 - protein, 43 aa, Homo sapiens
MCKRTDPVPVTIALDSLSWLLLRLPCTTLCQVLHAVSHQDSCP

SEQ ID NO: 59426 - protein, 21 aa, Homo sapiens
MEQSNDSLRVNHNDGEESKTS

SEQ ID NO: 59427 - protein, 153 aa, Homo sapiens
MAITQFRLFKFCTCLATVFSFLKRLICRSGRGRKLSGDQITLPTTVDYSSVPKQTDVEEWTSWDEDAPTSVKIEGGNGNVATQQNSLEQLEPDYFKDMTPTIRKTQKIVIKKREPLNFGIPDGSTGFSSRLAATQDLPFIHQSTSHWVGATII

SEQ ID NO: 59428 - protein, 178 aa, Homo sapiens
MVAMAEAEAGVAVEVRGLPPAVPDELLTLYFENRRRSGGGPVLSWQRLGCGGVLTFREPADAERVLAQADHELHGAQLSLRPAPPRAPARLLLQGLPPGTTPQRLEQHVQALLRASGLPVQPCCALASPRPDRALVQLPKPLSEADVRVLEEQAQNLGLEGTLVSLARVPQARAVRVV

SEQ ID NO: 59429 - protein, 400 aa, Homo sapiens
MTLILTSLLFFGLSLGPRTRVQAENLPKPILWAEPGPVITWHNPVTIWCQGTLEAQGYRLDKEGNSMSRHILKTLESENKVKLSIPSMMWEHAGRYHCYYQSPAGWSEPSDPLELVVTAYSRPTLSALPSPVVTSGVNVTLRCASRLGLGRFTLIEEGDHRLSWTLNSHQHNHGKFQALFPMGPLTFSNRGTFRCYGYENNTPYVWSEPSDPLQLLVSGQISDRPSLSVQPGPTVTSGEKVTLLCQSWDPMFTFLLTKEGAAHPPLRLRSMYGAHKYQAEFPMSPVTSAHAGTYRCYGSRSSNPYLLSHPSEPLELVVSGATETLNPAQKKSDSKTAPHLQDYTVENLIRMGVAGLVLLFLGILLFEAQHSQRSPPRCSQEANSRKDNAPFRVVEPWEQI

SEQ ID NO: 59430 - protein, 106 aa, Homo sapiens
MAAETQTLNFGPEWLRALSSGGSITSPPLSPALPKYKLADYRYGREEMLALFLKDNKIPSDLLDKEFLPILQEEPLPPLALVPFTEEEQRNFSMSVNSAAVLRLTG

SEQ ID NO: 59431 - protein, 247 aa, Homo sapiens
LKQFTEKMQSDMEKIQESADSLEGGILDLGSVLSHILPVSELREAQLYSVDVTLDPDTAYPSLILSDNLRQVRYSYLQQDLPDNPERFNLFPCVLGSPCFIAGRHYWEVEVGDKAKWTIGVCEDSVCRKGGVTSAPQNGFWAVSLWYGKEYWALTSPMTALPLRTPLQRVGIFLDYDAGEVSFYNVTERCHTFTFSHATFCGPVRPYFSLSYSGGKSAAPLIICPMSGIDGFSGHVGNHGHSMETSP

SEQ ID NO: 59432 - protein, 1187 aa, Homo sapiens
MRTTKVYKLVIHKKGFGGSDDELVVNPKVFPHIKLGDIVEIAHPNDEYSPLLLQVKSLKEDLQKETISVDQTVTQVFRLRPYQDVYVNVVDPKDVTLDLVELTFKDQYIGRGDMWRLKKSLVSTCAYITQKVEFAGIRAQAGELWVKNEKVMCGYISEDTRVVFRSTSAMVYIFIQMSCEMWDFDIYGDLYFEKAVNGFLADLFTKWKEKNCSHEVTVVLFSRTFYDAKSVDEFPEINRASIRQDHKGRFYEDFYKVVVQNERREEWTSLLVTIKKLFIQYPVLVRLEQAEGFPQGDNSTSAQGNYLEAINLSFNVFDKHYINRNFDRTGQMSVVITPGVGVFEVDRLLMILTKQRMIDNGIGVDLVCMGEQPLHAVPLFKLHNRSAPRDSRLGDDYNIPHWINHSFYTSKSQLFCNSFTPRIKLAGKKPASEKAKNGRDTSLGSPKESENALPIQVDYDAYDAQVFRLPGPSRAQCLTTCRSVRERESHSRKSASSCDVSSSPSLPSRTLPTEEVRSQASDDSSLGKSANILMIPHPHLHQYEVSSSLGYTSTRDVLENMMEPPQRDSSAPGRFHVGSAESMLHVRPGGYTPQRALINPFAPSRMPMKLTSNRRRWMHTFPVGPSGEAIQIHHQTRQNMAELQGSGQRDPTHSSAELLELAYHEAAGRHSNSRQPGDGMSFLNFSGTEELSVGLLSNSGAGMNPRTQNKDSLEDSVSTSPDPILTLSAPPVVPGFCCTVGVDWKSLTTPACLPLTTDYFPDRQGLQNDYTEGCYDLLPEADIDRRDEDGVQMTAQQVFEEFICQRLMQGYQIIVQPKTQKPNPAVPPPLSSSPLYSRGLVSRNRPEEEDQYWLSMGRTFHKVTLKDKMITVTRYLPKYPYESAQIHYTYSLCPSHSDSEFVSCWVEFSHERLEEYKWNYLDQYICSAGSEDFSLIESLKFWRTRFLLLPACVTATKRITEGEAHCDIYGDRPRADEDEWQLLDGFVRFVEGLNRIRRRHRSDRMMRKGTAMKGLQMTGPISTHSLESTAPPVGKKGTSALSALLEMEASQKCLGEQQAAVHGGKSSAQSAESSSVAMTPTYMDSPRKDGAFFMEFVRSPRTASSAFYPQVSVDQTATPMLDGTSLGICTGQSMDRGNSQTFGNSQNIGEQGYSSTNSSDSSGHAAARHHLAHSRSGRLRQLPAQVV

SEQ ID NO: 59433 - protein, 119 aa, Homo sapiens
MASQLQVFSPPSVSSSAFCSAKKLKIEPSGWDVSGQSSNDKYYTHSKTLPATQGQANSSHQVANFNIPAYDQGLLLPAPAVEHIVVTAADSSGSAATSTFQSSQTLTHRSNVSLLEPYQ

SEQ ID NO: 59434 - protein, 48 aa, Homo sapiens
  MOD_RES (1)..(1): Any amino acid
XAKQGSLYHEMVLSEPVAPGGPGEGLLLQDNAISTEIQALLSSYYSDR

SEQ ID NO: 59435 - protein, 67 aa, Homo sapiens
ESQLDEDEHGLHTKYIHRMEHVPTWLQNTHVYSWPKNKKNILLRLLREEEYVAPPRGPLPTLQVVPL

SEQ ID NO: 59436 - protein, 161 aa, Homo sapiens
EELQKSLQDQGSKAEDAISVLLKKKLEEHLEKLHEANNELQKKRAIIEDLEPRFNNSSLKIEELQEALRKKEEEMKQMEERYKKYLEKAKSVIRTLDPKQNQGAAPEIQALKNQLQERDRLFHSLEKEYEKTKSQREMEEKYIVSAWYNMGMTLHKKAAED

SEQ ID NO: 59437 - protein, 74 aa, Homo sapiens
  MOD_RES (1)..(1): Any amino acid
XDVKMEIFSPMPGESCENANTSLGRRMSVNCEKLVKREKPRELIFPSNYDLLRHLQYATHFPIPLVLMSVPPSV

SEQ ID NO: 59438 - protein, 1127 aa, Homo sapiens
MELPNYSRQLLQQLYTLCKEQQFCDCTISIGTIYFRAHKLVLAAASLLFKTLLDNTDTISIDASVVSPEEFALLLEMMYTGKLPVGKHNFSKIISLADSLQMFDVAVSCKNLLTSLVNCSVQGQVVRDVSAPSSETFRKEPEKPQVEILSSEGAGEPHSSPELAATPGGPVKAETEEAAHSVSQEMSVNSPTAQESQRNAETPAETPTTAEACSPSPAVQTFSEAKKTSTEPGCERKHYQLNFLLENEGVFSDALMVTQDVLKKLEMCSEIKGPQKEVILNCCEGRTPKETIENLLHRMTEEKTLTAEGLVKLLQAVKTTFPNLGLLLEKLQKSATLPSTTVQPSPDDYGTELLRRYHENLSEIFTDNQILLKMISHMTSLAPGEREVMEKLVKRDSGSGGFNSLISAVLEKQTLSATAIWQLLLVVQETKTCPLDLLMEEIRREPGADAFFRAVTTPEHATLETILRHNQLILEAIQQKIEYKLFTSEEEHLAETVKEILSIPSETASPEASLRAVLSRAMEKSVPAIEICHLLCSVHKSFPGLQPVMQELAYIGVLTKEDGEKETWKVSNKFHLEANNKEDEKAAKEDSQPGEQNDQGETGSLPGQQEKEASASPDPAKKSFICKACDKSFHFYCRLKVHMKRCRVAKSKQVQCKECSETKDSKKELDKHQLEAHGAGGEPDAPKKKKKRLPVTCDLCGREFAHASGMQYHKLTEHFDEKPFSCEECGAKFAANSTLKNHLRLHTGDRPFMCKHCLMTFTQASALAYHTKKKHSEGKMYACQYCDAVFAQSIELSRHVRTHTGDKPYVCRDCGKGFRQANGLSIHLHTFHNIEDPYDCKKCRMSFPTLQDHRKHIHEVHSKEYHPCPTCGKIFSAPSMLERHVVTHVGGKPFSCGICNKAYQQLSGLWYHNRTHHPDVFAAQNHRSSKFSSLQCSSCDKTFPNTIEHKKHIKAEHADMKFHECDQCKELFPTPALLQVHVKCQHSGSQPFRCLYCAATFRFPGALQHHVTTEHFKQSETTFPCELCGELFTSQAQLDSHLESEHPKVMSTETQAAASQMAQVIQTPEPVAPTEQVITLEETQLAGSQVFVTLPDSQASQASSELVAVTVEDLLDGTVTLICGEAK

SEQ ID NO: 59439 - protein, 725 aa, Homo sapiens
MGLSLPKEKGLILCLWSKFCRWFQRRESWAQSRDEQNLLQQKRIWESPLLLAAKDNDVQALNKLLKYEDCKVHQRGAMGETALHIAALYDNLEAAMVLMEAAPELVFEPMTSELYEGQTALHIAVVNQNMNLVRALLARRASVSARATGTAFRRSPRNLIYFGEHPLSFAACVNSEEIVRLLIEHGADIRAQDSLGNTVLHILILQPNKTFACQMYNLLLSYDRHGDHLQPLDLVPNHQGLTPFKLAGVEGNTVMFQHLMQKRKHTQWTYGPLTSTLYDLTEIDSSGDEQSLLELIITTKKREARQILDQTPVKELVSLKWKRYGRPYFCMLGAIYLLYIICFTMCCIYRPLKPRTNNRTSPRDNTLLQQKLLQEAYVTPKDDIRLVGELVTVIGAIIILLVEVPDIFRMGVTRFFGQTILGGPFHVLIITYAFMVLVTMVMRLISASGEVVPMSFALVLGWCNVMYFARGFQMLGPFTIMIQKMIFGDLMRFCWLMAVVILGFASAFYIIFQTEDPEELGHFYDYPMALFSTFELFLTIIDGPANYNVDLPFMYSITYAAFAIIATLLMLNLLIAMMGDTHWRVAHERDELWRAQVVATTVMLERKLPRCLWPRSGICGREYGLGDRWFLRVEDRQDLNRQRIQRYAQAFHTRGSEDLDKDSVEKLELGCPFSPHLSLPTPSVSRSTSRSSANWERLRQGTLRRDLRGIINRGLEDGESWEYQI

SEQ ID NO: 59440 - protein, 16 aa, Homo sapiens
MVLNSLDKMIQLQKNT

SEQ ID NO: 59441 - protein, 508 aa, Homo sapiens
MSPPGMWQPGVQQPGISQQVPSHPDMSQPGMSQQVPSQPGIRQPDTSQSCKNQTDMSQPDANQSSLSDSNQTGIIQPSPSLLGMNQMDMNQWSASLYEMNQVDMKQPSMSQAGMRQSGTNLPDINQPGMKQPGTWQLGRSQPGMWPQSLSELVLSEASISQPGPPQRAPSQSGPRQSSTSQAGTNQSGISQPVMWQLDMRQSGGSQPSMRQVGTSQSGTSQIGMSQPGTWQTGLSQPVPRQPNKSPPGMWQRGMWQPGMSQQVPSQLGMRQPGTSQSSKNQTGMSHPGRGQPGIWEPGPSQPGLSQQDLNQLVLSQPGLSQPGRSQPSVSQMGMRQTSMDYFQIRHAEAGDCPEILRLIKELAACENMLDAMELTAADLLRDGFGDNPLFYCLIAEVNDQQKPSGKLTVGFAMYYFTYDSWTGKVLYLEDFYVTQAYQGLGIGAEMLKRLSQIAITTQCNCMHFLVVIWNQASINYYTSRGALDLSSEEGWHLFRFNREELLDMAWEE

SEQ ID NO: 59442 - protein, 145 aa, Homo sapiens
MAIHKALVMCLGLPLFLFPGAWAQGHVPPGCSQGLNPLYYNLCDRSGAWGIVLEAVAGAGIVTTFVLTIILVASLPFVQDTKKRSLLGTQVFFLLGTLGLFCLVFACVVKPDFSTCASRRFLFGVLFAICFSCLAAHVFALNFLA

SEQ ID NO: 59443 - protein, 66 aa, Homo sapiens
  MOD_RES (1)..(1): Any amino acid
XFSLDADAVLTNLQTLRILIEENRKVIAPMLSRHGKLWSNFWGALSPDEYYARSEDYVELVQRKRV

SEQ ID NO: 59444 - protein, 547 aa, Homo sapiens
MCRLISDFQRHSISDDDSGCASEEYAWVPPGLKPEQVYQFFSCLPEDKVPYVNSPGEKYRIKQLLHQLPPHDSEAQYCTALEEEEKKELRAFSQQRKRENLGRGIVRIFPVTITGAICEECGKQIGGGDIAVFASRAGLGACWHPQCFVCTTCQELLVDLIYFYHVGKVYCGRHHAECLRPRCQACDEIIFSPECTEAEGRHWHMDHFCCFECEASLGGQRYVMRQSRPHCCACYEARHAEYCDGCGEHIGLDQGQMAYEGQHWHASDRCFCCSRCGRALLGRPFLPRRGLIFCSRACSLGSEPTAPGPSRRSWSAGPVTAPLAASTASFSAVKGASETTTKGTSTELAPATGPEEPSRFLRGAPHRHSMPELGLRSVPEPPPESPGQPNLRPDDSAFGRQSTPRVSFRDPLVSEGGPRRTLSAPPAQRRRPRSPPPRAPSRRRHHHHNHHHHHNRHPSRRRHYQCDAGSGSDSESCSSSPSSSSSESSEDDGFFLGERIPLPPHLCRPMPAQDTAMETFNSPSLSLPRDSRAGMPRQARDKNCIVA

SEQ ID NO: 59445 - protein, 94 aa, Homo sapiens
DPPELKRAKENQKNISNVYYRGQLGRATTLSVTPEMERVKKNQENISSVKYTQDHKQMKGRPSLILDTPAMRHVKEAQNHISMVGSNQIILKTC

SEQ ID NO: 59446 - protein, 725 aa, Homo sapiens
MAACEGRRSGALGSSQSDFLTPPVGGAPWAVATTVVMYPPPPPPPHRDFISVTLSFGENYDNSKSWRRRSCWRKWKQLSRLQRNMILFLLAFLLFCGLLFYINLADHWKALAFRLEEEQKMRPEIAGLKPANPPVLPAPQKADTDPENLPEISSQKTQRHIQRGPPHLQIRPPSQDLKDGTQEEATKRQEAPVDPRPEGDPQRTVISWRGAVIEPEQGTELPSRRAEVPTKPPLPPARTQGTPVHLNYRQKGVIDVFLHAWKGYRKFAWGHDELKPVSRSFSEWFGLGLTLIDALDTMWILGLRKEFEEARKWVSKKLHFEKDVDVNLFESTIRILGGLLSAYHLSGDSLFLRKAEDFGNRLMPAFRTPSKIPYSDVNIGTGVAHPPRWTSDSTVAEVTSIQLEFRELSRLTGDKKFQEAVEKVTQHIHGLSGKKDGLVPMFINTHSGLFTHLGVFTLGARADSYYEYLLKQWIQGGKQETQLLEDYVEAIEGVRTHLLRHSEPSKLTFVGELAHGRFSAKMDHLVCFLPGTLALGVYHGLPASHMELAQELMETCYQMNRQMETGLSPEIVHFNLYPQPGRRDVEVKQTGTTCCGQRPWRACSTCTASQGTANTRTGAGRFCRASADSHGSPRVAILPSTMSRILRSPSLGTRWRASSWGRRSSICSCSSPMTQTCSAWMPTCSTPKPTLCLSGPLPRVDGCWCGDFGWAEAPCWVCGIFQGPT

SEQ ID NO: 59447 - protein, 47 aa, Homo sapiens
MAKSFPVFSLLSFILIHLVLSSVSGPRHWWPPRGIIKEISWKNQVLP

SEQ ID NO: 59448 - protein, 705 aa, Homo sapiens
MWEKMETKTIVYDLDTSGGLMEQIQALLAPPKTDEAEKRSRKPEKEPRRSGRATNHDSCDSCKEGGDLLCCDHCPAAFHLQCCNPPLSEEMLPPGEWMCHRCTVRRKKREQKKELGHVNGLVDKSGKRTTSPSSDTDLLDRSASKTELKAIAHARILERRASRPGTPTSSASTETPTSEQNDVDEDIIDVDEEPVAAEPDYVQPQLRRPFELLIAAAMERNPTQFQLPNELTCTTALPGSSKRRRKEETTGKNVKKTQHELDHNGLVPLPVKVCFTCNRSCRVAPLIQCDYCPLLFHMDCLEPPLTAMPLGRWMCPNHIEHVVLNQKNMTLSNRCQVFDRFQDTVSQHVVKVDFLNRIHKKHPPNRRVLQSVKRRSLKVPDAIKSQYQFPPPLIAPAAIRDGELICNGIPEESQMHLLNSEHLATQAEQQEWLCSVVALQCSILKHLSAKQMPSHWDSEQTEKADIKPVIVTDSSVTTSLQTADKTPTPSHYPLSCPSGISTQNSLSCSPPHQSPALEDIGCSSCAEKSKKTPCGTANGPVNTEVKANGPHLYSSPTDSTDPRRLPGANTPLPGLSHRQGWPRPLTPPAAGGLQNHTVGIIVKTENATGPSSCPQRSLVPVPSLPPSIPSSCASIENTSTLQRKTVQSQIGPPLTDSRPLGSPPNATRVLTPPQAAGDGILATTANQRFSSPAPSSALGVPEPMG

SEQ ID NO: 59449 - protein, 105 aa, Homo sapiens
MSISSDEVNFLVYRYLQESGFSHSAFTFGIESHISQSNINGALVPPAALISIIQKGLQYVEAEVSINEDGTLFDGRPIESLSLIDAVMPDVVQTRQQAYRDKLAQ

SEQ ID NO: 59450 - protein, 135 aa, Homo sapiens
MKTTEICGAPGVGKTQLCMQLAVDVQIPECFGGVAGEAVFIDTEGSFMVDRVVDLATACIQHLQLIAEKHKGEEHRKALEDFTLDNILSHIYYFRCRDYTELLAQVYLLPDFLSEHSKVRLVIVDGIAFPFRHDL

SEQ ID NO: 59451 - protein, 224 aa, Homo sapiens
GPPGSEGLPGPPGPAGPRGERGPQGNSGEKGDQGFQGQPGFPGPPGPPGFPGKVGSPGPPGPQAEKGPAGLDGLDGKDGKPGLRGDPGPAGPPGLMGPPGFKGKTGHPGLPGPKGDCGKPGPPGSTGRPGAEGEPGAMGPQGRPGPPGHVGPPGPPGQPGPAGISAVGLKGDRGATGERGLAGLPGQPGPPGHPGPPGEPGTDGAAGKEGPPGKQGFYGPPGPK

SEQ ID NO: 59452 - protein, 627 aa, Homo sapiens
MGVPGGDTVSQPQAAPSPLEKSPSTAILCNTCGNVCKGEVLRVQDKYFHIKCFVCKACGCDLAEGGFFVRQGEYICTLDYQRLYGTRCFSCDQFIEGEVVSALGKTYHPDCFVCAVCRLPFPPGDRVTFNGKECMCQKCSLPVSVGSSAHLSQGLRSCGGCGTEIKNGQALVALDKHWHLGCFKCKSCGKLLNAEYISKDGLPYCEADYHAKFGIRCDSCEKYITGRVLEAGEKHYHPSCALCVRCGQMFAEGEEMYLQGSSIWHPACRQAARTEDRNKETRTSSESIISVPASSTSGSPSRVIYAKLGGEILDYRDLAALPKSKAIYDIDRPDMISYSPYISHSAGDRQSYGESPQLLSPTPTEGDQDDRSYKQCRTSSPSSTGSVSLGRYTPTSRSPQHYSRPGSESGRSTPSLSVLSDSKPPPSTYQQAPRHFHVPDTGVKDNIYRKPPIYRQHAARRSDGEDGSLDQDNRKKSSWLMLKGDADTRTNSPDLDTQSLSHSSGTDRDPLQRMAGDSFHSRFPYSKSDPLPGHGKNGLDQRNANLAPCGADPDASWGMREYKIYPYDSLIVTNRIRVKLPKDVDRTRLERHLSPEEFQEVFGMSIEEFDRLALWKRNDLKKKALLF

SEQ ID NO: 59453 - protein, 86 aa, Homo sapiens
EARHAVLALLKAIVQGQGERLGVLRALFFKVIKDYPSNEDLHERLEVFKALTDNGRHITYLEEELVDGCWLVLGIPSGAGELGQIQ

SEQ ID NO: 59454 - protein, 218 aa, Homo sapiens
MMRTCVLLSAVLWCLTGAYREPDYSYQMAVRFTTRSCIGRYNDVFFRVLKKILDSLISDLSCHVIEPSYKCHSVEIPEHGLIHELFIAFQVNPFAPGWKGACNGSVDCEDTTNHNILQARDRIEDFFRSQAYIFYHNFNKTLPAMHFVDHSLQVVRLDSCRPGFGKNERLHSNCASCCVVCSPATFSPDVNVTCQTCVSVLTYGAKSCPQTSNKNQQY

SEQ ID NO: 59455 - protein, 25 aa, Homo sapiens
MDLVKNHLMYAVREEVEILKEQIRE

SEQ ID NO: 59456 - protein, 55 aa, Homo sapiens
MAAALFVLLGFALLGTHGASGAAGTVFTTVEDLGSKILLTCSLNDSATEQRAAPE

SEQ ID NO: 59457 - protein, 156 aa, Homo sapiens
VHPENEDWTCFEQSASLDIKSFFGFESTVEKIAMKQYTSNIKKGKEIIEYYLRQLEEEGITFVPRWSPPSITTSSETSSSSSKKQAASMAVVIPEAALKEGLSGDALSSPSAPEPVVGTPDGGSGRGFIPRARLGKSALPFSLCLLCLFPLPWNIR

SEQ ID NO: 59458 - protein, 483 aa, Homo sapiens
MALEIHMSDPMCLIENFNEQLKVNQEALEILSAITQPVVVVAIVGLYRTGKSYLMNKLAGKNKGFSVASTVQSHTKGIWIWCVPHPNWPNHTLVLLDTEGLGDVEKADNKNDIQIFALALLLSSTFVYNTVNKIDQGAIDLLHNVTELTDLLKARNSPDLDRVEDPADSASFFPDLVWTLRDFCLGLEIDGQLVTPDEYLENSLRPKQGSDQRVQNFNLPRLCIQKFFPKKKCFIFDLPAHQKKLAQLETLPDDELEPEFVQQVTEFCSYIFSHSMTKTLPGGIMVNGSRLKNLVLTYVNAISSGDLPCIENAVLALAQRENSAAVQKAIAHYDQQMGQKVQLPMETLQELLDLHRTSEREAIEVFMKNSFKDVDQSFQKELETLLDAKQNDICKRNLEASSDYCSALLKDIFGPLEEAVKQGIYSKPGGHNLFIQKTEELKAKYYREPRKGIQAEEVLQKYLKSKESVSHAILQTDQALTET

SEQ ID NO: 59459 - protein, 64 aa, Homo sapiens
MLVGDSGVGKTCLLVRFKDGAFLAGTFISTVGIDFRQGLTLSPWLECSGDHGGLQPPTSGFKPS

SEQ ID NO: 59460 - protein, 209 aa, Homo sapiens
MADDAGAAGGPGGPGGPGMGNRGGFRGGFGSGIRGRGRGRGRGRGRGRGARGGKAEDKEESEIIDFFLGASLKDEVLKIMPVQKQTRAGQRTRFKAFVAIGDYNGHVGLGVKCSKEVATAIRGAIILAKLSIVPVRRGYWGNKIGKPHTVPCKVTGRCGSVLVRLIPAPRGTGIVSAPVPKKLLMMAGIDDCYTSARGCTATLGNFGHL

SEQ ID NO: 59461 - protein, 188 aa, Homo sapiens
MPVTVTRTTITTTTTSSSGLGSPMIVGSPRALTQPLGLLRLLQLVSTCVAFSLVASVGAWTGSMGNWSMFTWCFCFSVTLIILIVELCGLQARFPLSWRNFPITFACYAALFCLSASIIYPTTYVQFLSHGRSRDHAIAATFFSCIACVAYATEVAWTRARPGEITGYMATVPGLLKVLETFVACIIF

SEQ ID NO: 59462 - protein, 350 aa, Homo sapiens
MSVSLSKLGFIKHLSSTEDDLRDCLLSSSKEGTEDEEEEIKQEINMLKKYSHHRNIATYYGAFIKKNPPGMDDQLWLVMEFCGAGSVTDLIKNTKGNTLKEEWIAYICREILRGLSHLHQHKVIHRDIKGQNVLLTENAEVKLVDFGVSAQLDRTVGRRNTFIGTPYWMAPEVIACDENPDATYDFKSDLWSLGITAIEMAEGAPPLCDMHPMRALFLIPRNPAPRLKSKKWSKKFQSFIESCLVKNHSQRPATEQLMKHPFIRDQPNERQVRIQLKDHIDRTKKKRGEKDETEYEYSGSEEEEEENDSGEPSSILNLPGESTLRRDFLRLQLANKERSEALRRQQLEQQ

SEQ ID NO: 59463 - protein, 59 aa, Homo sapiens
LERTGIDLGTTGRLQLMARLAEGTGLQIPPAAQQALQMSGSLAFGAVAVEALHCSCTEL

SEQ ID NO: 59464 - protein, 21 aa, Homo sapiens
MKSEDYPHETMAPDIHEERQY

SEQ ID NO: 59465 - protein, 191 aa, Homo sapiens
MQDYNKDDMSYRRISAVEPKTALPFNRFLPNKSRQPSYVPAPLRKKKPDKHEDNRRSWASPVYTEADGTFSRSKSMSDVSAEDVQNLRQLRYEEMQKIKSQLKEQDQKWQDDLAKWKDRRKSYTSDLQKKKEEREEIEKQALEKSKRSSKTFKEMLQDRESQNQKSTVPSRRRMYSFDDVLEEGKRPPTMT

SEQ ID NO: 59466 - protein, 94 aa, Homo sapiens
MAVRERAAAAMAALERRVPSLDDFAGQSWSSWVERADLPAADGAELEESSKNTKKLDAMTLIKEGGSRHTLGLGPRADRTTLHFSTTLQKEVAA

SEQ ID NO: 59467 - protein, 381 aa, Homo sapiens
MSLNTSFEFLRNTPCLSSLLPKAEFTIISTSWVPPNLRPSICSSSAWGQERMGLASLADWESLESSVSSVARQNRLNEAGNTTKKYNIMAFNAADKVNFATWNQARLERDLSNKKIYQEEEMPESGAGSEFNRKLREEARRKKYGIVLKEFRPEDQPWLLRVNGKSGRKFKGIKKGGVTENTSYYIFTQCPDGAFEAFPVHNWYNFTPLARHRTLTAEEAEEEWERRNKVLNHFSIMQQRRLKDQDQDEDEEEKEKRGRRKASELRIHDLEDDLEMSSDASDASGEEGGRVPKAKKKAPLAKGGRKKKKKKGSDDEAFEDSDDGDFEGQEVDYMSDGSSSSQEEPESKAKAPQQEEGPKGVDEQSDSSEESEEEKPPEEDK

SEQ ID NO: 59468 - protein, 446 aa, Homo sapiens
MDPGENAFTSQKSDDDYEDYASNKTWVLTPKVPEGDVTVILNNLLEGYDNKLRPDIGVKPTLIHTDMYVNSIGPVNAINMEYTIDIFFAQTWYDRRLKFNSTIKVLRLNSNMVGKIWIPDTFFRNSKKADAHWITTPNRMLRIWNDGRVLYTLRLTIDAECQLQLHNFPMDEHSCPLEFSSYGYPREEIVYQWKRSSVEVGDTRSWRLYQFSFVGLRNTTEVVKTTSGDYVVMSVYFDLSRRMGYFTIQTYIPCTLIVVLSWVSFWINKDAVPARTSLGITTVLTMTTLSTIARKSLPKVSYVTAMDLFVSVCFIFVFSALVEYGTLHYFVSNRKPSKDKDKKKKNPLLRMFSFKAPTIDIRPRSATIQMNNATHLQERDEEYGYECLDGKDCASFFCCFEDCRTGAWRHGRIHIRIAKMDSYARIFFPTAFCLFNLVYWVSYLYL

SEQ ID NO: 59469 - protein, 111 aa, Homo sapiens
MGEKSENCGVPEDLLNGLKVTDTQEAECAGPPVPDPKNQHSQSKLLRDDEAHLQEDQGEEECFHDCSASFEEEPGADKVENKSNEDVNSSELDEEYLIELEKNMSDEEKQR

SEQ ID NO: 59470 - protein, 215 aa, Homo sapiens
MKLPVHKLYIEYGIQRITCPNVDGYFPSSVKPTITWYMGCYKIQNFNNVIPEGMNLSFLIALISNNGNYTCVVTYPENGRTFHLTRTLTVKVVGSPKNAVPPVIHSPNDHVVYEKEPGEELLIPCTVYFSFLMDSRNEVWWTIDGKKPDDITIDVTINESISHSRTEDETRTQILSIKKVTSEDLKRSYVCHARSAKGEVAKAAKVKQKGNRCGQ

SEQ ID NO: 59471 - protein, 46 aa, Homo sapiens
MPGWKKNIPICLQAEEQERDESPYTKSASQTKPPDGALAVRRQSIP

SEQ ID NO: 59472 - protein, 98 aa, Homo sapiens
MDTEMSEDIDHNLTPTLDSMSYGMPNQTGSENSLLDEDDYFLNSGDLAGIPVVGSDNEDEQDFSSKDNLVSSIHTDDSLEVERRVTQHESDNENEIQI

SEQ ID NO: 59473 - protein, 172 aa, Homo sapiens
MDFSLGLRLGPRNKKPAHQEPPACSRHGPPAGSPCLSCPPSACAFPCHGCPPPPCSCTACPSSAAPCPACPSLPGPPCTCSCPRCPACPPLTCPHNSCVSCSGPPLTCCHPSPCPVYPCSMSRAACLSSRLGCSDSCSCGQGAAWGPPGSLGCCSCCFRGQQRTSRGRCLII

SEQ ID NO: 59474 - protein, 73 aa, Homo sapiens
MMTPQVITPQQMQQILQQQVLSPQQLQVLLQQQQALMLQQQQLQEFYKKQQEQLQLQLLQQQHAGKQPKEFVP

SEQ ID NO: 59475 - protein, 455 aa, Homo sapiens
MSVSVLSPSRLLGDVSGILQAASLLILLLLLIKAVQLYLHRQWLLKALQQFPCPPSHWLFGHIQELQQDQELQRIQKWVETFPSACPHWLWGGKVRVQLYDPDYMKVILGRSDPKSHGSYRFLAPWIGYGLLLLNGQTWFQHRRMLTPAFHYDILKPYVGLMADSVRVMLDKWEELLGQDSPLEVFQHVSLMTLDTIMKCAFSHQGSIQVDRNSQSYIQAISDLNNLVFSRVRNAFHQNDTIYSLTSAGRWTHRACQLAHQHTDQVIQLRKAQLQKEGELEKIKRKRHLDFLDILLLAKMENGSILSDKDLRAEVDTFMFEGHDTTASGISWILYALATHPKHQERCREEIHSLLGDGASITWNHLDQMPYTTMCIKEALRLYPPVPGIGRELSTPVTFPDGRSLPKGIMVLLSIYGLHHNPKVWPNPEVFDPFRFAPGSAQHSHAFLPFSGGSR

SEQ ID NO: 59476 - protein, 294 aa, Homo sapiens
ELWGLKEGTYLFQLTVTSSDHPEDTANVTVTVLSTKQTEDYCLASNKVGRCRGSFPRWYYDPTEQICKSFVYGGCLGNKNNYLREEECILACRGVQVCSGTCQPTQFRCSNGCCIDSFLECDDTPNCPDASDEAACEKYTSGFDELQRIHFPSDKGHCVDLPDTGLCKESIPRWYYNPFSEHCARFTYGGCYGNKNNFEEEQQCLESCRGISKKDVFGLRREIPIPSTGSVEMAVAVFLVICIVVVVAILGYCFFKNQRKDFHGHHHHPPPTPASSTVSTTEDTEHLVYNHTTR

SEQ ID NO: 59477 - protein, 128 aa, Homo sapiens
EISVPVPSDADSPRFKTSVGSAKYVPERNVVIWSIKSFPGGKEYLMRAHFGLPSVEKEEVEGRPPIGVKFEIPYFTVSGIQVRYMKIIEKSGYQALPWVRYITQSGGWERNSLCFPRPWSFPHPPDFI

SEQ ID NO: 59478 - protein, 217 aa, Homo sapiens
MTESGKPILYSYFRSSCSWRVRIALALKGIDYETVPINLIKDGGQQFSKDFQALNPMKQVPTLKIDGITIHQSLAIIEYLEEMRPTPRLLPQDPKKRASVRMISDLIAGGIQPLQNLSVLKQVGEEMQLTWAQNAITCGFNALEQILQSTAGIYCVGDEVTMADLCLVPQVANAERFKVDLTPYPTISSINKRLLVLEAFQVSHPCRQPDTPTELRA

SEQ ID NO: 59479 - protein, 253 aa, Homo sapiens
MNPAAEAEFNILLATDSYKVTHYKQYPPNTSKVYSYFECREKKTENSKLRKVKYEETVFYGLQYILNKYLKGKVVTKEKIQEAKDVYKEHFQDDVFNEKGWNYILEKYDGHLPIEIKAVPEGFVIPRGNVLFTVENTDPECYWLTNWIETILVQSWYPITVATNSREQKKILAKYLLETSGNLDGLEYKLHDFGYRGVSSQETAGIGASAHLVNFKGTDTVAGLALIKKYYGTKDPVPGYSVPAAEHREKLQT

SEQ ID NO: 59480 - protein, 197 aa, Homo sapiens
MILMEGIGCMRHSSLTRQPKLPYRSLASARGGLQEFVSVWVRDPRIQKEDFWHSYIDYEICIHTNSMCFTMKTSCVRRRYREFVWLRQRLQSNALLVQLPELPSKNLFFNMNNRQHVDQRRQGLEDFLRKVLQNALLLSDSSLHLFLQSHLNSEDIEACVSGQTKYSVEEAIHKFALMNRRFPEEDEEGKKENDIDY

SEQ ID NO: 59481 - protein, 26 aa, Homo sapiens
MGIALLGCVGALKELRCLLGLYFGML

SEQ ID NO: 59482 - protein, 202 aa, Homo sapiens
MTDGILGKAATMEIPIHGNGEARQLPEDDGLEQDLQQVMVSGPNLNETSIVSGGYGGSGDGLIPTGSGRHPSHSTTPSGPGDEVARGIAGEKFDIVKKWGINTYKCTKQLLSERFGRGSRTVDLELELQIELLRETKRKYESVLQLGRALTAHLYSLLQTQHALGDAFADLSQKSPELQPTGRTPSGWAQPYPQQHSPVEAA

SEQ ID NO: 59483 - protein, 182 aa, Homo sapiens
MDLGIPDLLDAWLEPPEDIFSTGSVLELGLHCPPPEVPVTRLQEQGLQGWKSGGDRGCGLQESEPEDFLKLFIDPNEVYCSEASPGSDSGISEDPCHPDSPPAPRATSSPMLYEVVYEAGALERMQGETGPNVGLISIQLDQWSPAFMVPDSCMVSELPFDAHAHILPRAGTVAPVPCTTLV

SEQ ID NO: 59484 - protein, 204 aa, Homo sapiens
MESGSTAASEEARSLRECELYVQKHNIQALLKDSIVQLCTARPERPMAFLREYFERLEKEEAKQIQNLQKAGTRTDSREDEISPPPPNPVVKGRRRRGAISAEVYTEEDAASYVRKVIPKDYKTMAALAKAIEKNVLFSHLDDNERSDIFDAMFSVSFIAGETVIQQGDEGDNFYVIDQGETDVYVNNEWATSVGEGGSFGELA

SEQ ID NO: 59485 - protein, 1728 aa, Homo sapiens
MQESQTKSMFVSRALEKILADKEVKRPQHSQLRRACQVALDEIKAEIEKQRLGTAAPPKANFIEADKYFLPFELACQSKSPRVVSTSLDCLQKLIAYGHITGNAPDSGAPGKRLIDRIVETICSCFQGPQTDEGVQLQIIKALLTAVTSPHIEIHEGTILQTVRTCYNIYLASKNLINQTTAKATLTQMLNVIFTRMENQVLQEARELEKPIQSKPQSPVIQAAAVSPKFVRLKHSQAQSKPTTPEKTDLTNGEHARSDSGKVSTENGDAPRERGSSLSGTDDGAQEVVKDILEDVVTSAIKEAAEKHGLTEPERVLGELECQECAIPPGVDENSQTNGIADDRQSLSSADNLESDAQGHQVAARFSHVLQKDAFLVFRSLCKLSMKPLGEGPPDPKSHELRSKVVSLQLLLSVLQNAGPVFRTHEMFINAIKQYLCVALSKNGVSSVPDVFELSLAIFLTLLSNFKMHLKMQIEVFFKEIFLNILETSTSSFEHRWMVIQTLTRICADAQCVVDIYVNYDCDLNAANIFERLVNDLSKIAQGRSGHELGMTPLQELSLRKKGLECLVSILKCMVEWSKDLYVNPNHQTSLGQERLTDQEIGDGKGLDMARRCSVTSMESTVSSGTQTTVQDDPEQFEVIKQQKEIIEHGIELFNKKPKRGIQFLQEQGMLGTSVEDIAQFLHQEERLDSTQVGDFLGDSARFNKEVMYAYVDQLDFCEKEFVSALRTFLEGFRLPGEAQKIDRLMEKFAARYIECNQGQTLFASADTAYVLAYSIIMLTTDLHSPQVKNKMTKEQYIKMNRGINDSKDLPEEYLSSIYEEIEGKKIAMKETKELTIATKSTKQNVASEKQRRLLYNLEMEQMAKTAKALMEAVSHAKAPFTSATHLDHVRPMFKLVWTPLLAAYSIGLQNCDDTEVASLCLEGIRCAIRIACIFGMQLERDAYVQALARFSLLTASSSITEMKQKNIDTIKTLITVAHTDGNYLGNSWHEILKCISQLELAQLIGTGVKTRYLSGSGREREGSLKGHTLAGEEFMGLGLGNLVSGGVDKRQMASFQESVGETSSQSVVVAVDRIFTGSTRLDGNAIVDFVRWLCAVSMDELASPHHPRMFSLQKIVEISYYNMNRIRLQWSRIWHVIGDHFNKVGCNPNEDVAIFAVDSLRQLSMKFLEKGELANFRFQKDFLRPFEHIMKKNRSPTIRDMAIRCIAQMVNSQAANIRSGWKNIFAVFHQAASDHDGNIVELAFQTTCHIVTTIFQHHFPAAIDSFQDAVKCLSEFACNAAFPDTSMEAIRLIRFCGKYVSERPRVLQEYTSDDMNVAPGDRVWVRGWFPILFELSCIINRCKLDVRTRGLTVMFEIMKSYGHTFEKHWWQDLFRIVFRIFDNMKLPEQLSEKSEWMTTTCNHALYAICDVFTQFYEALNEVLLSDVFAQLQWCVKQDNEQLARSGTNCLENLVISNGEKFSPEVWDETCNCMLDIFKTTIPHVLLTWRPVGMEEDSSEKHLDVDLDRQSLSSIDKNPSERGQSQLSNPTDDSWKGRPYANQKLFASLLIKCVVQLELIQTIDNIVFYPATSKKEDAEHMVAAQQDTLDADIHIETEDQGMYKYMSSQHLFKLLDCLQESHSFSKAFNSNYEQRTVLWRAGFKGKSKPNLLKQETSSLACCLRILFRMYVDENRRDSWEEIQQRLLTVCSEALAYFITVNSESHREAWTSLLLLLLTKTLKINDEKV

SEQ ID NO: 59486 - protein, 368 aa, Homo sapiens
MRVMAPRTLILLLSGALALTETWAGSHSMRYFYTAVSRPGRGEPHFIAVGYVDDTQFVRFDSDAASPRGEPRAPWVEQEGPEYWDRETQKYKRQAQTDRVSLRNLRGYYNQSEAGSHIIQRMYGCDVGPDGRLLRGYDQYAYDGKDYIALNEDLRSWTAADTAAQITQRKWEAAREAEQLRAYLEGLCVEWLRRYLKNGKETLQRAEHPKTHVTHHPVSDHEATLRCWALGFYPAEITLTWQWDGEDQTQDTELVETRPAGDGTFQKWAAVVVPSGEEQRYTCHVQHEGLPEPLTLRWEPSSQPTIPIVGIVAGLAVLAVLAVLGAVVAVVMCRRKSSAACVGLRCRISSHLSFVTSRASGISFCKGI

SEQ ID NO: 59487 - protein, 91 aa, Homo sapiens
MLETYNHLVSLEIPSSKPKLIAQLERGEAPWREERKCPLDLCPDGALLCCQAGIQWCYIGSLQPLPPGFKQFPCLSLLSSWDYRIEARNST

SEQ ID NO: 59488 - protein, 62 aa, Homo sapiens
MADKEAAFDDAVEERVINEEYKIWKKNTPFLYDLVMTHALEWPSLTAQWLPDVTRIWRFWFS

SEQ ID NO: 59489 - protein, 376 aa, Homo sapiens
MDRTETRFRKRGQITGKITTSRQPHRQNEQSPQRSTSGYPLQEVVDDEVLGPSAPGVDPSPPCRSLGWKRKREWSDESEEEPEKELAPEPEETWVVETLCGLKMKLKQQRVSPILLEHHKDFNSQLAPGVDPSPPHRSFCWKRKMEWWDKSEESEEEPRKVLAPEPEEIWVAEMLCGLKMKLKRRRVSLVLPEHHEAFNRLLEDPVIKRFLAWDKDLRVSDKYLLAMVIAYFSRAGFPSWQYQRLHFFLALYLANDMEEDDEDSKQNIFHFLYGKNRSRIPLLRKRRFQLYRSMNPRARKNRSHIPLVRKRRFQLRRCMNPRARKNRSQIVLFQKRRFHFFCSMSCRAWVSPEELEEIQAYDPEHWVWARDRARLS

SEQ ID NO: 59490 - protein, 137 aa, Homo sapiens
GQSVTKSDFLPKTHLHGDEFLPVLARGSKRETAFSRGNERILNPRVPPPCPEPSSVSHQQFQPLHRMQQTNVALLGRETVGKKEPTGFSLNNPMYVRSPCDPDRDQRYLTTYNQGTLTSADPFYQNTPHSSRCVAHS

SEQ ID NO: 59491 - protein, 264 aa, Homo sapiens
MPVQLSEHPEWNESMHSLRISVGGLPVLASMTKAADPRFRPRWKVILTFFVGAAILWLLCSHRPAPGRPPTHNAHNWRLGQAPANWYNDTYPLSPPQRTPAGIRYRIAVIADLDTESRAQEENTWFSYLKKGYLTLSDSGDKVAVEWDKDHGVLESHLAEKGRGMELSDLIVFNGKLYSVDDRTGVVYQIEGSKAVPWVILSDGDGTVEKGNWTLSSAGDCKEAVAAGEASLTCRRSWPMDTKIKKMLPFSRNCQKSSCLSRLL

SEQ ID NO: 59492 - protein, 1068 aa, Homo sapiens
MLKPQPLQQPSQPQQPPPTQQAVARRPPGGTSPPNGGLPGPLATSAAPPGPPAAASPCLGPVAAAGSGLRRGAEGILAPQPPPPQQHQERPGAAAIGSARGQSTGKGPPQSPVFEGVYNNSRMLHFLTAVVGSTCDVKVKNGTTYEGIFKTLSSKFELAVDAVHRKASEPAGGPRREDIVDTMVFKPSDVMLVHFRNVDFNYATKDKFTDSAIAMNSKVNGEHKEKVLQRWEGGDSNSDDYDLESDMSNGWDPNEMFKFNEENYGVKTTYDSSLSSYTVPLEKDNSEEFRQRELRAAQLAREIESSPQYRLRIAMENDDGRTEEEKHSAVQRQGSGRESPSLASREGKYIPLPQRVREGPRGGVRCSSSRGGRPGLSSLPPRGPHHLDNSSPGPGSEARGINGGPSRMSPKAQRPLRGAKTLSSPSNRPSGETSVPPPPAAPPFLPVGRMYPPRSPKSAAPAPISASCPEPPIGSAVPTSSASIPVTSSVSDPGVGSISPASPKISLAPTDVKELSTKEPGRTLEPQELARIAGKVPGLQNEQKRFQLEELRKFGAQFKLQPSSSPENSLDPFPPRILKEEPKGKEKEVDGLLTSEPMGSPVSSKTESVSDKEDKPPLAPSGGTEGPEQPPPPCPSQTGSPPVGLIKGEDKDEGPVAEQVKKSTLNPNAKEFNPTKPLLSVNKSTSTPTSPGPRTHSTPSIPVLTAGQSGLYSPQYISYIPQIHMGPAVQAPQMYPYPVSNSVPGQQGKYRGAKGSLPPQRSDQHQPASAPPMMQAAAAAGPPLVAATPYSSYIPYNPQQFPGQPAMMQPMAHYPSQPVFAPMLQSNPRMLTSGSHPQAIVSSSTPQYPSAEQPTPQALYATVHQSYPHHATQLHAHQPQPATTPTGSQPQSQHAAPSPVQHQAGQAPHLGSGQPQQNLYHPGALTGTPPSLPPGPSAQSPQSSFPQPAAVYAIHHQQLPHGFTNMAHVTQAHVQTGITAAPPPHPGAPHPPQVMLLHPPQSHGGPPQGAVPQSGVPALSASTPSPYPYIGHPQGEQPGQAPGFPGGADDRILQSHPSQQLPFHPPGN

SEQ ID NO: 59493 - protein, 554 aa, Homo sapiens
MARRPRHSIYSSDEDDEDFEMCDHDYDGLLPKSGKRHLGKTRWTREEDEKLKKLVEQNGTDDWKVIANYLPNRTDVQCQHRWQKVLNPELIKGPWTKEEDQRVIELVQKYGPKRWSVIAKHLKGRIGKQCRERWHNHLNPEVKKTSWTEEEDRIIYQAHKRLGNRWAEIAKLLPGRTDNAIKNHWNSTMRRKVEQEGYLQESSKASQPAVATSFQKNSHLMGFAQAPPTAQLPATGQPTVNNDYSYYHISEAQNVSSHVPYPVALHVNIVNVPQPAAAAIQRHYNDEDPEKEKRIKELELLLMSTENELKGQQVLPTQNHTCSYPGWHSTTIADHTRPHGDSAPVSCLGEHHSTPSLPADPGSLPEESASPARCMIVHQGTILDNDSSSWCDLSSFEFFEEADFSPSQHHTGKALQLQQREGNGTKPAGEPSPRVNKRMLSESSLDPPKVLPPARHSTIPLVILRKKRGQASPLATGDCSSFIFADVSSSTPKRSPVKSLPFSPSQFLNTSSNHENSDLEMPSLTSTPLIGHKLTVTTPFHRDQTVKTQKENTV

SEQ ID NO: 59494 - protein, 163 aa, Homo sapiens
MQNSHSGVNQLGGVFVNGRPLPDSTRQKIVELAHSGARPCDISRILQTHADAKVQVLDNQNVSNGCVSKILGRYYETGSIRPRAIGGSKPRVATPEVVSKIAQYKRECPSIFAWEIRDRLLSEGVCTNDNIPSVSSLRTSALPALSPMLSPLYLLPPSLSTVS

SEQ ID NO: 59495 - protein, 222 aa, Homo sapiens
MSTSWSDRLQNAADMPANMDKHALKKYRREAYHRVFVNRSLAMEKIKCFGFDMDYTLAVYKSPEYESLGFELTVERLVSIGYPQELLSFAYDSTFPTRGLVFDTLYGNLLKVDAYGNLLVCAHGFNFIRGPETREQYPNKFIQRDDTERFYILNTLFNLPETYLLACLVDFFTNCPRYTSEFSASERCHIANLRDGTAPAAPCRLSPPTRPLSLPVCCSHHF

SEQ ID NO: 59496 - protein, 108 aa, Homo sapiens
GPCATLWASLDPVSVDTARLEHLFESRAKEVLPSKKAGEGRRTMTTVLDPKRSNAINIGLTTLPPVHVIKAALLNFDEFAVSKDGIEALATSSEATDHDAHGGRAAED

SEQ ID NO: 59497 - protein, 420 aa, Homo sapiens
MTTELMMVIAQENLGAHIEKEQEEEALKTCINPLQVWITSASAPACYNLIPILTSGEVFGMHTEISITLFDNKQAEEHLKSLVVETQDLASPVLRSVSICTKVEEAFRQAHVIVVLDDSTNKEVFTLEDCLRSRVPLCRLYGYLIEKNAHESVRVIVGGRTFVNLKTVLLMRYAPRIAHNIIAVALGVEGEAKAILARKLKTAPSYIKDVIIWGNISGNNYVDLRKTRVYRYESAIWGPLHYSRPVLNLIFDSEWVKREFVAILKNLTTTGRQFGGILAAHSIATTLKYWYHGSPPGEIVSLGILSEGQFGIPKGIVFSMPVKFENGTWVVLTDLKDVEISEQIMTRMTSDLIQEKLVALGDKIHFQPYQSGHKDLVPDEEKNLAMSDAAEFPNQIPQTTFEKPQSLEFLNEFEGKTVES

SEQ ID NO: 59498 - protein, 90 aa, Homo sapiens
MLSVRVAAAVVRALPRRAGLVSTEGRHDAGGRVGLQGGGAPARALSAGGRGAVANAAILHPWLLRLDRAGDTGALLLVTCAEAEWYRADS

SEQ ID NO: 59499 - protein, 92 aa, Homo sapiens
MQICGSSVASVAAGTSFQVLGPVCWQQLDLKMAVRVLWGGLSLLRVLWCLLPQTGYVHPDEFFQSPEVMAGPSPTPLRDSSSRGCWCWYPPM

SEQ ID NO: 59500 - protein, 59 aa, Homo sapiens
MISLIWKYYSVPVAVVPSKWITPLDRLVAFPTRVAGGVGITCWILVCNKVVAIVLHPFS

SEQ ID NO: 59501 - protein, 318 aa, Homo sapiens
MASALEQFVNSVRQLSAQGQMTQLCELINKSGELLAKNLSHLDTVLGALDVQEHSLGVLAVLFVKFSMPSVPDFETLFSQVQLFISTCNGEHIRYATDTFAGLCHQLTNALVERKQPLRGIGILKQAIDKMQMNTNQLTSIHADLCQLCLLAKCFKPALPYLDVDMMDICKENGAYDAKHFLCYYYYGGMIYTGLKNFERALYFYEQAITTPAMAVSHIMLESYKKYILVSLILLGKVQQLPKYTSQIVGRFIKRQSLAMLARLVLNSWPQAVLLRLPPRVLGLQPLSNAYHELAQVYSTNNPSELRNLVNKHSETFT

SEQ ID NO: 59502 - protein, 310 aa, Homo sapiens
STGAQVQVAGDMLPNSTERAITIAGIPQSIIECVKQICVVMLESPPKGVTIPYRPKPSSSPVIFAGGQAYTIQGQYAIPQPDLTKLHQLAMQQSHFPMTHGNTGFSGIESSSPEVKGYWAGLDASAQTTSHELTIPNDLIGCIIGRQGAKINEIRQMSGAQIKIANPVEGSTDRQVTITGSAASISLAQYLINVSLENAKPSSQAASVTIPDHLSINLSQPSTPSSSSSSTTTPSLATAGTSDAPSSLPNPLPTAPCVSSLLGMKPIPLLALNVVSAAKGTGASATTTTTSAVPCVTNKLKGEKQRFSPY

SEQ ID NO: 59503 - protein, 130 aa, Homo sapiens
  MOD_RES (1)..(1): Any amino acid
XPPDAEPPPPFQTQTPPQSLQQPAPPGSERRLPTPEQIFQNIKQEYSRYQRWRHLEVVLNQSEACASESQPHSSALTAPSSPGSSWMKKDQPTFTLRQVGIICERLLKDYEDKIREEYEQILNTKLADVS

SEQ ID NO: 59504 - protein, 177 aa, Homo sapiens
SGWAFIKYVLSDKEKKVFGIVIPMQVLANVAYIIIESREEGASDYVLWKEILFLVDLICCGAILFPVVWSIRHLQDASGTDGKVAVNLAKLKLFRHYYVMVAVPFQWQWLYQLLVEGSTLAFFVLTGYKFQPTGNNPYLQLPQEDEEDVQMEQVMTDSGFREGLSKVNKTASGRELL

SEQ ID NO: 59505 - protein, 95 aa, Homo sapiens
MRLTRCQAALAAAITLNLLVLFYVSWLQHQPRNSRARGPRRASAAGPRVTVLVREFEAFDNAVPELVDSFLQQDPAQPVVVAADTLPYPPLALPR

SEQ ID NO: 59506 - protein, 60 aa, Homo sapiens
MPLVEERHRILNETGKILLEKFGGSFLNCVRESENSAQKLMHLVVESFPSYRDVTLFECT

SEQ ID NO: 59507 - protein, 58 aa, Homo sapiens
MVKRKETKEWCPDWEFGRETKNLSPKENIYEIRSPQQEKARVIREIRCQVERQQGHQE

SEQ ID NO: 59508 - protein, 380 aa, Homo sapiens
MGLLVFVRNLLLALCLFLVLGFLYYSAWKLHLLQWEEDSNSVVLSFDSAGQTLGSEYDRLGFLLNLDSKLSPRTLCTVVFGLDCILESPGEPKKLLMPASHPLEILKSLSEDTAFALGFLKLPRPAELATKYANFSEGACKPGYASALMTAIFPRFSKPAPMFLDDSFRKWARIREFVPPFGIKGQDNLIKAILSVTKEYRLTPALDSLRCRRCIIVGNGGVLANKSLGSRIDDYDIVVRLNSAPVKGFEKDVGSKTTLRITYPEGAMQRPEQYERDSLFVLAGFKWQDFKWLKYIVYKERVSASDGFWKSVATRVPKEPPEIRILNPYFIQEAAFTLIGLPFNNGLMGRGSWTHNIQREKEFLRKLVKARVITDLSSGI

SEQ ID NO: 59509 - protein, 171 aa, Homo sapiens
RDIEEVSQGLLSLLGANRAEAQQRRLLGRHEQVVERLLETQDGAEKQLREILTMEKEVAQSLLNAKEQVHQGGVELQQLEAGLQEAGEEDTRLKASLLQLTRELEELKEIEADLERQEKEVDEDTTVTIPSAVYVAQLYHQVSKIEWDYECEPGMVKGRGMFECHGVPRLC

SEQ ID NO: 59510 - protein, 832 aa, Homo sapiens
MVALRGLGSGLQPWCPLDLRLEWVDTVWELDFTETEPLDPSIEAEIIETGLAAFTKLYESLLPFATGEHGSMESIWTFFIENNVSHSTLVALFYHFVQIVHKKNVSVQYREYGLHAAGLYFLLLEVPGSVANQVFHPVMFDKCIQTLKKSWPQESNLNRKRKKEQPKSSQANPGRHRKRGKPPRREDIEMDEIIEEQEDENICFSARDLSQIRNAIFHLLKNFLRLLPKFSLKEKPQCVQNCIEVFVSLTNFEPVLHECHVTQARALNQAKYIPELAYYGLYLLCSPIHGEGDKVISCVFHQMLSVILMLEVGEGSHRAPLAVTSQVINCRNQAVQFISALVDELKESIFPVVRILLQHICAKVVDKSEYRTFAAQSLVQLLSKLPCGEYAMFIAWLYKYSRSSKIPHRVFTLDVVLALLELPEREVDNTLSLEHQKFLKHKFLVQEIMFDRCLDKAPTVRSKALSSFAHCLELTVTSASESILELLINSPTFSVIESHPGTLLRNSSAFSYQRQTSNRSEPSGEINIDSSGETVGSGERCVMAMLRRRIRDEKTNVRKSALQVLVSILKHCDVSGMKEDLWILQDQCRDPAVSVRKQALQSLTELLMAQPRCVQIQKAWLRGVVPVVMDCESTVQEKALEFLDQLLLQNIRHHSHFHSGDDSQVLAWALLTLLTTESQELSRYLNKAFHIWSKKEKFSPTFINNVISHTGTEHSAPAWMLLSKIAGSSPRLDYSRIIQSWEKISSQQNPNSNTLGHILCVIGHIAKHLPKSTRDKVTDAVKCKLNGFQWSLEVISSAVDALQRLCRASAETPAEEQHWLEKESCVQRAVRA

SEQ ID NO: 59511 - protein, 779 aa, Homo sapiens
MATQADLMELDMAMEPDRKAAVSHWQQQSYLDSGIHSGATTTAPSLSGKGNPEEEDVDTSQVLYEWEQGFSQSFTQEQVADIDGQYAMTRAQRVRAAMFPETLDEGMQIPSTQFDAAHPTNVQRLAEPSQMLKHAVVNLINYQDDAELATRAIPELTKLLNDEDQVVVNKAAVMVHQLSKKEASRHAIMRSPQMVSAIVRTMQNTNDVETARCTAGTLHNLSHHREGLLAIFKSGGIPALVKMLGSPVDSVLFYAITTLHNLLLHQEGAKMAVRLAGGLQKMVALLNKTNVKFLAITTDCLQILAYGNQESKLIILASGGPQALVNIMRTYTYEKLLWTTSRVLKVLSVCSSNKPAIVEAGGMQALGLHLTDPSQRLVQNCLWTLRNLSDAATKQEGMEGLLGTLVQLLGSDDINVVTCAAGILSNLTCNNYKNKMMVCQVGGIEALVRTVLRAGDREDITEPAICALRHLTSRHQEAEMAQNAVRLHYGLPVVVKLLHPPSHWPLIKATVGLIRNLALCPANHAPLREQGAIPRLVQLLVRAHQDTQRRTSMGGTQQQFVEGVRMEEIVEGCTGALHILARDVHNRIVIRGLNTIPLFVQLLYSPIENIQRVAAGVLCELAQDKEAAEAIEAEGATAPLTELLHSRNEGVATYAAAVLFRMSEDKPQDYKKRLSVELTSSLFRTEPMAWNETADLGLDIGAQGEPLGYRQDDPSYRSFHSGGYGQDALGMDPMMEHEMGGHHPGADYPVDGLPDLGHAQDLMDGLPPGDSNQLAWFDT

SEQ ID NO: 59512 - protein, 189 aa, Homo sapiens
TFLCDFILDGADLELRLADGSNNCSGRVEVRIHEQWWTICDQNWKNEQALVVCKQLGCPFSVFGSRRAKPSNEARDIWINSISCTGNESALWDCTYDGKAKRTCFRRSDAGVICSGDATWGLRLVGGSNRCSGRLEVYFQGRWGTVCDDGWNSKAAAVVCSQLDCPSSIIGMGLGNASTGYGKIWLDDV

SEQ ID NO: 59513 - protein, 172 aa, Homo sapiens
MGSPSACPYRVCIPWQGLLLTASLLTFWNLPNSAQTNIDVVPFNVAEGKEVLLVVHNESQNLYGYNWYKGERVHANYRIIGYVKNISQENAPGPAHNGRETIYPNGTLLIQNVTHNDAGIYTLHVIKENLVNEEVTRQFYVFYESVQASSPDLSAGTAVSIMIGVLAGMALI

SEQ ID NO: 59514 - protein, 175 aa, Homo sapiens
MAEGGAADLDTQRSDIATLLKTSLRKGDTWYLVDSRWFKQWKKYVGFDSWDKYQMGDQNVYPGPIDNSGLLKDGDAQSLKEHLIDELDYILLPTEGWNKLVSWYTLMEGQEPIARKGGSILGMKVVEQGMFVKHCKVEVYLTELKLCENGNMNNVVTRRFSKADTIDTIEKEIRK

SEQ ID NO: 59515 - protein, 174 aa, Homo sapiens
MAAARPSLGRVLPGSSVLFLCDMQEKFRHNIAYFPQIVSVAARMLKVARLLEVPVMLTEQYPQGLGPTVPELGTEGLRPLAKTCFSMVPALQQELDSRPQLRSVLLCGIEAQACILNTTLDLLDRGLQVHVVVDACSSRSQVDRLVALARMRQSGAFLSTSEGLILQLVGDAVH

SEQ ID NO: 59516 - protein, 154 aa, Homo sapiens
  MOD_RES (1)..(1): Any amino acid
XTVASFLVAQVRKLNDSSSRRPQLCDAGLKTWLRRMHADRDKAGDGLEATPKVAKIQVVWPIKDPLKVPLTPSTKVAHVLRQFTEHLSPGSKGQEDSEDMDSLLLHHRSMESANILLYEVGGNINEHRLDPDAYLLDLYRANPHGEWVLKQNPT

SEQ ID NO: 59517 - protein, 50 aa, Homo sapiens
MFRMLNSSFEDDPFFSWSYSAAAETEAQEALGTIIRTLSPFLHTEKICDR

SEQ ID NO: 59518 - protein, 403 aa, Homo sapiens
MPVPPPPAPPPPPTFALANTEKPTLNKTEQAGRNALLSDISKGKKLKKTVTNDRSAPILDKPKGAGAGGGGGGFGGGGGFGGGGGGGGGGSFGGGGPPGLGGLFQAGMPKLRSTANRDNDSGGSRPPLLPPGGRSTSAKPFSPPSGPGRFPVPSPGHRSGPPEPQRNRMPPPRPDVGSKPDSIPPPVPSTPRPIQSSPHNRGSPPVPGGPRQPSPGPTPPPFPGNRGTALGGGSIRQSPLSSSSPFSNRPPLPPTPSRALDDKPPPPPPPVGNRPSIHREAVPPPPPQNNKPPVPSTPRPSASSQAPPPPPPPSRPGPPPLPPSSSGNDETPRLPQRNLSLSSSTPPLPSPGRSGPLPPPPSERPPPPVRDPPGRSGMTRRGVSCFQNPACPNVPIILSVKIV

SEQ ID NO: 59519 - protein, 119 aa, Homo sapiens
MCEEETTALVCDNGSGLCKAGFAGDDAPRAVFPSIVGRPRHQGVMVGMGQKDSYVGDEAQSKRGILTLKYPIEHGIITNWDDMEKPHDHFSNLGCQHLSLDYCNGFLADFLVSCPHSPN

SEQ ID NO: 59520 - protein, 91 aa, Homo sapiens
MEKLYSENEGMASNQGKMENEEQPQDERKPEVTCTLEDKKLENEGKTENKGKTGDEEMLKDKGKPESEGEAKEGKSEREGESEMEGGSERE

SEQ ID NO: 59521 - protein, 190 aa, Homo sapiens
  MOD_RES (1)..(1): Any amino acid
XEEEEEEYEEEEEEDYDEEEEESSEVPDLPSIRHAAVQAWLETVSGAPLDENDLEEDVDSEPAEIEGEAAEDGDPGDTGAELDDDQHWSDSPSDADRELRLPCPAEGEAELELRVSEDEEKLPASPKHQERGPSQATSPIRSPQESALLFIPVHSPSTEGPQLPPVPAATQEKSPEERLFPEPLLPKEKP

SEQ ID NO: 59522 - protein, 277 aa, Homo sapiens
MPLPLPSAFVLSALQPSPTHSSSNTQRLPDRVTGVDTDPHFIIHVPQKEDTLCFNINEEPGVILSLVQDPNTGFSVNGQLIGNKARSPGQHDGTYFGRLGIANPATDFQLEVTPQNITLNPGFGGPVFSWRDQAVLRQDGVVVTINKKRNLVVSVDDGGTFEVVLHRVWKGSSVHQDFLGFYVLDSHRMSARTHGLLGQFFHPIGFEVSDIHPGSDPTKPDATMVVRNRRLTVTRGLQKDYSKDPWHGAEVSCWFIHNNGAGLIDGAYTDYIVPDIF

SEQ ID NO: 59523 - protein, 141 aa, Homo sapiens
MAMIELGFGRQNFHPLKRKSSLLLKLIAVVFAVLLFCEFLIYYLAIFQCNWPEVKTTASDGEQTTREPVLKAMFLADTHLLGEFLGHWLDKLRREWQMERAFQTALWLLQPEVVFILGDIFDEGKWSTPEAWADDVERFQK

SEQ ID NO: 59524 - protein, 949 aa, Homo sapiens
MAGIFYFALFSCLFGICDAVTGSRVYPANEVTLLDSRSVQGELGWIASPLEGGWEEVSIMDEKNTPIRTYQVCNVMEPSQNNWLRTDWITREGAQRVYIEIKFTLRDCNSLPGVMGTCKETFNLYYYESDNDKERFIRENQFVKIDTIAADESFTQVDIGDRIMKLNTEIRDVGPLSKKGFYLAFQDVGACIALVSVRVFYKKCPLTVRNLAQFPDTITGADTSSLVEVRGSCVNNSEEKDVPKMYCGADGEWLVPIGNCLCNAGHEERSGECQACKIGYYKALSTDATCAKCPPHSYSVWEGATSCTCDRGFFRADNDAASMPCTRPPSAPLNLISNVNETSVNLEWSSPQNTGGRQDISYNVVCKKCGAGDPSKCRPCGSGVHYTPQQNGLKTTKVSITDLLAHTNYTFEIWAVNGVSKYNPNPDQSVSVTVTTNQAAPSSIALVQAKEVTRYSVALAWLEPDRPNGVILEYEVKYYEKDQNERSYRIVRTAARNTDIKGLNPLTSYVFHVRARTAAGYGDFSEPLEVTTNTVPSRIIGDGANSTVLLVSVSGSVVLVVILIAAFVISRRRSKYSKAKQEADEEKHLNQGVRTYVDPFTYEDPNQAVREFAKEIDASCIKIEKVIGVGEFGEVCSGRLKVPGKREICVAIKTLKAGYTDKQRRDFLSEASIMGQFDHPNIIHLEGVVTKCKPVMIITEYMENGSLDAFLRKNDGRFTVIQLVGMLRGIGSGMKYLSDMSYVHRDLAARNILVNSNLVCKVSDFGMSRVLEDDPEAAYTTRGGKIPIRWTAPEAIAYRKFTSASDVWSYGIVMWEVMSYGERPYWDMSNQDVIKAIEEGYRLPPPMDCPIALHQLMLDCWQKERSDRPKFGQIVNMLDKLIRNPNSLKRTGTESSRPNTALLDPSSPEFSAVVSVGDWLQAIKMDRYKDNFTAAGYTTLEAVVHVNQE

SEQ ID NO: 59525 - protein, 56 aa, Homo sapiens
MHEQIENEYIIGLLQQRSQTIYNVHSDNKLSEMLSLFEKGLKNVKNEYEQLNYAKQ

SEQ ID NO: 59526 - protein, 714 aa, Homo sapiens
MAYYGKCIETVIEQLDKFTPKRDNPEQFLEAAATSLQALSPQKQSFVLEVLSGCLEYRKLLTVVVDAFYVEDGRLCLRVDHSRFEVICYLATFLLEELGFQLFCNIIKSQPVDKMCKFLRFFFNPLHLCSWIKDEWSLIYEPAHVKENWIDPLMRWQPEVQELINHLEGVSASQSSPLKTKAKVTEPKEFNLTAPRPRTIPAPEPVPVVAKPRPVPQSTYQPPKEQQQLETVKRYNRRKAEELLLRANIEELRCAMPRSCRERVQGSKQQLRLQFPPRIRKTPKLTFYRPDNILVKLNTTAILREGALYQRQVEQELQRVDKLVDGAGDFSEFFEWQKKMQAKDREEQLAASECRRLQGKLSHEEAVLARQSLMQENKQRVEQQKEQMAKLMLQRAERRLREDRSRKELVEQVIEGQKNAKAAQTKLAKGRQQTVQEAIEESRGLLQRRAQAAQEEQRRRCELISQLRALETQPTRKGKLVDLTQIPGYGLEGEMSIVELRERLALLKENQRRKEEEKRDQIIQGKHTKSQELQNMVEQISLCRAAMGRSAALRWEEKKALAAAPAAPSQDERVQQLRRRISERAAERSRQAALLHVSAPRTARPKPRVSPDWWEEPGRLKAGAGWGWRARRAGTGVPGRGWRGDRVRSAAGRYAAAGAGGGGGVPARADAFPGLQAQLEAQHWLELERSRERRLQALQQGGSGPGPARRLEAA

SEQ ID NO: 59527 - protein, 341 aa, Homo sapiens
MAGCCAALAAFLFEYDTPRIVLIRSRKVGLMNRAVQLLILAYVIGWVFVWEKGYQETDSVVSSVTTKVKGVAVTNTSKLGFRIWDVADYVIPAQEENSLFVMTNVILTMNQTQGLCPEIPDATTVCKSDASCTAGSAGTHSNGVSTGRCVAFNGSVKTCEVAAWCPVEDDTHVPQPAFLKAAENFTLLVKNNIWYPKFNFSKRNILPNITTTYLKSCIYDAKTDPFCPIFRLGKIVENAGHSFQDMAVEGGIMGIQVNWDCNLDRAASLCLPRYSFRRLDTRDVEHNVSPGYNFRFAKYYRDLAGNEQRTLIKAYGIRFDIIVFGKAGKFDIIPKKFLESD

SEQ ID NO: 59528 - protein, 208 aa, Homo sapiens
MLGTDRCVVEEWLSEFKALPDTQITSYAATLHRKKTLVPALYKVIQDSNNELLEPVCHQLFELYRSSEVRLKRFTLQFLPELMWVYLRLTVSRDRQSNGCIEALLLGIYNLEIADKDGNNKVLSFTIPSLSKPSIYHEPSTIGSMALTEGALCQHDLIRVVYSDLHPQRETFTAQNRFEVLSFLMLCYNSAIVYMPASSYQSLCRMGS

SEQ ID NO: 59529 - protein, 137 aa, Homo sapiens
  MOD_RES (1)..(1): Any amino acid
XAEHVKGIHPISDSKIIPTSGDHHIFNKTSHGYEANPAKVLASSLSPFREGRFIERRLRSSSEGTAGSSRMILKPKDGNIEEVNSLRKQRAGSSSSKMNSLGLRQISDHLNRCFTICSTELTFSKLTTCSEVTVTGI

SEQ ID NO: 59530 - protein, 43 aa, Homo sapiens
MSWSPSLTTQTCGAWEMKERLGTGGFGNVIRWHNQAFKSAAEE

SEQ ID NO: 59531 - protein, 90 aa, Homo sapiens
  MOD_RES (1)..(1): Any amino acid
XVNEFISKYIVNEPRDVGYLAQHQLFDQIPELKQDISIPDYCSLGDGEEEEITINAWLTWRIPTWKSSPSLPRPHSCPASCLLERSCSSR

SEQ ID NO: 59532 - protein, 71 aa, Homo sapiens
  MOD_RES (1)..(1): Any amino acid
XDPRLPAWALVLLGPALVFALGPAPTPEMREKLCGHHFVRALVRVCGGPRWSTEARRPATGGDPEFHSVPR

SEQ ID NO: 59533 - protein, 210 aa, Homo sapiens
MLCEEAAQKRKGKEPGMALPQGRLTFRDVAIEFSLAEWKCLNPSQRALYREVMLENYRNLEAVDISSKRMMKEVLSTGQGNTEVIHTGTLQRYQSYHIGDFCFQEIEKEIHDIEFQCQEDERNGHEAPMTKIKKLTGSTDQHDHRHAGNKPIKDQLGSSFYSHLPELHIIQIKGLTSKDFWYVRKKPRRGRGKQRSQGWLFLSTTGLGSP

SEQ ID NO: 59534 - protein, 90 aa, Homo sapiens
MEVPPPAPRSFLCRALCLFPRVFAAEAVTADSEVLEERQKRLPYVPEPYYPESGWDRLRELFGKDNLHIVLPHEASFVMAGAGVGELQCL

SEQ ID NO: 59535 - protein, 154 aa, Homo sapiens
MVLNRSGMWQEEVTVPSVQTFLIPEAMTFEEAAALLVNYITAYMVLFDFGNLQPGHSVLVHMAAGGVGMAAVQLCRTVENVTVFGTASASKHEALKENGVTHPIDYHTTDYVDEIKKISPKGVDIVMDPLGGSDTAKGYNLLKPMGKVVTYGEL

SEQ ID NO: 59536 - protein, 214 aa, Homo sapiens
  MOD_RES (1)..(1): Any amino acid
XIGSGVERMGAGMGFGLERMAAPIDRVGQTIERMGSGVERMGPAIERMGLSMERMVPAGMGAGLERMGPVMDRMATGLERMGANNLERMGLERMGANSLERMGLERMGANSLERMGPAMGPALGAGIERMGLAMGGGGGASFDRAIEMERGNFGGSFAGSFGGAGGHAPGVARKACQIFVRNLPFDFTWKMLKDKFNECEPERQVLHVSRNALV

SEQ ID NO: 59537 - protein, 663 aa, Homo sapiens
MCHPDKAFTSDKLQCVFNEYKAAVWVPPRPRPLSRAPLPEAGGENLHLKISRVRKRNLPFVVWGEEEASTPGLDAISHHLCYPDRTHRDRTEKHSTMPDSPVDVKTQSRLTPPTMPPPPTTQGAPRTSSFTPTTLTNGTSHSPTALNGAPSPPNGFSNGPSSSSSSSLANQQLPPACGARQLSKLKRFLTTLQQFGNDISPEIGERVRTLVLGLVNSTLTIEEFHSKLQEATNFPLRPFVIPFLKANLPLLQRELLHCARLAKQNPAQYLAQHEQLLLDASTTSPVDSSELLLDVNENGKRRTPDRTKENGFDREPLHSEHPSKRPCTISPGQRYSPNNGLSYQPNGLPHPTPPPPQHYRLDDMAIAHHYRDSYRHPSHRDLRDRNRPMGLHGTRQEEMIDHRLTDREWAEEWKHLDHLLNCIMDMVEKTRRSLTVLRRCQEADREELNYWIRRYSDAEDLKKGGGSSSSHSRQQSPVNPDPVALDAHREFLHRPASGYVPEEIWKKAEEAVNEVKRQAMTELQKAVSEAERKAHDMITTERAKMERTVAEAKRQAAEDALAVINQQEDSSESCWNCGRKASETCSGCNTARYCGSFCQHKDWEKHHHICGQTLQAQQQGDTPAVSSSVTPNSGAGSPMDTPPAATPRSTTPGTPSTIETTPR

SEQ ID NO: 59538 - protein, 89 aa, Homo sapiens
MGCGNSTATSAGAGQGPAGAAKDVTEESVTEDDKRRNYGGVYVGLPSEAVNMVSSQTKTVRKKENNIMTQESRACSSVWKEFGSVGRCN

SEQ ID NO: 59539 - protein, 192 aa, Homo sapiens
  MOD_RES (1)..(1): Any amino acid
XKRRLLMETCAVNNGGCDRTCKDTSTGVHCSCPVGFTLQLDGKTCKDIDECQTRNGGCDHFCKNIVGSFDCGCKKGFKLLTDEKSCQDVDECSLDRTCDHSCINHPGTFACACNRGYTLYGFTHCGDTNECSINNGGCQQVCVNTVGSYECQCHPGYKLHWNKKDCVVKGLLPTSVSPRVSLHCGKSGGGDG

SEQ ID NO: 59540 - protein, 206 aa, Homo sapiens
  MOD_RES (1)..(1): Any amino acid
XELDRREREMQNLSQHGRKNNWPPLPSNFPVGPCFYQDFSVDIPVEFQKTVKLMYYLWMFHAVTLFLNIFGCLAWFCVDSARAVDFGLSILWFLLFTPCSFVCWYRPLYGAFSGWISSLTGLNQNIPVGIMMIIIAALFTASAVISLVMFKKVHGLYRTTGASFEKAQQEFATGVMSNKTVQTAAANAASTAASSAAQNAFKGNQI

SEQ ID NO: 59541 - protein, 157 aa, Homo sapiens
MSAARESHPHGVKRSASPDDDLGSSNWEAADLGNEERKQKFLRLMGAGKKEHTGRLVIGDHKSTSHFRTGEEDKKINEELESQYQQSMDSKLSGRYRRHCGLGFSERRSFAMLPRLVSKLLGSSDLSAFQSAGTTGVSHHVRPGHIFNRREQQHAHK

SEQ ID NO: 59542 - protein, 69 aa, Homo sapiens
  MOD_RES (1)..(1): Any amino acid
XAYPAAYGQISQAFPQPPPMIPQQQREGFVSFDNPASAQTAIQAMNGFQIGMKRLKVQLKRPKDANRPY

SEQ ID NO: 59543 - protein, 165 aa, Homo sapiens
MDSLGAVSTRLGFDLFKELKKTNDGNIFFSPVGILTAIGMVLLGTRGATASQLEEVFHSEKETKSSRIKAEEKEIENTEAVHQQFQKFLTEISKLTNDYELNITNRLFGEKTYLFLQKYLDYVEKYYHASLEPVDFVNAADESRKKINSWVESKTNDVETEAQRV

SEQ ID NO: 59544 - protein, 122 aa, Homo sapiens
MDIGGTLVKLSYFEPIDITAEEEQEEVESLKSIRKYLTSNVAYGSTGIRDVHLELKDLTLFGRRGNLHFIRFPTQDLPTFIQMGRDKNFSTLQTVLCATGGGAYKFEKDFRTIGNLHLHKLD

SEQ ID NO: 59545 - protein, 182 aa, Homo sapiens
MLPAVGSVDEEEDPAEEDCPELVPIETTQSEEEEKSGLGAKIPVTIITGYLGAGKTTLLNYILTEQHSKRVAVILNESGEGSALEKSLAVSQGGELYEEWLELRNGCLCCSVKDNGLRAIENLMQKKGKFDDILLETTGLADPGAVTSMFWVDAELGSDIYLDGIITIVDSKYGLKAKNWTT

SEQ ID NO: 59546 - protein, 73 aa, Homo sapiens
MKTKLNIYNMQFLLFVFLVWDPARLVLANIQEDEAKNNITIFTRILDRLLDGYDNRLRPGLGVSRVESPVCVT

SEQ ID NO: 59547 - protein, 521 aa, Homo sapiens
MIHVRRHETRRNSKSHVPEQKSRVDWRRTKRSSISQLLDSDEELDSEEFDSDEELDSDESFENDEELDSNKGPDCNKTPGSERELNLSKIQSEGNDSKCLINSGNGSTYEEETNKIKHRNIDLQDQEKHLSQEDNDLNKQTGQIIEDDLEEEDIKRGKRKRLSSVMCDSDESDDSDILVRKVGVKRPRRVVEDEGSSVEMEQKTPEKTLAAQKREKLQKLKELSKQRSRQRRSSGRDFEDSEKESCPSSDEVDEEEEEDNYESDEDGDDYIIDDFVVQDEEGDEENKNQQGEKLTTSQLKLVKQNSLYSFSDHYTHFERVVKALLINALDESFLGTLYDGTRQKSYAKDMLTSLHYLDNRFVQPRLESLVSRSRWKEQYKERVENYSNVSIHLKNPENCSCQACGLHRYCKYSVHLSGELYNTRTMQIDNFMSHDKQVFTVGRICASRTRIYHKLKHFKFKLYQECCTIAMTEEVEDEQVKETVERIFRRSKENGWIKEKYGQLEEYLNFADYFQEEKFEL

SEQ ID NO: 59548 - protein, 117 aa, Homo sapiens
MRMSVGLSLLLPLSGRTFLLLLSVVMAQSHWPSEPSEAVRDWENQLEASMHSVLSDLHEAVPTVVGIPDGTAVVGRSFRVTIPTDLIASSGDIIKVSAAGKEALPSWLHWDSQSHTL

SEQ ID NO: 59549 - protein, 137 aa, Homo sapiens
MANFQEHLSCSSSPHLPFSESKTFNGLQDELTAMGNHPSPKLLEDQQEKGMVRTELIESVHSPVTTTVLTSVSEDSRDQFENSVLQLREHDESETAVSQGNSNTVDGESTSGTEDIKIQFSRSGSGSGGFLEGLFGC

SEQ ID NO: 59550 - protein, 62 aa, Homo sapiens
MKVLISSLLLLLPLMLMSMVSSSLNPGVARGHRDRGQASRRWLQEGGQECECKAMLLFQIGS

SEQ ID NO: 59551 - protein, 152 aa, Homo sapiens
MAAAVSSVVRRVEELGDLAQAHIQQLSEAAGEDDHFLIRASAALEKLKLLCGEEKECSNPSNLLELYTQAILDMTYFEENKLVDEDFPEDSSSQKVKELISFLSEPEILVKENNMHPKHCNLLGDELLECLSHFPLWLSQTSLLSLGPLPLP

SEQ ID NO: 59552 - protein, 904 aa, Homo sapiens
MLSSWQGGPRPRQLLLWLLILAAWETGSGQLHYSVPEEAKHGTFVGRIAQDLGLELAELVPRLFRVASKRHGDLLEVNLQNGILFVNSRIDREELCGRSAECSIHLEVIVDRPLQVFHVEVKVRDINDNPPIFPESKKRIIIAESRPPETRFPLDGASDADIGVNSALTYRLDPNDYFTLDAQNSLEQMSSLSLVLRKTLDREEIQEHSLLLTASDGGKPELTGTVQLLITILDVNDNAPEFYQSVYKVTVLENAFNGTLVIKLNATDPDDGTNGDIVYSFRRPVWPAVVYAFTINPNNGEIRTKGKLDFEEKKLYEISVEAVDKGNIPMAGHCTLLVEVLDVNDNAPEVTITSLSLPIREDTQPSAIIALISVSDRDSGSNGQVTCTLTPHVPFKLVSTYKNYYSLVLDSALDRESVSAYELVVTARDGGSPSLWATASVSVGVADVNDNAPAFAQPEYTVFVKENNPPGCHIFTVSAQDADAQENALVSYSLVERRVGERALSSYVSVHAESGKVYALQPLDHEELELLQFQVSARDSGVPPLGSNVTLQVFVLDENDNAPALLTPGAGSAGGTVSELMPRSVGAGHVVAKVRAVDADSGYNAWLSYELQLAAVGARIPFRVGLYTGEISTTRPLDEVDAPHHRLLVLVKDHGEPALTATATVLLSLVESGQAPQASSRASAGAVGPEAALVDVNVYLIIAICAVSSLLVLTLLLYTALRCSAPPTEGACAPGKPTLVCSSAAGSWSYSQQRRPRVCSGEGPHKTDLMAFSPSLPPCLGSAEGTGQREEDSECLKEPRQPNPDWRYSASLRAGMHSSVHLEEAGILRAGPGGPDQQWPTVSSATPEPEAGEVSPPVGAGVNSNSWTFKYGPGNPKQSGPEPKKQTQVSFLLRRKGEASQPRQ

SEQ ID NO: 59553 - protein, 294 aa, Homo sapiens
MGRKVTVATCALNQWALDFEGNLQRILKSIEIAKNRGARYRLGPELEICGYGCWDHYYESDTLLHSFQVLAALVESPVTQDIICDVGMPVMHRNVRYNCRVIFLNRKILLIRPKMALANEGNYRELRWFTPWSRSRHTEEYFLPRMIQDLTKQETVPFGDAVLVTWDTCIGSEICEELWTPHSPHIDMGLDGVEIITNASGSHQVLRKANTRVDLVTMVTSKNGGIYLLANQKGCDGDRLYYDGCAMIAMNGSVFAQGSQFSLDDVVMSGPGHAWGRVLCAETELLALPCKPGA

SEQ ID NO: 59554 - protein, 68 aa, Homo sapiens
MDDVPAPTPAPAPPAAAAPRVPFHCSECGKSFRYRSDLRRHFARHTALNASTVGFSPLPCSPALACPP

SEQ ID NO: 59555 - protein, 252 aa, Homo sapiens
MIGGLFIYNHKGEVLISRVYRDDIGRNAVDAFRVNVIHARQQVRSPVTNIARTSFFHVKRSNIWLAAVTKQNVNAAMVFEFLYKMCDVMAAYFGKISEENIKNNFVLIYELLDEILDFGYPQNSETGALKTFITQQGIKSQHQTKEEQSQITSQGKGTADETSKSGKQSIAIDDCTFHQCVRLSKFDSERSISFIPPDGEFELMRYRTTKDIILPFRVIPLVREVGRTKLEVKVVIKSNFKPSLLAQKIEVR

SEQ ID NO: 59556 - protein, 103 aa, Homo sapiens
MAGEQKPSSNLLEQFILLAKGTSGSALTALISQVLEAPGVYVFGELLELANVQELAEGANAAYLQLLNLFAYGTYPDYIVYPLLRVAERPGDAESPGTRRPYH

SEQ ID NO: 59557 - protein, 105 aa, Homo sapiens
MVPSRRTWNLGATPSLRGLWRVGRAPEPEPGMARPAPAPASPAARPFPHTGPGRLRTGRGKDTPVCGDEDSSARSAARPALAQCRALSVDWAGPGSPHGLYLTLQ

SEQ ID NO: 59558 - protein, 174 aa, Homo sapiens
MGSMFRSEEVALVQLFLPTAAAYTCVSRLGELGLVEFRDLNASVSAFQRRFVVDVRRCEELEKTFTFLQEEVRRAGLVLPPPKGRLPAPPPRDLLRIQEETERLAQELRDVRGNQQALRAQLHQLQLHAAVLRQGHEPQLAAAHTDGASERTPLLQAPGGPHQDLRVKASQPRG

SEQ ID NO: 59559 - protein, 74 aa, Homo sapiens
MELHILEHRVRVLSVARPGLWLYTHPLIKLLFLPRRSRCKFFSLTETPEDYTLMVDEEGFKDEETETQITHPRS

SEQ ID NO: 59560 - protein, 81 aa, Homo sapiens
  MOD_RES (1)..(1): Any amino acid
XWRRLATVEERKKIVASSHDHGYTTLATSVTLLKASEVEEILDGNDEKYKAVSISTEPPTYLREQKAKRNSHFDDHDPAVI

SEQ ID NO: 59561 - protein, 148 aa, Homo sapiens
MVLKAFFPTCCVSTDSGLLVGRWVPEQSSAVVLAVLHFPFIPIQVKQLLAQVRQASQVGVAVLGTWCHCRQEPEESLGRFLESLGAVFPHEPWLRLCRERGGTFWSCEATHRQAPTAPGAPGEDQVMLIFYDQRQVLLSQLHLPTVLP

SEQ ID NO: 59562 - protein, 161 aa, Homo sapiens
MASMQKRLQKELLALQNDPPPGMTLNEKSVQNSITQWIVDMEGAPGTLYEGEKFQLLFKFSSRYPFDSPQVMFTGENIPVHPHVYSNGHICLSILTEDWSPALSVQSVCLSIISMLSSCKEKRRPPDNSFYVRTCNKNPKKTKWWYHEAAYHKDFSLLFKD

SEQ ID NO: 59563 - protein, 190 aa, Homo sapiens
MFAFWPTHRRVAFQAWPQSLARRRTPPGEESTSRQLAPVLGYLGSRQKHSLPDLPYDYGALEPHINAQIMQLHHSKHHAAYVNNLNVTEEKYQEALAKGDVTAQIALQPALKFNGGGHINHSIFWTNLSPNGGGEPKGELLEAIKRDFGSFDKFKEKLTAASVGVQGSGWGWLGFNKERGHLQIAACPNQ

SEQ ID NO: 59564 - protein, 53 aa, Homo sapiens
MAQMEVVVPGRNGAMTDCGVGPGFPHLGEVAPGKGSWGQWRQFPSMVSRLAMW

SEQ ID NO: 59565 - protein, 102 aa, Homo sapiens
  MOD_RES (1)..(1): Any amino acid
XLEEEEKRASRAPSKQRTRSQRKVGGGSAQPCDSIVVAYYFCGEPIPYRTLVRGRAVTLGQFKELLTKKGSYRPPSHLRCCLLTALLTSVLQILLQESERRV

SEQ ID NO: 59566 - protein, 170 aa, Homo sapiens
MASIFSKLLTGRNASLLFATMGTSVLTTGYLLNRQKVCAEVREQPRLFPPSADYPDLRKHNNCMAECLTPAIYAKLRNKVTPNGYTLDQCIQTGVDNPGHPFIKTVGMVAGDEESYEVFADLFDPVIKLRHNGYDPRVMKHTTDLDASKITQGQFDEHYVLSSRVRTGRS

SEQ ID NO: 59567 - protein, 95 aa, Homo sapiens
MGRGMGEEGPPSLEYIQAKDLFPPKELVKEEENLQVPFTVLQGEGVEFLGRAADALIAISNYRLHIKFKDSVINVPLRMIDSVESRDMFQLHISC

SEQ ID NO: 59568 - protein, 162 aa, Homo sapiens
MATPYVPVPMPIGNSASSFTTNRNQRSSSFGSVSTSSNSSKGQLEDSNMGNFKQTSVPDQMDNTSSVCSSPLIRTKFTGTASSIEYSTRPRDTEEQNPETVNWEDRPSTPTILGYEVMEERAKFTAFCETLEETNYRLQKELLEKQKEMESLKKLLSEKQLH

SEQ ID NO: 59569 - protein, 55 aa, Homo sapiens
MASSEDVASSPERHYTPLPSASRELTSHQGVLGKCRYVYYGKNSEGNRFIRDDQL

SEQ ID NO: 59570 - protein, 174 aa, Homo sapiens
MCADDLLSVLLYLLVKTEIPNWMANLSYIKNFRFSSLAKDELGYCLTSFEAAIEYIRQGSLSAKPPESEGFGDRLFLKQRMSLLSQMTSSPTDCLFKHIASGNQKEVERLLSQEDHDKDTVQKMCHPLCFCDDCEKLVSGRLNDPSVVTPFSRDDRGHTPLHVAAVCGQASLID

SEQ ID NO: 59571 - protein, 124 aa, Homo sapiens
MPPSGPRGTLLLLPLLLLLLLRAVLAVPLERGAPNKEETPATESPDTGLYYHRYLQEVIDVLETDGHFREKLQAANAEDIKSGKLSRELDFVSHHVRTKLDELKRQEVSRLRMLLKAKMDAEQD

SEQ ID NO: 59572 - protein, 510 aa, Homo sapiens
MLLPVFTLKLRHKISPRMVAIGRYDGTHPCLAAATQTGKVFIHNPHTRNQHVSASRVFQSPLESDVSLLSINQAVSCLTAGVLNPELGYDALLVGTQTNLLAYDVYNNSDLFYREVADGANAIVLGTLGDISSPLAIIGGNCALQGFNHEGSDLFWTVTGDNVNSLALCDFDGDGKKELLVGSEDFDIRVFKEDEIVAEMTETEIVTSLCPMYGSRFGYALSNGTVGVYDKTSRYWRIKSKNHAMSIHAFDLNSDGVNELITGWSNGKVDARSDRTGEVIFKDNFSSAIAGVVEGDYRMDGHIQLICCSVDGEIRGYLPGTAEMRGNLMDTSAEQDLIRELSQKKQNLLLELRNYEENAKAELASPLNEADGHRGIIPANTRLHTTLSVSLGNETQTAHTELRISTSNDTIIRAVLIFAEGIFTGESHVVHPSIHNLSSSICIPIVPPKDVPVDLHLKAFVGYRSSTQFHVFESTRQLPRFSMYALTSLDPASEPISYVNFTIAERAQRQ

SEQ ID NO: 59573 - protein, 219 aa, Homo sapiens
MECCRRATPGTLLLFLAFLLLSSRTARSEEDRDGLWDAWGPWSECSRTCGGGASYSLRRCLSSKSCEGRNIRYRTCSNVDCPPEAGDFRAQQCSAHNDVKHHGQFYEWLPVSNDPDNPCSLKCQAKGTTLVVELAPKVLDGTRCYTESLDMCISGLCQIVGCDHQLGSTVKEDNCGVCNGDGSTCRLVRGQYKSQLSATKCKTHRDGRPLDLLTYPLLA

SEQ ID NO: 59574 - protein, 99 aa, Homo sapiens
  MOD_RES (1)..(1): Any amino acid
XELACKLERRLRREEAEESGPQLAPLGAPAPEPKPEPEPPARAPTASADAELSAQLSRRLDINEGAARPRRCRVFNPYTEFPEFSRRLIKDLESMFKLI

SEQ ID NO: 59575 - protein, 172 aa, Homo sapiens
MVAGMLGLREEKSEDQDLQGLKDKPLKFKKVKKDKKEEKEGKHEPVQPSAHHSAEPAEAGKAETSEGSGSAPAVPEASASPKQRRSIIRDRGPMYDDPTLPEGWTRKLKQRKSGRSAGKYDVYLINPQGKAFRSKVELIAYFEKLQELAEAGDAPKGAAPRDPRRPRQRVCR

SEQ ID NO: 59576 - protein, 1079 aa, Homo sapiens
MMTSVGTNRARGNWEQPQNQNQTQHKQRPQATAEQIRLAQMISDHNDADFEEKVKQLIDITGKNQDECVIALHDCNGDVNRAINVLLEGNPDTHSWEMVGKKKGVSGQKDGGQTESNEEGKENRDRDRDYSRRRGGPPRRGRGASRGRECMHGALSKPAVVRGQENGLDGTKSGGPSGRGTERGRRGRGRGRGGSGRRGGRFSAQGMGTFNPADYAEPANTDDNYGNSSGNTWNNTGHFEPDDGTSAWRTATEEWGTEDWNEDLSETKIFTASNVSSVPLPAENVTITAGQRIDLAVLLGKTPSTMENDSSNLDPSQAPSLAQPLVFSNSKQTAISQPASGNTFSHHSMVSMLGKGFGDVGEAKGGSTTGSQFLEQFKTAQALAQLAAQHSQSGSTTTSSWDMGSTTQSPSLVQYDLKNPSDSAVHSPFTKRQAFTPSSTMMEVFLQEKSPAVATSTAAPPPPSSPLPSKSTSAPQMSPGSSDNQSSSPQPAQQKLKQQKKKASLTSKIPALAVEMPGSADISGLNLQFGALQFGSEPVLSDYESTPTTSASSSQAPSSLYTSTASESSSTISSNQSQESGYQSGPIQSTTYTSQNNAQGPLYEQRSTQTRRYPSSISSSPQKDLTQAKNGFSSVQATQLQTTQSVEGATGSAVKSDSPSTSSIPPLNETVSAASLLTTTNQHSSSLGGLSHSEEIPNTTTTQHSSTLSTQQNTLSSSTSSGRTSTSTLLHTSVESEANLHSSSSTFSTTSSTVSAPPPVVSVSSSLNSGSSLGLSLGSNSTVTASTRSSVATTSGKAPPNLPPGVPPLLPNPYIMAPGLLHAYPPQVYGYDDLQMLQTRFPLDYYSIPFPTPTTPLTGRDGSLASNPYSGDLTKFGRGDASSPAPATTLAQPQQNQTQTHHTTQQTFLNPALPPGYSYTSLPYYTGVPGLPSTFQYGPAVFPVAPTSSKQHGVNVSVNASATPFQQPSGYGSHGYNTGVSVTSSNTGVPDISGSVYSKTQQSFEKQGFHSGTPAASFNLPSALGSGGPINPATAAAYPPAPFMHILTPHQQPHSQILHHHLQQDGQDILNFVDDQLGE

SEQ ID NO: 59577 - protein, 1076 aa, Homo sapiens
  MOD_RES (1)..(1): Any amino acid
XPVHGPQNVEIVDIRARQLTLQWEPFGYAVTRCHSYNLTVQYQYVFNQQQYEAEEVIQTSSHYTLRGLRPFMTIRLRLLLSNPEGRMESEELVVQTEEDVPGAVPLESIQGGPFEEKIYIQWKPPNETNGVITLYEINYKAVGSLDPSADLSSQRGKVFKLRNETHHLFVGLYPGTTYSFTIKASTAKGFGPPVTTRIATKISAPSMPEYDTDTPLNETDTTITVMLKPAQSRGAPVSVYQLVVKEERLQKSRRAADIIECFSVPVSYRNASSLDSLHYFAAELKPANLPVTQPFTVGDNKTYNGYWNPPLSPLKSYSIYFQALSKANGETKINCVRLATKAPMGSAQVTPGTPLCLLTTGASTQNSNTVEPEKQVDNTVKMAGVIAGLLMFIIILLGVMLTIKRRRNAYSYSYYLKLAKKQKETQSGAQREMGPVASADKPTTKLSASRNDEGFSSSSQDVNGFTDGSRGELSQPTLTIQTHPYRTCDPVEMSYPRDQFQPAIRVADLLQHITQMKRGQGYGFKEEYEALPEGQTASWDTAKEDENRNKNRYGNIISYDHSRVRLLVLDGDPHSDYINANYIDGYHRPRHYIATQGPMQETVKDFWRMIWQENSASIVMVTNLVEVGRVKCVRYWPDDTEVYGDIKVTLIETEPLAEYVIRTFTVQKKGYHEIRELRLFHFTSWPDHGVPCYATGLLGFVRQVKFLNPPEAGPIVVHCSAGAGRTGCFIAIDTMLDMAENEGVVDIFNCVRELRAQRVNLVQTEEQYVFVHDAILEACLCGNTAIPVCEFRSLYYNISRLDPQTNSSQIKDEFQTLNIVTPRVRPEDCSIGLLPRNHDKNRSMDVLPLDRCLPFLISVDGESSNYINAALMDSHKQPAAFVVTQHPLPNTVADFWRLVFDYNCSSVVMLNEMDTAQFCMQYWPEKTSGCYGPIQVEFVSADIDEDIIHRIFRICNMARPQDGYRIVQHLQYIGWPAYRDTPPSKRSLLKVVRRLEKWQEQYDGREGRTVVHCLNGGGRSGTFCAICSVCEMIQQQNIIDVFHIVKTLRNNKSNMVETLEQYKFVYEVALEYLSSF

SEQ ID NO: 59578 - protein, 152 aa, Homo sapiens
SSTGSSSGNHGGSGGGNGHKPGNSETSPGMFNFDTFWKNFKSKLGFINWDAINKNQVPPPSTRALLYFSRLWEDFKQNTPFLNWKAIIEGADASSLQKRAGRDDQNYNYNQHAYPTAYGGKYSVKTPAKGGVSPSSSASRVQPGLLQWVKFW

SEQ ID NO: 59579 - protein, 890 aa, Homo sapiens
MHLRAHRTRRGKVSPTAKTKSLLHFIVLCVAGVVVHAQEQGIDILHQLGLGGKDVRHSSPATAVPSASTPLPQGVHLTESGVIFKNDAYIETPFVKILPVNLGQPFTILTGLQSHRVNNAFLFSIRNKNRLQLGVQLLPKKLVVHIRGKQPAVFNYSVHDEQWHSFAITIRNQSVSMFVECGKKYFSTETIPEVQTFDSNSVFTLGSMNNNSIHFEGIVCQLDIIPSAEASADYCRYVKQQCRQADKYQPETSIPCTTLIPTKIPEHSPPPKLFAEKVLSEDTFTEGKSIPNIIKNDSETVYKRQEHQISRSQLSSLQSGNVSAVDLTNHGIQAKEMITEEDTQTNFSLSVTTHRISEAKMNTKEKFSSLLNMSDNITQHDDRVTGLSLFKKMPSILPQIKQDTITNLKKAITANLHTNELMEMQPILNTSLHRVTNEPSVDNHLDLRKEGEFYPDATYPIENSYETELYDYYYYEDLNTMLEMEYLRGPKGDTGPPGPPGPAGIPGPSGKRGPRGIPGPHGNPGLPGLPGPKGPKGDPGFSPGQPVPGEKGDQGLSGLMGPPGMQGDKGLKGHPGLPGLPGEQGIPGFAGNIGSPGYPGRQGLAGPEGNPGPKGAQGFIGSPGEAGQLGPEGERGIPGIRGKKGFKGRQGFPGDFGDRGPAGLDGSPGLVGGTGPPGFPGLRGSVGPVGPIGPAGIPGPMGLSGNKGLPGIKGDKGEQGTAGELGEPGYPGDKGAVGLPGPPGMRGKSGPSGQTGDPGLQGPSGPPGPEGFPGDIGIPGQNGPEGPKGLLGNRGPPGPPGLKGTQGEEGPIGAFGELGPRGKPGQKGYAGEPGPEGLKGEVGDQGNIGKIGETMESCSVTQAGAQWHDLGSLHPLPPGFKRFSCLSLPG

SEQ ID NO: 59580 - protein, 561 aa, Homo sapiens
MPLAFCGSENHSAAYRVDQGVLNNGCFVDALNVVPHVFLLFITFPILFIGWGSQSSKVHIHHSTWLHFPGHNLRWILTFMLLFVLVCEIAEGILSDGVTESHHLHLYMPAGMAFMAAVTSVVYYHNIETSNFPKLLIALLVYWTLAFITKTIKFVKFLDHAIGFSQLRFCLTGLLVILYGMLLLVEVNVIRVRRYIFFKTPREVKPPEDLQDLGVRFLQPFVNLLSKGTYWWMNAFIKTAHKKPIDLRAIGKLPIAMRALTNYQRLCEAFDAQVRKDIQGTQGARAIWQALSHAFGRRLVLSSTFRILADLLGFAGPLCIFGIVDHLGKENDVFQPKTQFLGVYFVSSQEFLANAYVLAVLLFLALLLQRTFLQASYYVAIETGINLRGAIQTKIYNKIMHLSTSNLSMGEMTAGQICNLVAIDTNQLMWFFFLCPNLWAMPVQIIVGVILLYYILGVSALIGAAVIILLAPVQYFVATKLSQAQRSTLEYSNERLKQTNEMLRGIKLLKLYAWENIFRTRVETTRRKEMTSLRAFAIYTSISSWPHWTALPPSHPGHLHV

SEQ ID NO: 59581 - protein, 113 aa, Homo sapiens
MAYGVPRKNTVKTILRGSCYNVQEPWDIALLAKTWSTNLANIKLPFLEEISFGGSVQLTKCTTIKDGLLPSAESIKLEREYEVKRLCKLKCQENTSKEIQLLLRERPAGLRRP

SEQ ID NO: 59582 - protein, 375 aa, Homo sapiens
MVVVVATIKSVSFYTRKDGQLIYTPFTEDTETVGQRALHSILNAAIMISVIVVMTILLVVLYKYRCYKVIHAWLIISSLLLLFFFSFIYLGEVFKTYNVAVDYITVALLIWNFGVVGMISIHWKGPLRLQQAYLIMISALMALVFIKYLPEWTAWLILAVISVYDLVAVLCPKGPLRMLVETAQERNETLFPALIYSSTMVWLVNMAEGDPEAQRRVSKNSKYNAESTERESQDTVAENDDGGFSEEWEAQRDSHLGPHRSTPESRAAVQELSSSILAGEDPEERGVKLGLGDFIFYSVLVGKASATASGDWNTTIACFVAILIGLCLTLLLLAIFKKALPALPISITFGLVFYFATDYLVQPFMDQLAFHQFYI

SEQ ID NO: 59583 - protein, 174 aa, Homo sapiens
  MOD_RES (1)..(1): Any amino acid
XTLGRSKGRLRLPQIGSKNKLSSSKENLDASKENGAGQICELADALSRGHVLGGSQPELVTPQDHEVALANGFLYEHEACGNGYSNGQLGNHSEEDSTDDQREDTRIKPIYNLYAISELHPDEIDTDSAYILFYEQQGIDYAQFLPKTDGKKMADTSSMDEDFESDYKKYCVLQ

SEQ ID NO: 59584 - protein, 808 aa, Homo sapiens
MRLLLLVPLLLAPAPGSSAPKVRRQSDTWGPWSQWSPCSRTCGGGVSFRERPCYSQRRDGGSSCVGPARSHRSCRTESCPDGARDFRAEQCAEFDGAEFQGRRYRWLPYYSAPNKCELNCIPKGENFYYKHREAVVDGTPCEPGKRDVCVDGSCRVVGCDHELDSSKQEDKCLRCGGDGTTCYPVAGTFDANDLSRGYNQILIVPMGATSILIDEAAASRNFLAVKNVRGEYYLNGHWTIEAARALPAASTILHYERGAEGDLAPERLHARGPTSEPLVIELISQEPNPGVHYEYHLPLRRPSPGFSWSHGSWSDCSAECGGGHQSRLVFCTIDHEAYPDHMCQRQPRPADRRSCNLHPCPETKRWKAGPWAPCSASCGGGSQSRSVYCISSDGAGIQEAVEEAECAGLPGKPPAIQACNLQRCAAWSPEPWGECSVSCGVGVRKRSVTCRGERGSLLHTAACSLEDRPPLTEPCVHEDCPLLSDQAWHVGTWGLCSKSCSSGTRRRQVICAIGPPSHCGSLQHSKPVDVEPCNTQPCHLPQEVPSMQDVHTPASNPWMPLGPQESPASDSRGQWWAAQEHPSARGDHRGERGDPRGDQGTHLSALGPAPSLQQPPYQQPLRSGSGPHDCRHSPHGCCPDGHTASLGPQWQGCPGAPCQQSRYGCCPDRVSVAEGPHHAGCTKSYGGDSTGGMPRSRAVASTVHNTHQPQAQQNEPSECRGSQFGCCYDNVATAAGPLGEGCVGQPSHGLAWQVWSPRWCRQPWGSWCGSPAQTTLPRNPRLPGRKMASPSPLTGVCDGPPTSSDRCV

SEQ ID NO: 59585 - protein, 129 aa, Homo sapiens
  MOD_RES (1)..(1): Any amino acid
XKLLLKLDCTFIKSEKYKNCTHLIAERLCKSEKFLAACAAGKWILTKDYIIHSAKSGRWLDETTYEWGYKIEKDSRYSPQMQSAPKRWREELKRTGAPGAFHRWKVVLLVRTDKRSDSLIRLSDTTALE

SEQ ID NO: 59586 - protein, 193 aa, Homo sapiens
MAELNTHVNVKEKIYAVRSVVPNKSNNEIVLVLQQFDFNVDKAVQAFVDGSAIQVLKEWNMTGKKKNNKRKRSKSKQHQGNKDAKDKVERPEAGPLQPQPPQIQNGPMNGCEKDSSSTDSANEKPALIPREKKISILEEPSKALRGVTGPNIEKSVKDLQRCTVSLTRYRVMIKEEVDSSVKKIKAAFAELHN

SEQ ID NO: 59587 - protein, 131 aa, Homo sapiens
MSISSDEVNFLVYRYLQESGFSHSAFTFGIESHISQSNINGALVPPAALISIIQKGLQYVEAEVSINEDGTLFDGRPIESLSLIDAVMPDVVQTRQQAYRDKLAQQQAAAAAAAAAAASQQGSAKNGENTA

SEQ ID NO: 59588 - protein, 349 aa, Homo sapiens
MSLMVVSMACVGFFLLQGAWPHEGVHRKPSLLAHPGPLVKSEETVILQCWSDVRFQHFLLHREGKFKDTLHLIGEHHDGVSKANFSIGPMMQDLAGTYRCYGSVTHSPYQLSAPSDPLDIVITGLYEKPSLSAQPGPTVLAGESVTLSCSSRSSYDMYHLSREGEAHERRFSAGPKVNGTFQADFPLGPATHGGTYRCFGSFRDSPYEWSNSSDPLLVSVTGNPSNSWPSPTEPSSKTGNPRHLHVLIGTSVVIILFILLLFFLLHRWCSNKKNAAVMDQEPAGNRTANSEDSDEQDPQEVTYVQLDHCVFTQRKITRPSQRPKTPPTDTRVYTELPNAESRSKVVSCP

SEQ ID NO: 59589 - protein, 1034 aa, Homo sapiens
  MOD_RES (1)..(1): Any amino acid
XISLLEHEKESELKEIEQELHLAQAEIQSLRQAAEDSATEHESDIASLQEDLCRMQNELEDMERIRGDYEMEIASLRAEMEMKSSEPSGSLGLSDYSGLQEELQELRERYHFLNEEYRALQESNSSLTGQLADLESERTQRATERWLQSQTLSMTSAESQTSEMDFLEPDPEMQLLRQQLRDAEEQMHGMKNKCQELCCELEELQHHRQVSEEEQRRLQRELKCAQNEVLRFQTSHSVTQNEELKSRLCTLQKKYDTSQDEQNELLKMQLQLQTELRQLKVMKSTLVENQSEKELLCRLQKLHLQHQNVTCEKEKLLERQQQLQEELQCHEAELQHLRDTVASFKESNEKDTETHAQLQEMKQLYQASKDELERQKHMYDQLEQDLLLCQLELKELKASHPIPEDKGKCANKCDTLLSRLTELQEKYKASQKEMGQLQMEQCELLEDQRRMQEEQGQLQEELHRLTLPLPKSGLLLKSQELLTKLEDLCELQLLYQGMQEEQKKLIQNQDCVLKEQLEIHEELRRFKESHFQEVLENPDDSKLAKSSKCNRNKQSKLLMEQMQALQVMYDAGQAKQELLQQEQGRLLEERKRLQADLQLCLEEMQLLQVQSPSIKMSLESYGKSYGSMVPSNENCRKTYDTTVDDNESYYKSYTSTQTSSKSFLKSYDSSTSASEAYGKSYCTTSNSSITYKKSYGSTSSSDTCQKSFVSSCTDEEPAEPEDMERFEEMVVKVLIKLQAVQAMYQISQEEHSQLQEQMEKLLAKQKDLKEELDACEREFKECMECLEKPMAPQNDKNEIKELQTKLRELQLQYQASMDEQGRLLVVQEQLEGQLQCCQEELRQLREKRPSVVKEARGKNANKNMNKNANGVKMKKVTKPCSDTSESDLETRKSLEVVLYYKASQRKLDGLAKEEEKKEEMEEEKKQVKEEAKEQCGDELVAEPADPEEAKSTEDQEENEEDKEEEEKEEDSEEEEDDADSSLESPEENNPLRLSESKKNMFGLWKPMVFLAIAAVALYVLPNMRQQESEFCLME

SEQ ID NO: 59590 - protein, 78 aa, Homo sapiens
  MOD_RES (1)..(1): Any amino acid
XEESENEFYIKQKKARPSVKETLQKSGVRKEFPITEAVGSDKTNRHPLECLPGLIQDKEWNEKELQKLHCTNLVSGQR

SEQ ID NO: 59591 - protein, 299 aa, Homo sapiens
MAVMAPRTLVLLLSGALALTQTWAGSHSMRYFFTSVSRPGRGEPRFIAVGYVDDTQFVRFDSDAASQRMEPRAPWIEQEGPEYWDGETRKVKAHSQTHRVDLGTLRGYYNQSEAGSHTVQRMYGCDVGSDWRFLRGYHQYAYDGKDYIALKEDLRSWTAADMAAQTTKHKWEAAHVAEQLRAYLEGTCVEWLRRYLENGKETLQRTDAPKTHMTHHAVSDHEATLRCWALSFYPAEITLTWQRDGEDQTQDTELVETRPAGDGTFQKWAAVVVPSGQEQRYTCHVQHEGLPKPLTLRWV

SEQ ID NO: 59592 - protein, 39 aa, Homo sapiens
SSAPSSLGTGYFPSCTTALKKLAGHGEVWKPLFCYTMAK

SEQ ID NO: 59593 - protein, 101 aa, Homo sapiens
MAPEMDQFYRSTMAIYKSIMEQFNPALENLVYLGNNYLRAFHALSEAAEVYFSAIQKIGERALQSPTSQILGADIPWRPAAAHGEEHQAGHAVHQRQPPAL

SEQ ID NO: 59594 - protein, 380 aa, Homo sapiens
MAERQEEQRGSPPLRAEGKADAEVKLILYHWTHSFSSQKVRLVIAEKALKCEEHDVSLPLSEHNEPWFMRLNSTGEVPVLIHGENIICEATQIIDYLEQTFLDERTPRLMPDKESMYYPRVQHYRELLDSLPMDAYTHGCILHPELTVDSMIPAYATTRIRSQIGNTESELKKLAEENPDLQEAYIAKQKRLKSKLLDHDNVKYLKKILDELEKVLDQVETELQRRNEETPGRETASNLKCNKDQHVGICRLAEEGQQPWLCGESFTLADVSLAVTLHRLKFLGFARRNWGNGKRPNLETYYERVLKRKTFNKVLGHVNNILISAVLPTAFRVAKKRAPKVLGTTLVVGLLAGVGYFAFMLFRKRLGSMILAFRPRPNYF

SEQ ID NO: 59595 - protein, 178 aa, Homo sapiens
GEKGPRGKPGDMGPPGPQGPPGKDGPPGVKGENGHPGSPGEKGEKGETGQAGSPGEKGEAGEKGNPGAEGLQGVPGPKGEAGLDGAKGEKGFQGEKGDRGPLGLPGASGLDGRPGPPGTPGPIGVPGPAGPKGERGSKGDPGMTGPTGAAGLPGLHGPPGDKGNRGEDGLPVQGCWNK

SEQ ID NO: 59596 - protein, 129 aa, Homo sapiens
SRRAETLVCCCFDLLKKLRAKLQSLKAEREEARHREEMALRGKDAVGLHAKQEELVQQTVSLTSTLQQDWRSMQLDYTTWTALLSRSRQLTEKLTVKSQQALQERDVAIEEKQEISGLSCRFWPTWTAS

SEQ ID NO: 59597 - protein, 143 aa, Homo sapiens
MGSESTYSECETFTDEDTSTLVHPELQPEGDADSAGGSAVPSECLDAMEEPDHGALLLLPGRPHPHGQSVITVIGGEEHFEDYGEGSEAELSPETLCNGQLGCSDPAFLTPSPTKRLSSKKVARYLHQSGALTMEALEDPSPE

SEQ ID NO: 59598 - protein, 321 aa, Homo sapiens
MSLDILGLMKKEQDSNVTEFVLLGLSSSWELQLFLFLLFLFFYIAIVLGNLLIVVTVQAHAHLLQSPMYYFLGHLSFIDLCLSCVTVPKMLGDFLQQGKSISFSGCLAQIYFLHFLGASEMFLLTVMAYDRYVAICNPLRYLTVMNPQLCLWLVLACWCGGFIHSIMQVILVIQLPFCGPNELDNFYCDVPQVIKLACMDTYVVEVLVIANSGLLSLVCFLVLLFSYAIILITLRTHFCQGQNKVFSTCASHLTVVSLIFVPCVFIYLRPFCSFSVDKIFSLFYTVITPMLNPLIYTLRNTDMKTAMKKLRIKPCGIPLPC

SEQ ID NO: 59599 - protein, 140 aa, Homo sapiens
MNDRLGEDESLLMKLYSFLLNDSPLNPLLASFFSKVLSILISRKPEQIVDFLKKKHDFVDLIIKHIGTSAIMDLLLRLLTCIEPPQPRQDVLNWLNEEKIIQRLVEIVHPSQEEDRHSNASQSLCEIVRLSRDQMLQIQN

SEQ ID NO: 59600 - protein, 65 aa, Homo sapiens
  MOD_RES (1)..(1): Any amino acid
XGYGGGGPGYSGGSRGYGSGGSYNDFGNYNNQSSNFGPMKGGNFGGRSSGPYGGGGQYFAKPRNQ

SEQ ID NO: 59601 - protein, 259 aa, Homo sapiens
  MOD_RES (1)..(1): Any amino acid
XFSSLCLDRNLPDMMQLWSEIFNNPCFEEEEHFKVLVKMTAQELANGIPDSGHLYASIRAGRTLTPAGDLQETFSGMDQVRLMKRIAEMTDIKPILRKLPRIKKHLLNGDNMRCSVNATPQQMPQTEKAVEDFLRSIGRSKKERRPVRPHTVEKPVPSSSGGDAHVPHGSQVIRKLVMEPTFKPWQMKTHFLMPFPVNYVGECIRTVPYTDPDHARKRPVCGSGDLGLISPRASSRSLCLCCRPSHHCLPRLLSEVDVF

SEQ ID NO: 59602 - protein, 57 aa, Homo sapiens
MLNVHNLNYSSSRTLLFQRFSVIFMDVLFVYAVREKGIWKEHFSLLFSYISSISTSM

SEQ ID NO: 59603 - protein, 162 aa, Homo sapiens
QQLKEGKQLCAAPEPQLCLQTRILKPKEKILFINLCQWTRIPAPQSTTHPVPLTVGKPEDTTEISDAYTVIDVAYNPDVLHAAEKDQVKKNQLIQMAMKCIEEKFQFTLSHSYHITKFRIKGSIQRMKQNLMGIQTDSIDLREKMRRGKLMIVNGKLNCFKM

SEQ ID NO: 59604 - protein, 616 aa, Homo sapiens
MELVTFRDVAIEFSPEEWKCLDPAQQNLYRDVMLENYRNLVSLAICSPFSQDLSPVQGIEDSFHKLILKRYEKCGHENLQLRKGCKRVNECKVQKGVNNGVYQCLSTTQSKIFQCNTCVKVFSKFSNSNKHKIRHTGEKPFKCTECGRSFYMSHLTQHTGIHAGEKPYKCEKCGKAFNRSTSLSKHKRIHTGEKPYTCEECGKAFRRSTVLNEHKKIHTGEKPYKCEECGKAFTRSTTLNEHKKIHTGEKPYKCKECGKAFRWSTSLNEHKNIHTGEKPYKCKECGKAFRQSRSLNEHKNIHTGEKPYTCEKCGKAFNQSSSLIIHRSIHSEQKLYKCEECGKAFTWSSSLNKHKRIHTGEKPYTCEECGKAFYRSSHLAKHKRIHTGEKPYTCEECGKAFNQSSTLILHKRIHSGQKPYKCEECGKAFTRSTTLNEHKKIHTGEKPYKCEECGKAFIWSASLNEHKNIHTGEKPYKCKECGKAFNQSSGLIIHRSIHSEQKLYKCEECGKAFTRSTALNEHKKIHSGEKPYKCKECGKAYNLSSTLTKHKRIHTGEKPFTCEECGKAFNWSSSLTKHKIIHTGEKSYKCEECGKAFNRPSTLTVHKRIHTGKEHS

SEQ ID NO: 59605 - protein, 112 aa, Homo sapiens
  MOD_RES (1)..(1): Any amino acid
XFRHEDCANASLANLTCDQLADRRSPVIEFWENKVLRLSGGLEVPGALNWEVTLCLLACWVLVYFCVWKGVKSTGKVPLEACSGEGGSALGAGCLCQAHLWQREVTRQSLAL

SEQ ID NO: 59606 - protein, 93 aa, Homo sapiens
MPLPVQVFNLQQPASSVSGSGGAESQDRMRDSSAPSSASSSVTDLYCTPHSSRSDLVLPGTAGDFSLSASLSAWGRGAHADRRGPPGRPAECT

SEQ ID NO: 59607 - protein, 82 aa, Homo sapiens
EEALRAGVVKKMMKFLKTGGETASRYAIKILAICTNSYHEAREEVIRLDKKCLPRAVISNLEESLLHLKLCLLAGGKRCFTC

SEQ ID NO: 59608 - protein, 271 aa, Homo sapiens
MMKTLLLFVGLLLTWESGQVLGDQTVSDNELQEMSNQGSKYVNKEIQNAVNGVKQIKTLIEKTNEERKTLLSNLEEAKKKKEDALNETRESETKLKELPGVCNETMMALWEECKPCLKQTCMKFYARVCRSGSGLVGRQLEEFLNQSSPFYFWMNGDRIDSLLENDRQQTHMLDVMQDHFSRASSIIDELFQDSLMPFSPYEPLNFHAMFQPFLEMIHEAQQAMDIHFHSPAFQHPPTEFIREGDDDRTVCREIRHNSTGCLRMKDQCDKC

SEQ ID NO: 59609 - protein, 198 aa, Homo sapiens
LLHKNLQEHFSNQDLVFLLLTPSIITESCSTHRLEHSLYKPQKGLFHRVPLVVANLGMSEQLGYKTVSGSCMSTGFSRAVQTHSSKFFEEDGSLKEVHKINEMYASLQEELKLYSFSECHLHPGSRLKEQPLFGTCPHGIRQRARKLVDYRREPPQLAHELIFQFISVYFQRTNWHDKSCINEKLHVKKHFTTYKAYL

SEQ ID NO: 59610 - protein, 452 aa, Homo sapiens
MAEYDLTTRIAHFLDRHLVFPLLEFLSVKEIYNEKELLQGKLDLLSDTNMVDFAMDVYKNLYSDDIPHALREKRTTVVAQLKQLQAETEPIVKMFEDPETTRQMQSTRDGRMLFDYLADKHGFRQEYLDTLYRYAKFQYECGNYSGAAEYLYFFRVLVPATDRNALSSLWGKLASEILMQNWDAAMEDLTRLKETIDNNSVSSPLQSLQQRTWLIHWSLFVFFNHPKGRDNIIDLFLYQPQYLNAIQTMCPHILRYLTTAVITNKDVRKRRQVLKDLVKVIQQESYTYKDPITEFVECLYVNFDFDGAQKKLRECESVLVNDFFLVACLEDFIENARLFIFETFCRIHQCISINMLADKLNMTPEEAERWIVNLIRNARLDAKIDSKLGHVVMGNNAVSPYQQVIEKTKSLSFRSQMLAMNIEKKLNQNSRSEVRTTHLLFCLGFSNHVIVT

SEQ ID NO: 59611 - protein, 38 aa, Homo sapiens
MSVGVSTSAPLSPTSGTSVGMSTFSIMDYVVFVLLLVL

SEQ ID NO: 59612 - protein, 176 aa, Homo sapiens
PSQALPGDPALLPGQSVTKSDFLPKTHLHVPPPCPEPSSVSHQQFQPLHRMQQTNVALLGRETVGKKEPTGFSLNNPMYVRSPCDPDRDQRYLTTYNQGYFENIPKGLDQEGWTRGGIQPQMPGGYALSQPVSCMEATPNPMESLRHLHPHVGRTLTSADPFYQNTPHSSRCVAHS

SEQ ID NO: 59613 - protein, 484 aa, Homo sapiens
MGSPLRFDGRVVLVTGAGAGLGRAYALAFAERGALVVESTGSIIEVLSKIDSEGGVSANHTSRATSTATSGFAGAIGQKLPPFSYAYTELEAIMYALGVGASIKDPKDLKFIYEGSSDFSCLPTFGVIIGQKSMMGGGLAEIPGLSINFAKVLHGEQYLELYKPLPRAGKLKCEAVVADVLDKGSGVVIIMDVYSYSEKELICHNQFSLFLVGSGGFGGKRTSDKVKVAVAIPNRPPDAVLTDTTSLNQAALYRLSGDWNPLHIDPNFASLAGFDKPILHGLCTFGFSARRVLQQFADNDVSRFKAIKARFAKPVYPGQTLQTEMWKEGNRIHFQTKVQETGDIVISNAYVDLAPTSGTSAKTPSEGGKLQSTFVFEEIGRRLKDIGPEVVKKVNAVFEWHITKGGNIGAKWTIDLKSGSGKVYQGPAKGAADTTIILSDEDFMEVVLGKLDPQKAFFSGRLKARGNIMLSQKLQMILKDYAKL

SEQ ID NO: 59614 - protein, 44 aa, Homo sapiens
MAEDWLDCPALGPGWKRREVFRKSGATCGRSDTYYQRRQDPKQS

SEQ ID NO: 59615 - protein, 147 aa, Homo sapiens
  MOD_RES (1)..(1): Any amino acid
XNVISRAKVMVCQLEITPATSLEALTMARRSGVKTLFNPAPAIADLDPQFYTLSDVFCCNESEAEILTGLTVGSAADAGEAALVLLKRGCQVVIITLGAEGCVVLSQTEPEPKHIPTEKVKAVDTTCRPGSRPKSEAASVKKQKHYK

SEQ ID NO: 59616 - protein, 101 aa, Homo sapiens
MLTLASKLKRDDGLKGSRTAATASDSTRRVSVRDKLLVKEVAELEANLPCTCKVHFPDPNKLHCFQLTVTPDEGYYQGGKFQFETEVPDAYNMVFIERTFN

SEQ ID NO: 59617 - protein, 640 aa, Homo sapiens
MTHILLLYYLVFLLPTESCRTLYQAASKSKEKVPARPHGVCDGVCTDYSQCTQPCPPDTQGNMGFSCRQKTWHKITDTCQTLNALNIFEEDSRLVQPFEDNIKISVYTGKSETITDMLLQKCPTDLSCVIRNIQQSPWIPGNIAVIVQLLHNISTAIWTGVDEAKMQSYSTIANHILNSKSISNWTFIPDRNSSYILLHSVNSFARRLFIDKHPVDISDVFIHTMGTTISGDNIGKNFTFSMRINDTSNEVTGRVLISRDELRKVPSPSQVISIAFPTIGAILEASLLENVTVNGLVLSAILPKELKRISLIFEKISKSEERRTQCVGWHSVENRWDQQACKMIQENSQQAVCKCRPSKLFTSFSILMSPHILESLILTYITYVGLGISICSLILCLSIEVLVWSQVTKTEITYLRHVCIVNIAATLLMADVWFIVASFLSGPITHHKGCVAATFFVHFFYLSVFFWMLAKALLILYGIMIVFHTLPKSVLVASLFSVGYGCPLAIAAITVAATEPGKGYLRPEICWLNWDMTKALLAFVIPALAIVVVNLITVTLVIVKTQRAAIGNSMFQEVRAIVRISKNIAILTPLLGLTWGFGVATVIDDRSLAFHIIFSLLNAFQVSPDASDQVQSERIHEDVL

SEQ ID NO: 59618 - protein, 155 aa, Homo sapiens
MTALRLLQRMKRDWMHTGRRPSGLCGAALLVAARMHDFRRTVKEVISVVKVCESTLRKRLTEFEDTPTSQLTIDEFMKIDLEEECDPPSYTAGQRKLRMKQLEQVLSKKLEEVEGEISSYQDAIEIELENSRPKAKGGLASLAKDGSTEDTASSL

SEQ ID NO: 59619 - protein, 450 aa, Homo sapiens
MVAERTHKAAATGARGPGELGAPGTVALVAARAERGARLPSPGSCGLLTLALCSLALSLLAHFRTAELQARVLRLEAERGEQQMETAILGRVNQLLDEKWKLHSRRRREAPKTSPGCNCPPGPPGPTGRPGLPGQPGTRGFPGFPGPIGLDGKPGHPGPKGDMGLTGPPGQPGPQGQKGEKGQCGEYPHRLLPLLNSVRLAPPPVIKRRTFQGEQSQASIQGPPGPPGPPGPSGPLGHPGLPGPMGPPGLPGPPGPKGDPGIQGYHGRKGERGMPGMPGKHGAKGAPGIAVAGMKGEPGIPGTKGEKGAEGSPGLPGLLGQKGEKGDAGNSIGGGRGEPGPPGLPGPPGPKGEAGVDGQVGPPGQPGDKGERGAAGEQGPDGPKGSKGEPGKGEMVDYNGNINEALQEIRTLALMGPPGLPGQIGPPGAPGIPGQKGEIGLPGPPGHDGE

SEQ ID NO: 59620 - protein, 363 aa, Homo sapiens
MRDGFRRKSFYSSHYARERSPYKRDNTFFRESPVGRKDSPHSRSGSSVSSRSYSPERSKSYSFHQSQHRNKERPVQSLKTSRDTSPSSGSAVSSSKVLDKPSRLTEKELAEAASKWAAEKLEKSDESNLPEISEYEAGSTAPLFTDQPEEPESNTTHGIELFEDSQLTTRSKAIASKTKEIEQVYRQDCETFGMVVKMLIEKDPSLEKSIQFALRQNLHEIESAGQTWQQVPPVRNTEMDHDGTPENEGEETAQSHDASNHTIVGLGPNQVPEMKETTLQAPQPPQAPQPLQPRKKRVRRTTQLRRTTGAPDITWGMLKKTTQEAERILLRTQTPFTPENLFLAMLSVVHCNSRKDVKPENKQ

SEQ ID NO: 59621 - protein, 166 aa, Homo sapiens
MKAIKKSLTEEEYLYLDFSHQTEGCIFPLHTSVTLFLLSYCDCKIFKICLVVTKEVSRDSSLLRDDLIQDVEIQIISRQELPPIVQNCCLPAVVERSDNFCRAGLAVVLRHIIQKSYEADPLKKELLELLGFKKTCLKACAEVSQWTRLCELTIPLAIENFLRESS

SEQ ID NO: 59622 - protein, 129 aa, Homo sapiens
  MOD_RES (1)..(1): Any amino acid
XTPAAVLAPPKAEAQENGDHREVKVKVEPIPAIGHATLGTASRIIQTAQTTPVQTVTIVQQAPLGQHQLPIKTVTQNGTHVASVPTAVHGQVNNGKTCWSVAPRGCGYWEQSPFSLVVSVLTVTILAFV

SEQ ID NO: 59623 - protein, 117 aa, Homo sapiens
MPYEVNAGYDFTNMVRKKNPPLRNVASEGEGQILEPIGTESKVSGKNKEFSADQMSENTDQSDAAELNHKEEHSLHVQDPSSSSKKDLKSAVLSEKAGFNYESPSKGGNFPSFPHDE

SEQ ID NO: 59624 - protein, 1259 aa, Homo sapiens
MGGCFCIPRERSLTRGPGKETPSKDPTVSSECIASSEYKEKCFLPQNINPDLTLSFCVKSRSRRCVNGPLQEAARRRLWALENEDQEVRMLFKDLSARLVSIQSQRAQFLITFKTMEEIWKFSTYLNLGYVSMCLEHLLFDHKYWLNCILVEDTEIQVSVDDKHLETIYLGLLIQEGHFFCRALCSVTPPAEKEGECLTLCKNELISVKMAEAGSELEGVSLVTGQRGLVLVSALEPLPLPFHQWFLKNYPGSCGLSRKRDWTGSYQIGRGRCKALTGYEPGEKDELNFYQGESIEIIGFVIPGLQWFIGKSTSSGQVGFVPTRNIDPDSYSPMSRNSAFLSDEERCSLLALGSDKQTECSSFLHTLARTDITSVYRLSGFESIQNPPNDLSASQPEGFKEVRPGRAWEEHQAVGSRQSSSSEDSSLEEELLSATSDSYRLPEPDDLDDPELLMDLSTGQEEEAENFAPILAFLDHEGYADHFKSLYDFSFSFLTSSFYSFSEEDEFVAYLEASRKWAKKSHMTWAHARLCFLLGRLSIRKVKLSQARVYFEEAIHILNGAFEDLSLVATLYINLAAIYLKQRLRHKGSALLEKAGALLACLPDRESSAKHELDVVAYVLRQGIVVGSSPLEARACFLAIRLLLSLGRHEEVLPFAERLQLLSGHPPASEAVASVLSFLYDKKYLPHLAVASVQQHGIQSAQGMSLPIWQVHLVLQNTTKLLGFPSPGWGEVSALACPMLRQALAACEELADRSTQRALCLILSKVYLEHRSPDGAIHYLSQALVLGQLLGEQESFESSLCLAWAYLLASQAKKALDVLEPLLCSLKETESLTQRGVIYNLLGLALQGEGRVNRAAKSYLRALNRAQEVGDVHNQAVAMANLGHLSLKSWAQHPARNYLLQAVRLYCELQASKETDMELVQVFLWLAQVLVSGHQLTHGLLCYEMALLFGLRHRHLKSQLQATKSLCHFYSSVSPNPEACITYHEHWLALAQQLRDREMEGRLLESLGQLYRNLNTARSLRRSLTCIKESLRIFIDLGETDKAAEAWLGAGRLHYLMQEDELVELCLQAAIQTALKSEEPLLALKLYEEAGDVFFNGTRHRHHAVEYYRAGAVPLARRLKAVRTELRIFNKLTELQISLEGYEKALEFATLAARLSTVTGDQRQELVAFHRLATVYYSLHMYEMAEDCYLKTLSLCPPWLQSPKEALYYAKVYYRLGRLTFCQLKFLLCCPGWSSVVQSGLPATSDSGAQVILQCQPPE

SEQ ID NO: 59625 - protein, 43 aa, Homo sapiens
MALSRVCWARSAVWGSAVTPGHFVTRRLQLGRSGLAWGAPRKP

SEQ ID NO: 59626 - protein, 815 aa, Homo sapiens
MSGLGRLFGKGKKEKGPTPEEAIQKLKETEKILIKKQEFLEQKIQQELQTAKKYGTKNKRAALQALRRKKRFEQQLAQTDGTLSTLEFQREAIENATTNAEVLRTMELAAQSMKKAYQDMDIDKVDELMTDITEQQEVAQQISDAISRPMGFGDDVDEDELLEELEELEQEELAQELLNVGDKEEEPSVKLPSVPSTHLPAGPGSTALRMTVVGNPRSWSCQWLPILILLLGTGHGPGVEGVTHYKAGDPVILYVNKVGPYHNPQETYHYYQLPVCCPEKIRHKSLSLGEVLDGDRMAESLYEIRFRENVEKRILCHMQLSSAQVEQLRQAIEELYYFEFVVDDLPIRGFVGYMEESGFLPHSHKIGLWTHLDFHLEFHGDRIIFANVSVRDVKPHSLDGLRPDEFLGLTHTYSVRWSETSVERRSDRRRGDDGGFFPRTLEIHWLSIINSMVLVFLLVGFVAVILMRVLRNDLARYNLDEETTSAGSGDDFDQGDNGWKIIHTDVFRFPPYRGLLCAVLGVGAQFLALGTGIIVMALLGMFNVHRHGAINSAAILLYALTCCISGYVSSHFYRQIGGERWVWNIILTTSLFSVPFFLTWSVVNSVHWANGSTQALPATTILLLLTVWLLVGFPLTVIGGIFGKNNASPFDAPCRTKNIAREIPPQPWYKSTVIHMTVGGFLPFSAISVELYYIFATVWGREQYTLYGILFFVFAILLSVGACISIALTYFQLSGEDYRWWWRSVLSVGSTGLFIFLYSVFYYARRSNMSGAVQTVEFFGYSLLTGYVFFLMLGTISFFSSLKFIRYIYVNLKMD

SEQ ID NO: 59627 - protein, 79 aa, Homo sapiens
MLKQPLTYRLSKEMAKNDPIELPTSRSKNVTNQKKPTPFSSRMSFRSSFASLFSFRKSGKETSKLPSLGQKGCDGHAGP

SEQ ID NO: 59628 - protein, 458 aa, Homo sapiens
MQLPRWWELGDPCAWTGQGRGTRRMSPATTGTFLLTVYSIFSKVHSDRNVYPSAGVLFVHVLEREYFKGEFPPYPKPGEISNDPITFNTNLMGYPDRPGWLRYIQRTPYSDGVLYGSPTAENVGKPTIIEITAYNRRTFETARHNLIINIMSAEDFPLPYQAEFFIKNMNVEEMLASEVLGDFLGAVKNVWQPERLNAINITSALDRGGRVPLPINDLKEGVYVMVGADVPFSSCLREVENPQNQLRCSQEMEPVITCDKKFRTQFYIDWCKISLVDKTKQVSTYQEVIRGEGILPDGGEYKPPSDSLKSRDYYTDFLITLAVPSAVALVLFLILAYIMCCRREGVIQLVHHSAIQKSTKELRDMSKNREIAWPLSTLPVFHPVTGEIIPPLHTDNYDSTNMPLMQTQQNLPHQTQIPQQQTTGDFRLTTFQRFEASIMKLFIRFQLQDVYQNFSLQF

SEQ ID NO: 59629 - protein, 162 aa, Homo sapiens
MSYNYVVTAQKPTAVNGCVTGHFTSAEDLNLLIAKNTRLEIYVVTAEGLRPVKEVGMYGKIAVMELFRPKALSSSVSSSKLFSSSTAPHETSFGEEVEVHNLLIIDQHTFEVLHAHQFLQNEYALSLVSCKLGKDPNTYFIVGTAMVYPEEAEPKQGRIVVF

SEQ ID NO: 59630 - protein, 92 aa, Homo sapiens
DAAVSALAALCSEYYMKEPGEADPAIQEELITQYLAELRNPEEMTRCGFSLALGALPGFLLKGRLQQVLTGLRAVTHTSPEDVSFAESRRDG

SEQ ID NO: 59631 - protein, 85 aa, Homo sapiens
EEVRLQYEKLHQLLDEDLRQTVEVLDKAQAKFCSENAAQALHLGERMQEAKKLLGSLQLLFDKTEDVSFMKNTKSVKILMDSKSK

SEQ ID NO: 59632 - protein, 122 aa, Homo sapiens
MLRSTLAQQGTPVYSVAWGPDSEKVLYTAGKQLIIKPLQPNAKVLQWKAHDGIILKVDWNSVNDLILSAGEDCKYKVWDSYGRPLYNSQPHEHPITSVAWAPDGELFAVGSFHTLRLCDKTG

SEQ ID NO: 59633 - protein, 640 aa, Homo sapiens
MSTRTPLPTVNERDTENHTSHGDGRQEVTSRTSRSGARCRNSIASCADEQPHIGNYRLLKTIGKGNFAKVKLARHILTGREVAIKIIDKTQLNPTSLQKLFREVRIMKILNHPNIVKLFEVIETEKTLYLIMEYASGGEVFDYLVAHGRMKEKEARSKFRQIVSAVQYCHQKRIVHRDLKAENLLLDADMNIKIADFGFSNEFTVGGKLDTFCGSPPYAAPELFQGKKYDGPEVDVWSLGVILYTLVSGSLPFDGQNLKELRERVLRGKYRIPFYMSTDCENLLKRFLVLNPIKRGTLEQIMKDRWINAGHEEDELKPFVEPELDISDQKRIAGPAIPSVVAYPKRSQTSTADSDLKEDGISSRKSSGSAVGGKGIAPASPMLGNASNPNKADIPERKKSSTVPSSNTASGGMTRRNTYVCSERTTADRHSVIQNGKENSTIPDQRTPVASTHSISSAATPDRIRFPRGTASRSTFHGQPRERRTATYNGPPASPSLSHEATPLSQTRSRGSTNLFSKLTSKLTRSRNVSAEQKDENKEAKPRSLRFTWSMKTTSSMDPGDMMREIRKVLDANNCDYEQRERFLLFCVHGDGHAENLVQWEMEVCKLPRLSLNGVRFKRISGTSIAFKNIASKIANELKL

SEQ ID NO: 59634 - protein, 161 aa, Homo sapiens
MSEKVDWLQSQNGVCKVDVYSPGDNQAQDWKMDTSTDPVRVLSWLRRDLEKSTAEFQDVRFKPGESFGGETSNSGDPHKGFSVDYYNTTTKGTPERLHFEMTHKEIPCQGPRAQLGNGSSVDEVSFYANRLTNLVIAMARKEINEKIDGSENKCVYQSLYM

SEQ ID NO: 59635 - protein, 13 aa, Homo sapiens
MAPTRAQALSRAP

SEQ ID NO: 59636 - protein, 1499 aa, Homo sapiens
MEAATTLHPGPRPALPLGGPGPLGEFLPPPECPVFEPSWEEFADPFAFIHKIRPIAEQTGICKVRPPPDWQPPFACDVDKLHFTPRIQRLNELEAQTRVKLNFLDQIAKYWELQGSTLKIPHVERKILDLFQLNKLVAEEGGFAVVCKDRKWTKIATKMGFAPGKAVGSHIRGHYERILNPYNLFLSGDSLRAMNIKIEPEETTEARTHNLRRRMGCPTPKCENEKEMKSSIKQEPIERKDYIVENEKEKPKSRSKKATNAVDLYVCLLCGSGNDEDRLLLCDGCDDSYHTFCLIPPLHDVPKGDWRCPKCLAQECSKPQEAFGFEQAARDYTLRTFGEMADAFKSDYFNMPVHMVPTELVEKEFWRLVSTIEEDVTVEYGADIASKEFGSGFPVRDGKIKLSPEEEEYLDSGWNLNNMPVMEQSVLAHITADICGMKLPWLYVGMCFSSFCWHIEDHWSYSINYLHWGEPKTWYGVPGYAAEQLENVMKKLAPELFVSQPDLLHQLVTIMNPNTLMTHEVPVYRTNQCAGEFVITFPRAYHSGFNQGFNFAEAVNFCTVDWLPLGRQCVEHYRLLHRYCVFSHDEMICKMASKADVLDVVVASTVQKDMAIMIEDEKALRETVRKLGVIDSERMDFELLPDDERQCVKCKTTCFMSAISCSCKPGLLVCLHHVKELCSCPPYKYKLRYRYTLDDLYPMMNALKLRAESYNEWALNVNEALEAKINKKKSLVSFKALIEESEMKKFPDNDLLRHLRLVTQDAEKCASVAQQLLNGKRQTRYRSGGGKSQNQLTVNELRQFVTQLYALPCVLSQTPLLKDLLNRVEDFQQHSQKLLSEETPSAAELQDLLDVSFEFDVELPQLAEMRIRLEQARWLEEVQQACLDPSSLTLDDMRRLIDLGVGLAPYSAVEKAMARLQELLTVSEHWDDKAKSLLKARPRHSLNSLATAVKEIEEIPAYLPNGAALKDSVQRARDWLQDVEGLQAGGRVPVLDTLIELVTRGRSIPVHLNSLPRLETLVAEVQAWKECAVNTFLTENSPYSLLEVLCPRCDIGLLGLKRKQRKLKEPLPNGKKKSTKLESLSDLERALTESKETASAMATLGEARLREMEALQSLRLANEGKLLSPLQDVDIKICLCQKAPAAPMIQCELCRDAFHTSCVAVPSISQGLRIWLCPHCRRSEKPPLEKILPLLASLQRIRVRLPEGDALRYMIERTVNWQHRAQQLLSSGNLKFVQDRVGSGLLYSRWQASAGQVSDTNKVSQPPGTTSFSLPDDWDNRTSYLHSPFSTGRSCIPLHGVSPEVNELLMEAQLLQVSLPEIQELYQTLLAKPSPAQQTDRSSPVRPSSEKNDCCRGKRDGINSLERKLKRRLEREGLSSERWERVKKMRTPKKKKIKLSHPKDMNNFKLERERSYELVRSAETHSLPSDTSYSEQEDSEDEDAICPAVSCLQPEGDEVDWVQCDGSCNQWFHQVCVGVSPEMAEKEDYICVRCTVKDAPSRK

SEQ ID NO: 59637 - protein, 87 aa, Homo sapiens
MNVHRGSDSDRLLRQEASCLVDDTLAVAQEKEANSLASSGPHNLTYPLGPRNEDLSLDYASQPANLQFPHIMPLAEDIKGSCFQSGN

SEQ ID NO: 59638 - protein, 83 aa, Homo sapiens
MTMTANKNSSITHGAGGTKAPRGTLSRSQSVSPPPVLSPPRSPIYPLSDSETSACRYPSHSSSRVLLKDRHPPAPSPQNPQDP

SEQ ID NO: 59639 - protein, 70 aa, Homo sapiens
MGHCHPGVVKAALKQMELLNTNSRFLHDNIVEYAKRLSATLPEKLSVCYFTNSGSEANDLALRLARQFRG

SEQ ID NO: 59640 - protein, 54 aa, Homo sapiens
MATDWLGSIVSINCGDSLGVYQGRVSAVDQVSQTISLTRPFHNGVKCLVPEVTF

SEQ ID NO: 59641 - protein, 44 aa, Homo sapiens
  MOD_RES (1)..(1): Any amino acid
XSYIPPCKRENQKNLESVMNWQQYWKDEIGSQPFTCYFNQHQRS

SEQ ID NO: 59642 - protein, 155 aa, Homo sapiens
MSVTYDDSVGVEVSSDSFWEVGNYKRTVKRIDDGHRLCSDLMNCLHERARIEKAYAQQLTEWARRWRQLVEKGPQYGTVEKAWMAFMSEAERVSELHLEVKASLMNDDFEKIKNWQKEAFHKQMMGGFKETKEAEDGFRKAQKPWAKKLKEVHLS

SEQ ID NO: 59643 - protein, 202 aa, Homo sapiens
MGLLVFVRNLLLALCLFLVLGFLYYSAWKLHLLQWEEDSKYDRLGFLLNLDSKLPAELATKYANFSEGACKPGYASALMTAIFPRFSKPAPMFLDDSFRKWARIREFVPPFGIKGQDNLIKAILSVTKEYRLTPALDSLVLDKGVGSRAKGAGKETWWAALCTEVSASLPSASAAAAASSWAMEAFLPTSLWGHELTTMTLW

SEQ ID NO: 59644 - protein, 286 aa, Homo sapiens
ARELMAVLLTPRFRRLVSQNELPGPGLNGPSSRNRRDGFCRKRRTGCSGPFQATQLWDGIIHSLQAQVEIKRRRHHLQTYKDCFTGSDAVDVVLSHLMQNTCLSSNDISCLKGVHLCQVLMNHKVFEPVGMKKLFKKEKELEFEDSNISLYRFLGNKSSYDCCKRQKDAENEFNETLRPGYEMISNPLAQEIGEERIEELIHTINGNPALCPNITVQKPFLRLSKEDVWKEQTLLCLLQLIHLPFLDNILEPPVKTQNLQLNKEEDLVITNTCLDRELIPSLCLPE

SEQ ID NO: 59645 - protein, 163 aa, Homo sapiens
LLCDPIPLDTEVTALSEDEYFSAGVVKGHRKESGELYYSIEKEGQRKWYKRMAVILSLEQGNRLREQYGLGPYEAVTPLTKAADISLDNLVEGKRKRRSNVSSPATPTASSSSSTTPTRKITESPRASMGVLSGKRKLITSEEERSPAKRGRKSATVKPGRHA

SEQ ID NO: 59646 - protein, 38 aa, Homo sapiens
MSNYSVSLVGPAPWGFRLQGGKDFNMPLTISSLTFWWR

SEQ ID NO: 59647 - protein, 94 aa, Homo sapiens
  MOD_RES (1)..(1): Any amino acid
XNDASLRMHNLSILVRQIKFYYQETLQQLIMMSLPNVLIIGKNPFSEQGTEEVKKLLLLLLGCAVQCQKKEEFIERIQGLDFDTKAAVAAHIQE

SEQ ID NO: 59648 - protein, 486 aa, Homo sapiens
MVAEAGSMPAASSVKKPFGLRSKMGKWCRHCFPWCRGSGKSNVGTSGDHDDSAMKTLRSKMGKWCRHCFPWCRGSGKSNVGTSGDHDDSAMKTLRSKMGKWCCHCFPCCRGSGKSKVGPWGDYDDSAFMEPRYHVRREDLDKLHRAAWWGKVPRKDLIVMLKDTDMNKKDKQKRTALHLASANGNSEVVKLLLDRRCQLNILDNKKRTALTKAVQCQEDECALMLLEHGTDPNIPDEYGNTALHYAIYNEDKLMAKALLLYGADIESKNKHGLTPLLLGVHEQKQQVVKFLIKKKANLNALDRYGRTVLILAVCCGSASIVSLLLEQNIDVSSQDLSGQTAREYAVSSRHNVICQLLSDYKEKQILKVSSENSNPEQDLKLTSEEESQRLKGSENSQPEEMSQEPEINKGGDRKVEEEMKKHGSTHMGFPENLPNGATADNGDDGLIPPRKSRTPESQQFPDTENEQYHRDFSGHPNFPTTLPIKQ

SEQ ID NO: 59649 - protein, 450 aa, Homo sapiens
  MOD_RES (1)..(1): Any amino acid
XEQAVEWYKKGIEELEKGIAVIVTGQGEQCERARRLQAKMMTNLVMAKDRLQLLEKMQPVLPFSKSQTDVYNDSTNLACRNGHLQSESGAVPKRKDPLTHTSNSLPRSKTVMKTGSAGLSGHHRAPSYSGLSMVSGVKQGSGPAPTTHKGTPKTNRTNKPSTPTTATRKKKDLKNFRNVDSNLANLIMNEIVDNGTAVKFDDIAGQDLAKQALQEIVILPSLRPEAKAVAAESNATFFNISAASLTSKYVGEGEKLVRALFAVARELQPSIIFIDEVDSLLCERREGEHDASRRLKTEFLIEFDGVQSAGDDRVLVMGATNRPQELDEAVLRRFIKRVYVSLPNEETRLLLLKNLLCKQGSPLTQKELAQLARMTDGYSGSDLTALAKDAALGPIRELKPEQVKNMSASEMRNIRLSDFTESLKKIKRSVSPQTLEAYIRWNKDFGDTTV

SEQ ID NO: 59650 - protein, 399 aa, Homo sapiens
  MOD_RES (1)..(1): Any amino acid
XQHSSSLGGLSHSEEIPNTTTTQHSSTLSTQQNTLSSSTSSGRTSTSTLLHTSVESEANLHSSSSTFSTTSSTVSAPPPVVSVSSSLNSGSSLGLSLGSNSTVTASTRSSVATTSGKAPPNLPPGVPPLLPNPYIMAPGLLHAYPPQVYGYDDLQMLQTRFPLDYYSIPFPTPTTPLTGRDGSLASNPYSGDLTKFGRGDASSPAPATTLAQPQQNQTQTHHTTQQTFLNPALPPGYSYTSLPYYTGVPGLPSTFQYGPAVFPVAPTSSKQHGVNVSVNASATPFQQPSGYGSHGYNTGVSVTSSNTGVPDISGSVYSKTQQSFEKQGFHSGTPAASFNLPSALGSGGPINPATAAAYPPAPFMHILTPHQQPHSQILHHHLQQDGQDILNFVDDQLGE

SEQ ID NO: 59651 - protein, 54 aa, Homo sapiens
MASAELQGKYQKLAQEYSKLRAQNQVLKKGVVDEQANSAALKLNCEDQSVFTLI

SEQ ID NO: 59652 - protein, 164 aa, Homo sapiens
MAAASSSDSDACGAESNEANSKWLDAHYDPMANIHTFSACLALADLHGDGEYKLVVGDLGPGGQQPRLKVLKGPLVMTESPLPALPAAAATFLMEQHEPRTPALALASGPCVYVYKNLRPYFKFSLPQLPPNPLEQDLWNQAKEGDGRGAFVHPVTQVSAAGAK

SEQ ID NO: 59653 - protein, 140 aa, Homo sapiens
  MOD_RES (1)..(1): Any amino acid
XEKKKKVKPPRTLITEDGKALNVNEPKIDFSLKDNEKQIILDLAVYRYMDTSLIDVDVQPTYVRVMIKGKPFQLVLPAEVKPDSSSAKRSQTTGHLVICMPKGANQLMRKALLSLFMSLKQLQHSFPLFLYVFNLSKFFT

SEQ ID NO: 59654 - protein, 267 aa, Homo sapiens
MAGPEGFQYRALYPFRRERPEDLELLPGDVLVVSRAALQALGVAEGGERCPQSVGWMPGLNERTRQRGDFPGTYVEFLGPVALARPGPRPRGPRPLPARPRDGAPEPGLTLPDLPEQFSPPDVAPPLLVKLVEAIERTGLDSESHYRPELPAPRTDWSLSDVDQWDTAALADGIKSFLLALPAPLVTPEASAEARRALRGVSPALTSRRCWWRSCFRNTWKSRRLRPQRCRLNPPRQSRPPQSWPMEGAHPPCRMLSGTGGTFQGRR

SEQ ID NO: 59655 - protein, 214 aa, Homo sapiens
MILNKALLLGALALTTVMSPCGGEDIVADHVASCGVNLYQFYGPSGQYTHEFDGDEQFYVDLERKETAWRWPEFSKFGGFDPQGALRNMAVAKHNLNIMIKRYNSTAATNEVPEVTVFSKSPVTLGQPNTLICLVDNIFPPVVNITWLSNGQSVTEGVSETSFLSKSDHSFFKISYLTFLPSADEIYDCKVEHWGLDQPLLKHWGASPSTGAEE

SEQ ID NO: 59656 - protein, 159 aa, Homo sapiens
MDVFMKGLSKAKEGVVAAAEKTKQGVAEAAGKTKEGVLYVGSKTKEGVVHGVATVAEKTKEQVTNVGGAVVTGVTAVAQKTVEGAGSIAAATGFVKKDQLGKSSLRNECSPEPAASTDQSQNEEGAPQEGILEDMPVDPDNEAYEMPSEEGYQDYEPEA

SEQ ID NO: 59657 - protein, 48 aa, Homo sapiens
MDSTLTASEIRQRFIDFFKRNEHTYVHSSATIPLDDPTLLFANAGMNQ

SEQ ID NO: 59658 - protein, 773 aa, Homo sapiens
MGVWLNKDDYIRDLKRIILCFLIVYMAILVGTDQDFYSLLGVSKTASSREIRQAFKKLALKLHPDKNPNNPNAHGDFLKINRAYEVLKDEDLRKKYDKYGEKGLEDNQGGQYESWNYYRYDFGIYDDDPEIITLERREFDAAVNSGELWFVNFYSPGCSHCHDLAPTWRDFAKEVDGLLRIGAVNCGDDRMLCRMKGVNSYPSLFIFRSGMAPVKYHGDRSKESLVSFAMQHVRSTVTELWTGNFVNSIQTAFAAGIGWLITFCSKGGDCLTSQTRLRLSGMLDGLVNVGWMDCATQDNLCKSLDITTSTTAYFPPGATLNNKEKNSILFLNSLDAKEIYLEVIHNLPDFELLSANTLEDRLAHHRWLLFFHFGKNENSNDPELKKLKTLLKNDHIQPSLAVFKGQGTKEYEIHHGKKILYDILAFAKESVNSHVTTLGPQNFPANDKEPWLVDFFAPWCPPCRALLPELRRASNLLYGQLKFGTLDCTVHEGLCNMYNIQAYPTTVVFNQSNIHEYEGHHSAEQILEFIEDLMNPSVVSLTPTTFNELVTQRKHNEVWMVDFYSPWCHPCQVLMPEWKRMARTLTGLINVGSIDCQQYHSFCAQENVQRYPEIRFFPPKSNKAYHYHSYNGWNRDAYSLRIWGLGFLPQVSTDLTPQTFSEKVLQGKNHWVIDFYAPWCGPCQNFAPEFELLARMIKGKVKAGKVDCQAYAQTCQKAGIRAYPTVKFYFYERAKRNFQEEQINTRDAKAIAALISEKLETLRNQGKRNKDEL

SEQ ID NO: 59659 - protein, 127 aa, Homo sapiens
MTTLVLDNGAYNAKIGYSHENVSVIPNCQFRSKTARLKTFTANQIDEIKDPSGLFYILPFQKGYLVNWDVQRQVWDYLFGKEMYQVDFLDTNIIITEPYFNFTSIQESMNEILFEEYQFQAVLRVNG

SEQ ID NO: 59660 - protein, 120 aa, Homo sapiens
MKVARFQKIPNGENETMIPVLTSKKASELPVSEVASILQADLQNGLNKCEVSHRRAFHGWNEFDISEDEPLWKKYISQFKNPLIMLLLASAVISVLMHQFDDAVSITVAILIVVTVAFVQ

SEQ ID NO: 59661 - protein, 1558 aa, Homo sapiens
  MOD_RES (1)..(1): Any amino acid
XQGEMRVPEEALKHEKFTIQLQLSQKSSESELSKSASAKSIDSKVADAATEVQHKTTEALKSEEKAMDISAMPRGTPLYGQPSWWGDDEVDEKRAFKTNGKPEEKNHEAGTSGCGIDAKQVEEQSAAANEEVLFPFCREPSYFEIPTKEFQQPSQITESTIHEIPTKDTPSSHITGAGHASFTIEFDDSTPGKVTIRDHVTKFTSDQRHKSKKSSPGTQDLLGIQTGMMAPENKVADWLAQNNPPQMLWERTEEDSKSIKSDVPVYLKRLKGNKHDDGTQSDSENAGAHRRCSKRATLEEHLRRHHSEHKKLQKVQATEKHQDQAVVSQTAFMIAFFDEDNPRKRRSYSFTQSAGILCQETTYSTPHTKLEKAKSPTADAKVVSLSLQTSSAHHRGGHGVPHGKLLKQKSEEPSVSIPFLQTALLRSSGSLGHRPSQEMDKMLKNQATSATSEKDNDDDQSDKGTYTIELENPNSEEVEARKMIDKVFGVDDNQDYNRPVINEKHKDLIKDWALSSAAAVMEERKPLTTSGFHHSEEGTSSSGSKRWVSQWASLAANHTRHDQEERIMEFSAPLPLENETEISESGMTVRSTGSATSLASQGERRRRTLPQLPNEEKSLESHRAKVVTQRSEIGEKQDTELQEKETPTQVYQKDKQDADRPLSKMNRAVNGETLKTGGDNKTLLHLGSSAPGKEKSETDKETSLVKQTLAKLQQQEQREEAQWTPTKLSSKNVSGQTDKCREETFKQESQPPEKNSGHSTSKGDRVAQSESKRRKAEEILKSQTPKGGDKKESSKSLVRQGSFTIEKPSPNIPIELIPHINKQTSSTPSSLALTSASRIRERSESLDPDSSMDTTLILKDTEAVMAFLEAKLREDNKTDEGPDTPSYNRDNSISPESDVDTASTISLVTGETERKSTQKRKSFTSLYKDRCSTGSPSKDVTKSSSSGAREKMEKKTKSRSTDVGSRADGRKFVQSSGRIRQPSVDLTDDDQTSSVPHSAISDIMSSDQETYSCKPHGRTPLTSADEHVHSKLEGSKVTKSKTSPVVSGSSSKSTTLPRPRPTRTSLLRRARLGEASDSELADADKASVASEVSTTSSTSKPPTGRRNISRIDLLAQPRRTRLGSLSARSDSEATISRSSASSRTAEAIIRSGARLVPSDKFSPRIRANSISRLSDSKVKSMTSAHGSASVNSRWRRFPTDYASTSEDEFGSNRNSPKHTRLRTSPALKTTRLQSAGSAMPTSSSFKHRIKEQEDYIRDWTAHREEIARISQDLALIAREINDVAGEIDSVTSSGTAPSTTVSTAATTPGSAIDTREEVGDLHGEMHKLVDRVFDESLNFRKIPPLVHSKTPEGNNGRSGDPRPQAAEPPDHLTITRRRTWSRDEVMGDNLLLSSVFQFSKKIRQSIDKTAGKIRILFKDKDRNWDDIESKLRAESEVPIVKTSSMEISSILQELKRVEKQLQAINAMIDPDGTLEALNNMGFPSAMLPSPPKQKSSPVNNHHSPGQTPTLGQPEARALHPAAVSAAAEFENAESEADFSIHFNRFNPDGEEEDVTVQE

SEQ ID NO: 59662 - protein, 160 aa, Homo sapiens
MGKRQHQKDKIDRFSLCCPSCSPTPGLKQSSCLGLPNCWDYRYITCAEYTHFYGGKKPDLPQTNFRRLPFDHCSLSLQPFVYPVCTPDGIVFDLLNIVPWLKKYGTNPSNGEKLDGRSLIKLNFSKNSEGKYHCPVLFTVFTNNTHIVAVRTTGNVYAYE

SEQ ID NO: 59663 - protein, 267 aa, Homo sapiens
MDPLTKVPCGSQIAQTILWKAKSSLSFGIQPLQTWPTKDPELESQVNLSVSEDLGCRRGDFSRKHYGSVELLISSDADGAIQRAGRFRVENGSSDENATALPGTWRRTDVHLENPEYHTRWYFKYFLGQVHQNYIGNDAEKSPFFLSVTLSDQNNQRVPQYRAILWRKTGTQKICLPYSPTKTLSVKSILSAMNLDKFEKGPREIFHPEIQKDLLVLEEQEGSVNFKFGVLFAKDGQLTDDEMFSNEIGSEPFQKFLNLLGDTITLK

SEQ ID NO: 59664 - protein, 154 aa, Homo sapiens
MFSSVAHLARANPFNTPHLQLVHDGLGDLRSSSPGPTGQPRRPRNLAAAAVEEQYSCDYGSGRFFILCGLGGIISCGTTHTALVPLDLVKCRMQVDPQKYKGIFNGFSVTLKEDGVRGLAKGWAPTFLGYSMQGLCKFGFYEVFKVLYSNMLGE

SEQ ID NO: 59665 - protein, 1651 aa, Homo sapiens
MAPTLFQKLFSKRTGLGAPGRDARDPDCGFSWPLPEFDPSQIRLIVYQDCERRGRNVLFDSSVKRRNEDISVSDLNTIYSYLHGMEILSNLREHQLRLMSARARYERYSGNQVLFCSETIARCWYILLSGSVLVKGSMVLPPCSFGKQFGGKRGCDCLVLEPSEMIVVENAKDNEDSILQREIPARQSRRRFRKINYKGERQTITDDVEVNSYLSLPADLTKMHLTENPHPQVTHVSSSQSGCSIASDSGSSSLSDIYQATESEVGDVDLTRLPEGPVDSEDDEEEDEEIDRTDPLQGRDLVRECLEKEPADKTDDDIEQLLEFMHQLPAFANMTMSVRRELCSVMIFEVVEQAGAIILEDGQELDSWYVILNGTVEISHPDGKVENLFMGNSFGITPTLDKQYMHGIVRTKVDDCQFVCIAQQDYWRILNHVEKNTHKVEEEGEIVMVHEHRELDRSGTRKGHIVIKATPERLIMHLIEEHSIVDPTYIEDFLLTYRTFLESPLDVGIKLLEWFKIDSLRDKVTRIVLLWVNNHFNDFEGDPAMTRFLEEFEKNLEDTKMNGHLRLLNIACAAKAKWRQVVLQKASRESPLQFSLNGGSEKGFGIFVEGVEPGSKAADSGLKRGDQIMEVNGQNFENITFMKAVEILRNNTHLALTVKTNIFVFKELLFRTEQEKSGVPHIPKIAEKKSNRHSIQHVPGDIEQTSQEKGSKKVKANTVSGGRNKIRKILDKTRFSILPPKLFSDGGLSQSQDDSIVGTRHCRHSLAIMPIPGTLSSSSPDLLQPTTSMLDFSNPSDIPDQVIRVFKVDQQSCYIIISKDTTAKEVVFHAVHEFGLTGASDTYSLCEVSVTPEGVIKQRRLPDQFSKLADRIQLNGRYYLKNNMETETLCSDEDAQELVKESQLSMLQLSTIEVATQLSMRDFDLFRNIEPTEYIDDLFKLNSKTGNTHLKRFEDIVNQETFWVASEILTEANQLKRMKIIKHFIKIALHCRECKNFNSMFAIISGLNLASVARLRGTWEKLPSKYEKHLQDLQDIFDPSRNMAKYRNILSSQSMQPPIIPLFPVVKKDMTFLHEGNDSKVDGLVNFEKLRMISKEIRQVVRMTSANMDPAMMFRQRSLSQGSTNSNMLDVQGGAHKKRARRSSLLNAKKLYEDAQMARKVKQYLSSLDVETDEEKFQMMSLQWEPAYGTLTKNLSEKRSAKSSEMSPVPMRSAGQTTKAHLHQPHRVSQVLQVPAVNLHPIRKKGQTKDPALNTSLPQKVLGTTEEISGKKHTEDTISVASSLHSSPPASPQGSPHKGYTLIPSAKSDNLSDSSHSEISSRSSIVSNCSVDSMSAALQDERCSSQALAVPESTGALEKTEHASGIGDHSQHGPGWTLLKPSLIKCLAVSSSVSNEEISQEHIIIEAADSGRGSWTSCSSSSHDNFQSLPNPKSWDFLNSYRHTHLDDPIAEVEPTDSEPYSCSKSCSRTCGQCKGSLERKSWTSSSSLSDTYEPNYGTVKQRVLESTPAESSEGLDPKDATDPVYKTVTSSTEKGLIVYCVTSPKKDDRYREPPPTPPGYLGISLADLKEGPHTHLKPPDYSVAVQRSKMMHNSLSRLPPASLSSNLVACVPSKIVTQPQRHNLQPFHPKLGDVTDADSEADENEQVSAV

SEQ ID NO: 59666 - protein, 110 aa, Homo sapiens
MFFTISRKNMSQKLSLLLLVFGLIWGLMLLHYTFQQPRHQSSVKLREQILDLSKRYVKALAEENKNTVDVENGASMAGYADLKRTIAVLLDDILQRLVKLENKVDYIVVN

SEQ ID NO: 59667 - protein, 55 aa, Homo sapiens
MMESVGVYGFCGCKAKNKMKCDSRWEIAASGPAWTCDLCSHTRPCTWFNAPLSPS

SEQ ID NO: 59668 - protein, 28 aa, Homo sapiens
  MOD_RES (1)..(1): Any amino acid
XKHEEKQQEGGIVSKNFTKKIQELNPHT

SEQ ID NO: 59669 - protein, 48 aa, Homo sapiens
MEAQSHSSTTTEKKKVENSIVKCSTRTDVSEKAVASSTTSNESSTVFI

SEQ ID NO: 59670 - protein, 2068 aa, Homo sapiens
MSNRPNNNPGGSLRRSQRNTAGAQPQDDSIGGRSHLGQAKHKGYSPPESRKSNSKAPKVQSNTTSELSRGHLSKRSCSSSSAVIVPQPEDPDRANTSERQKTGQVPKKDNSRGVKRSASPDYNRTNSPSSAKKPKALQHTESPSETNKPHSKSKKRHLDQEQQLKSAQSPSTSKAHTRKSGATGGSRSQKRKRTESSCVKSGSGSESTGAEERSAKPTKLASKSATSAKAGCSTITDSSSAASTSSSSSAVASASSTVPPGARVKQGKDQNKARRSRSASSPSPRRSSREKEQSKTGGSSKFDWAARFSPKVSLPKTKLSLPGSSKSETSKPGPSGLQAKLASLRKSTKKRSESPPAELPSLRRSTRQKTTGSCASTSRRGSGLGKRGAAEARRQEKMADPESNQEAVNSSAARTDEAPQGAAASSSVAGAVGMTTSGESESDDSEMGRLQALLEARGLPPHLFGPLGPRMSQLFHRTIGSGASSKAQQLLQGLQASDESQQLQAVIEMCQLLVMGNEETLGGFPVKSVVPALITLLQMEHNFDIMNHACRALTYMMEALPRSSAVVVDAIPVFLEKLQVIQCIDVAEQALTALEMLSRRHSKAILQAGGLADCLLYLEFFSINAQRNALAIAANCCQSITPDEFHFVADSLPLLTQRLTHQDKKSVESTCLCFARLVDNFQHEENLLQQVASKDLLTNVQQLLVVTPPILSSGMFIMVVRMFSLMCSNCPTLAVQLMKQNIAETLHFLLCGASNGSCQEQIDLVPRSPQELYELTSLICELMPCLPKEGIFAVDTMLKKGNAQNTDGAIWQWRDDRGLWHPYNRIDSRIIEVAAHQVGEDEISLSTLGRVYTIDFNSMQQINEDTGTARAIQRKPNPLANSNTSGYSESKKDDARAQLMKEDPELAKSFIKTLFGVLYEVYSSSAGPAVRHKCLRAILRIIYFADAELLKDVLKNHAVSSHIASMLSSQDLKIVVGALQMAEILMQKLPDIFSVYFRREGVMHQVKHLAESESLLTSPPKACTNGSGSMGSTTSVSSGTATAATHAAADLGSPSLQHSRDDSLDLSPQGRLSDVLKRKRLPKRGPRRPKYSPPRDDDKVDNQAKSPTTTQSPKSSFLASLNPKTWGRLSTQSNSNNIEPARTAGGSGLARAASKDTISNNREKIKGWIKEQAHKFVERYFSSENMDGSNPALNVLQRLCAATEQLNLQVDGGAECLVEIRSIVSESDVSSFEIQHSGFVKQLLLYLTSKSEKDAVSREIRLKRFLHVFFSSPLPGEEPIGRVEPVGNAPLLALVHKMNNCLSQMEQFPVKVHDFPSGNGTGGSFSLNRGSQALKFFNTHQLKCQLQRHPDCANVKQWKGGPVKIDPLALVQAIERYLVVRGYGRVREDDEDSDDDGSDEEIDESLAAQFLNSGNVRHRLQFYIGEHLLPYNMTVYQAVRQFSIQAEDERESTDDESNPLGRAGIWTKTHTIWYKPVREDEESNKDCVGGKRGRAQTAPTKTSPRNAKKHDELWHDGVCPSVSNPLEVYLIPTPPENITFEDPSLDVILLLRVLHAISRYWYYLYDNAMCKEIIPTSEFINSKLTAKANRQLQDPLVIMTGNIPTWLTELGKTCPFFFPFDTRQMLFYVTAFDRDRAMQRLLDTNPEINQSDSQDSRVAPRLDRKKRTVNREELLKQAESVMQDLGSSRAMLEIQYENEVGTGLGPTLEFYALVSQELQRADLGLWRGEEVTLSNPKGSQEGTKYIQNLQGLFALPFGRTAKPAHIAKVKMKFRFLGKLMAKAIMDFRLVDLPLGLPFYKWMLRQETSLTSHDLFDIDPVVARSVYHLEDIVRQKKRLEQDKSQTKESLQYALETLTMNGCSVEDLGLDFTLPGFPNIELKKGGKDIPVTIHNLEEYLRLVIFWALNEGVSRQFDSFRDGFESVFPLSHLQYFYPEELDQLLCGSKADTWDAKTLMECCRPDHGYTHDSRAVKFLFEILSSFDNEQQRLFLQFVTGSPRLPVGGFRSLNPPLTIVRKTFESTENPDDFLPSVMTCVNYLKLPDYSSIEIMREKLLIAAREGQQSFHLS

SEQ ID NO: 59671 - protein, 10 aa, Homo sapiens
MHQESCSFPT

SEQ ID NO: 59672 - protein, 159 aa, Homo sapiens
MARGERRRRAVPAEGVRTAERAARGGPGRRDGRGGGPRSTAGGVALAVVVLSLALGMSGRWVLAWYRARRAVTLHSAPPVLPADSSSPAVAPDLFWGTYRPHVYFGMKTRSPKPLLTGLRYFCPPFGLPVLLCGDRWQGSPTTRGWGQGAVEVYQWAHQ

SEQ ID NO: 59673 - protein, 91 aa, Homo sapiens
MTELPAPLSYFQNAQMSEDNHLSNTNDNRERQEHNDRRSLGHPEPLSNGRPQGNSRQVVEQDEEEDEELTLKYGAKHVIMLFVPVTLCMVV

SEQ ID NO: 59674 - protein, 278 aa, Homo sapiens
MGETLGDSPIDPESDSFTDTLSANISQEMTMVDTEMPFWPTNFGISSVDLSVMEDHSHSFDIKPFTTVDFSSISTPHYEDIPFTRTDPVVADYKYDLKLQEYQSAIKVEPASPPYYSEKTQLYNKPHEEPSNSLMAIECRVCGDKASGFHYGVHACEGCKGFFRRTIRLKLIYDRCDLNCRIHKKSRNKCQYCRFQKCLAVGMSHNAIRFGRMPQAEKEKLLAEISSDIDQLNPESADLRALAKHLYDSYIKSFPLTKAKARAILTGKTTDKSTAQVC

SEQ ID NO: 59675 - protein, 118 aa, Homo sapiens
MSCNPSFGGIGKGHLMREVDALDGLCSRICDQSGVHYKVLNRRKGPAVWGLRAQIDRKLYKQNMQKEILNTPLLTVQEGAVEDLILTEPEPEHTGKCRVSGVVLARRSAAMLLDSHQP

SEQ ID NO: 59676 - protein, 142 aa, Homo sapiens
MAELEHLGGKRAESARMRRAEQLRRWRGSLTEQEPAERRGAGRQPLTRRGSPRVRFEDGAVFLAACSSGDTDEVRKLLARGADINTVNVDGLTALHQACIDENLDMVKFLVENRANVNQQDNEGWTPLHAAASCGYLNIAES

SEQ ID NO: 59677 - protein, 555 aa, Homo sapiens
MNVMLENYKNLVFLAGIAVSKQDPITSLEQEKEPWNMKICEMVDESPAMCSSFTRDLWPEQDIKDSFQQVILRRHGKCEHENLQLRKGSANVVECKVYKKGYNELNQCLTTTQSKIFPCDKYIKVFHKIFNSNRHKTRHTGEKPFKCKKCDESFCMLLHLHQHKRIHIRENSYQCEECDKVFKRFSTLTRHKRVHTGEKPFKCEECGKAFKHSSTLTTHKMIHTGEKPYRCEECGKAFYHSSHLTTHKVIHTGEKPFKCEECGKAFNHPSALTTHKFIHVKEKPYKCEECDKAFNRFSYLTKHKIIHSGEKSYKCEQCGKGFNWSSTLTKHKRIHTGEKPYKCEECGKAFNVSSHLTTHKMIHTGEKPYKCEECGKAFNHSSKLTIHKIIHTGEKPYKCEECGKAFNQSSNLTKHKIIHTGEKLYKCEECGKAFNRSSNLTTHKRIHTGEKPYKCEECGKAFNRSSNLTKHNIIHTGEKSYKCEECGKAFNQSSTLTKHRKIQQGMVAHACNPNTLRGLGEQIARSGVQDQPGQHGKTPSLLKIQKFAGCGGRRL

SEQ ID NO: 59678 - protein, 387 aa, Homo sapiens
MTCLISYWVTLRKPSPVYSFGFERLEVLAVFASTVLAQLGALFILKESAERFLEQPEIHTGRLLVGTFVALCFNLFTMLSIRNKPFAYVSEAASTSWLQEHVADLSRSLCGIIPGLSSIFLPRMNPFVLIDLAGAFALCITYMLIEINNYFAVDTASAIAIALMTFGTMYPMSVYSGKVLLQTTPPHVIGQLDKLIREVSTLDGVLEVRNEHFWTLGFGSLAGSVHVRIRRDANEQMVLAHVTNRLYTLVSTLTVQIFKDDWIRPALLSGPVAANVLNFSDHHVIPMPLLKGTDDLNPVTSTPAKPSSPPPEFSFNTPGKNVNPVILLNTQTRPYGFGLNHGHTPYSSMLNQGLGVPGIGATQGLRTGFTNIPSRYGTNNRIGQPRP

SEQ ID NO: 59679 - protein, 184 aa, Homo sapiens
METQADLVSQEPQALLDSALPSKVPAFSDKDSLGDEMLAAALLKAKSQELVTFEDVAVYFIRKEWKRLEPAQRDLYRDVMLENYGNVFSLDRETRTENDQEISEDTRSHGVLLGRFQKDISQGLKFKEAYEREVSLKRPLGNSPGERLNRKMPDFGQVTVEEKLTPRGERSEKYNDFGNSFTVN

SEQ ID NO: 59680 - protein, 29 aa, Homo sapiens
PPQMRRLVHLQTLVLNGNPLLHAQLRSQR

SEQ ID NO: 59681 - protein, 46 aa, Homo sapiens
MNRFRVSKFRHTEARPPRREPEQVEPQRIAEPGAGRPFGPPKRQED

SEQ ID NO: 59682 - protein, 38 aa, Homo sapiens
MADKVRRQRPRRRVCWALVAVLLADLLALSGNLGGKHR

SEQ ID NO: 59683 - protein, 205 aa, Homo sapiens
MPFYSASLIETVQSEIIRDNTGILECVKEGIGRVIGMGVPHSKRLLPLLSLIFPTVLHGVLHYIISSVIQKFVLLILKRKTYNSHLAESTSPVQSMLDAYFPELIANFAASLCSDVILYPLETVLHRLHIQGTRTIIDNTDLGYEVLPINTQYEGMRDCINTIRQEEGVFGFYKGFGAVIIQYTLHAAVLQITKIIYSTLLQNNI

SEQ ID NO: 59684 - protein, 47 aa, Homo sapiens
MASTVVAVGLTIAAAGFAGRYVLQAMKHMEPQVKQVFQSLPKSPYCQ

SEQ ID NO: 59685 - protein, 251 aa, Homo sapiens
MFLLLTALQVLAIAMTQSQEDENKIIGGHTCTRSSQPWQAALLAGPRRRFLCGGALLSGQWVITAAHCGRPILQVALGKHNLRRWEATQQVLRVVRQVTHPNYNSRTHDNDLMLLQLQQPARIGRAVRPIEVTQACASPGTSCRVSGWGTISSPIARYPASLQCVNINISPDEVCQKAYPRTITPGMVCAGVPQGGKDSCQGDSGGPLVCRGQLQGLVSWGMERCALPGYPGVYTNLCKYRSWIEETMRDK

SEQ ID NO: 59686 - protein, 135 aa, Homo sapiens
MRPADPLIKAIKDGDEEALKTMIKEGKNLAEPNKEGWLPLHEAAYYGQVGCLKVLQRACERKNAEAVKILVQHNADTNHRCNRGWTALHESVSRNDLEVMQILVSGGAKVESKNAYGITPLFVAAQSGQLEALRF

SEQ ID NO: 59687 - protein, 192 aa, Homo sapiens
MEKDLLELQTLIDVHFEQRKKEEEELVALKERIERRRSERAEQQRFRTEKERERQAKLAEEKMRKEEEEAKKRAEDDAKKKKVLSNMGAHFGGYLVKAEQKRGKRQTGREMKVRILSERKKPLDIDYMGEEQLREKAQELSDWIHQLESEKFDLMAKLKQQKYEINVLYNRISHAQKFRKGAGKGRVGGRWK

SEQ ID NO: 59688 - protein, 386 aa, Homo sapiens
MGRGARVPSEAPGAGVERRWLGAALVALCLLPALVLLARLGAPAVPAWSAAQGDVAALGLSAVPPTRVPGPLAPRRRRYTLTPARLRWDHFNLTYRILSFPRNLLSPRETRRALAAAFRMWSDVSPFSFREVAPEQPSDLRIGGRPPPPRPGPARPASQPRAPPRLLPDQPHGLPGLRAAPLLRRPHGGAGPRLLPPARRHPLRRQRVLGPGPHALQLEERRVAHGPGARGGPRDRPRAGPDALTTRPGAHAPERHAARLEGVVPGRAVGAAPALRMPRQAVRVRVLGAEGLLRRSPAAHEEALPQQLRLLLRIPLPHGGHHPTAPQDQNQAGARGQERDLPLRPEDPPQERESVLVQGPGAPGVLLPRLPGPGRGAPEHHRQRRQ

SEQ ID NO: 59689 - protein, 164 aa, Homo sapiens
MGLQQEISLTERLSAEQIKEYKGVFEMFDEEGNGEVKTGELEWLMSLLGINPTKSELASMAKDVDRDNKGFFNCDGFLALMGVYHEKAQNQESELRAAFRVFDKEGKGYIDWNTLKYVLMNAGEPLNEVEAEQMMKEADKDGDRTIDYEEFVAMMTGESFKLIQ

SEQ ID NO: 59690 - protein, 75 aa, Homo sapiens
MSWRGRRYRPRRCLRLAQLVGPMLEPSVPEPQQEEPPTESQDHTPGQKREDDQGAAEIQGTSILAQDKTQFSETG

SEQ ID NO: 59691 - protein, 95 aa, Homo sapiens
MPTYQIRAPTAALPQGVVMAASPGSLHSPQQLAEEATRKRELRLMKNREAARECRRKKKEYVKCLENRVAVLENQNKTLIEELKALKDLYCHKVE

SEQ ID NO: 59692 - protein, 1431 aa, Homo sapiens
MVSSGCRMRSLWFIIVISFLPNTEGFSRAALPFGLVRRELSCEGYSIDLRCPGSDVIMIESANYGRTDDKICDADPFQMENTDCYLPDAFKIMTQRCNNRTQCIVVTGSDVFPDPCPGTYKYLEVQYECVPYIFVCPGTLKAIVDSPCIYEAEQKAGAWCKDPLQAADKIYFMPWTPYRTDTLIEYASLEDFQNSRQTTTYKLPNRVDGTGFVVYDGAVFFNKERTRNIVKFDLRTRIKSGEAIINYANYHDTSPYRWGGKTDIDLAVDENGLWVIYATEQNNGMIVISQLNPYTLRFEATWETVYDKRAASNAFMICGVLYVVRSVYQDNESETGKNSIDYIYNTRLNRGEYVDVPFPNQYQYIAAVDYNPRDNQLYVWNNNFILRYSLEFGPPDPAQVPTTAVTITSSAELFKTIISTTSTTSQKGPMSTTVAGSQEGSKGTKPPPAVSTTKIPPITNIFPLPERFCEALDSKGIKWPQTQRGMMVERPCPKGTRGTASYLCMISTGTWNPKGPDLSNCTSHWVNQLAQKIRSGENAASLANELAKHTKGPVFAGDVSSSVRLMEQLVDILDAQLQELKPSEKDSAGRSYNKLQKREKTCRAYLKAIVDTVDNLLRPEALESWKHMNSSEQAHTATMLLDTLEEGAFVLADNLLEPTRVSMPTENIVLEVAVLSTEGQIQDFKFPLGIKGAGSSIQLSANTVKQNSRNGLAKLVFIIYRSLGQFLSTENATIKLGADFIGRNSTIAVNSHVISVSINKESSRVYLTDPVLFTLPHIDPDNYFNANCSFWNYSERTMMGYWSTQGCKLVDTNKTRTTCACSHLTNFAILMAHREIAYKDGVHELLLTVITWVGIVISLVCLAICIFTFCFFRGLQSDRNTIHKNLCINLFIAEFIFLIGIDKTKYAIACPIFAGLLHFFFLAAFAWMCLEGVQLYLMLVEVFESEYSRKKYYYVAGYLFPATVVGVSAAIDYKSYGTEKACWLHVDNYFIWSFIGPVTFIILLNIIFLVITLCKMVKHSNTLKPDSSRLENINNYRVCDGYYNTDLPGSWVLGAFALLCLLGLTWSFGLLFINEETIVMAYLFTIFNAFQGVFIFIFHCALQKKVRKEYGKCFRHSYCCGGLPTESPHSSVKASTTRTSARYSSGTQSRIRRMWNDTVRKQSESSFISGDINSTSTLNQGHSLNNARDTSAMDTLPLNGNFNNSYSLHKGDYNDSVQVVDCGLSLNDTAFEKMIISELVHNNLRGSSKTHNLELTLPVKPVIGGSSSEDDAIVADASSLMHSDNPGLELHHKELEAPLIPQRTHSLLYQPQKKVKSEGTDSYVSQLTAEAEDHLQSPNRDSLYTSMPNLRDSPYPESSPDMEEDLSPSRRSENEDIYYKSMPNLGAGHQLQMCYQISRGNSDGYIIPINKEGCIPEGDVREGQMQLVTSL

SEQ ID NO: 59693 - protein, 128 aa, Homo sapiens
MMSEHDLADVVQIAVEDLSPDHPVVLENHVVTDEDEPALKRQRLEINCQDPSIKSFLYSINQTICLRLDSIEAKLQALEATCKSLEEKLDLVTNKQHSPIQVPMVAGSPLGATQTCNKVRCLPQQSGP

SEQ ID NO: 59694 - protein, 45 aa, Homo sapiens
MASVLSYESLVHAVAGAVGSVTAMTVFFPLDTARLRLQDLFKLKL

SEQ ID NO: 59695 - protein, 448 aa, Homo sapiens
MISEAGLSFNLIQTERQNHARELVQGLSLSEWDGIVTVSGDGLLHEVLNGLLDRPDWEEAVKMPVGILPCGSGNALAGAVNQHGGFEPALGLDLLLNCSLLLCRGGGHPLDLLSVTLASGSRCFSFLSVAWGFVSDVDIQSERFRALGSARFTLGTVLGLATLHTYRGRLSYLPATVEPASPTPAHSLPRAKSELTLTPDPAPPMAHSPLHRSVSDLPLPLPQPALASPGSPEPLPILSLNGGGPELAGDWGGAGDAPLSPDPLLSSPPGSPKAALHSPVSEGAPVIPPSSGLPLPTPDARVGASTCGPPDHLLPPLGTPLPPDWVTLEGDFVLMLAISPSHLGADLVAAPHARFDDGLVHLCWVRSGISRAALLRLFLAMERGSHFSLGCPQLGYAAARAFRLEPLTPRGVLTVDGEQVEYGPLQAQMHPGIGTLLTGPPGCPGREP

SEQ ID NO: 59696 - protein, 487 aa, Homo sapiens
MQWIRGGSGMLITGDSIVSAEAVWDHVTMANRELAFKAGDVIKVLDASNKDWWWGQIDDEEGWFPASFVRLWVNQEDEVEEGPSDVQNGHLDPNSDCLCLGRPLQNRDQMRANVINEIMSTERHYIKHLKDICEGYLKQCRKRRDMFSDEQLKVIFGNIEDIYRFQMGFVRDLEKQYNNDDPHLSEIGPCFLEHQDGFWIYSEYCNNHLDACMELSKLMKDSRYQHFFEACRLLQQMIDIAIDGFLLTPVQKICKYPLQLAELLKYTAQDHSDYRYVAAALAVMRNVTQQINERKRRLENIDKIAQWQASVLDWEGEDILDRSSELIYTGEMAWIYQPYGRNQQRVFFLFDHQMVLCKKDLIRRDILYYKGRIDMDKYEVVDIEDGRDDDFNVSMKNAFKLHNKETEEIHLFFAKKLEEKIRWLRAFREERKMVQEDEKIGFEISENQKRQAAMTVRKLPFPQLSEARICSPKGFASVFNGTCCGES

SEQ ID NO: 59697 - protein, 183 aa, Homo sapiens
MLHDERPYLCNFLGTIYENSSRQALMNILKKDGNDKLCWVSAREHWQPQETNESLKNYQDALLQSDLTLCPVGVNTECYRIYEACSYGSIPVVEDVMTAGNCGNTSVHHGAPLQLLKSMGAPFIFIKNWKELPAVLEKEKTIILQEKIERRKMLLQWYQHFKTELKMKFTNILESSFLMNNKS

SEQ ID NO: 59698 - protein, 373 aa, Homo sapiens
MSSKLLEPAGAHLSSGSSEPLVEPGRGRVGARVKGERGLQASGSAPGRSKMAEGERQPPPDSSEEAPPATQNFIIPKKEIHTVPDMGKWKRSQAYADYIGFILTLNEGVKGKKLTFEYRVSEAIEKLVALLNTLDRWIDETPPVDQPSRFGNKAYRTWYAKLDEEAENLVATVVPTHLAAAVPEVAVYLKESVGNSTRIDYGTGHEAAFAAFLCCLCKIGVLRVDDQIAIVFKVFNRYLEVMRKLQKTYRMEPAGSQGVWGLDDFQFLPFIWGSSQLIDHPYLEPRHFVDEKAVNENHKDYMFLECILFITEMKTGPFAEHSNQLWNISAVPSWSKVNQGLIRMYKAECLEKFPVIQHFKFGSLLPIHPVTSG

SEQ ID NO: 59699 - protein, 58 aa, Homo sapiens
MNECCLCGTSVAMRTLYRTRYGIPGSICDDYMATLCCPHCTLCQIKRDINRRRAMRTF

SEQ ID NO: 59700 - protein, 324 aa, Homo sapiens
MSSSVEQKKGPTRQRKCGFCKSNRDKECGQLLISENQKVAAHHKCMLFSSALVSSHSDNESLGGFSIEDVQKEIKRGTKLMCSLCHCPGATIGCDVKTCHRTYHYHCALHDKAQIREKPSQGIYMVYCRKHKKTAHNSEAADLEESFNEHELEPSSPKSKKKSRKGRPRKTNFKGLSEDTRSTSSHGTDEMESSSYRDRSPHRSSPSDTRPKCGFCHVGEEENEARGKLHIFNAKKAAAHYKCMLFSSGTVQLTTTSRAEFGDFDIKTVLQEIKRGKRMKCTLCSQPGATIGCEIKACVKTYHYHCGVQDKAKYIENMSRGIYK

SEQ ID NO: 59701 - protein, 64 aa, Homo sapiens
MSSHEGGKKKALKQPKKQAKEMDEEEKAFKQKQKEEQKKLEVLKAKVVGKGPLATGGIKKSGKK

SEQ ID NO: 59702 - protein, 471 aa, Homo sapiens
MCGDCVEKEYPNRGNTCLENGSFLLNFTGCAVCSKRDFMLITNKSLKEEDGEEIVTYDHLCKNCHHVIARHEYTFSIMDEFQAKVEEKIQEVFSSYKFNHLVPRLVLQREKHFHYLKRGLRQLTDAYECLDASRPWLCYWILHSLELLDEPIPQIVATDVCQFLELCQSPEGGFGGGPGQYPHLAPTYAAVNALCIIGTEEAYDIINREKLLQYLYSLKQPDGSFLMHVGGEVDVRSAYCAASVASLTNIITPDLFEGTAEWIARCQNWEGGIGGVPGMEAHGGYTFCGLAALVILKRERSLNLKSLLQWVTSRQMRFEGGFQGRCNKLVDGCYSFWQAGLLPLLHRALHAQGDPALSMSHWMFHQQALQEYILMCCQCPAGGLLDKPGKSRDFYHTCYCLSGLSIAQHFGSGAMLHDVVLGVPENALQPTHPVYNIGPDKVIQATTYFLQKPVPGFEELKDETSAEPATD

SEQ ID NO: 59703 - protein, 121 aa, Homo sapiens
MQRLQVVLGHLRGPADSGWMPQAAPCLSGAPQASAADVVVVHGRRTAICRAGRGGFKDTTPDELLSAVMTAVLKDVNLRPEQLGDICVDQHGVSYVFLFYIHTEMCCSLGPGQSWPESPSF

SEQ ID NO: 59704 - protein, 7 aa, Homo sapiens
MAIQFRS

SEQ ID NO: 59705 - protein, 119 aa, Homo sapiens
MMEEEELEFVEELEAVLQLTPEVQLAIEQVFPSQDPLDRADFNAVEYINTLFPTEQSLANIDEVVNKIRLKIRRLDDNIRTVVRGQTNVGQDGRQAGDSRFIKKFYKLAGHSGHSGSRL

SEQ ID NO: 59706 - protein, 1040 aa, Homo sapiens
MQPEEGTGWLLELLSEVQLQQYFLRLRDDLNVTRLSHFEYVKNEDLEKIGMGRPGQRRLWEAVKRRKALCKRKSWMSKVFSGKRLEAEFPPHHSQSTFRKTSPAPGGPAGEGPLQSLTCLIGEKDLRLLEKLGDGSFGVVRRGEWDAPSGKTVSVAVKCLKPDVLSQPEAMDDFIREVNAMHSLDHRNLIRLYGVVLTPPMKMVTELAPLGSLLDRLRKHQGHFLLGTLSRYAVQVAEGMGYLESKRFIHRDLAARNLLLATRDLVKIGDFGLMRALPQNDDHYVMQEHRKVPFAWCAPESLKTRTFSHASDTWMFGVTLWEMFTYGQEPWIGLNGSQILHKIDKEGERLPRPEDCPQDIYNVMVQCWAHKPEDRPTFVALRDFLLEAQPTDMRALQDFEEPDKLHIQMNDVITVIEGRAENYWWRGQNTRTLCVGPFPRNVVTSVAGLSAQDISQPLQNSFIHTGHGDSDPRHCWGFPDRIDELYLGNPMDPPDLLSVELSTSRPPQHLGGVKKPTYDPVSEDQDPLSSDFKRLGLRKPGLPRGLWLAKPSARVPGTKASRGSGAEVTLIDFGEEPVVPALRPCAPSLAQLAMDACSLLDETPPQSPTRALPRPLHPTPVVDWDARPLPPPPAYDDVAQDEDDFEICSINSTLVGAGVPAGPSQGQTNYAFVPEQARPPPPLEDNLFLPPQGGGKPPSSAQTAEIFQALQQECMRQLQAPAGSPAPSPSPGGDDKPQVPPRVPIPPRPTRPHVQLSPAPPGEEETSQWPGPASPPRVPPREPLSPQGSRTPSPLVPPGSSPLPPRLSSSPGKTMPTTQSFASDPKYATPQVIQAPGPRAGPCILPIVRDGKKVSSTHYYLLPERPSYLERYQRFLREAQSPEEPTPLPVPLLLPPPSTPAPAAPTATVRPMPQAALDPKANFSTNNSNPGARPPPPRATARLPQRGCPGDGPEAGRPADKIQMLQAMVHGVTTEECQAALQCHGWSVQRAAQYLKVEQLFGLGLRPRGECHKVLEMFDWNLEQAGCHLLGSWGPAHHKR

SEQ ID NO: 59707 - protein, 139 aa, Homo sapiens
MALHIHEACILLLVIPGLVTSAAISHEDYPADEGDQISSNDNLIFDDYRGKGCVDDSGFVYKLGERFFPGHSNCPCVCALDGPVCDQPECPKIHPKCTKVEHNGCCPECKEVKNFCEYHGKNYKILEEFKVQTALQERR

SEQ ID NO: 59708 - protein, 226 aa, Homo sapiens
MLISVESPNLTTPITSNPTDTRKITSGNSSNSPNAEVMAVQKKLDSIIDLTKEGLSNCNTESPVSPLESHSKAASNSKETTPLAQNAVQVPESFEHLPPLPEPPAPLPELVDKTRDTLPPQKPELKVKRVFRPNGIALTWNITKINPKCAPVESYHLFLCHENSNNKLIWKKIGEIKALPLPMACTLSQFLASNRYYFTVQSKDIFGRYGPFCDIKSIPGFSENLT

SEQ ID NO: 59709 - protein, 198 aa, Homo sapiens [sequence omitted]

SEQ ID NO: 59710 - protein, 572 aa, Homo sapiens
MVKEITRDIKQLDHAKRHLTTSITTLNHLHMLAGGVDSLEAMTRRRQYGEVANLLQGVMNVLEHFHKYMGIPQIRQLSERVKAAQTELGQQILADFEEAFPSQGTKRPGGPSNVLRDACLVANILDPRIKQEIIKKFIKQHLSEYLVLFQENQDVAWLDKIDRRYAWIKRQLVDYEEKYGRMFPREWCMAERIAVEFCHVTRAELAKIMRTRAKEIEVKLLLFAIQRTTNFEGFLAKRFSGCTLTDGTLKKLESPPPSTNPFLEDEPTPEMEELATEKGDLDQPKKPKAPDNPFHGIVSKCFEPHLYVYIESQDKNLGELIDRFVADFKAQGPPKPNTDEGGAVLPSCADLFVYYKKCMVQCSQLSTGEPMIALTTIFQKYLREYAWKILSGNLPKTTTSSGGLTISSLLKEKEGSEVAKFTLEELCLICNILSTAEYCLATTQQLEEKLKEKVDVSLIERINLTGEMDTFSTVISSSIQLLVQDLDAACDPALTAMSKMQWQNVEHVGDQSPYVTSVILHIKQNVPIIRDNLASTRKYFTQFCVKFANSFIPKFITHLFKCKPISMVGAEQ

SEQ ID NO: 59711 - protein, 150 aa, Homo sapiens
MKVELCSFSGYKIYPGHGRRYARTDGKVFQFLNAKCESAFLSKRNPRQINWTVLYRRKHKKGQSEEIQKKRTRRAVKFQRAITGASLADIMAKRNQKPEVRKAQREQAIRAAKEAKKAKQASKKTAMAAAKVIMGFLYFLEQYNRKIFFF

SEQ ID NO: 59712 - protein, 166 aa, Homo sapiens
AQPDDTFYFDTEFTSRTPKDSPGIPPSAGAHQLFRGFSFVATGLMEDDGKPRAPQAPLHSVVQVIDKSKRDPSEEIEILLRYGQHPNIITLKDVYDDGKHVYLVTELMRGGELLDKILRQKFFSEREASFVLHTIGKTVEYLHSQGVVHRDLKPSNILYVDESGNP

SEQ ID NO: 59713 - protein, 1077 aa, Homo sapiens
MAPRKRSHHGLGFLCCFGGSDIPEINLRDNHPLQFMEFSSPIPNAEELNIRFAELVDELDLTDKNREAMFALPPEKKWQIYCSKKKEQEDPNKLATSWPDYYIDRINSMAAMQSLYAFDEEETEMRNQVVEDLKTALRTQPMRFVTRFIELEGLTCLLNFLRSMDHATCESRIHTSLIGCIKALMNNSQGRAHVLAQPEAISTIAQSLRTENSKTKVAVLEILGAVCLVPGGHKKVLQAMLHYQVYAAERTRFQTLLNELDRSLGRYRDEVNLKTAIMSFINAVLNAGAGEDNLEFRLHLRYEFLMLGIQPVIDKLRQHENAILDKHLDFFEMVRNEDDLELARRFDMVHIDTKSASQMFELIHKKLKYTEAYPCLLSVLHHCLQMPYKRNGGYFQQWQLLDRILQQIVLQDERGVDPDLAPLENFNVKNIVNMLINENEVKQWRDQAEKFRKEHMELVSRLERKERECETKTLEKEEMMRTLNKMKDKLARESQELRQARGQVAELVAQLSELSTGPVSSPPPPGGPLTLSSSMTTNDLPPPPPPLPFACCPPPPPPPLPPGGPPTPPGAPPCLGMGLPLPQDPYPSSDVPLRKKRVPQPSHPLKSFNWVKLNEERVPGTVWNEIDDMQVFRILDLEDFEKMFSAYQRHQELITNPSQQKELGSTEDIYLASRKVKELSVIDGRRAQNCIILLSKLKLSNEEIRQAILKMDEQEDLAKDMLEQLLKFIPEKSDIDLLEEHKHEIERMARADRFLYEMSRIDHYQQRLQALFFKKKFQERLAEAKPKVEAILLASRELVRSKRLRQMLEVILAIGNFMNKGQRGGAYGFRVASLNKIADTKSSIDRNISLLHYLIMILEKHFPDILNMPSELQHLPEAAKVNLAELEKEVGNLRRGLRAVEVELEYQRRQVREPSDKFVPVMSDFITVSSFSFSELEDQLNEARDKFAKALMHFGEHDSKMQPDEFFGIFDTFLQAFSEARQDLEAMRRRKEEEERRARMEAMLKEQRERERWQRQRKVLAAGSSLEEGGEFDDLVSALRSGEVFDKDLCKLKRSRKRSGSQALEVTRERAINRLNY

SEQ ID NO: 59714 - protein, 137 aa, Homo sapiens
MAVPPGHGPFSGFPGPQEHTQVLPDVRLLPRRLPLAFRDATSAPLRKLSVDLIKTYKHINEVYYAKKKRRAQQAPPQDSSNKKEKKVLNHGYDDDNHDYIVRSGERWLERYEIDSLIGKGSFGQVWDTPHHPDPRPH

SEQ ID NO: 59715 - protein, 296 aa, Homo sapiens
  MOD_RES (1)..(1): Any amino acid
XRPLGVQQPGARLPGEGNAGLLGLGPEAAAPGKRIRKPSLLYEGFESPTMASVPALQLTPANPPPPEVSNPKKPGRVTNQLQYLHKVVMKALWKHQFAWPFRQPVDAVKLGLPDYHKIIKQPMDMGTIKRRLENNYYWAASECMQDFNTMFTNCYIYNKPTDDIVLMAQTLEKIFLQKVASMPQEEQELVVTIPKNSHKKGAKLAALQGSVTSAHQVPAVSSVSHTALYTPPPEIPTTVLNIPHPSVISSPLLKSLHSAGPPLLAVTAAPPAQPLAKKKGVKRKADTTTPTPTAIL

SEQ ID NO: 59716 - protein, 577 aa, Homo sapiens
MIHAVLQWQKRNAAPPPSNTEAPPGETRTEAGAETRSPGKAEAESDALPDDTVIESEALPSDIAAEARAKTGGTVSDQALLFGDDDAGEGPSSLIREKPVPKQNENEEENLDKEQTGNLKQELDDKSATCKAYPKRPLLGLVLTPTRELAVQVKQHIDAVARFTGIKTAILVGGMSTQKQQRMLNRRPEIVVATPGRLWELIKEKHYHLRNLRQLRCLVVDEADRMVEKGHFAELSQLLEMLNDSQYNPKRQTLVFSATLTLVHQAPARILHKKHTKKMDKTAKLDLLMQKIGMRGKPKVIDLTRNEATVETLTETKIHCETDEKDFYLYYFLMQYPGRSLVFANSISCIKRLSGLLKVLDIMPLTLHACMHQKQRLRNLEQFARLEDCVLLATDVAARGLDIPKVQHVIHYQVPRTSEIYVHRSGRTARATNEGLSLMLIGPEDVINFKKIYKTLKKDEDIPLFPVQTKYMDVVKERIRLARQIEKSEYRNFQACLHNSWIEQAAAALEIELEEDMYKGGKADQQEERRRQKQMKVLKKELRHLLSQPLFTESQKTKYPTHTHSGRDLMQICIVLE

SEQ ID NO: 59717 - protein, 15 aa, Homo sapiens
MANDIDELIGIPFPN

SEQ ID NO: 59718 - protein, 355 aa, Homo sapiens
MVAFAGWSLPVQYRDSHTDSHLHTRQHCSLFDVSHMLQTKILGSDRVKLMESLVVGDIAELRPNQGTLSLFTNEAGGILDDLIVTNTSEGHLYVVSNAGCWEKDLALMQDKVRELQNQGRDVGLEVLDNALLALQGPTAAQVLQAGVADDLRKLPFMTSAVMEVFGVSGCRVTRCGYTGEDGVEISVPVAGAVHLATAILKNPEVKLAGLAARDSLRLEAGLCLYGNDIDEHTTPVEGSLSWTLGKRRRAAMDFPGAKVIVPQLKGRVQRRRVGLMCEGAPMRAHSPILNMEGTKIGTVTSGCPSPSLKKNVAMGYVPCEYSRPGTMLLVEVRRKQQMAVVSKMPFVPTNYYTLK

SEQ ID NO: 59719 - protein, 49 aa, Homo sapiens
MAGITTIEAVKRKIQVLQQQADDAEERAERLQREVEGERRAREQRYEGY

SEQ ID NO: 59720 - protein, 51 aa, Homo sapiens
MDEEPERTKRWEGGYERTWEILKEDESGSLKATIEDILFKAKRKRCATFMW

SEQ ID NO: 59721 - protein, 1068 aa, Homo sapiens
MPPGVDCPMEFWTKEENQSVVVDFLLPTGVYLNFPVSRNANLSTIKQLLWHRAQYEPLFHMLSGPEAYVFTCINQTAEQQELEDEQRRLCDVQPFLPVLRLVAREGDRVKKLINSQISLLIGKGLHEFDSLCDPEVNDFRAKMCQFCEEAAARRQQLGWEAWLQYSFPLQLEPSAQTWGPGTLRLPNRALLVNVKFEGSEESFTFQVSTKDVPLALMACALRKKATVFRQPLVEQPEDYTLQVNGRHEYLYGSYPLCQFQVQKPRAKPPPIPAKKPSSVSLWSLEQPFRIELIQGSKVNADERMKLVVQAGLFHGNEMLCKTVSSSEVSVCSEPVWKQRLEFDINICDLPRMARLCFALYAVIEKAKKARSTKKKSKKADCPIAWANLMLFDYKDQLKTGERCLYMWPSVPDEKGELLNPTGTVRSNPNTDSAAALLICLPEVAPHPVYYPALEKLPGGMLLASREWRPELLWMRLHAEDSAPSRMIGVAMPGLGVLPGLVQAPGDAECSRLLQILELGRHSECVHVTEEEQLQLREILERRGSGELYEHEKDLVWKLRHEVQEHFPEALARLLLVTKWNKHEDVAQMLYLLCSWPELPVLSALELLDFSFPDCHVGSFAIKSLRKLTDDELFQYLLQLVQVLKYESYLDCELTKFLLDRALANRKIGHFLFWHLRSEMHVPSVALRFGLILEAYCRGSTHHMKVLMKQGEALSKLKALNDFVKLSSQKTPKPQTKELMHLCMRQEAYLEALSHLQSPLDPSTLLAEVCVEQCTFMDSKMKPLWIMYSNEEAGSGGSVGIIFKNGDDLRQDMLTLQMIQLMDVLWKQEGLDLRMTPYGCLPTGDRTGLIEVVLRSDTIANIQLNKSNMAATAAFNKDALLNWLKSKNPGEALDRAIEEFTLSCAGYCVATYVLGIGDRHSDNIMIRESGQLFHIDFGHFLGNFKTKFGINRERVPFILTYDFVHVIQQGKTNNSEKFERFRGYCERAYTILRRHGLLFLHLFALMRAAGLPELSCSKDIQYLKDSLALGKTEEEALKHFRVKFNEALRESWKTKVNWLAHNVSKDNRQ

SEQ ID NO: 59722 - protein, 142 aa, Homo sapiens
MAETVWSTDTGEAVYRSRDPVRNLRLRVHLQRITSSNFLHYQPAAELGKDLIDLATFRPQPTASGHRPEEDEEEEIVIGWQEKLFSQFEVDLYQNETACQSPLDYQYRQEILKLENSGGKKNRRIFTYTDSDRYTNLEEAWL

SEQ ID NO: 59723 - protein, 346 aa, Homo sapiens
MKSRIPVVLLACGSFNPITNMHLRMFEVARDHLHQTEYEEKDHEVALVFPGPQSISIKDISFHLQKRIQNNVSSKNDDPDKSSFKRKRTEEQAFCDLNDSKCKGTTLKKIIFIDSTWNQTNKIFTDERLQGMYQVIQGIISPVNDTYGKKDLAASHHRVAMARLALQTSDWIRVDPWESEQAQWMETVKVLRHHHSKLLRSPPQMEGPDHGKALFSTPAAVPELKLLCGADVLKTFQTPNLWKDAHIQEIVEKFGLVCVGRVGHDPKGYIAESPILRMHQHNIHLAKEPVQNEISATYIRRALGQGQSVKYLIPDAVITYIKDHGLYTKGSTWKGKSTQSTEGKTS

SEQ ID NO: 59724 - protein, 303 aa, Homo sapiens
MARASSGNGSEEAWGALRAPQQQSPAASSLEGAIWRRAGTQTRALDAILYHPQQSHLLRELCPGVNNQPYLCESGHCCGETGCCTYYYELWWFWLLWTVLILFSCCCAFRHRRAKLRLQQQQRQREINLLAYHGACHGAGPFPTGSLLDLRFLSTFKPPAYEDVVHRPGTPPPPYTVAPGRPLTASSEQTCCSSSSSCPAHFEGTNVEGVSSHQSAPPHQEGEPGAGVTPASTPPSCRYRRLTGDSGIELCPCPASGEGEPVKEVRVSATLPDLEDYSPCALPPESVPQIFPMGLSSSEGDIP

SEQ ID NO: 59725 - protein, 60 aa, Homo sapiens
  MOD_RES (1)..(1): Any amino acid
XLNVGHLKLTFCSVGPTECAALAFVLQHLRRPVALQLDYNSVGDIGVEQLLPCLGVCKAL

SEQ ID NO: 59726 - protein, 40 aa, Homo sapiens
MQFGTRTTTAEPGFMGTWQNADTNLLFRMSQQAIRCTLVN

SEQ ID NO: 59727 - protein, 126 aa, Homo sapiens
MTVSDAILRYAMSNCGWAQEERQSSSHLAKGDQPKSCCFLPRSGRRSSPSPPPSEEKDHLEVWAPVVDSEVPSLESPTLPPLSSPLCCDFGRPKEGTSTLQSVRRAVGGDHAVPLDPGQLETVLEK

SEQ ID NO: 59728 - protein, 291 aa, Homo sapiens
MWQLWASLCCLLVLANARSRPSFHPLSDELVNYVNKRNTTWQAGHNFYNVDMSYLKRLCGTFLGGPKPPQRVMFTEDLKLPASFDAREQWPQCPTIKEIRDQGSCGSCWAFGAVEAISDRICIHTNAHVSVEVSAEDLLTCCGSMCGDGCNGGYPAEAWNFWTRKGLVSGGLYESHVGYNSYSVSNSEKDIMAEIYKNGPVEGAFSVYSDFLLYKSGVYQHVTGEMMGGHAIRILGWGVENGTPYWLVANSWNTDWGDNGFFKILRGQDHCGIESEVVAGIPRTDQYWEKI

SEQ ID NO: 59729 - protein, 44 aa, Homo sapiens
MAAAEPSPRRVGFVGAGRMAGAIAQGLIRAAILQGPEESRSIGK

SEQ ID NO: 59730 - protein, 585 aa, Homo sapiens
MLHLHHSWSWLPAMLAVLLSLAPSASSDISASRPNILLLMADDLGIGDIGCYGNNTMRTPNIDRLAEDGVKLTQHISAASLCTPSRAAFLTGRYPVRSGMVSSIGYRVLQWTGASGGLPTNETTFAKILKEKGYATGLIGKWHLGLNCESASDHCHHPLHHGFDHFYGMPFSLMGDCARWELSEKRVNLEQKLNFLFQVLALVALTLVAGKLTHLIPVSWMPVIWSALSAVLLLASSYFVGALIVHADCFLMRNHTITEQPMCFQRTTPLILQEVASFLKRNKHGPFLLFVSFLHVHIPLITMENFLGKSLHGLYGDNVEEMDWMVGRILDTLDVEGLSNSTLIYFTSDHGGSLENQLGNTQYGGWNGIYKGGKGMGGWEGGIRVPGIFRWPGVLPAGRVIGEPTSLMDVFPTVVRLAGGEVPQDRVIDGQDLLPLLLGTAQHSDHEFLMHYCERFLHAARWHQRDRGTMWKVHFVTPVFQPEGAGACYGRKVCPCFGEKVVHHDPPLLFDLSRDPSETHILTPASEPVFYQVMERVQQAVWEHQRTLSPVPLQLDRLGNIWRPWLQPCCGPFPLCWCLREDDPQ

SEQ ID NO: 59731 - protein, 145 aa, Homo sapiens
MDSKESLTPGREENPSSVLAQERGDVMDFYKTLRGGATVKVSASSPSLAVASQSDSKQRRLLVDFPKGSVSNAQQPDLSKAVSLSMGLYMGETETKVMGNDLGFPQQGQISLSSGETDLKLLEESIANLNRSTSVPENPKSSAST

SEQ ID NO: 59732 - protein, 104 aa, Homo sapiens
MRQPLSWGRWRAMLARTYGPGPSAGYRWASGAQGYVRNPPVGACDLQGELDRFGGISVRLARLDALDRLDAAAFQKGLQGKCAWDEGLPGLQSFSNEITAAPTP

SEQ ID NO: 59733 - protein, 555 aa, Homo sapiens
MARAVGPERRLLAVYTGGTIGMRSELGVLVPGTGLAAILRTLPMFHDEEHARARGLSEDTLVLPPASRNQRILYTVLECQPLFDSSDMTIAEWVCLAQTIKRHYEQYHGFVVIHGTDTMAFAASMLSFMLENLQKTVILTGAQVPIHALWSDGRENLLGALLMAGQYVIPEVCLFFQNQLFRGNRATKVDARRFAAFCSPNLLPLATVGADITINRELVRKVDGKAGLVVHSSMEQDVGLLRLYPGIPAALVRAFLQPPLKGVVMETFGSGNGPTKPDLLQELRVATERGLVIVNCTHCLQGAVTTDYAAGMAMAGAGVISGFDMTSEAALAKLSYVLGQPGLSLDVRKELLTKDLRGEMTPPSVEERRPSLQGNTLGGGVSWLLSLSGSQEADALRNALVPSLACAAAHAGDVEALQALVELGSDLGLVDFNGQTPLHAAARGGHTEAVTMLLQRGVDVNTRDTDGFSPLLLAVRGRHPGVIGLLREAGASLSTQELEEAGTELCRQRQPGTWQWWPFYRAWRVRLVPRPHAQKCCLVSNLKASCCSISHSFLP

SEQ ID NO: 59734 - protein, 189 aa, Homo sapiens
MPGVARLPLLLGLLLLPRPGRPLDLADYTYDLAEEDDSEPLNYKDPCKAAAFLGDIALDEEDLRAFQVQQAVDLRRHTARKSSIKAAVPGNTSTPSCQSTNGQPQRGACGRWRGRSRSRRAATSRPERVWPDGVIPFVIGGNFTGSQRAVFRQAMRHWEKHTCVTFLERTDEDSYIVFTYRPCGSGPPP

SEQ ID NO: 59735 - protein, 43 aa, Homo sapiens
MWSRRQGRLRPTVCGVEELRRRRREREHCGRRGGSSSWSARGC

SEQ ID NO: 59736 - protein, 43 aa, Homo sapiens
MAPGQLGEALAERRGLRPRLRPPTLPPWRRPAGPGTAGAALRD

SEQ ID NO: 59737 - protein, 1568 aa, Homo sapiens
MGAVLRSLLACSFCVLLRAAPLLLYANRRDLRLVDATNGKENATIVVGGLEDAAAVDFVFSHGLIYWSDVSEEAIKRTEFNKTESVQNVVVSGLLSPDGLACDWLGEKLYWTDSETNRIEVSNLDGSLRKVLFWQELDQPRAIALDPSSGFMYWTDWGEVPKIERAGMDGSSRFIIINSEIYWPNGLTLDYEEQKLYWADAKLNFIHKSNLDGTNRQAVVKGSLPHPFALTLFEDILYWTDWSTHSILACNKYTGEGLREIHSDIFSPMDIHAFSQQRQPNATNPCGIDNGGCSHLCLMSPVKPFYQCACPTGVKLLENGKTCKDGATELLLLARRTDLRRISLDTPDFTDIVLQLEDIRHAIAIDYDPVEGYIYWTDDEVRAIRRSFIDGSGSQFVVTAQIAHPDGIAVDWVARNLYWTDTGTDRIEVTRLNGTMRKILISEDLEEPRAIVLDPMVGYMYWTDWGEIPKIERAALDGSDRVVLVNTSLGWPNGLALDYDEGKIYWGDAKTDKIEVMNTDGTGRRVLVEDKIPHIFGFTLLGDYVYWTDWQRRSIERVHKRSAEREVIIDQLPDLMGLKATNVHRVIGSNPCAEENGGCSHLCLYRPQGLRCACPIGFELISDMKTCIVPEAFLLFSRRADIRRISLETNNNNVAIPLTGVKEASALDFDVTDNRIYWTDISLKTISRAFMNGSALEHVVEFGLDYPEGMAVDWLGKNLYWADTGTNRIEVSKLDGQHRQVLVWKDLDSPRALALDPAEGFMYWTEWGGKPKIDRAAMDGSERTTLVPNVGRANGLTIDYAKRRLYWTDLDTNLIESSNMLGLNREVIADDLPHPFGLTQYQDYIYWTDWSRRSIERANKTSGQNRTIIQGHLDYVMDILVFHSSRQSGWNECASSNGHCSHLCLAVPVGGFVCGCPAHYSLNADNRTCSAPTTFLLFSQKSAINRMVIDEQQSPDIILPIHSLRNVRAIDYDPLDKQLYWIDSRQNMIRKAQEDGSQGFTVVVSSVPSQNLEIQPYDLSIDIYSRYIYWTCEATNVINVTRLDGRSVGVVLKGEQDRPRAVVVNPEKGYMYFTNLQERSPKIERAALDGTEREVLFFSGLSKPIALALDSRLGKLFWADSDLRRIESSDLSGANRIVLEDSNILQPVGLTVFENWLYWIDKQQQMIEKIDMTGREGRTKVQARIAQLSDIHAVKELNLQEYRQHPCAQDNGGCSHICLVKGDGTTRCSCPMHLVLLQDELSCGESQFQCASGQCIDGALRCNGDANCQDKSDEKNCEVLCLIDQFRCANGQCIGKHKKCDHNVDCSDKSDELDCYPTEEPAPQATNTVGSVIGVIVTIFVSGTVYFICQRMLCPRMKGDGETMTNDYVVHGPASVPLGYVPHPSSLSGSLPGMSRGKSMISSLSIMGGSSGPPYDRAHVTGASSSSSSSTKGTYFPAILNPPPSPATERSHYTMEFGYSSNSPSTHRSYSYRPYSYRHFAPPTTPCSTDVCDSDYAPSRRMTSVATAKGYTSDLNYDSEPVPPPPTPRSQYLSAEENYESCPPSPYTERSYSHHLYPPPPSPCTDSS

SEQ ID NO: 59738 - protein, 40 aa, Homo sapiens
MPNSEPASLLELFNSIATQGELVRSLKAGNASKLGSFRWK

SEQ ID NO: 59739 - protein, 238 aa, Homo sapiens
MVGPRSWETGRIGDERQEETGGGRGEGRGRRQRESEDPKGWRWGWKDWGPAGKRVCSLKQEFVGQSLWVRVCGAGIETRGIGVQMLTTSLFSEQCDFTEDQTAEFKEAFQLFDRTGDGKILYSQCGDVMRALGQNPTNAEVLKVLGNPKSDEMNVKVLDFEHFLPMLQTVAKNKDQGTYEDYVEGLRVFDKEGNGTVMGAEIRHVLVTLGEKMTEEEVEMLVAGHEDSNGCINYEGKR

SEQ ID NO: 59740 - protein, 882 aa, Homo sapiens
MATRGGAGVAMAVWSLLSARAVTAFLLLFLPRFLQAQTFSFPFQQPEKCDNNQYFDISALSCVPCGANQRQDARGTSCVCLPGFQMISNNGGPAIICKKCPENMGMSLTSEWFAKYLQSSAAACWVYANLTSCQALGNMCVMNMNSYDFATFDACGLFQFIFENTAGLSTVHSISFWRQNLPWLFYGDQLGLAPQVLSSTSLPTNFSFKGENQNTKLKFVAASYDIRGNFLKWQTLEGGVLQLCPDTETRLNAAYSFGTTYQQNCEIPISKILIDFPTPIFYDVYLEYTDENQHQYILAVPVLNLNLQHNKIFVNQDSNSGKWLLTRRIFLVDAVSGRENDLGTQPRVIRVATQISLSVHLVPNTINGNIYPPLITIAYSDIDIKDANSQSVKVSFSVTYEMDHGEAHVQTDIALGVLGGLAVLASLLKTAGWKRRIGSPMIDLQTVVKFLVYYAGDLANVFFIITVGTGLYWLIFFKAQKSVSVLLPMPIQEERFVTYVGCAFALKALQFLHKLISQITIDVFFIDWERPKGKVLKAVEGEGGVRSATVPVSIWRTYFVANEWNEIQTVRKINSLFQVLTVLFFLEVVGFKNLALMDSSSSLSRNPPSYIAPYSCILRYAVSAALWLAIGIIQVVFFAVFYERFIEDKIRQFVDLCSMSNISVFLLSHKCFGYYIHGRSVHGHADTNMEEMNMNLKREAENLCSQRGLVPNTDGQTFEIAISNQMRQHYDRIHETLIRKNGPARLLSSSASTFEQSIKAYHMMNKFLGSFIDHVHKEMDYFIKDKLLLERILGMEFMEPMEKSIFYNDEGYSFSSVLYYGNEATLLIFDLLFFCVVDLACQNFILASFLTYLQQEIFRYIRNTVGQKNLASKTLVDQRFLI

SEQ ID NO: 59741 - protein, 122 aa, Homo sapiens
EDLIDGIIFAANYLGSTQLLSDKTPSKNVRMMQAQEAVSRIKAPEGESQPMTEVDLFISTQRIKVLNADTQETMMDHPLRTISYIADIGNIVVLMARRRMPRSNSQENVEASHPSQDGKRQY

SEQ ID NO: 59742 - protein, 262 aa, Homo sapiens
MPLHVKWPFPAVPPLTWTLASSVVMGLVGTYSCFWTSEWAQAEAGPPGYPCPAGGILKLRHIWNLKLMRWTPAAADICFTKELHSHFFSLGKCVPVCRGDGVYQKGMDFILEKLNHGDWVHIFPEGIGRLIAECHLNPIILPLWHVGEPGDGDREMASGVGGLGLPLVPGCPAPPHVWPSVHCAAGMNDVLPNSPPYFPRFGQKITVLIGKPFSALPVLERLRAENKSAVEMRKALTDFIQEEFQHLKTQAEQLHNHLQPGR

SEQ ID NO: 59743 - protein, 165 aa, Homo sapiens
MSRVRDAGCVAAGIVIGAGAWYCVYKYTRGRDQTKKRMAKPKNRAVAGTGARARAGLRAGFTIDLGSGFSPPTPVRAEAEDRAQDEASALDTVGAEAVAPAASSAEAQSGAGSQAQEADGAGVGPKAESVVGAAMASAIAPPPGVTEALGAAEAPAMAGAPKVAE

SEQ ID NO: 59744 - protein, 169 aa, Homo sapiens
MRALCIRETCSSELGFSRNWSRRKAGHCPNPGISLGAVRTGFRFGHGDKVRYRCSSNLVLTGSSERECQGNGVWSGTEPICRQPYSYDFPEDVAPALGTSFSHMLGATNPTQKTKDHENGTGTNTYAALNSVYLMMNNQMRLLGMETMAWQEIRHAIILLTDGKSNMGG

SEQ ID NO: 59745 - protein, 36 aa, Homo sapiens
MEAAAAVVAAEAEVENEDGDSSCGDVCFMDKGLQRT

SEQ ID NO: 59746 - protein, 157 aa, Homo sapiens
MAGSDAEWVTIANNLLFKCHIHLRIHELQDCDANVFIALYQSILGEKVPDLIVIPRSQEDDAHNVQAVIDSLALDYLQVSLSHITGENIVKGDKESIKNLLEIFDGLLEYLTERISETSHEKSAPCLLRCWAPLGMEMKQNPLVKSLDLETQHTPFL

SEQ ID NO: 59747 - protein, 317 aa, Homo sapiens
MGEINQTLVSEFLLLGLSGYPKIEIVYFALILVMYLVILIGNGVLIIASIFDSHFHTPMYFFLGNLSFLDICYTSSSVPSTLVSLISKKRNISFSGCAVQMFFGFAMGSTECLLLGMMAFDRYVAICNPLRYPIILSKVAYVLMASVSWLSGGINSAVQTLLAMRLPFCGNNIINHFACEILAVLKLACADISLNIITMVISNMAFLVLPLMVIFFSYMFILYTILQMNSATGRRKAFSTCSAHLTVVIIFYGTIFFMYAKPKSQDLIGEEKLQALDKLISLFYGVVTPMLNPILYSLRNKDVKAAVKYLLNKKPIH

SEQ ID NO: 59748 - protein, 53 aa, Homo sapiens
MGLKALCLGLLCVLFVSHFYTPMPDNIEESWKIMALDAIAKTCTFTNRGLLTS

SEQ ID NO: 59749 - protein, 676 aa, Homo sapiens
MEDSYKDRTSLMKGAKDIAREVKKQTVKKVNQAVDRAQDEYTQRSYSRFQDEEDDDDYYPAGETYNGEANDDEGSSEATEGHDEDDEIYEGEYQGIPSMNQAKDSIVSVGQPKGDEYKDRRELESERRADEEELAQQYELIIQECGHGRFQWALFFVLGMALMADGVEVFVVGFVLPSAETDLCIPNSGSGWLGSIVYLGMMVGAFFWGGLADKVGRKQSLLICMSVNGFFAFLSSFVQGYGFFLFCRLLSGFGIGGAIPTVFSYFAEVLAREKRGEHLSWLCMFWMIGGIYASAMAWAIIPHYGWSFSMGSAYQFHSWRVFVIVCALPCVSSVVALTFMPESPRFLLEVGKHDEAWMILKLIHDTNMRARGQPEKVFTVNKIKTPKQIDELIEIESDTGTWYRRCFVRIRTELYGIWLTFMRCFNYPVRDNTIKLTIVWFTLSFGYYGLSVWFPDVIKPLQSDEYALLTRNVERDKYANFTINFTMENQIHTGMEYDNGRFIGVKFKSVTFKDSVFKSCTFEDVTSVNTYFKNCTFIDTVFDNTDFEPYKFIDSEFKNCSFFHNKTGCQITFDDDYSAYWIYFVNFLGTLAVLPGNIVSALLMDRIGRLTMLGGSMVLSGISCFFLWFGTSESMMIGMLCLYNGLTISAWNSLDVVTVELYPTDRRRRVLPCCPG

SEQ ID NO: 59750 - protein, 127 aa, Homo sapiens
MRRAGLGEGVPPGNYGNYGYANSGYSACEEENERLTESLRSKVTAIKSLSIEIGHEVKTQNKLLAEMDSQFDSTTGFLVDPSGSRDFTSSSESLLLLILTVPQHLSRSLKRRRLTFSAIYHSCRIIS

SEQ ID NO: 59751 - protein, 37 aa, Homo sapiens
MVYYPELFVWVSQEPFPNKDMEGRLPKETSLSPFMES

SEQ ID NO: 59752 - protein, 353 aa, Homo sapiens
MALNHTALPQDERLPHYLRDGDPFASKLSWEADLVAGFYLTIIGILSTFGNGYVLYMSSRRKKKLRPAEIMTINLAVCDLGISVVGKPFTIISCFCHRWVFGWIGCRWYGWAGFFFGCGSLITMTAVSLDRYLKICYLSYGVWLKRKHAYICLAAIWAYASFWTTMPLVGLGDYVPEPFGTSCTLDWWLAQASVGGQVFILNILFFCLLLPTAVIVFSYVKIIAKVKSSSKEVAHFDSRIHSSHVLEMKLTKVAMLICAGFLIAWIPYAVVSVWSAFGRPDSIPIQLSVVPTLLAKSAAMYNPIIYQVIDYKFACCQTGGLKATKKKSLEGFRLHTVTTVRKSSAVLEIHEEV

SEQ ID NO: 59753 - protein, 117 aa, Homo sapiens
LDLSENRLESLPPQMRRLVHLQTLVLNGNPLLHAQLRQLPAMTALQTLHLRSTQRTQSNLPTSLEGLSNLADVDLSCNDLTRVPECLYTLPSLRRLNLSSNQITELSLCIDHQPFAS

SEQ ID NO: 59754 - protein, 235 aa, Homo sapiens
MEARCALALLWDAPHRPPLPKPDPSEAEEAAHVLLPLTGAGVGAALPAPEVPGLCGEGGAGQGLAHDRRTGQNVVPEPTHQVAAPDGGGARGRAAPRGPAAPASAAGRVATAAAAAAAPGPSLPAQLVALRAAEPAALGRGQQSGFSVRARLGGVSDARPIGVERRARSGGARGCLRPWSSGSRAREERQALRLSSRAPPPPAGSQASVAQMHGQLRGGLSRHFSLHCRYALAGT

SEQ ID NO: 59755 - protein, 80 aa, Homo sapiens
MGKSYHPGCFRCIVCNKCLDGIPFTVDFSNQVYCVTDYHKNYAPKCAACGQPILPSEGCEDIVRVISMDRDYHFECYHCE

SEQ ID NO: 59756 - protein, 255 aa, Homo sapiens
MAGLSRGSARALLAALLASTLLALLVSPARGRGGRDHGDWDEASRLPPLPPREDAARVARFVTHVSDWGALATISTLEAVRGRPFADVLSLSDGPPGAGSGVPYFYLSPLQLSVSNLQENPYATLTMTLAQTNFCKKHGFDPQSPLCVHIMLSGTVTKVNETEMDIAKHSLFIRHPEMKTWPSSHNWFFAKLNITNIWVLDYFGGPKIVTPEEYYNVTVHWKTSCGDHLVQLLHCIAEDTQAQRGEVIWSKSHSK

SEQ ID NO: 59757 - protein, 93 aa, Homo sapiens
MQKSEGSGGTQLKNRATGNYDQRTSSSTQLKHRNAVQGSKSSLSTSSPESARKLHPRPSDKLNPKTINPFGEQSRVPSAFAAIYSKGGIPCRV

SEQ ID NO: 59758 - protein, 75 aa, Homo sapiens
MGTWARTLLGPDYSDENDYTHTSYNAMHVKHTSSNLERECSPKLMKRSQSVVEAGTLKHEEKGENENTQPLLALD

SEQ ID NO: 59759 - protein, 855 aa, Homo sapiens
MFALGLPFLVLLVASVESHLGVLGPKNVSQKDAEFERTYVDEVNSELVNIYTFNHTVTRNRTEGVRVSVNVLNKQKGAPLLFVVRQKEAVVSFQVPLILRGMFQRKYLYQKVERTLCQPPTKNESEIQFFYVDVSTLSPVNTTYQLRVSRMDDFVLRTGEQFSFNTTAAQPQYFKYEFPEGVDSVIVKVTSNKAFPCSVISIQDVLCPVYDLDNNVAFIGMYQTMTKKAAITVQRKDFPSNSFYVVVVVKTEDQACGGSLPFYPFAEDEPVDQGHRQKTLSVLVSQAVTSEAYVSGMLFCLGIFLSFYLLTVLLACWENWRQKKKTLLVAIDRACPESGHPRVLADSFPGSSPYEGYNYGSFENVSGSTDGLVDSAGTGDLSYGYQGHDQFKRRLPSGQMRQLCIAMGRSFEPVGTRPRVDSMSSVEEDDYDTLTDIDSDKNVIRTKQYLYVADLARKDKRVLRKKYQIYFWNIATIAVFYALPVVQLVITYQTVVNVTGNQDICYYNFLCAHPLGNLSAFNNILSNLGYILLGLLFLLIILQREINHNRALLRNDLCALECGIPKHFGLFYAMGTALMMEGLLSACYHVCPNYTNFQFDTSFMYMIAGLCMLKLYQKRHPDINASAYSAYACLAIVIFFSVLGVVFGKGNTAFWIVFSIIHIIATLLLSTQLYYMGRWKLDSGIFRRILHVLYTDCIRQCSGPLYVDRMVLLVMGNVINWSLAAYGLIMRPNDFASYLLAIGICNLLLYFAFYIIMKLRSGERIKLIPLLCIVCTSVVWGFALFFFFQGLSTWQKTPAESREHNRDCILLDFFDDHDIWHFLSSIAMFGSFLVSGPPGRAGWVREGSSCLLLCG

SEQ ID NO: 59760 - protein, 52 aa, Homo sapiens
MEKVKSPELQAEAKSYFEKSKEQLTPLIKKAGTELVNFLSYFVELGTQPATQ

SEQ ID NO: 59761 - protein, 1418 aa, Homo sapiens
MVSSGCRMRSLWFIIVISFLPNTEGFSRAALPFGLVRRELSCEGYSIDLRCPGSDVIMIESANYGRTDDKICDADPFQMENTDCYLPDAFKIMTQRCNNRTQCIVVTGSDVFPDPCPGTYKYLEVQYECVPYIFVCPGTLKAIVDSPCIYEAEQKAGAWCKDPLQAADKIYFMPWTPYRTDTLIEYASLEDFQNSRQTTTYKLPNRVDGTGFVVYDGAVFFNKERTRNIVKFDLRTRIKSGEAIINYANYHDTSPYRWGGKTDIDLAVDENGLWVIYATEQNNGMIVISQLNPYTLRFEATWETVYDKRAASNAFMICGVLYVVRSVYQDNESETGKNSIDYIYNTRLNRGEYVDVPFPNQYQYIAAVDYNPRDNQLYVWNNNFILRYSLEFGPPDPAQVPTTAVTITSSAELFKTIISTTSTTSQKGPMSTTVAGSQEGSKGTKPPPAVSTTKIPPITNIFPLPERFCEALDSKGIKWPQTQRGMMVERPCPKGTRGTASYLCMISTGTWNPKGPDLSNCTSHWVNQLAQKIRSGENAASLANELAKHTKGPVFAGDVSSSVRLMEQLVDILDAQLQELKPSEKDSAGRSYNKAIVDTVDNLLRPEALESWKHMNSSEQAHTATMLLDTLEEGAFVLADNLLEPTRVSMPTENIVLEVAVLSTEGQIQDFKFPLGIKGAGSSIQLSANTVKQNSRNGLAKLVFIIYRSLGQFLSTENATIKLGADFIGRNSTIAVNSHVISVSINKESSRVYLTDPVLFTLPHIDPDNYFNANCSFWNYSERTMMGYWSTQGCKLVDTNKTRTTCACSHLTNFAILMAHREIAYKDGVHELLLTVITWVGIVISLVCLAICIFTFCFFRGLQSDRNTIHKNLCINLFIAEFIFLIGIDKTKYAIACPIFAGLLHFFFLAAFAWMCLEGVQLYLMLVEVFESEYSRKKYYYVAGYLFPATVVGVSAAIDYKSYGTEKACWLHVDNYFIWSFIGPVTFIILLNIIFLVITLCKMVKHSNTLKPDSSRLENINNYRVCDGYYNTDLPGSWVLGAFALLCLLGLTWSFGLLFINEETIVMAYLFTIFNAFQGVFIFIFHCALQKKVRKEYGKCFRHSYCCGGLPTESPHSSVKASTTRTSARYSSGTQSRIRRMWNDTVRKQSESSFISGDINSTSTLNQGHSLNNARDTSAMDTLPLNGNFNNSYSLHKGDYNDSVQVVDCGLSLNDTAFEKMIISELVHNNLRGSSKTHNLELTLPVKPVIGGSSSEDDAIVADASSLMHSDNPGLELHHKELEAPLIPQRTHSLLYQPQKKVKSEGTDSYVSQLTAEAEDHLQSPNRDSLYTSMPNLRDSPYPESSPDMEEDLSPSRRSENEDIYYKSMPNLGAGHQLQMCYQISRGNSDGYIIPINKEGCIPEGDVREGQMQLVTSL

SEQ ID NO: 59762 - protein, 194 aa, Homo sapiens
MLRLQKRLASSVLRCGKKKVWLDPNETNEIANANSRQQIRKLIKDGLIIRKPVTVHSRARCRKNTLARRKGRHMGIGKRKGTANARMPEKVTWMRRMRILRRLLRRYRESKKIDRHMYHSLYLKVKGNVFKNKRILMEHIHKLKADKARKKLLADQAEARRSKTKEARKRREERLQAKKEEIIKTLSKEEETKK

SEQ ID NO: 59763 - protein, 444 aa, Homo sapiens
MLLMVVSMACVGFFLVQRAGPHVGGQDKPFLSAWPSAVVPRGGHVTLRCHYRHRFNNFMLYKEDRIHVPIFHGRLFQESFNMSPVTTAHAGNYTCRGSHPHSPTGWSAPSNPVVIMVTGNHRKPSLLAHPGPLVKSGERVILQCWSDIMFEHFFLHKEGISKDPSRLVGQIHDGVSKANFSIGPMMLALAGTYRCYGSVTHTPYQLSAPSDPLDIVVTGPYEKPSLSAQPGPKVQAGESVTLSCSSRSSYDMYHLSREGGAHERRLPAVRKVNRTFQADFPLGPATHGGTYRCFGSFRHSPYEWSDPSDPLLVSVTGNPSSSWPSPTEPSSKSGNPRHLHILIGTSVVIILFILLLFFLLHLWCSNKKNAAVMDQEPAGNRTANSEDSDEQDPQEVTYAQLDHCVFTQRKITRPSQRPKTPPTDTILYTELPNAKPRSKVVSCP

SEQ ID NO: 59764 - protein, 130 aa, Homo sapiens
MDGGDDGNLIIKKRFVSEAELDERRKRRQEEWEKVRKPEDPEECPEEVYDPRSLYERLQEQKDRKQQEYEEQFKFKNMVRGLDEDETNFLDEVSRQQELIEKQRREEELKELKEYRNNLKKVGISQENKK

SEQ ID NO: 59765 - protein, 230 aa, Homo sapiens
MAPLLLQLAVLGAALAAAALVLISIVAFTTATKMPALHRHEEEKFFLNAKGQKETLPSIWDSPTKQLSVVVPSYNEEKRLPVMMDEALSYLEKRQKRDPAFTYEVIVVDDGSKDQTSKVAFKYCQKYGSDKVRVITLVKNRGKGGAIRMGIFSSRGEKILMADADGATKFPDVEKLEKGLNDLQPWPNQMAIACGSRAHLEKESIAQHKCSFGGLISQPVFIGSILYGRH

SEQ ID NO: 59766 - protein, 610 aa, Homo sapiens
MTTKRSLFVRLVPCRCLRGEEETVTTLDYSHCSLEQVPKEIFTFEKTLEELYLDANQIEELPKQLFNCQSLHKLSLPDNDLTTLPASIANLINLRELDVSKNGIQEFPENIKNCKVLTIVEASVNPISKLPDGFSQLLNLTQLYLNDAFLEFLPANFGRLTKLQILELRENQLKMLPKTMNRLTQLERLDLGSNEFTEVPEVLEQLSGLKEFWMDANRLTFIPGFIGSLKQLTYLDVSKNNIEMVEEGISTCENLQDLLLSSNSLQQLPETIGSLKNITTLKIDENQLMYLPDSIGGLISVEELDCSFNEVEALPSSIGQLTNLRTFAADHNYLQQLPPEIGSWKNITVLFLHSNKLETLPEEMGDMQKLKVINLSDNRLKNLPFSFTKLQQLTAMWLSDNQSMLSRSFNSNFTTVSSFHCGSSRDLHGSQGSLALSVADRRGSGGHIFRMPLSNGQMGQPLRPQANYSQIHHPPQASVARHPSREQLIDYLMLKVAHQPPYTQPHCSPRQGHELAKQEIRVRVEKDPELGFSISGGVGGRGNPFRPDDDGIFVTRVQPEGPASKLLQPGDKIIQANGYSFINIEHGQAVSLLKTFQNTVELIIVREVSS

SEQ ID NO: 59767 - protein, 892 aa, Homo sapiens
MPVRKQDTQRALHLLEEYRSKLSQTEDRQLRSSIERVINIFQSNLFQALIDIQEFYEVTLLDNPKCIDRSKPSEPIQPVNTWEISSLPSSTVTSETLPSSLSPSVEKYRYQDEDTPPQEHISPQITNEVIGPELVHVSEKNLSEIENVHGFVSHSHISPIKANPPPVLVNTDSLETPTYVNGTDADYEYEEITLERGNSGLGFSIAGGTDNPHIGDDSSIFITKIITGGAAAQDGRLRVNDCILRVNEVDVRDVTHSKAVEALKEAGSIVRLYVKRRKPVSEKIMEIKLIKGPKGLGFSIAGGVGNQHIPGDNSIYVTKIIEGGAAHKDGKLQIGDKLLAVNNVCLEEVTHEEAVTALKNTSDFVYLKVAKPTSMYMNDGYAPPDITNSSSQPVDNHVSPSSFLGQTPASPARYSPVSKAVLGDDEITREPRKVVLHRGSTGLGFNIVGGEDGEGIFISFILAGGPADLSGELRKGDRIISVNSVDLRAASHEQAAAALKNAGQAVTIVAQYRPEEYSRFEAKIHDLREQMMNSSISSGSGSLRTSQKRSLYVRALFDYDKTKDSGLPSQGLNFKFGDILHVINASDDEWWQARQVTPDGESDEVGVIPSKRRVEKKERARLKTVKFNSKTRDKGSFNDKRKKNLFSRKFPFYKNKDQSEQETSDADQHVTSNASDSESSYRGQEEYVLSYEPVNQQEVNYTRPVIILGPMKDRINDDLISEFPDKFGSCVPHTTRPKRDYEVDGRDYHFVTSREQMEKDIQEHKFIEAGQYNNHLYGTSVQSVREVAEKGKHCILDVSGNAIKRLQIAQLYPISIFIKPKSMENIMEMNKRLTEEQARKTFERAMKLEQEFTEHFTAIVQGDTLEDIYNQVKQIIEEQSGSYIWVPAKEKL

SEQ ID NO: 59768 - protein, 75 aa, Homo sapiens
MIVGTLKGFDQTINLILDESHERVFSSSQGVEQVVLGLYIVRGDNVAVIGEIDEETDSALDLGNIRAEPLNSVAH

SEQ ID NO: 59769 - protein, 229 aa, Homo sapiens
MQIFVKTLTGKTITLEVEPSDTIENVKAKIQDKEGIPPDQQRLIFAGKQLEDGRTLSDYNIQKESTLHLVLRLRGGMQIFVKTLTGKTITLEVEPSDTIENVKAKIQDKEGIPPDQQRLIFAGKQLEDGRTLSDYNIQKESTLHLVLRLRGGMQIFVKTLTGKTITLEVEPSDTIENVKAKIQDKEGIPPDQQRLIFAGKQLEDGRTLSDYNIQKESTLHLVLRLRGGV

SEQ ID NO: 59770 - protein, 42 aa, Homo sapiens
MTSLLTTPSPREELMTTPILQPTEALSPEDGASTALIAGNRL

SEQ ID NO: 59771 - protein, 139 aa, Homo sapiens
MLQQVPENINFPAEEEKILEFWTEFNCFQECLKQSKHKPKFTFYDGPPFATGLPHYGHILAGTIKDIVTRYAHQSGFHVDRRFGWDCHGLPVEYEIDKTLGIRGPEDVAKMGITEYNNQCRAIVMRYSAEWKVGLQTTL

SEQ ID NO: 59772 - protein, 132 aa, Homo sapiens
MLRRRGSPGMGVHVGAALGALWFCLTGALEVQVPEDPVVALVGTDATLCCSFSPEPGFSLAQLNLIWQLTDTKQLVHSFAEGQDQGSAYANRTALFPDLLAQGNASLRLQRVRVADEGSFTCFVSIRDFGSA

SEQ ID NO: 59773 - protein, 458 aa, Homo sapiens
MISASRAAAARLVGAAASRGPTAARHQDSWNGLSHEAFRLVSRRDYASEAIKGAVVGIDLGTTNSCVAVMEGKQAKVLENAEGARTTPSVVAFTADGERLVGMPAKRQAVTNPNNTFYATKRLIGRRYDDPEVQKDIKNVPFKIVRASNGDAWVEAHGKLYSPSQIGAFVLMKMKETAENYLGHTAKNAVITVPAYFNDSQRQATKDAGQISGLNVLRVINEPTAAALAYGLDKSEDKVIAVYDLGGGTFDISILEIQKGVFEVKSTNGDTFLGGEDFDQALLRHIVKEFKRETGVDLTKDNMALQRVREAAEKAKCELSSSVQTDINLPYLTMDSSGPKHLNMKLTRAQFEGIVTDLIRRTIAPCQKAMQDAEVSKSDIGEVILVGGMTRMPKEICKKKKNEPGKKRSWTRWMPHILRNPRGRVQWLTPVIPALWEAKAGGSRGSADCTGSFWQSPK

SEQ ID NO: 59774 - protein, 330 aa, Homo sapiens
MTPKISWTSKFSVCPESAMACAAVMIPGLLRCSVGAIRIEAASLRLTLSTLRHLTLTSIMKSKRKTDHMERTASVLRREIVSAAKVCGAASESPSVKSLRLLVADQDFSFKAGQWVDFFIPGVSVVGGFSICSSPRLLEQERVIELAVKYTNHPPALWVHNTCTLDCEVAVRVGGEFFFDPQPADASRNLVLIAGGVGINPLLSILRHAADLLREQANKRNGYEIGTIKLFYSAKNTSELLFKKNILDLVNEFPEKIACSLHVTKQTTQINAELKPYITEGRITEKEIRDHISKETLFYICGPPPMTDFFSKQLENNHVPKEHICFEKWW

SEQ ID NO: 59775 - protein, 256 aa, Homo sapiens
MSPEEWTYLVVLLISIPIGFLFKKAGPGLKRWGAAAVGLGLTLFTCGPHTLHSLVTILGTWALIQAQPCSCHALALAWTFSYLLFFRALSLLGLPTPTPFTNAVQLLLTLKLVSLASEVQDLHLAQRKEMASGFSKGPTLGLLPDVPSLMETLSYSYCYVGIMTGPFFRYRTYLDWLEQPFPGAVPSLRPLLRRAWPAPLFGLLFLLSSHLFPLEAVREDAFYARPLPARLFYMIPVFFAFRMRFYVAWIAAECGC

SEQ ID NO: 59776 - protein, 131 aa, Homo sapiens
MAAAARARVAYLLRQLQRAACQCPTHSHTYSQAPGLSPSGKTTDYAFEMAVSNIRYGAAVTKEVGMDLKNMGAKNVCLMTDKNLSKLPPVQVAMDSLVKNGIPFTVYDNVRVEPTDSRHHFESHQTHTGTD

SEQ ID NO: 59777 - protein, 198 aa, Homo sapiens
METGRQAGVSAEMFAMPRGLKGSNKDGIPEDLDGNLEEPRDQEGELRSQDVMDLTEGDKETSASAPPAAKRLKTDTKGKKERKPTVDAEEAQRMTTLLSAMSEEQLARYEVCRQSAFPKARIAALMQSITGSSVSENVAIAMAGIAKVLVGEVVEEALDVCEMWGEMPPLQPKHLREAVRRLKPKGLFPNSNYKKFMF

SEQ ID NO: 59778 - protein, 30 aa, Homo sapiens
  MOD_RES (1)..(1): Any amino acid
XCLPGFSGALCNQASKWQKQILIPTCMLKG

SEQ ID NO: 59779 - protein, 222 aa, Homo sapiens
MDHHQPGTGRYQVLLNEEDNSESSAIEQPPTSNPAPQIVQAASSAPALETDSSPPPYSSITVEVPTTSDTEVYGEFYPVPPPYSVATSLPTYDEAEKAKAAAMAAAAAETSQRIQEEECPPRDDFSDADQLRVGNDGIFMLAFFTGRYGAICGFGLSLIKWILIVRFSDYFTGYFNGQYWLWWIFLVLGLLLFFRGFVNYLKVRNMSESMAAAHRTRYFFLL

SEQ ID NO: 59780 - protein, 174 aa, Homo sapiens
MLKKMGEAVARVARKVNETVESGSDTLDLAECKLVSFPIGIYKVLRNVSGQIHLITLANNELKSLTSKFMTTFSQLRELHLEGNFLHRLPSEVSALQHLKAIDLSRNQFQDFPEQLTALPALETINLEENEIVDVPVEKLAAMPALRSINLRFNPLNAEVRVIAPPLIKFDMLM

SEQ ID NO: 59781 - protein, 335 aa, Homo sapiens
MALRLLKLAATSASARVVAAGAQRVRGIHSSVQCKLRYGMWHFLLGDKASKRLTERSRVITVDGNICTGKGKLAKEIAEKLGFKHFPEAGIHYPDSTTGDGKPLATDYNGNCSLEKFYDDPRSNDGNSYRLQSWLYSSRLLQYSDALEHLLTTGQGVVLERSIFSDFVFLEAMYNQGFIRKQCVDHYNEVKSVTICDYLPPHLVIYIDVPVPEVQRRIQKKGDPHEMKITSAYLQDIENAYKKTFLPEMSEKCEVLQYSAREAQDSKKVVEDIEYLKFDKGPWLKQDNRTLYHLRLLVQDKFEVLNYTSIPIFLPEVTIGAHQTDRVLHQFREFG

SEQ ID NO: 59782 - protein, 228 aa, Homo sapiens
MWSWKCLLFWAVLVTATLCTARPSPTLPEQDALPSSEDDDDDDDSSSEEKETDNTKPNPVAPYWTSPEKMEKKLHAVPAAKTVKFKCPSSGTPNPTLRWLKNGKEFKPDHRIGGYKVRYATWSIIMDSVVPSDKGNYTCIVENEYGSINHTYQLDVVERSPHRPILQAGLPANKTVALGSNVEFMCKVYSDPQPHIQWLKHIEVNGSKIGPDNLPYVQILKPWKRGRQ

SEQ ID NO: 59783 - protein, 141 aa, Homo sapiens
MDMAQEPVTFRDVAIYFSREEWACLEPSQRALYRDVMLDNFSSVAALGFCSPRPDLVSRLEQWEEPWVEDRERPEFQAVQRGPRPGARKSADPKRPCDHPAWAHKKTHVRRERAREGSSFRKGFRLDTDDGQLPRAAPERT

SEQ ID NO: 59784 - protein, 231 aa, Homo sapiens
  MOD_RES (1)..(1): Any amino acid
XRELCQLLLEGLEGVLRDQLALRALEEALEQGQSLGPVEPLDGPAGAVLECLVLSSGMLVPELAIPVVYLLGALTMLSETQHKLLAEALESQTLLGPLELPLGAECPVAGAQHHVPAPRAPGEQLGRRSTGLGLAGRVWPRAGGGHSPRVLGAAGPGPHVCTLRLPGTAIRTEPGAPLACARAWPGSSPAGQSVCPPAASPRKARSPVAMWPVYHGAQELGKHNKGGIRRK

SEQ ID NO: 59785 - protein, 168 aa, Homo sapiens
MQTFLKGKRVGYWLSEKKIKKLNFQAFAELCRKRGMEVVQLNLSRPIEEQGPLDVIIHKLTDVILEADQNDSQSLELVHRFQEYIDAHPETIVLDPLPAIRTLLDRSKSYELIRKIEAYMEDDRICSPPFMELTSLCGDDTMRLLEKNGLTFPFICKTRVAHGTNSHE

SEQ ID NO: 59786 - protein, 247 aa, Homo sapiens
MGTPRLKTEHNITVLVSDVNDNAPAFTQTSYTLFVRENNSPALHIGSVSATDRDSGTNAQVTYSLLPPQNPHLRLASLVSINADNGHLFALRSLDYEALQAFEFRVGATDRGSPALSSEALVRVLVLDANDNSPFVLYPLQNGSAPCTELVPRAAEPGYLVTKVVAVDGDSGQNAWLSYQLLKATEPGLFSMWAHNGEVRTARLLSERDAAKHRLVVLVKDNGEPPRSATATLHVLLVDGFSQPYLP

SEQ ID NO: 59787 - protein, 515 aa, Homo sapiens
  MOD_RES (1)..(1): Any amino acid
XGNVWRFPYLCGKNGGGAFLIPYFLTLIFAGVPLFLLECSLGQYTSIGGLGVWKLAPMFKGVGLAAAVLSFWLNIYYIVIISWAIYYLYNSFTTTLPWKQCDNPWNTDRCFSNYSMVNTTNMTSAVVEFWERNMHQMTDGLDKPGQIRWPLAITLAIAWILVYFCIWKGVGWTGKVVYFSATYPYIMLIILFFRGVTLPGAKEGILFYITPNFRKLSDSEVWLDAATQIFFSYGLGLGSLIALGSYNSFHNNVYRDSIIVCCINSCTSMFAGFVIFSIVGFMAHVTKRSIADVAASGPGLAFLAYPEAVTQLPISPLWAILFFSMLLMLGIDSQGFITALVDEYPRLLRNRRELFIAAVCIISYLIGLSNITQGGIYVFKLFDYYSASGMSLLFLVFFECVSISWFYGVNRFYDNIQEMVGSRPCIWWKLCWSFFTPIIVAGVFIFSAVQMTPLTMGNYVFPKWGQGVGWLMALSSMVLIPGYMAYMFLTLKGSLKQRIQVMVQPSEDIVRPENG

SEQ ID NO: 59788 - protein, 478 aa, Homo sapiens
MVLLHVLFEHAVGYALLALKEVEEISLLQPQVEESVLNLGKFHSIVRLVAFCPFASSQVALENANAVSEGVVHEDLRLLLETHLPSKKKKVLLGVGDPKIGAAIQEELGYNCQTGGVIAEILRGVRLHFHNLVKGLTDLSACKAQLGLGHSYSRAKVKFNVNRVDNMIIQSISLLDQLDKDINTFSMRVREWYGYHFPELVKIINDNATYCRLAQFIGNRRELNEDKLEKLEELTMDGAKAKAILDASRSSMGMDISAIDLINIESFSSRVVSLSEYRQSLHTYLRSKMSQVAPSLSALIGEAVGARLIAHAGSLTNLAKYPASTVQILGAEKALFRALKTRGNTPKYGLIFHSTFIGRAAAKNKGRISRYLANKCSIASRIDCFSEVPTSVFGEKLREQVEERLSFYETGEIPRKNLDVMKEAMVQAEEAAAEITRKLEKQEKKRLKKEKKRLAALALASSENSSSTPEECEEGDRC

SEQ ID NO: 59789 - protein, 1220 aa, Homo sapiens
MALSDEPAAGGPEEEAEDETLAFGAALEAFGESAETRALLGRLREVHGGGAEREVALERFRVIMDKYQEQPHLLDPHLEWMMNLLLDIVQDQTSPASLVHLAFKFLYIITKVRGYKTFLRLFPHEVADVEPVLDLVTIQNPKDHEAWETRYMLLLWLSVTCLIPFDFSRLDGNLLTQPGQARMSIMDRILQIAESYLIVSDKARDAAAVLVSRVSLCWPDWSRTPDLVIRPPRPPKCWDYRFITRPDVKQSKMAEFLDWSLCNLARSSFQTMQGVITMDGTLQALAQIFKHGKREDCLPYAATVLRCLDGCRLPESNQTLLRKLGVKLVQRLGLTFLKPKVAAWRYQRGCRSLAANLQLLTQGQSEQKPLILTEDDDEDDDVPEGVERVIEQLLVGLKDKDTVVRWSAAKGIGRMAGRLPRALADDVVGSVLDCFSFQETDKAWHGGCLALAELGRRGLLLPSRLVDVVAVILKALTYDEKRGACSVGTNVRDAACYVCWAFARAYEPQELKPFVTAISSALVIAAVFDRDINCRRAASAAFQENVGRQGTFPHGIDILTTADYFAVGNRSNCFLVISVFIAGFPEYTQPMIDHLVTMKISHWDGVIRELAARALHNLAQQAPEFSATQVFPRLLSMTLSPDLHMRHGSILACAEVAYALYKLAAQENRPVTDHLDEQAVQGLKQIHQQLYDRQLYRGLGGQLMRQAVCVLIEKLSLSKMPFRGDTVIDGWQWLINDTLRHLHLISSHSRQQMKDAAVSALAALCSEYYMKEPGEADPAIQEELITQYLAELRNPEEMTRCGFSLALGALPGFLLKGRLQQVLTGLRAVTHTSPEDVSFAESRRDGLKAIARICQTVGVKAGAPDEAVCGENVSQIYCALLGCMDDYTTDSRGDVGTWVRKAAMTSLMDLTLLLARSQPELIEAHTCERIMCCVAQQASEKIDRFRAHAASVFLTLLHFDSPPIPHVPHRGELEKLFPRSDVASVNWSAPSQAFPRITQLLGLPTYRYHVLLGLVVSLGGLTESTIRHSTQSLFEYMKGIQSDPQALGSFSGTLLQIFEDNLLNERVSVPLLKTLDHVLTHGCFDIFTTEEDHPFAVKLLALCKKEIKNSKDIQKLLSGIAVFCEMVQFPGDVRRQALLQLCLLLCHRFPLIRKTTASQVYETLLTYSDVVGADVLDEVVTVLSDTAWDAELAVVREQRNRLCDLLGVPRPQLVPQPGAC

SEQ ID NO: 59790 - protein, 164 aa, Homo sapiens
MENQPVRWRALPGLPRPPGLPAAPWLLLGVLLLPGTLRLAGGQSVTHTGLPIMASLANTAISFSCRITYPYTPQFKVFTVSYFHEDLQGQRSPKKPTNCHPGLGTENQSHTLDCQVTLVLPGASATGTYYCSVHWPHSTVRGSGTFILVRETRFRHVGQAGLES

SEQ ID NO: 59791 - protein, 673 aa, Homo sapiens
MDRPAAAAAAGCEGGGGPNPGPAGGRRPPRAAGGATAGSRQPSVETLDSPTGSHVEWCKQLIAATISSQISGSVTSENVSRDYKVFRRPDLRALRDGNKLAQMEEAPLFPGESIKAIVKDVMYICPFMGAVSGTLTVTDFKLYFKNVERDPHFILDVPLGVISRVEKIGAQSHGDNSCGIEIVCKDMRNLRLAYKQEEQSKLGIFENLNKHAFPLSNGQALFAFSYKEKFPINGWKVYDPVSEYKRQGLPNESWKISKINSNYEFCDTYPAIIVVPTSVKDDDLSKVAAFRAKGRVPVLSWIHPESQATITRCSQPLVGPNDKRCKEDEKYLQTIMDANAQSHKLIIFDARQNSVADTNKTKGGGYESESAYPNAELVFLEIHNIHVMRESLRKLKEIVYPSIDEARWLSNVDGTHWLEYIRMLLAGAVRIADKIESGKTSVVVHCSDGWDRTAQLTSLAMLMLDSYYRTIKGFETLVEKEWISFGHRFALRVGHGNDNHADADRSPIFLQFVDCVWQMTRQFPSAFEFNELFLITILDHLYSCLFGTFLCNCEQQRFKEDVYTKTISLWSYINSQLDEFSNPFFVNYENHVLYPVASLSHLELWVNYYVRWNPRMRPQMPIHQNLKELLAVRAELQKRVEGLQREVATRAVSSSSERGSSPSHSATSVHTSV

SEQ ID NO: 59792 - protein, 847 aa, Homo sapiens
MSSEEDKSVEQPQPPPPPPEEPGAPAPSPAAADKRPRGRPRKDGASPFQRARKKPRSRGKTAVEDEDSMDGLETTETETIVETAEIKEQSAEEDAEAEVDNSKQLIPTLQRSVSEESANSLVSVGVEAKISEQLCAFCYCGEKSSLGQGDLKQFRITPGFILPWRNQPSNKKDIDDNSNGTYEKMQNSAPRKQRGQRKERSPQQNIVSCVSVSTQTASDDQAGKLWDELSLVGLPDAIDIQALFDSTGTCWAHHRCVEWSLGVCQMEEPLLVNVDKAVVSGSTERCAFCKHLGATIKCCEEKCTQMYHYPCAAGAGTFQDFSHIFLLCPEHIDQAPERSKEDANCAVCDSPGDLLDQFFCTTCGQHYHGMCLDIAVTPLKRAGWQCPECKVCQNCKQSGEDSKMLVCDTCDKGYHTFCLQPVMKSVPTNGWKCKNCRICIECGTRSSSQWHHNCLICDNCYQQQDNLCPFCGKCYHPELQKDMLHCNMCKRWVHLECDKPTDHELDTQLKEEYICMYCKHLGAEMDRLQPGEEVEIAELTTDYNNEMEVEGPEDQMVFSEQAANKDVNGQESTPGIVPDAVQVHTEEQQKSHPSESLDTDSLLIAVSSQHTVNTELEKQISNEVDSEDLKMSSEVKHICGEDQIEDKMEVTENIEVVTHQITVQQEQLQLLEEPETVVSREESRPPKLVMESVTLPLETLVSPHEESISLCPEEQLVIERLQGEKEQKENSELSTGLMDSEMTPTIEGCVKDVSYQGGKSIKLSSETESSFSSSADISKADVSSSPTPSSDLPSHDMLHNYPSALSSSAGNIMPTTYISVTPKIGMGKPAITKRKFSPGRPRSKQVG

SEQ ID NO: 59793 - protein, 177 aa, Homo sapiens
MDLYSTPAAALDRFVARRLQPRKEFVEKARRALGALAAALRERGGRLGAAAPRVLKTVKGGSSGRGTALKGGCDSELVIFLDCFKSYVDQRARRAEILSEMRASLESWWQNPVPGLRLTFPEQSVPGALQFRLTSVDLEDWMDVSLVPAFNVLGEGFLDHSRVGGKRSLGTTQDFQF

SEQ ID NO: 59794 - protein, 216 aa, Homo sapiens
MSGGPMGGRPGGRGAPAVQQNIPSTLLQDHENQRLFEMLGRKCLTLATAVVQLYLALPPGAEHWTKEHCGAVCFVKDNPQKSYFIRLYGLQAGRLLWEQELYSQLVYSTPTPFFHTFAGDDCQAGLNFADEDEAQAFRALVQEKIQKRNQRQSGDRRQLPPPPTPANEERRGGLPPLPLHPGGDQGGPPVGPLSLGLATVDIQNPDITSSRYRGLP

SEQ ID NO: 59795 - protein, 232 aa, Homo sapiens
MRLPWELLVLQSFILCLADDSTLHGPIFIQEPSPVMFPLDSEEKKVKLNCEVKGNPKPHIRWKLNGTDVDTGMDFRYSVVEGSLLINNPNKTQDAGTYQCTATNSFGTIVSREAKLQFAYLDNFKTRTRSTVSVRRGQGMVLLCGPPPHSGELSYAWIFNEYPSYQDNRRFVSQETGNLYIAKVEKSDVGNYTCVVTNTVTNHKVLGPPTPLILRNDVQYQLLSGEELMESQ

SEQ ID NO: 59796 - protein, 435 aa, Homo sapiens
MGSLLALLALLLLWGAVAEGPAKKVLTLEGDLVLGGLFPVHQKGGPAEDCGPVNEHRGIQRLEAMLFALDRINRDPHLLPGVRLGAHILDSCSKDTHALEQALDFVRASLSRGADGSRHICPDGSYATHGDAPTAITGVIGGSYSDVSIQVANLLRLFQIPQISYASTSAKLSDKSRYDYFARTVPPDFFQAKAMAEILRFFNWTYVSTVASEGDYGETGIEAFELEARARNICVATSEKVGRAMSRAAFEGVVRALLQKPSARVAVLFTRSEDARELLAASQRLNASFTWVASDGWGALESVVAGSEGAAEGAITIELASYPISDFASYFQSLDPWNNSRNPWFREFWEQRFRCSFRQRDCAAHSLRAVPFEQESKIMFVVNAVYAMAHALHNMHRALCPNTTRLCDAMRPVNGRRLYKDFVLNVKFDGDLKVS

SEQ ID NO: 59797 - protein, 123 aa, Homo sapiens
MDHTDNELQGTNSSGSLGGLDVRRRIPIKLISKQANKAKPAPRTQRTINRMPAKAPPGDEEGFDYNEEERYDCKGGELFANQRRFPGHLFWDFQINILGEKDDTPVHFCDKCGLPIKIYGRML

SEQ ID NO: 59798 - protein, 57 aa, Homo sapiens
MSFFPELYFNVDNGYLEGLVRGLKAGVLSQADYLNLVQCETLEGMDGATRDARGTCP

SEQ ID NO: 59799 - protein, 838 aa, Homo sapiens
MPTAESEAKVKTKVRFEELLKTHSDLMREKKKLKKKLVRSEENISPDTIRSNLHYMKETTSDDPDTIRSNLPHIKETTSDDVSAANTNNLKKSTRVTKNKLRNTQLATENPNGDASVEEDKQGKPNKKVIKTVPQLTTQDLKPETPENKVDSTHQKTHTKPQPGVDHQKSEKANEGREETDLEEDEELMQAYQCHVTEEMAKEIKRKIRKKLKEQLTYFPSDTLFHDDKLSSEKRKKKKEVPVFSKAETSTLTISGDTVEGEQKKESSVRSVSSDSHQDDEISSMEQSTEDSMQDDTKPKPKKTKKKTKAVADNNEDVDGDGVHEITSRDSPVYPKCLLDDDLVLGVYIHRTDRLKSDFMISHPMVKIHVVDEHTGQYVKKDDSGRPVSSYYEKENVDYILPIMTQPYDFKQLKSRLPEWEEQIVFNENFPYLLRGSDESPKVILFFEILDFLSVDEIKNNSEVQNQECGFRKIAWAFLKLLGANGNANINSKLRLQLYYPPTKPRSPLSVVEAFEWWSKCPRNHYPSTLYVTVRGLKVPDCIKPSYRSMMALQEEKGKPVHCERHHESSSVDTEPGLEESKEVIKWKRLPGQACRIPNKHLFSLNAGERGCFCLDFSHNGRILAAACASRDGYPIILYEIPSGRFMRELCGHLNIIYDLSWSKDDHYILTSSSDGTARIWKNEINNTNTFRVLPHPSFVYTAKFHPAVRELVVTGCYDSMIRIWKVEMREDSAILVRQFDVHKSFINSLCFDTEGHHMYSGDCTGVIVVWNTYVKINDLEHSVHHWTINKEIKETEFKGIPISYLEIHPNGKRLLIHTKDSTLRIMDLRMRTSSHVF

SEQ ID NO: 59800 - protein, 205 aa, Homo sapiens
MEAARRSLCFRLEQGYTSRGSPLSPQSSIDSELSTSELEDDSISMGYKLQDLTDVQIMARLQEESLRQDYASTSASVSRHSSSVSLSSGKKGTCSDQEYDQYSLEDEEEFDHLPPPQPRLPRCSPFQRGIPHSQTFSSIRECRRSPSSQYFPSNNYQQQQYYSPQAQTPDQQPNRTNGDKLRRSMPNLARMPSTTAISSNISSPV

SEQ ID NO: 59801 - protein, 77 aa, Homo sapiens
  MOD_RES (1)..(1): Any amino acid
XKKFQFLMFRLFSEARQPLSEEDVASLSWRPLHLPSADWQRAALSLWTHRTFREVLKEEDVHLVMVMCTCSPSHLRG

SEQ ID NO: 59802 - protein, 190 aa, Homo sapiens
MKQIFFLDDSGPPFGHMVLALGGYLGGFDGNFLWNRIGAEYSSNVPVWSLRLLPALAGALSVPMAYQIVLELHFSHCAAMGAALLMLIENALITQSRLMLLESVLIFFNLLAVLSYLKFFNCQKHSLPLWAPRPNHVQCLPGQLRGRTSSDHSGSATGGGLWVPGHSEERLWETCALLASFPPGHLPHDI

SEQ ID NO: 59803 - protein, 419 aa, Homo sapiens
  MOD_RES (1)..(1): Any amino acid
XSKPRASSLLPESTSRRSGPSDGPTAPYQPRRSTVTWDTALMVTALPSSAPRPHQSELELKFDMALRAGAAPTLGHRTLPLLPSLRASLAEIAGRLGPFGFFGTTLSPLRNFSGLSPPGETTSTSSASGVSGSLGFLGTTLSLPPYSLERKLSSPILACRRAAGPSSSACPRATRLRCCREAGSLGPQTRSPWGAPSLAGTRSCCSCARWQGQAQTSYSRAEVAGASKARRPTRPRPRLPLPAAITPWTSARPPQSTCDAASRRPSAARPCLRLASSRALPSRTLCLGSDSTAPPRWGPGAGPVRDQGRPLAPLRPRSSPPLGLGPQAAASHLARSADSRGTARPCCCVPAPTGPRAALWSASSVPRGPQEAAPASRPQDPTRPCPHPLATPQSLLLSCRPRRPCCRSSSWTPADRSTS

SEQ ID NO: 59804 - protein, 246 aa, Homo sapiens
MASAGRSEGTAGGGAGPEEPRREEGRAGLSPSSPPGSHSMRYFYTSVSRPGRGEPRFISVGYVDDTQFVRFDSDAASPREEPRAPWIEQEGPEYWDRNTQIYKAQAQTDRESLRNLRGYYNQSEAGSHTLQSMYGCDVGPDGRLLRGHDQYAYDGKDYIALNEDLRSWTAADTAAQITQRKWEAAREAEQRRAYLEGECVEWLRRYLENGKDKLERADPPKTHVTHHPISDHEATLRCWALGFYPA

SEQ ID NO: 59805 - protein, 842 aa, Homo sapiens
MSHPGVTTVMAVEDSTLQVVVRVRPPTPRELDSQRRPVVQVVDERVLVFNPEEPDGGFPGLKWGGTHDGPKKKGKDLTFVFDRVFGEAATQQDVFQHTTHSVLDSFLQGYNCSVFAYGATGAGKTHTMLGREGDPGIMYLTTVELYRRLEARQQEKHFEVLISYQEVYNEQIHDLLEPKGPLAIREDPDKGVVVQGLSFHQPASAEQLLEILTRGNRNRTQHPTDANATSSRSHAIFQIFVKQQDRVPGLTQAVQVAKMSLIDLAGSERASSTHAKGERLREGANINRSLLALINVLNALADAKGRKTHVPYRDSKLTRLLKDSLGGNCRTVMIAAISPSSLTYEDTYNTLKYADRAKEIRLSLKSNVTSLDCHISQYATICQQLQAEVAALRKKLQVYEGGGQPPPQDLPGSPKSGPPPEHLPSSPLPPHPPSQPCTPELPAGPRALQEESLGMEAQVERAMEGNSSDQEQSPEDEDEGPAEEVPTQMPEQNPTHALPESPRLTLQPKPVVGHFSARELDGDRSKQLALKVLCVAQRQYSLLQAANLLTPDMITEFETLQQLVQEEKIEPGAEALRTSGLARGAPLAQELCSESIPVPSPLCPEPPGYTGPVTRTMARRLSGPLHTLGIPPGPNCTPAQGSRWPMEKKRRRPSALEADSPMAPKRGTKRQRQSFLPCLRRGSLPDTQPSQGPSTPKGERASSPCHSPRVCPATVIKSRVPLGPSAMQNCSTPLALPTRDLNATFDLSEEPPSKPSFHECIGWDKIPQELSRLDQPFIPRAPVPLFTMKGPKPTSSLPGTSACKKKRVASSSVSHGRSRIARLPSSTLKRPAGPLVLPGDWH

SEQ ID NO: 59806 - protein, 240 aa, Homo sapiens
  MOD_RES (1)..(1): Any amino acid
XADRAQKHGMDEFISSNPCNFDHASLFEMVQRLTLDHRLNDSYSCLGWFSPGQVFVLDEYCARNGVRGCHRHLCYLRDLLERAENGAMIDPTLLHYSFAFCASHVHGNSQQMHVYLSGLPPNTDPEGSKTPSPPEPEAKKDTKKESKKRKDSKTQANQELKRPDGIGTVTVEEKERFEEIKERLRVLLENQITHFRYCFPFGRPEGALKATLSLLERVLMKDIVTPVPQEEVKTVIRKCL

SEQ ID NO: 59807 - protein, 223 aa, Homo sapiens
MGGAVVDEGPTGVKAPDGGWGWAVLFGCFVITGFSYAFPKAVSVFFKELIQEFGIGYSDTAWISSILLAMLYGTGPLCSVCVNRFGCRPVMLVGGLFASLGMVAASFCRSIIQVYLTTGVITGLGLALNFQPSLIMLNRYFSKRRPMANGLAAAGSPVFLCALSPLGQLLQDRYGWRGGFLILGGLLLNCCVCAALMRPLVVTAQPGSGPPRPSRRLLDLSVF

SEQ ID NO: 59808 - protein, 156 aa, Homo sapiens
MENLMTSSTLPPLFADEDGSKESNDLATTGLNHPEVPYSSGATSSTNNPEFVEDLSQGQLLQSESSNAAEGNEQRHEDEQRSKRGGWSKGRKRKKPLRDSNAPKSPLTGYVRFMNERREQLRAKRPEVPFPEITRMLGNEWSKLPPEEKQRYLDEA

SEQ ID NO: 59809 - protein, 192 aa, Homo sapiens
  MOD_RES (1)..(1): Any amino acid
XVEDLYVEGLPEGIPFRRPSTYGIPRLERILLAKERIRFVIKKHELLNSTREDLQLDKPASGVKEEWYARITKLRKMVDQLFCKKFAEALGSTEAKAVPYQKFEAHPNDLYVEGLPENIPFRSPSWYGIPRLEKIIQVGNRIKFVIKRPELLTHSTTEVTQPRTNTPVKEDWNVRITKLRKQVEEIFNLKFA

SEQ ID NO: 59810 - protein, 211 aa, Homo sapiens
MYGPRAASRNKETSAGPVAVMGKDYYKILGIPSGANEDEIKKAYRKMALKYHPDKNKEPNAEEKFKEIAEAYDVLSDPKKRGLYDQYGEEGLKTGGGTSGGSSGSFHYTFHGDPHATFASFFGGSNPFDIFFASSRSTRPFSGFDPDDMDVDEDEDPFGAFGRFGFNGLSRGPRRAPEPLYPRRKVQDPPVVHELRVSLEEIYHGSTKRMK

SEQ ID NO: 59811 - protein, 231 aa, Homo sapiens
MAYSWQTDPNPNESHEKQYEHQEFLFVNQPHSSSQVSLGFDQIVDEISGKIPHYESEIDENTFFVPTAPKWDSTGHSLNEAHQISLNEFTSKSRELSWHQVSKAPAIGFSPSVLPKPQNTNKECSWGSPIGKHHGADDSRFSILAPSFTSLDKINLEKELENENHNYHIGFESSIPPTNSSFSSDFMPKEENKRSGHVNIVEPSLMLLKGSLQPGMWESTWQKNIEVVPFS

SEQ ID NO: 59812 - protein, 534 aa, Homo sapiens
MLCCWSPEKPAYPARAPAWGCLLRVLGWFNSPRTSSETERSNDSGNGEHKSERKSPEENLQGAVKSFCTSASGAPLGPKGDGHYPWSCPVTHTREKIYAICSDYAFLNQATSIYKTPNPSRSPCLPDSTSLSAGNNSSRYIGIPTSTSEIIYNEENSLENLSNSLGKLPLAWEIDKSEFDGVTTNSKHKSGNAKKQVSKRKTSDKKGRYQKECPQHSPLEDIKQRKVLDLRRWYCISRPQYKTSCGISSLISCWNFLYSTMGAGNLPPITQEEALHILGFQPPFEDIRFGPFTGNTTLMRWFRQINDHFHVKGCSYVLYKPHGKNKTAGETASGALSKLTRGLKDESLAYIYHCQNHYFCPIGFEATPVKANKAFSRGPLSPQEVEYWILIGESSRKHPAIHCKKWADIVTDLNTQNPEYLDIRHLERGLQYRKTKKVGGNLHCIIAFQRLNWQRFGLWNFPFGTIRQESQPPTHAQGIAKSESEDNISKKQHGRLGRSFSASFHQDSAWKKMSSIHERRNSGYQGYSDYDGND

SEQ ID NO: 59813 - protein, 542 aa, Homo sapiens
ALFKQKHQSMVKKTGDWKKHVETNSRLMKKFEESRAELEKVLRIAQEGLEEKGDPEELLRRHTEFFSQLDQRVLNAFLKACDELTDILPEQEQQGLQEAVRKLHKQWKDLQGEAPYHLLHLKIDVEKNRFLASVEECRTELDRETKLMPQEGSEKIIKEHRVFFSDKGPHHLCEKRLQLIEELCVKLPVRDPVRDTPGTCHVTLKELRAAIDSTYRKLMEDPDKWKDYTSRFSEFSSWISTNETQLKGIKGEAIDTANHGEVKRAVEEIRNGVTKRGETLSWLKSRLKVLTEVSSENEAQKQGDELAKLSSSFKALVTLLSEVEKMLSNFGDCVQYKEIVKNSLEELISGSKEVQEQAEKILDTENLFEAQQLLLHHQQKTKRISAKKRDVQQQIAQAQQGEGGLPDRGHEELRKLESTLDGLERSRERQERRIQVTLRKWERFETNKETVVRYLFQTGSSHERFLSFSSLESLSSELEQTKEFSKRTESIAVQAENLVKEASEIPLGPQNKQLLQQQAKSIKEQVKKLEDTLEEEYVIDKS

SEQ ID NO: 59814 - protein, 57 aa, Homo sapiens
MDTVGTFEMAKVLCKFSLFTAVHKHYSLVQWQEFAGQNPDCLEHLAASSGTGSSDFE

SEQ ID NO: 59815 - protein, 67 aa, Homo sapiens
QRPSEAKEIKLYAQIPPIEKMDASLSMLANCEKLSLSTNCIEKIANLNGLRGSRGHIRRTVDLLQFY

SEQ ID NO: 59816 - protein, 29 aa, Homo sapiens
MNERREQLRAKRPEVPFPEITRMLGNEWS

SEQ ID NO: 59817 - protein, 180 aa, Homo sapiens
MAAIYGEEWCVIDDCAKIFCIRISDDIDDPKWTLCLQVMLPNEYPGTAPPIYQLNAPWLKGQERADLSNSLEEIYIQNIGESILYLWVEKIRDVLIQKSQMTEPGPDVKKKTEEEDVECEDDLILACQPESSLKALDFDISETRTEVEVEELPPIDHGIPITDRRSTFQAHLAPVVCPKQ

SEQ ID NO: 59818 - protein, 129 aa, Homo sapiens
MDPLQKRNPASPSKSSPMTAAETSQEGPAPSQPSYSEQPMMGLSNLSPGPGPSQAVPLPEGLLRQRYREEKTLEERRWERLEFLQRKKAFLRHVRRRHRDHMAPYAVGREARISPLGDRSQNRFRCECR

SEQ ID NO: 59819 - protein, 38 aa, Homo sapiens
MTLPSPPTLPAQDGKKEARGPEPPLETPLAAEDWETEY

SEQ ID NO: 59820 - protein, 157 aa, Homo sapiens
MSRRRISCKDLGHADCQGWLYKKKEKGSFLSNKWKKFWVILKGSSLYWYSNQMAEKADGFVNLPDFTVERASECKKKHAFKISHPQIKTFYFAAENVQEMNVWLNKLGSAVIHQESTTKDEECYSESEQEDPEIAAETPPPPHASQTQSLTAQQASS

SEQ ID NO: 59821 - protein, 120 aa, Homo sapiens
MFKLRNSSSPATGEDPEGSDILGCSPHPCPGLTDGHPGHLHGDNCTGEGGHFLLDPWLFCGHHCLHGDPQRCLHCLQQQHLRHDRLLSYEELPGTDIRGPAMSWGCKDEQAPVPSELMAQ

SEQ ID NO: 59822 - protein, 54 aa, Homo sapiens
MLPAGEIGASPAAPCCSESGDERKNLEEKSDINVTVLIGSKQVSEGTYNFIRNS

SEQ ID NO: 59823 - protein, 125 aa, Homo sapiens
MRRSAAPSQLQGNSFKKPKFIPPGRSNPGLNEEITKLNPDIKLFEGVAINNTFLPSQNDLRICSLNLPSEESTREINNRDNCSGKYCFEAPTLATLDPPHTVHSAPKEVAVSKEQEEKSDSLVKY

SEQ ID NO: 59824 - protein, 184 aa, Homo sapiens
  MOD_RES (1)..(1): Any amino acid
XDFPATNWDDKSIRQAFIRKVFLVLTLQLSVTLSTVSVFTFVAESVLTASLSYMVGMIASFYNTEAVIMAVGITTAVCFTVVIFSMQTRYDFTSCMGVLLVSMVVLFIFAILCIFIRNRILEIVYASLGALLFTCFLAVDTQLLLGNKQLSLSPEEYVFAALNLYTDIINIFLYILTIIGRAKE

SEQ ID NO: 59825 - protein, 144 aa, Homo sapiens
MDFVRLARLFARARPMGLFILQHLDPCRARWAGGREGLMRPMWAPFSSSSSQLPLGQERQENTGSLGSDPSHSNSTATQEEDEEEEESFGTLSDKYSSRRLFRKSAAQFHNLRFGERRDEQMEPEPKLWRGRRNTPYWYFLQCK

SEQ ID NO: 59826 - protein, 427 aa, Homo sapiens
  MOD_RES (1)..(1): Any amino acid
XQYKQEAPKTPPHIILHYCVFKTTWDWIILILTFYTAILVPYNVSFKTRQNNVAWLVVDSIVDVIFLVDIVLNFHTTFVGPAGEVISDPKLIRMNYLKTWFVIDLLSCLPYDVINAFENVDEGISSLFSSLKVVRLLRLGRVARKLDHYIEYGAAVLVLLVCVFGLAAHWMACIWYSIGDYEIFDEDTKTIRNNSWLYQLAMDIGTPYQFNGSGSGKWEGGPSKNSVYISSLYFTMTSLTSVGFGNIAPSTDIEKIFAVAIMMIGSLLYATIFGNVTTIFQQMYANTNRYHEMLNSVRDFLKLYQVPKGLSERVMDYIVSTWSMSRGIDTEKVLQICPKDMRADICVHLNRKVFKEHPAFRLASDGCLRALAMEFQTVHCAPGDLIYHAGESVDSLCFVVSGSLEVIQDDEVVAILDCVPEDQRCET

SEQ ID NO: 59827 - protein, 147 aa, Homo sapiens
MEWDLVCEQKGLNRAASTFFFAGVLVGAVAFGYLSDRFGRRRLLLVAYVSTLVLGLASAASVSYVMFAITRTLTGSALAGFTIIVMPLGEAELEWLDVEHRTVAGVLSSTFWTGGVMLLALVGYLIRDWRWLLLAVTLPCAPGILSL

SEQ ID NO: 59828 - protein, 17 aa, Homo sapiens
  MOD_RES (1)..(1): Any amino acid
XALPSLPAGSGKKKFDA

SEQ ID NO: 59829 - protein, 166 aa, Homo sapiens
MPTTIEREFEELDTQRRWQPLYLEIRNESHDYPHRVAKFPENRNRNRYRDVSPYDHSRVKLQNAENDYINASLVDIEEAQRSYILTQGPLPNTCCHFWLMVWQQKTKAVVMLNRIVEKESVKCAQYWPTDDQEMLFKETGFSVKLLSEDVKSYYTVHLLQLENINV

SEQ ID NO: 59830 - protein, 109 aa, Homo sapiens
MEQPKGVDWTVIILTCQYKDSVQVFQRELEVRQKREQIPAGTLLLAVEDPEKRVGSGGATLNALLVAAEHLSARAGFTVVTSDVLHSAWILILHMGRDFPFDDCGRAFT

SEQ ID NO: 59831 - protein, 159 aa, Homo sapiens
MTPEFDEEVVFENSPLYQYLQDLGHTDFEICSSLSPKTEKCTTEGQQKPPTRVLPKDIGFRLDSLHTILQQEVLLQEDVELIELLDPSILSAGQSQQQENGHLPTLCSLATPNIWDLSMLFAFISLLVMLPTWWIVSSWLVWGVILFVYLVIRALRLWR

SEQ ID NO: 59832 - protein, 69 aa, Homo sapiens
  MOD_RES (1)..(1): Any amino acid
XSEGEESEEEERDGDVDQGFREQLMTVLQAGKPPARPLLAGHENPGSPAPQVGEEGCQGDPQCHPEPHQ

SEQ ID NO: 59833 - protein, 141 aa, Homo sapiens
MHPDGTIDGTKDENSDYTLFNLIPVGLRVVAIQGVKASLYVAMNGEGYLYSSDVFTPECKFKESVFENYYVIYSSTLYRQQESGRAWFLGLNKEGQIMKGNRVKKTKPSSHFVPKPIEVCMYREPSLHEIGEKQGRSRKSS

SEQ ID NO: 59834 - protein, 131 aa, Homo sapiens
  MOD_RES (1)..(1): Any amino acid
XACGGVIRNATTGRIVSPGFPGNYSNNLTCHWLLEAPEGQRLHLHFEKVSLAEDDDRLIIRNGDNVEAPPVYDSYEVEYLPIEGLLSSGKHFFVELSTDSSGAAAGMALRYEGEPAGASLGVAGPRGWARA

SEQ ID NO: 59835 - protein, 185 aa, Homo sapiens
  MOD_RES (1)..(1): Any amino acid
XGRHSRVGSDPVLMRKHRRHDLPLEGAKVFSNGHLGSEEYDVPPRLSPPPPVTTLLPSIKCTGPLANSLSEKTRDPVEEDDDEYKIPSSHPVSLNSQPSHCHNVKPPVRSCDNGHCMLNGTHGPSSEKKSNIPDLSIYLKGDVFDSASDPVPLPPARPPTRDNPKHGSSLNRTPSDYDLLIPPLG

SEQ ID NO: 59836 - protein, 34 aa, Homo sapiens
DCVDPWLMLQQTCPLCKFNVLDGGSPMARKVDGL

SEQ ID NO: 59837 - protein, 192 aa, Homo sapiens
MVEQLDTAVITPAMLEEEEQLEAAGLERERKMLEKARMSWDRESTEIRYRRLQHLLEKSNIYSKFLLTKMEQQQLEEQKKKEKLERKKESLKVKKGKNSIDASEEKPVMRKKRGREDESYNISEVMSKEEILSVAKKNKKENEDENSSSTNLCVEDLQKNKDSNSIIKDRLSETVRQNTKFFFDPVRKCNGQ

SEQ ID NO: 59838 - protein, 134 aa, Homo sapiens
MFYGTHFIMSPPTKSKLKRQSQLLSSMLSRTLSYKYRDLDSTFSSLGASDDPAELSTQLSAPGVLKVFGDSVCTGTHYKSVLATGTSSARELVKEALERYALDPRQAGQYVLCDVVGQAGDAGQRWQARCFRVF

SEQ ID NO: 59839 - protein, 55 aa, Homo sapiens
MNLERVSNEEKLNLCRKYYLGGFAFLPFLWLVNIFWFFREAFLVPAYTEQSQIKG

SEQ ID NO: 59840 - protein, 99 aa, Homo sapiens
  MOD_RES (1)..(1): Any amino acid
XMYYYNGKATESCPVAQAGVQWHDLGSLQPPSPRFKQFSCLSLLSSWDYRSMLHQQALPTTIGTRQAILPPNQQPALSLAPSSCKMAITAVTLGAPPVG

SEQ ID NO: 59841 - protein, 49 aa, Homo sapiens
SALGTESPRFLDRPDFFDYPDSDQARLLAVAQFIGEKPIVFINSGTAKR

SEQ ID NO: 59842 - protein, 78 aa, Homo sapiens
  MOD_RES (1)..(1): Any amino acid
XEERPGAWFGFGFCGFGQELGSGRGRQVHSPSPLRAGVDICRVSASWSYTAFVTRMDSWAMGPWRQSWSHGCWRRCRA

SEQ ID NO: 59843 - protein, 350 aa, Homo sapiens
MWTPELAILRGFPTEAERQQWKQEGVVGSESGSFLQLLLEGNYEAIFLNSMTQNIFNSTTTAEEKIDSYLEKQVVTFLDYSTDLDTTERQQLIFLLGVSSLQLFVQSNWTGPPVDLHPQDFLSSVLFQQFSEVKGLDAFVLSLLTLDGESIYSLTSKPILLLLARIILVNVRHKLTAIQSLPWWTLRCVNIHQHLLEERSPLLFTLAENCIDQVMKLQNLFVDDSGRYLAIQFHLECAYVFLYYYEYRKAKDQLDIAKDISQLQIDLTGALGKRTRFQENYVAQLILDVRREGDVLSNCEFTPAPTPQEHLTKNLELNDDTILNDIKLADCEQFQMPDLCAEEIAIILGI

SEQ ID NO: 59844 - protein, 165 aa, Homo sapiens
MAEDEPDAKSPKTGGRAPPGGAEAGEPTTLLQRLRGTISKAVQNKVEGILQDVQKFSDNDKLYLYLQLPSGPTTGDKSSEPSTLSNEEYMYAYRWIRNHLEEHTDTCLPKQSVYDAYRKYCESLACCRPLSTANFGKIIREIFPDIKARRLGGRGQSKYCYSGIR

SEQ ID NO: 59845 - protein, 233 aa, Homo sapiens
  MOD_RES (1)..(1): Any amino acid
XNIETSGLPKKPEITPRSLPPKPTVSSGKPSVAPKPAANRASGEWDSGTENRLKVTSKEGLTPYPPLQEAGSIPVTKPELPKKPNPGLIRSVNPEIPGRGPLAESSDSGKKVPTPAPRPLLLKKSVSSENPTYPSAPLKPVTVPPRLAGASQAKAYKSLGEGPPANPPVPVLQSKPLVDIDLISFDDDVLPTPSGNLAEESVGSEMVLDHVEALPLTRELINNLFKRAEHKHN

SEQ ID NO: 59846 - protein, 182 aa, Homo sapiens
MVSGRFYLSCLLLGSLGSMCILFTIYWMQYWRGGFAWNGSIYMFNWHPVLMVAGMVVFYGGASLVYRLPQSWVGPKLPWKLLHAALHLMAFVLTVVGLVAVFTFHNHGRTANLYSLHSWLGITTVFLFACQWFLGFAVFLLPWASMWLRSLLKPIHVFFGAAILSLSIASVISGINEKLFFS

SEQ ID NO: 59847 - protein, 93 aa, Homo sapiens
LLISGECLLTATDTVDVAMPLNFTGGQLHSRMFQNFPTELLLSLAVEPLTANFHKWSLSVKDISIQYMVSSGIQRKHLMSGRIWMAFPMHLML

SEQ ID NO: 59848 - protein, 116 aa, Homo sapiens
  MOD_RES (1)..(1): Any amino acid
XVRVLESHWFVWITQMNHIPKEIGHEKHRDWLAATCNVEPSLFTNWFSGHLNFQIEHHLFPRMPRHNYSRVAPLVKSLCAKHGLSYEVKPFLTALVDIVRSLKKSGDIWLDAYLHQ

SEQ ID NO: 59849 - protein, 231 aa, Homo sapiens
MGVTVQSQGPGGKVVTCAHRYEKRQHVNTKQESRDIFGRCYVLSQNLRIEDDMDGGDWSFCDGRLRGHEKFGSCQQGVAATFTKDFHYIVFGAPGTYNWKGIVRVEQKNNTFFDMNIFEDGPYEVGGETEHDESLVPVPANSYLGFSLDSGKGIVSKDEITFVSGAPRANHSGAVVLLKRDMKSAHLLPEHIFDGEGLASSFGYDVAVVDLNKDGWQDIVIGAPQYFDRDG

SEQ ID NO: 59850 - protein, 207 aa, Homo sapiens
MAGQPGHMPHGGSSNNLCHTLGPVHPPDPQRHPNTLSFRCSLADFQIEKKIGRGQFSEVYKATCLLDRKTVALKKVQIFEMMDAKARQDCVKEIGLLKQLNHPNIIKYLDSFIEDNELNIVLELADAGDLSQMIKYFKKQKRLIPERTVWKYFVQLCSAVEHMHSRRVMHRDIKPANVFITATGVVKLGDLGLGRFFSSETTAAHSL

SEQ ID NO: 59851 - protein, 174 aa, Homo sapiens
MGLCVPFAVTTSFLSLGLEWDLNVRLHGQHLVQQLVLRTVRGYLETPQPEKALALSFHGWSGTGKNFVARMLVENLYRDGLMSDCVRMFIATFHFPHPKYVDLYKEQLMSQIRETQQLCHQTLFIFDEAEKLHPGLLEVLGPHLERRAPEGHRAESPWTIFLFLSNLRGDIINE

SEQ ID NO: 59852 - protein, 207 aa, Homo sapiens
MAQEVDTAQGAEMRRGAGAARGRASWCWALALLWLAVVPGWSRVSGIPSRRHWPVPYKRFDFRPKPDPYCQAKYTFCPTGSPIPVMEGDDDIEVFRLQAPVWEFKYGDLLGHLKIMHDAIGFRSTLTGKNYTMEWYELFQLGNCTFPHLRPEMDAPFWCNQGAACFFEGIDDVHWKENGTLVQVATISEISCALKNGIKLAELGFLL

SEQ ID NO: 59853 - protein, 62 aa, Homo sapiens
TLSPQEEPAPLPALPVPLPDPSNEGKPQLVGRFQVTSSKEPAEPLPLQPTSPTLSGSPKPST

SEQ ID NO: 59854 - protein, 351 aa, Homo sapiens
TTEIIKCPQPKTLDEFTIIQNLQPQYQFRDYFIATCKQGYQLIEGNQVLHSFTAVCQDDGTWHRAMPRCKRVYTCTAQGIWKNEQKGEKIPRCLPVCGKPVNPVEQRQRIIGGQKAKMGNFPWQVFTNIHGRGGGALLGDRWILTAAHTLYPKEHEAQSNASLDVFLGHTNVEELMKLGNHPIRRVSVHPDYRQDESYNFEGDIALLELENSVTLGPNLLPICLPDNDTFYDLGLMGYVSGFGVMEEKIAHDLRFVRLPVANPQACENWLRGKNRMDVFSQNMFCAGHPSLKQDACQGDSGGVFAVRDPNTDRWVATGIVSWGIGCSRGYGFYTKVLNYVDWIKKEMEEED

SEQ ID NO: 59855 - protein, 227 aa, Homo sapiens
  MOD_RES (1)..(1): Any amino acid
XGADNPKAVPRLRRDTQQGMYDAVLHVGDFAYNLDQDNARVGDRFMRLIEPVAASLPYMTCPGNHEERYNFSNYKARFSMPGDNEGLWYSWDLGPAHIISFSTEVYFFLHYGRHLVQRQFRWLESDLQKANKNRAARPWIITMGHRPMYCSNADLDDCTRHESKVRKGLQGKLYGLEDLFYKYGVDLQLWAHEHSYERLWPIYNYQDGKIVDDVWVVRPLFGRRMYL

SEQ ID NO: 59856 - protein, 70 aa, Homo sapiens
MFVLVEMVDTVRIPPWQFERKLNDSIAEELNKKLANKVVYNVGLCICLFDITKLEDAYVFPGDGASHTKG

SEQ ID NO: 59857 - protein, 165 aa, Homo sapiens
MSVGFIGAGQLAFALAKGFTAAGVLAAHKIMASSPDMDLATVSALRKMGVKLTPHNKETVQHSDVLFLAVKPHIIPFILDEIGADIEDRHIVVSCAAGVTISSIEKKLSAFRPAPRVIRCMTNTPVVVREGATVYATGTHAQVEDGRLMEQLLSSVGFCTEVEED

SEQ ID NO: 59858 - protein, 81 aa, Homo sapiens
MEQQDQSMKEGRLTLVLALATLIAAFGSSFQYGYNVAAVNSPALLMQQFYNETYYGRTGEFMEDFPLTLLWSVTVSMFPFG

SEQ ID NO: 59859 - protein, 30 aa, Homo sapiens
  MOD_RES (1)..(1): Any amino acid
XDMDGVEMDETDREVEYFKSTLGGRGGWIT

SEQ ID NO: 59860 - protein, 111 aa, Homo sapiens
MARQKMSEIFPLTEELWLEWLHDEISMAQDGLDREHVYDLFEKAVKDYICPNIWLEYGQYSVGGIGQKGGLEKVRSVFERALSSVGLHMTKGLALWEAYREFESAIVEAAR

SEQ ID NO: 59861 - protein, 103 aa, Homo sapiens
MQSTSNHLWLLSDILGQGATANVFRGRHKKTGDLFAIKVFNNISFLRPVDVQMREFEVLKKLNHKNIVKLFAIEEETTTRHKVLIMEFCPCGSLYTVLEEPSN

SEQ ID NO: 59862 - protein, 56 aa, Homo sapiens
ARYVQCARAAGVPCRCFLFTATLEQARHNNRFREMTDSSHIPVSDMVMYGYRYCWG

SEQ ID NO: 59863 - protein, 225 aa, Homo sapiens
  MOD_RES (1)..(1): Any amino acid
XGPSERTLSINEEEPEGGFSKWNATNKDPEELFKQEMPPRCSSPTVGPPPLPQKSLETRAQKKLSCSLEDLRSESVDKCMDGNQPFPVLEPKDSPFLAEHKYPTLPGKLSGATPNGEAAKSPPTICQPDATGSSLLRLNRGRSVSAPVLGDTESGWDDTAVVNDLSSTSSGTESGPQSPLTPDGKRNPKGIKKFWGKIRRTQSGNFYTDTLGMAEFRRGGLRATA

SEQ ID NO: 59864 - protein, 263 aa, Homo sapiens
MKGWGWLALLLGALLGTAWARRSQDLHCGACRALVDELEWEIAQVDPKKTIQMGSFRINPDGSQSVVEVPYARSEAHLTELLEEICDRMKEYGEQIDPSTHRKNYVRVVGRNGESSELDLQGIRIDSDISGTLKFACESIVEEYEDELIEFFSREADNVKDKLCSKRTDGGTSKNRDRKGKMDVTNSAEKSRRSPAMALLTAAARLLGTKNASCLVLAARHASASSTNLKDILADLIPKEQARIKTFRQQHGKTVVGQITVDM

SEQ ID NO: 59865 - protein, 297 aa, Homo sapiens
MSVQVAAPGSAGLGPERLSPEELVRQTRQVVQGLEALRAEHHGLAGHLAEALAGQGPAAGLEMLEEKQQVVLLALSAHVGALEAEKQRLRSQARRLAQENVWLREELEETQRRLRASEESVAQLEEEKRHLEFLGQLRQYDPPAESQQSESPPRRDSLASLFPSEEEERKGPEAAGAAAAQQGGYEIPARLRTLHNLVIQYAGQGRYEVAVPLCRQALEDLERSSGHCHPDVATMLNILALVYRDQNKYKEATDLLHDALQIREQTLGPEHPAVAATLNNLAVLYGKRGRYREAEPL

SEQ ID NO: 59866 - protein, 107 aa, Homo sapiens
MASASSSRAGVALPFEKSQLTLKVVSAKPKVHNRQPRINSYVEVAVDGLPSETKKTGKRIGSSELLWNEIIILNVTAQSHLDLKVWSCHTLRNELLGTASVNLSNVL

SEQ ID NO: 59867 - protein, 68 aa, Homo sapiens; identical to SEQ ID NO: 57933

SEQ ID NO: 59868 - protein, 174 aa, Homo sapiens
  MOD_RES (1)..(1): Any amino acid
XIDAGTQIFFSYAIGLGALTALGSYNRFNNNCYNGTSFFAGFVVFSILGFMAAEQGVHISKVAESGPGLAFIAYPRAVTLMPVAPLWAALFFFMLLLLGLDSQFVGVEGFITGLLDLLPASYYFRFQREISVALCCALCFVIDLSMVTDGGMYVFQLFDYYSASGTTLLWQAFW

SEQ ID NO: 59869 - protein, 17 aa, Homo sapiens
NKVREQGARGVSRPAGA

SEQ ID NO: 59870 - protein, 71 aa, Homo sapiens
MSENAVRQNGQLVRNDSLWHRSDSAPRNKISRFQAPISAPEYTYGISNIDTTIEGTSDDLTVVDAASLRRQ

SEQ ID NO: 59871 - protein, 210 aa, Homo sapiens
MVGEDADLPCHLFPTMSAETMELRWVSSSLRQVVNVYADGKEVEDRQSAPYRGRTSILRDGITAGKAALRIHNVTASDSGKYLCYFQDGDFYEKALVELKVAEWRKIQYMARGEKSLAYHEWKMALFKPADVILDPDTANAILLVSEDQRSVQRAEEPRDLPDNPERFEWRYCVLGCENFTSGRHYWEVEVGDRKEWHIGVCSKNVERKK

SEQ ID NO: 59872 - protein, 155 aa, Homo sapiens
  MOD_RES (1)..(1): Any amino acid
XQEETLREQTLLDASGNMHNSWITTGEDSGVGETSKRPFSHDNADFGKAASAGEQLELNFLIISNKKSGRIKQYLHSPPCQPLMTSLQLSEKLKLTYEEKCEIEESQLKFLRNKNHGRARWLTPVIPALWEAEAGESRGQEIETILANMVKPRFY

SEQ ID NO: 59873 - protein, 111 aa, Homo sapiens
MEPQVSNGPTSNTSNGPSSNNRNCPSPMQTGATTDDSKTNLIVNYLPQNMTQEEFRSLFGSIGEIESCKLVRDKITGQSLGYGFVNYIDPKDAEKAINTLNGLRLQTKTIK

SEQ ID NO: 59874 - protein, 184 aa, Homo sapiens
MVDTEMPFWPTNFGISSVDLSVMEDHSHSFDIKPFTTVDFSSISTPHYEDIPFTRTDPVVADYKYDLKLQEYQSAIKVEPASPPYYSEKTQLYNKPHEEPSNSLMAIECRVCGDKASGFHYGVHACEGCKGFFRRTIRLKLIYDRCDLNCRIHKKSRNKCQYCRFQKCLAVGMSHNEELQKDSY

SEQ ID NO: 59875 - protein, 81 aa, Homo sapiens
MFTSEKGVVEEWLSEFKTLPETSLPNYATNLKDKSSLVSSLYKVIQEPQSEWRGAVASIYAAISPRTNLVLPCSLSQQKCA

SEQ ID NO: 59876 - protein, 151 aa, Homo sapiens
MGDEKDSWKVKTLDEILQEKKRRKEQEEKAEIKRLKNSDDRDSKRDSLEEGELRDHCMEITIRNSPYRREDSMEDRGEEDDSLAIKPPQQMSRKEKVHHRKDEKRKEKWKHARVKEREHERRKRHREEQDKARREWERQKRREMAREHSRR

SEQ ID NO: 59877 - protein, 33 aa, Homo sapiens
MASGRPEELWEAVVGAAERFRARTGTELVLLTA

SEQ ID NO: 59878 - protein, 365 aa, Homo sapiens
MRLHLLLLLALCGAGTTAAELSYSLRGNWSICNGNGSLELPGAVPGCVHSALFQQGLIQDSYYRFNDLNYRWVSLDNWTYSKEFKIPFEISKWQKVNLILEGVDTVSKILFNEVTIGETDNMFNRYSFDITNVVRDVNSIELRFQSAVLYAAQQSKAHTRYQVPPDCPPLVQKGECHVNFVRKEQCSFSWDWGPSFPTQGIWKDVRIEAYNICHLNYFTFSPIYDKSAQEWNLEIESTFDVVSSKPVGGQVIVAIPKLQTQQTYSIELQPGKRIVELFVNISKNITVETWWPHGHGNQTGYNMTVLFELDGGLNIEKSAKSWRLESKIKVSAELCSFRRLWERILPCPFQFLIIAGNPWLVDASL

SEQ ID NO: 59879 - protein, 178 aa, Homo sapiens
FFDNLGAILTYAVVGTLWNAFTTGAALWGLQQAGLVGLTLPSMPSRNSVAETSVTNLLRESGSGACLDLQVIDTVRSGRDREDAVMHHLLCGGLYKPRRRYKASCSRHFISEDAQERQDKEVFQQNMKRRLESFKSTKHNICFTKSKPRPRKTGRRKDGVANAEATNGKHRGLGFQDT

SEQ ID NO: 59880 - protein, 133 aa, Homo sapiens
MDRLGSFSNDPSDKPPCRGCSSYLMEPYIKCAECGPPPFFLCLQCFTRGFEYKKHQSDHTYEIMDVANQMCTKTKEECEKHYMKHFINNPLFASTLLNLKQAEEAKTADTAIPFHSTDDPPRPTFDSLLSRDM

SEQ ID NO: 59881 - protein, 111 aa, Homo sapiens
MDGPRQDATLDEEEDMVIIYNRVPKTASTSFTNIAYDLCAKNKYHVLHINTTKNNPVMSLQDQVRFVKNITSWKEMKPGFYHGHVSYLDFAKFGVKKKPIYINVIRDPIER

SEQ ID NO: 59882 - protein, 98 aa, Homo sapiens
  MOD_RES (1)..(1): Any amino acid
XMAYNTLMEVSASMLFRVQHHYNSHYEKFGDFVWRSEDELGPSLLESFMSLQDINLLERRPGRPQRPGNPLSNVSWRISEIAPTSHTDMSAGIKETAS

SEQ ID NO: 59883 - protein, 50 aa, Homo sapiens
MGNGLSDQTSILSNLPSFQSFHIVILGLDCAGKTTVLYRLQFNEFVNTVP

SEQ ID NO: 59884 - protein, 50 aa, Homo sapiens
MTSLLTTPSPREELMTTPILQPTEALSPEDGASTALIAVVITVVFLTLLS

SEQ ID NO: 59885 - protein, 183 aa, Homo sapiens
  MOD_RES (1)..(1): Any amino acid
XDWDGLRDSVPPFTPDFEGATDTCNFDLVEDGLTAMVSGGGETLSDIREGAPLGVHLPFVGYSYSCMALRDSEVPGPTPMELEAEQLLEPHVQAPSLEPSVSPQDETSTTRGRGSEPGPRGTRPAVAGADGVAAGRGSHRSLGLAYRRRFPCSCSPLFCLVPPPWAALGWWPTPANSPQSGAA

SEQ ID NO: 59886 - protein, 73 aa, Homo sapiens
MSLEDPFFVVRGEVQKAVNTARGLYQRWCELLQESAAVGREELDWTTNELRNGLRSIEWDLEDLEETIVSAHV

SEQ ID NO: 59887 - protein, 473 aa, Homo sapiens
MFLSSVGFSVVMMSIWPYLQKIDPTADTSFLGWVIASYSLGQMVASPIFGLWSNYRPRKEPLIVSILISVAANCLYAYLHIPASHNKYYMLVARGLLGIGAGNVAVVRSYTAGATSLQERTSSMANISMCQALGFILGPVFQTCFTFLGEKGVTWDVIKLQINMYTTPVLLSAFLGILNIILILAILREHRVDDSGRQCKSINFEEASTDEAQVPQGNIDQVAVVAINVLFFVTLFIFALFETIITPLTMDMYAWTQEQAVLYNGIILAALGVEAVVIFLGVKLLSKKIGERAILLGGLIVVWVGFFILLPWGNQFPKIQWEDLHNNSIPNTTFGEIIIGLWKSPMEDDNERPTGCSIEQAWCLYTPVIHLAQFLTSAVLIGLGYPVCNLMSYTLYSKILGPKPQGVYMGWLTASGSGARILGPMFISQVYAHWGPRWAFSLVCGIIVLTITLLGVVYKRLIALSVRYGRIQE

SEQ ID NO: 59888 - protein, 245 aa, Homo sapiens
MISLPGPLVTNLLRFLFLGLSALAPPSRAQLQLHLPANRLQAVEGGEVVLPAWYTLHGEVSSSQPWEVPFVMWFFKQKEKEDQVLSYINGVTTSKPGVSLVYSMPSRNLSLRLEGLQEKDSGPYSCSVNVQDKQGKSRGHSIKTLELNVLVPPAPPSCRLQGVPHVGANVTLSCQSPRSKPAVQYQWDRQLPSFQTFFAPALDVIRGSLSLTNLSSSMAGVYVCKAHNEVGTAQCNVTLEVSTGQ

SEQ ID NO: 59889 - protein, 208 aa, Homo sapiens
  MOD_RES (1)..(1): Any amino acid
XCEGHGQCNCGRCDCKAGWYGKKCEHPQSCTLSAEESIRKCQGSSDLPCSGRGKCECGKCTCYPPGDRRVYGKTCECDDRRCEDLDGVVCGGHGTCSCGRCVCERGWFGKLCQHPRKCNMTEEQSKNLCESADGILCSGKGSCHCGKCICSAEEWYISGEFCDCDDRDCDKHDGLICTGNGICSCGNCECWDGWNGNACEIWLGSEYP

SEQ ID NO: 59890 - protein, 119 aa, Homo sapiens
  MOD_RES (1)..(1): Any amino acid
XEGDGEGNILPIMQSIMQNLLSKDVLYPSLKEITEKYPEWLQSHRESLPPEQFEKYQEQHSVMCKICEQFEAETPTDSETTQKARFEMVLDLMQQLQDLGHPPKELAGEMVSMSYFSRF

SEQ ID NO: 59891 - protein, 95 aa, Homo sapiens
MGEEGTGGTVHLLCLAASSGVPLFCRSSRGGAPARQQLPFSVIGSLNGVHMFGQNLEVQLSSARTENTTVVWKSFHDRSPGGNVGQGQGLGDSPC

SEQ ID NO: 59892 - protein, 158 aa, Homo sapiens
MKGFIFLKAIGVQLRNMAQETNHSQVPMLCSTGCGFYGNPRTNGMCSVCYKEHLQRQNSSNGRISPPATSVSSLSESLPVQCTDGSVPEAQSALDSTSSSMQPSPVSNQSLLSESVASSQLDSTSVDKAVPETEDVQASVSDTAQQPSEEQSKSLEKP

SEQ ID NO: 59893 - protein, 204 aa, Homo sapiens
ISEHVEEAKKLYSIILSAPIPEPKTKDDLEQLTTEIKKRANNVRNKLKSMEKHIEEDEVRSSADLRIRKSQHSVLSRKFVEVMTKYNEAQVDFRERSKGRIQRQLEITGKKTTDEELEEMLESGNPAIFTSGIIDSQISKQALSEIEGRHKDIVRLESSIKELHDMFMDIAMLVENQKLIIIIVLVVVLLGILALIIGLSVGLN

SEQ ID NO: 59894 - protein, 271 aa, Homo sapiens
  MOD_RES (1)..(1): Any amino acid
XEEEKIFGRGSRQRRDVDYSDALTEKQWLRAIEDGNLEEMEEEVRLKKRKRRRNVDKDPAKEDVEKAKKRRGRPPAEKLSPNPPKLTKQMNAIIDTVINYKDSSGRQLSEVFIQLPSRKELPEYYELIRKPVDFKKIKERIRNHKYRSLGDLEKDVMLLCHNAQTFNLEGSQIYEDSIVLQSVFKSARQKIAKEEESEDESNEEEEEEDEEESESEAKSVKVKIKLNKKDDKGRDKGKGKKRPNRGKAKPVVSDFDSDEEQDERVSVADWD

SEQ ID NO: 59895 - protein, 357 aa, Homo sapiens
VKIQGQNKEMLAAACQMFLGKTEAEIAHIALETLEGHQRAIMAHMTVEEIYKDRQKFSEQVFKVASSDLVNMGISVVSYTLKDIHDDQDYLHSLGKARTAQVQKDARIGEAEAKRDAGIREAKAKQEKVSAQYLSEIEMAKAQRDYELKKAAYDIEVNTRRAQADLAYQLQVAKTKQQIEEQRVQVQVVERAQQVAVQEQEIARREKELEARVRKPAEAERYKLERLAEAEKSQLIMQAEAEAASVRMRGEAEAFAIGARARAEAEQMAKKAEAFQLYQEAAQLDMLLEKLPQVAEEISGPLTSANKITLVSSGSGTMGAAKVTGEVLDILTRLPESVERLTGVSISQVNHKPLRTA

SEQ ID NO: 59896 - protein, 84 aa, Homo sapiens
  MOD_RES (1)..(1): Any amino acid
XGEKISLGITVLLSLTVFMLLVAEIMPATSDSVPLIAQYFASTMIIVGLSVVVTVIVLQYHHHDPDGGKMPKWPPRDFYYDLLL

SEQ ID NO: 59897 - protein, 183 aa, Homo sapiens
NTNHVDTKELCDYFVDHMGDYEDVLASLETLNHSVLKAMGYTKKVYEGGSNVDQFVTRFLLKETANQIQSLLSSVESAVEAIEEQTSQLRQNHIKPSHSAAQTWCGSPTPASAPNHKLMAMEQGKTLPSATEDAKEEGLEAQISRLAELIGRLESKHLQLVRQEMAVCPEQLSEFLDSLRQYL

SEQ ID NO: 59898 - protein, 158 aa, Homo sapiens
FLDSNQENDLLWEEKFPERTTVTELPQTSHVSFSEPDIPSSKSTELPVDWSIKTRLLFTSSQPFTWADHLKAQEEAQGLVQHCRATEVTLPKSIQDPKLSSELRCTFQQSLIYWLHPALSWLPLFPRIGADRKMAGKTSPWSNDATLQHVLMSDWHGV

SEQ ID NO: 59899 - protein, 69 aa, Homo sapiens
GSPATSVPGMGLHPPGPPLARPILPRERGALDRIVEYLVGDGPQNSFSMCLLFFLEPCKKNQTSGSKTS

SEQ ID NO: 59900 - protein, 4041 aa, Homo sapiens
KTESWHCLPQEMDSSQTLDTSQTRFNVRTEDTEVTDFPSLEEGILTQSENQVKEPNRDLFCSPLLVIQDSFASPDLPLLTCLTQDQEFAPDSLFHQSELSFAPLRGIPDKSEDTEWSSRPSEVSEALFQATAEVASDLASSRFSVSQHPLIGSTAVGSQCPFLPSEQGNNEETISSVDELKIPKDCDRYDDLCSYMSWKTRKDTQWPENNLADKDQVSVATSFDITDENIATKRSDHFDAARSYGQYWTQEDSSKQAETYLTKGLQGKVESDVITLDGLNENAVVCSERVAELQRKVGHSNLGINESFSFLLPSFVPHKPTRESEYHSSDLRMLRMSPDTVPKAPKHLKAGDTSKGGIAKVTQSNLKSGITTTPVDSDIGSHLSLSLEDLSQLAVSSPLETTTGQHTDTLNQKTLADTHLTEETLKVTAIPEPADQKTATPTVLSSSHSHRGKPSIFYQQGLPDSHLTEEALKVSAAPGLADQTTGMSTLTSTSYSHREKPGTFYQQELPESNLTEEPLEVSAAPGPVEQKTGIPTVSSTSHSHVEDLLFFYRQTLPDGHLTDQALKVSAVSGPADQKTGTATVLSTPHSHREKPGIFYQQEFADSHQTEETLTKVSATPGPADQKTEIPAVQSSSYSQREKPSILYPQDLADSHLPEEGLKVSAVAGPADQKTGLPTVPSSAYSHREKLLVFYQQALLDSHLPEEALKVSAVSGPADGKTGTPAVTSTSSASSSLGEKPSAFYQQTLPNSHLTEEALKVSIVPGPGDQKTGIPSAPSSFYSHREKPIIFSQQTLPDFLFPEEALKVSAVSVLAAQKTGTPTVSSNSHSHSEKSSVFYQQELPDSDLPRESLKMSAIPGLTDQKTVPTPTVPSGSFSHREKPSIFYQQEWPDSYATEKALKVSTGPGPADQKTEIPAVQSSSYPQREKPSVLYPQVLSDSHLPEESLKVSAFPGPADQMTDTPAVPSTFYSQREKPGIFYQQTLPESHLPKEALKISVAPGLADQKTGTPTVTSTSYSQHREKPSIFHQQALPGTHIPEEAQKVSAVTGPGNQKTWIPRVLSTFYSQREKPGIFYQQTLPGSHIPEEAQKVSPVLGPADQKTGTPTPTSASYSHTEKPGIFYQQVLPDNHPTEEALKISVASEPVDQTTGTPAVTSTSYSQYREKPSIFYQQSLPSSHLTEEAKNVSAVPGPADQKTVIPILPSTFYSHTEKPGVFYQQVLPHSHPTEEALKISVASEPVDQTTGTPTVTSTSYSQHTEKPSIFYQQSLPGSHLTEEAKNVSAVPGPGDRKTGIPTLPSTFYSHTEKPGSFYQQVLPHSHLPEEALEVSVAPGPVDQTIGTPTVTSPSSSFGEKPIVIYKQAFPEGHLPEESLKVSVAPGPVGQTTGAPTITSPSYSQHRAKSGSFYQLALLGSQIPEEALRVSSAPGPADQTTGIPTITSTSYSFGEKPIVNYKQAFPDGHLPEEALKVSIVSGPTEKKTDIPAGPLGSSALGEKPITFYRQALLDSPLNKEVVKVSAAPGPADQKTETLPVHSTSYSNRGKPVIFYQQTLSDSHLPEEALKVPPVPGPDAQKTETPSVSSSLYSYREKPIVFYQQALPDSELTQEALKVSAVPQPADQKTGLSTVTSSFYSHTEKPNISYQQELPDSHLTEEALKVSNVPGPADQKTGVSTVTSTSYSHREKPIVSYQRELPHFTEAGLKILRVPGPADQKTGINILPSNSYPQREHSVISYEQELPDLTEVTLKAIGVPGPADQKTGIQIASSSSYSNREKASIFHQQELPDVTEEALNVFVVPGQGDRKTEIPTVPLSYYSRREKPSVISQQELPDSHLTEEALKVSPVSIPAEQKTGIPIGLSSSYSHSHKEKLKISTVHIPDDQKTEFPAATLSSYSQIEKPKISTVIGPNDQKTPSQTAFHSSYSQTVKPNILFQQQLPDRDQSKGILKISAVPELTDVNTGKPVSLSSSYFHREKSNIFSPQELPGSHVTEDVLKVSTIPGPAGQKTVLPTALPSSFSHREKPDIFYQKDLPDRHLTEDALKISSALGQADQITGLQTVPSGTYSHGENHKLVSEHVQRLIDNLNSSDSSVSSNNVLLNSQADDRVVINKPESAGFRDVGSEEIQDAENSAKTLKEIRTLLMEAENMALKRCNFPAPLARFRDISDISFIQSKKVVCFKEPSSTGVSNGDLLHRQPFTEESPSSRCIQKDIGTQTNLKCRRGIENWEFISSTTVRSPLQEAESKVSMALEETLRQYQAAKSVMRSEPEGCSGTIGNKIIIPMMTVIKSDSSSDASDGNGSCSWDSNLPESLESVSDVLLNFFPYVSPKTSITDSREEEGVSESEDGGGSSVDSLAAHVKNLLQCESSLNHAKEILRNAEEEESRVRAHAWNMKFNLAHDCGYSISELNEDDRRKVEEIKAELFGHGRTTDLSKGLQSPRGMGCKPEAVCSHIIIESHEKGCFRTLTSEHPQLDRHPCAFRSAGPSEMTRGRQNPSSCRAKHVNLSASLDQNNSHFKVWNSLQLKSHSPFQNFIPDEFKISKGLRMPFDEKMDPWLSELVEPAFVPPKEVDFHSSSQMPSPEPMKKFTTSITFSSHRHSKCISNSSVVKVGVTEGSQCTGASVGVFNSHFTEEQNPPRDLKQKTSSPSSFKMHSNSQDKEVTILAEGRRQSQKLPVDFERSFQEEKPLERSDFTGSHSEPSTRANCSNFKEIQISDNHTLISMGRPSSTLGVNRSSSRLGVKEKNVTITPDLPSCIFLEQRELFEQSKAPRADDHVRKHHSPSPQHQDYVAPDLPSCIFLEQRELFEQCKAPYVDHQMRENHSPLPQGQDSIASDLPSPISLEQCQSKAPGVDDQMNKHHFPLPQGQDCVVEKNNQHKPKSHISNINVEAKFNTVVSQSAPNHCTLAASASTPPSNRKALSCVHITLCPKTSSKLDSGTLDERFHSLDAASKARMNSEFNFDLHTVSSRSLEPTSKLLTSKPVAQDQESLGFLGPKSSLDFQVVQPSLPDSNTITQDLKTIPSQNSQIVTSRQIQVNISDFEGHSNPEGTPVFADRLPEKMKTPLSAFSEKLSSDAVTQITTESPEKTLFSSEIFINAEDRGHEIIEPGNQKLRKAPVKFASSSSVQQVTFSRGTDGQPLLLPYKPSGSTKMYYVPQLRQIPPSPDSKSDTTVESSHSGSNDAIAPDFPAQVLGTRDDDLSATVNIKHKEGIYSKRVVTKASLPVGEKPLQNENADASVQVLITGDENLSDKKQQEIHSTRAVTEAAQAKEKESLQKDTADSSAAAAAEHSAQVGDPEMKNLPDTKAITQKEEIHRKKTVPEEAWPNNKESLQINIEESECHSEFENTTRSVFRSAKFYIHHPVHLPSDQDICHESLGKSVFMRHSWKDFFQHHPDKHREHMCLPLPYQNMDKTKTDYTRIKSLSINVNLGNKEVMDTTKSQVRDYPKHNGQISDPQRDQKVTPEQTTQHTVSLNELWNKYRERQRQQRQPELGDRKELSLVDRLDRLAKILQNPITHSLQVSESTHDDSRGERSVKEWSGRQQQRNKLQKKKRFKSLEKSHKNTGELKKSKVLSHHRAGRSNQIKIEQIKFDKYILSKQPGFNYISNTSSDCRPSEESELLTDTTTNILSGTTSTVESDILTQTDREVALHERSSSVSTIDTARLIQAFGHERVCLSPRRIKLYSSITNQQRRYLEKRSKHSKKVLNTGHPLVTSEHTRRRHIQVANHVISSDSISSSASSFLSSNSTFCNKQNVHMLNKGIQAGNLEIVNGAKKHTRDVGITFPTPSSSEAKLEENSDVTSWSEEKREEKMLFTGYPEDRKLKKNKKNSHEGVSWFVPVENVESRSKKENVPNTCGPGISWFEPITKTRPWREPLREQNCQGQHLDGRGYLAGPGREAGRDLLRPFVRATLQESLQFHRPDFISRSGERIKRLKLIVQERKLQSMLQTERDALFNIDRERQGHQNRMCPLPKRVFLAIQKNKPISKKEMIQRSKRIYEQLPEVQKKREEEKRKSEYKSYRLRAQLYKKRVTNQLLGRKVPWD

SEQ ID NO: 59901 - protein, 587 aa, Homo sapiens
MEYEEITLERGNSGLGFSIAGGTDNPHIGDDPSIFITKIIPGGAAAQDGRLRVNDSILFVNEVDVREVTHSAAVEALKEAGSIVRLYVMRRKPPAEKVMEIKLIKGPKGLGFSIAGGVGNQHIPGDNSIYVTKIIEGGAAHKDGRLQIGDKILAVNSVGLEDVMHEDAVAALKNTYDVVYLKVAKPSNAYLSDSYAPPDITTSYSQHLDNEISHSSYLGTDYPTAMTPTSPRRYSPVAKDLLGEEDIPREPRRIVIHRGSTGLGFNIVGGEDGEGIFISFILAGGPADLSGELRKGDQILSVNGVDLRNASHEQAAIALKNAGQTVTIIAQYKPEEYSRFEAKIHDLREQLMNSSLGSGTASLRSNPKRGFYIRALFDYDKTKDCGFLSQALSFRFGDVLHVIDASDEEWWQARRVHSDSETDDIGFIPSKRRVERREWSRLKAKDWGSSSGSQGREDSVLSYETVTQMEVHYARPIIILGPTKDRANDDLLSEFPDKFGSCVPHTTRPKREYEIDGRDYHFVSSREKMEKDIQAHKFIEAGQYNSHLYGTSVQSVREVAEQGKHCILDVSANAVRRLQAAHLHPIA

SEQ ID NO: 59902 - protein, 212 aa, Homo sapiens
  MOD_RES (1)..(1): Any amino acid
XLKGVILVICYFMMHYVDYSMMYHLIRGQSVIKLYIIYNMLEVADRLFSSFGQDILDALYWTATEPKERKRAHIGFVEIKGSVFKKFEKNNLFQMSNSDIKERFTNYVLLLIVCLRNMEQFSWNPDHLWVLFPDVCMVIASEIAVDIVKHAFITKFNDITADVYSEYRASLAFDLVSSRQKNAYTDYSDSVARRMGFIPLPLAVLVDIPEST

SEQ ID NO: 59903 - protein, 94 aa, Homo sapiens
MNGEQQLDADAGSGMEEVELSWEDYLEETGSTAVPYGSFKHVDTRLQNGFAPGMKLEVAVRTDPETYWVATVITTCEQLLLLRYDGYGEDRRAD

SEQ ID NO: 59904 - protein, 362 aa, Homo sapiens
MATTVTCTRFTDEYQLYEDIGKGAFSVVRRCVKLCTGHEYAAKIINTKKLSARDHQKLEREARICRLLKHSNIVRLHDSISEEGFHYLVFDLVTGGELFEDIVAREYYSEADASHCIQQILEAVLHCHQMGVVHRDLKPENLLLASKCKGAAVKLADFGLAIEVQGDQQAWFGFAGTPGYLSPEVLRKEAYGKPVDIWACGVILYILLVGYPPFWDEDQHKLYQQIKAGAYDFPSPEWDTVTPEAKNLINQMLTINPAKRITAHEALKHPWVCQRSTVASMMHRQETVECLKKFNARRKLKPRVYSTRKQMESSPRRIAPKTVQPPPAPKGRFLLPPWSLKPPSSITQWTGLRSLLTVPIPP

SEQ ID NO: 59905 - protein, 121 aa, Homo sapiens
MEAPAAGLFLLLLLGTWAPAPGSASSEAPPLINEDVKRTVDLSSHLAKVTAEVVLAHLGGGSTSRATSFLLALEPELEARLAHLGVQVKGEDEEENNLEVRETKIKGKRVCCPGSITVVPC

SEQ ID NO: 59906 - protein, 192 aa, Homo sapiens
MADQIPLYPVRSAAAAAANRKRAAYYSAAGPRPGADRHSSCCGWLINICRRKKELKARTVWLGCPEKCEEKHPRNSIKNQKYNVFTFIPGVLYEQFKFFLNLYFLVISCSQFVPALKIGYLYTYWAPLGFVLAVTMTREAIDEFRRFQRDKEVNSQLYSKLTVRGKVQVKSSDIQVGDLIIVEKNQRIPSDM

SEQ ID NO: 59907 - protein, 201 aa, Homo sapiens
MADTQYILPNDIGVSSLDCREAFRLLSPTERLYAYHLSRAAWYGGLAVLLQTSPEAPYIYALLSRLFRAQDPDQLRQHALAEGLTEEEYQAFLVYAAGVYSNMGNYKSFGDTKFVPNLPKEKLERVILGSEAAQQHPEEVRGLWQTCGELMFSLEPRLRHLGLGKEGITTYFSGNCTMEDAKLAQDFLDSQNLSAYNTRLF

SEQ ID NO: 59908 - protein, 17 aa, Homo sapiens
MASPDRSKRKILKAKKT

SEQ ID NO: 59909 - protein, 442 aa, Homo sapiens
MAAAALRDPAQQGYVTFEDVAVYFSQEEWRLLDDAQRLLYRNVMLENFTLLASLGLASSKTHEITQLESWEEPFMPAWEVVTSAIPRGCWHGAEAEEAPEQIASVGLLSSNIQQHQKQHCGEKPLKRQEGRVPVLRSCKVHLSEKSLQSREVGKALLISSGVLKHQVTHTGEKSHRSSKSREAFHAGKRHYKCSECGKAFGQKYLLVQHQRLHAGKKTYECSECGKLFRDMSNLFIHQIVHTGERPYGCSNCGKSFSRNAHLIEHQRVHTGEKPFTCSECGKAFRHNSTLVQHHKIHTGVRPYECSECGKLFSFNSSLMKHQRIHTGERPYKCSECGKFYSHKSNLIKHWRVHTGERPYKCSDCGKFFTQCSSLMQHQKVHTGEKPFKCNECGRFFRENSSLVKHQRVHTGAKPYECRECGKFFRHNSSLFKHRRIHTGEMQ

SEQ ID NO: 59910 - protein, 553 aa, Homo sapiens
  MOD_RES (1)..(1): Any amino acid
XTSLRLLCSVIGGTDQAQWEDITGTTKLVYANECANFTTNVSARFWLSDCPRTAEAVNFATLLYKELTAVPYMAKFVIFAKMNDPREGRLRCYCMTDDKVDKTLEQHENFVEVARSRDIEVLEGMSLFAELSGNLVPVKKAAQQRSFHFQSFRENRLAMPVKVRDSSREPGGSLSFLRKAMKYEDTQHILCHLNITMPPCAKGSGAEDRRRTPTPLALRYSILSESTPGSLSGTEQAEMKMAVISEHLGLSWAELARELQFSVEDINRIRVENPNSLLEQSVALLNLWVIREGQNANMENLYTALQSIDRGEIVNMLEGSGRQSRNLKPDRRHTDRDYSLSPSQMNGHQRGQARITHSPTVSQVTERSQDRLQDWDADGSIVSYLQDAAQGSWQEEVTQGPHSFQGTSTMTEGLEPGGSQEYEKVLVSVSEHTWTEQPEAESSQADRDRRQQGQEEQVQEAKNTFTQVVQGNEFQNIPGEQVTEEQFTDEQGNIVTKKIIRKVVRQIDLSSADAAQEHEEVTVEGPLEDPSELEVDIDYFMKHSKDHTSTPNP

SEQ ID NO: 59911 - protein, 42 aa, Homo sapiens
MAGERTRRFTRSLLRPGQAAELRHSAASAAAVAVSSRQQQRH

SEQ ID NO: 59912 - protein, 62 aa, Homo sapiens
MAEGSGEVVAVSATGAANGLNNGAGGTSATTCNPLSRKLHKILETRLDNDKSADSKKFTWRY

SEQ ID NO: 59913 - protein, 168 aa, Homo sapiens
MLLRSKPALPPPLMLLLLGPLGPLSPGALPRPAQAQDVVDLDFFTQEPLHLVSPSFLSVTIDANLATDPRFLILLGSPKLRTLARGLSPAYLRFGGTKTDFLIFDPKKESTFEERSYWQSQVNQDICKYGSIPPDVEEKLRLEWPYQEQLLLREHYQKKFKNSTYSTS

SEQ ID NO: 59914 - protein, 147 aa, Homo sapiens
MRPQGPAASPQRLRGLLLLLLLQLPAPSSASEIPKGKQKAQLRQREVVDLYNGMCLQGPAGVPGRDGSPGANGIPGTPGIPGRDGFKGEKGECLRESFEESWTPNYKQCSWSSLNYGIDLGKIAVSLNYFKIEARFKGFHILVLIFR

SEQ ID NO: 59915 - protein, 172 aa, Homo sapiens
  MOD_RES (1)..(1): Any amino acid
XKPGVSGHGVYELKDESLKDFNMYFYHYSKTQHSKAEHMQKKRRKQENKDEALPPPPPPEFCPAFSKVINLLNCDIMMYILRTVFERAIDTDSNLWTEGMLQMAFHILALGLLEEKQQLQKAPEEEVTFDFYHKASRLGSSAMNIQMLLEKLKGIPQLEGQKDMITWILQVN

SEQ ID NO: 59916 - protein, 115 aa, Homo sapiens
RAFILHKADPVPNGLRALPVFYACTVGINLFSIMYTGAPLLGFDKLPLWGTILISVGCAVFCALIVWFFVCPRMKRKIERCGGGENSLIQTWRFGGSSREREASQRGLERGNQHR

SEQ ID NO: 59917 - protein, 12 aa, Homo sapiens
EMGGSQEEIGLC

SEQ ID NO: 59918 - protein, 120 aa, Homo sapiens
MHYYQGKKYFRDRRGGGRNSDWSSDTNRQGQQSSSDCYIYDSATGYYYDPLAGTYYDPNTQQEVYVPQDPGLPEEEEIKEKKPTSQGKSSSKKEMSKRDGKEKKDRGVTRFQENASEGKA

SEQ ID NO: 59919 - protein, 89 aa, Homo sapiens
MSTEAQRVDDSPSTSGGSSDGDQRESVQQEPEREQVQPKKKEGKISSKTAAKLSTSAKRIQKELAEITLDPPPNCRLFLIRSACISSNL

SEQ ID NO: 59920 - protein, 181 aa, Homo sapiens
KVWYDRLTLLALLDRTEDIKENVLAILLIVLVSLLGFLTLSQGFCKDMWVLLFCLVMASCQYSLLKGHNQIITYSRPIYFCVLCGLILLLDTGAKARHPPSYVVYGLKLFSPVFLQSARDYLIVFLYCFPAISLLGLFPQINTFCTYLLEQIDMLFFGGSAVSGITSAVYSVARSVLAAAL

SEQ ID NO: 59921 - protein, 699 aa, Homo sapiens
MQQRAGSKTAGPPCQWSRMASEGTNIPSPVVRQIDKQFLICSICLERYKNPKVLPCLHTFCERCLQNYIPAHSLTLSCPVCRQTSILPEKGVAALQNNFFITNLMDVLQRTPGSNAEESSILETVTAVAAGKPLSCPNHDGNVMEFYCQSCETAMCRECTEGEHAEHPTVPLKDVVEQHKASLQVQLDAVNKRLPEIDSALQFISEIIHQLTNQKASIVDDIHSTFDELQKTLNVRKSVLLMELEVNYGLKHKVLQSQLDTLLQGQESIKSCSNFTAQALNHGTETEVLLVKKQMSEKLNELADQDFPLHPRENDQLDFIVETEGLKKSIHNLGTILTTNAVASETVATGEGLRQTIIGQPMSVTITTKDKDGELCKTGNAYLTAELSTPDGSVADGEILDNKNGTYEFLYTVQKEGDFTLSLRLYDQHIRGSPFKLKVIRSADVSPTTEGVKRRVKSPGSGHVKQKAVKRPASMYSTGKRKENPIEDDLIFRVGTKGRNKGEFTNLQGVAASTNGKILIADSNNQCVQIFSNDGQFKSRFGIRGRSPGQLQRPTGVAVHPSGDIIIADYDNKWVSIFSSDGKFKTKIGSGKLMGPKGVSVDRNGHIIVVDNKACCVFIFQPNGKIVTRFGSRGNGDRQFAGPHFAAVNSNNEIIITDFHNHSVKRNCDLRAFPVQCSRQPLRINWHWYVGRLLFTSPG

SEQ ID NO: 59922 - protein, 711 aa, Homo sapiens
MLARRQRDPLQALRRRNQELKQQVDSLLSESQLKEALEPNKRQHIYQRCIQLKQAIDENKNALQKLSKADESAPVANYNQRKEEEHTLLDKLTQQLQGLAVTISRENITEVGAPTEEEEESESEDSEDSGGEEEDAEEEEEEKEENESHKWSTGEEYIAVGDFTAQQVGDLTFKKGEILLVIEKKPDGWWIAKDAKGNEGLVPRTYLEPYSEEEEGQESSEEGSEEDVEAVDETADGAEVKQRTDPHWSAVQKAISEINTVDVLTTMGAIPAGFRPSTLSQLLEEGNQFRANYFLQPELMPSQLAFRDLMWDATEGTIRSRPSRISLILTLWSCKMIPLPGMSIQVLSRHVRLCLFDGNKVLSNIHTVRATWQPKKPKTWTFSPQVTRILPCLLDGDCFIRSNSASPDLGILFELGISYIRNSTGERGELSCGWVFLKLFDASGVPIPAKTYELFLNGGTPYEKGIEVDPSISRRAHGSVFYQIMTMRRQPQLLVKLRSLNRRSRNVLSLLPETLIGNMCSIHLLIFYRQILGDVLLKDRMSLQSTDLISHPMLATFPMLLEQPDVMDALRSSWAGKESTLKRSEKLSKPVSPREGKKKWPELYHILKTMHCSCLPCYKIMRDKEFLKSTFLLVYHDCVLPLLHSTRLPPFRWAEEETETARWKVITDFLKQNQENQGALQALLSPDGVHEPFDLSEQTYDFLGEMRKNAV

SEQ ID NO: 59923 - protein, 32 aa, Homo sapiens
MLEPNLSVHSQKSTQNSKQGIFQLWNCPLNEG

SEQ ID NO: 59924 - protein, 481 aa, Homo sapiens
MAGPEGFQYRALYPFRRERPEDLELLPGDVLVVSRAALQALGVAEGGERCPQSVGWMPGLNERTRQRGDFPGTYVEFLGPVALARPGPRPRGPRPLPARPRDGAPEPGLTLPDLPEQFSPPDVAPPLLVKLVEAIERTGLDSESHYRPELPAPRTDWSLSDVDQWDTAALADGIKSFLLALPAPLVTPEASAEARRALREAAGPVGPALEPPTLPLHRALTLRFLLQHLGRVASRAPALGPAVRALGATFGPLLLRAPPPPSSPPPGGAPDGSEPSPDFPALLVEKLLQEHLEEQEVAPPALPPKPPKAKPASTVLANGGSPPSLQDAEWYWGDISREEVNEKLRDTPDGTFLVRDASSKIQGEYTLTLRKGGNNKLIKVFHRDGHYGFSEPLTFCSVVDLINHYRHESLAQYNAKLDTRLLYPVSKYQQDQIVKEDSVEAVGAQLKVYHQQYQDKSREYDQLYEEYTRTSQGLLGSPRRC

SEQ ID NO: 59925 - protein, 764 aa, Homo sapiens
  MOD_RES (1)..(1): Any amino acid
XKASAQASLASKDKTPKSKSKKRNSTQLKSRVKNIRYESASMSSTCEPCKSRNRHSAQTEEPVQAKVFSRKNHEQLEKIIKCNRSTEISSAHARRILQQSNRNACNEAPETGSDFSMFEALRDTIYSEVATLISQNESRPHFLIELFHELQLLNTDYLRQRALYALQDIVSRHISESHEKGENVKSVNSGTWIASNSELTPSESLATTDDETFEKNFERETHKISEQNDADNASVLSVSSNFEPFATDDLGNTVIHLDQALARMREYERMKTEAESNSNMRCTCRIIEDGDGAGAGTTVNNLEETPVIENRSSQQPVSEVSTIPCPRIDTQQLDRQIKAIMKEVIPFLKEHMDEVCSSQLLTSVRRMVLTLTQQNDESKEFVKFFHKQLGSILQDSLAKFAGRKLKDCGEDLLVEISEVLFNELAFFKLMQDLDNNSITVKQRCKRKIEATGVIQSCAKEAKRILEDHGSPAGEIDDEDKDKDETETVKQTQTSEVYDGPKNVRSDISDQEEDEESEGCPVSINLSKAETQALTNYGSGEDENEDEEMEEFEEGPVDVQTSLQANTEATEENEHDEQVLQRDFKKTAESKNVPLEREATSKNDQNNCPVKPCYLNILEDEQPLNSAAHKESPPTVDSTQQPNPLPLRLPEMEPLVPRVKEVKSAQETPESSLAGSPDTESPVLVNDYEAESGNISQKSDEEDFVKVEDLPLKLTIYSEADLRKKMVEEEQKNHLSGEICEMQTEELAGNSETLKEPETVGAQSI

SEQ ID NO: 59926 - protein, 19 aa, Homo sapiens
MLERKKPKTAENQKASEEN

SEQ ID NO: 59927 - protein, 73 aa, Homo sapiens
MTMGDMKTPDFDDLLAAFDIPDMVDPKAAIESGHDDHESHMKQNAHGEDDSHAPSSSDVGVSVIVKNVRNIDS

SEQ ID NO: 59928 - protein, 117 aa, Homo sapiens
  MOD_RES (1)..(1): Any amino acid
XLMGEVATDWMDTECPEAKRLKVEEPGMGAEEAVDCRQWTQHHLVAADIRVAPAMALTPPQGDADADGMDVNVRGPDSHPKPLYRLGCPHGRWLNGTDPGGPPGSRGHGGRAHRQPC

SEQ ID NO: 59929 - protein, 110 aa, Homo sapiens
  MOD_RES (1)..(1): Any amino acid
XGAVPRSIPNLAEVKKKGKMKKLGQAMEEDLIVGLQGMDLNLEAEALAGTGLVLDEQLNEFHCLWDDSFPEGPERLHAIKEQLIQEGLLDRCVSFQARFAEKEELMLVHR

SEQ ID NO: 59930 - protein, 42 aa, Homo sapiens
MYGKIIFVLLLSGDGANPENSGRRGQKAEGRARAKILKQEKL

SEQ ID NO: 59931 - protein, 90 aa, Homo sapiens
  MOD_RES (1)..(1): Any amino acid
XKLAKMYKTTPDVIFVFGFRTHFGGGKTTGFGMIYDSLDYAKKNEPKHRLARHGLYEKKKTSRKQRKERKNRMKKVRGTAKANVGAGKKK

SEQ ID NO: 59932 - protein, 532 aa, Homo sapiens
MAAAAAATAAAAASIRERQTVALKRMLNFNVPHIKNSTGEPVWKVLIYDRFGQDIISPLLSVKELRDMGITLHLLLHSDRDPIPDVPAVYFVMPTEENIDRMCQDLRNQLYESYYLNFISAISRSKLEDIANAALAASAVTQVAKVFDQYLNFITLEDDMFVLCNQNKELVSYRAINRPDITDTEMETVMDTIVDSLFCFFVTLGAVPIIRCSRGTAAEMVAVKLDKKLRENLRDARNSLFTGDTLGAGQFSFQRPLLVLVDRNIDLATPLHHTWTYQALVHDVLDFHLNRVNLEESSGVENSPAGARPKRKNKKSYDLTPVDKFWQKHKGSPFPEVAESVQQELESYRAQEDEVKRLKSIMGLEGEDEGAISMLSDNTAKLTSAVSSLPELLEKKRLIDLHTNVATAVLEHIKARKLDVYFEYEEKIMSKTTLDKSLLDIISDPDAGTPEDKMRLFLIYYISTQQAPSEADLEQYKKALTDAGCNLNPLQYIKQWKAFTKMASAPASYGSTTTKPMGCDTHGSRNSQDPSV

SEQ ID NO: 59933 - protein, 65 aa, Homo sapiens
  MOD_RES (1)..(1): Any amino acid
XQLFSKPEVIKQKYETGPCSKADVVDSETVVRARGLPWQSSDQDVARFFKGLNVARCIKRQGRSL

SEQ ID NO: 59934 - protein, 694 aa, Homo sapiens
  MOD_RES (1)..(1): Any amino acid
XPKAAYDYCEHYSPDCDSSAPKAAQAQEPQIDEYAPEDIIEYDYEYGEAEYKEAESVTEGPTVTEETIAQTEANIVDDFQEYNYGTMESYQTEAPRHVSGTNEPNPVEEIFTEEYLTGEDYDSQRKNSEDTLYENKEIDGRDSDLLVDGDLGEYDFYEYKEYEDKPTSPPNEEFGPGVPAETDITETSINGHGAYGEKGQKGEPAVVEPGMLVEGPPGPAGPAGIMGPPGLQGPTGPPGDPGDRGPPGRPGLPGADGLPGPPGTMLMLPFRYGGDGSKGPTISAQEAQAQAILQQARIALRGPPGPMGLTGRPGPVGGPGSSGAKGESGDPGPQGPRGVQGPPGPTGKPGKRGRPGADGGRGMPGEPGAKGDRGFDGLPGLPGDKGHRGERGPQGPPGPPGDDGMRGEDGEIGPRGLPGEAGPRGLLGPRGTPGAPGQPGMAGVDGPPGPKGNMGPQGEPGPPGQQGNPGPQGLPGPQGPIGPPGEKGPQGKPGLAGLPGADGPPGHPGKEGQSGEKGALGPPGPQGPIGYPGPRGVKGADGVRGLKGSKGEKGEDGFPGFKGDMGLKGDRGEVGQIGPRGEDGPEGPKGRAGPTGDPGPSGQAGEKGKLGVPGLPGYPGRQGPKDFRCHWFHWIPWVSRCQWRERCTGSSWQTRPSGSAWSNGSSRFKRCKRSHWETWAKGHFRWRWPSWPSR

SEQ ID NO: 59935 - protein, 53 aa, Homo sapiens
ARGDTGADEAVPRHDSSYGTFAGEFYDLRYLSEEDMANQAVMQRPVTISSATG

SEQ ID NO: 59936 - protein, 362 aa, Homo sapiens
MDDDDFGGFEAAETFDGGSGETQTTSPAIPWAAFPAVSGVHLSPSSPEIVLDRDHSSSIGCLSSDAIISSPENTHAANSIVSQTIPKAQIQQSTHTHLDISLFPLGLTDEKSNGTIALVDDSEDPGANVSNIQLQQKISSLEIKLKVSEEEKQRIKQDVESLMEKHNVLEKGFLKEKEQEAISFQDRYKELQEKHKQELEDMRKAGHEALSIIVDEYKALLQSSVKQQVEAIEKQYISAIEKQAHKCEELLNAQHQRLLEMLDTEKELLKEKIKEALIQQSQEQKEILEKCLEEERQRNKEALVSAAKLEKEAVKDAVLKVVEEERKNLEKAHAEERELWKTEHAKDQEKVSQEIQKAIQEQ

SEQ ID NO: 59937 - protein, 242 aa, Homo sapiens
MALRWGIVSVGLISSDFTAVLQTLPRSEHQVVAVAARDLSRAKEFAQKHDIPKAYGSYEELAKDPSVEVAYIGTQHPQHKAAVMLCLAAGKAVLCEKPTGVNAAEVREMVAEARSRALFLMEAIWTRFFPASEALRSVLAQGTLGDLRVARAEFGKNLIHVPRAVDRAQAGGALLDIGIYCVQFTSMVFGGQKPEKISVVGRRHETGMKESPVIPLSESELLADILEEVRKAIGVTFPQDKR

SEQ ID NO: 59938 - protein, 484 aa, Homo sapiens
  MOD_RES (1)..(1): Any amino acid
XPEGMQNLAPNDLPLLAMEYCQGGDLRKYLNQFENCCGLREGAILTLLSDIASALRYLHENRIIHRDLKPENIVLQQGEQRLIHKIIDLGYAKELDQGSLCTSFVGTLQYLAPELLEQQKYTVTVDYWSFGTLAFECITGFRPFLPNWQPVQWHSKVRQKSEVDIVVSEDLNGTVKFSSSLPYPNNLNSVLAERLEKWLQLMLMWHPRQRGTDPTYGPNGCFKALDDILNLKLVHILNMVTGTIHTYPVTEDESLQSLKARIQQDTGIPEEDQELLQEAGLALIPDKPATQCISDGKLNEGHTLDMDLVFLFDNSKITYETQISPRPQPESVSCILQEPKRNLAFFQLRKVWGQVWHSIQTLKEDCNRLQQGQRAAMMNLLRNNSCLSKMKNSMASMSQQLKAKLDFFKTSIQIDLEKYSEQTEFGIRERSETPGRTDDGSADRHCGLTEEPHGPEAGGNAGRPRGASKGAVQETKGKTSRPAN

SEQ ID NO: 59939 - protein, 58 aa, Homo sapiens
MAAPAGGGGSAVSVLAPNGRRHTVKVTPSTVLLQVLEDTCRRQDFNPCEYDLKCPWAV

SEQ ID NO: 59940 - protein, 251 aa, Homo sapiens
MASPDWGYDDKNGPEQWSKLYPIANGNNQSPVDIKTSETKHDTSLKPISVSYNPATAKEIINVGHSFHVNFEDNDNRSVLKGGPFSDSYRLFQFHFHWGSTNEHGSEHTVDGVKYSAELHVAHWNSAKYSSLAEAASKADGLAVIGVLMKVGEANPKLQKVLDALQAIKTKGKRAPFTNFDPSTLLPSSLDFWTYPGSLTHPPLYESVTWIICKESISVSSEQLAQFRSLLSNVEGDNAVPMQHNNRPTQP

SEQ ID NO: 59941 - protein, 74 aa, Homo sapiens
MPPKKQAQAGGSKKAEQKKKEKIIEDKTFGLKNKKGAKQQKFIKAVTHQVKFGQQNPRQDLTYKCLDESSNHIR

SEQ ID NO: 59942 - protein, 173 aa, Homo sapiens
KLKDMRDEVLEHELMVADRRQKREIRQLEQELHKWQVLVDSITGMSSPDFDNQTLAVLRGRMVRYLMRSREITLGRATKDNQIDVDLSLEGPAWKISRKQGVIKLKNNGDFFIANEGRRPIYIDGRPVLCGSKWRLSNNSVVETGSWGQRSQIHTARKLTEQGYKPSSWLRRN

SEQ ID NO: 59943 - protein, 740 aa, Homo sapiens
MAKRKEENFSSPKNAKRPRQEELEDFDKDGDEDECKGTTLTAAEVGIIESIHLKNFMCHSMLGPFKFGSNVNFVVGNNGSWSAVVRSRLNATSASQVQAILLFQPCGKSAVLTALIVGLGGRAVATNRGSSLKGFVKDGQNSADISITLRNRGDDAFKASVYGNSILIQQHISIDGSRSYKLKSATGSVVSTRKEELIAILDHFNIQVDNPVSVLTQEMSKQFLQSKNEGDKYKFFMKATQLEQMKEDYSYIMETKERTKEQIHQGEERLTELKRQCVEKEERFQSIAGLSTMKTNLESLKHEMAWAVVNEIEKQLNAIRDNIKIGEDRAARLDRKMEEQQVRLNEAEQKYKDIQDKLEKISEETNARAPECMALKADVVAKKRAYNEAEVLYNRSLNEYKALKKDDEQLCKRIEELKKSTDQSLEPERLERQKKISWLKERVKAFQNQENSVNQEIEQFQQAIEKDKEEHGKIKREELDVKHALSYNQRQLKELKDSKTDRLKRFGPNVPALLEAIDDAYRQGHFTYKPVGPLGACIHLRDPELALAIESCLKGLLQAYCCHNHADERVLQALMKRFYLPGTSRPPIIVSEFRNEIYDVRHRAAYHPDFPTVLTALEIDNAVVANSLIDMRGIETVLLIKNNSVARAVMQSQKPPKNCREAFTADGDQVFAGRYYSSENTRPKFLSRDVDSEISDLENEVENKTAQILNLQQHLSALEKDIKHNEELLKRCQLHYKELK

SEQ ID NO: 59944 - protein, 1003 aa, Homo sapiens
KVAHLVLKAHARTWHHYNSHHRPQQQGHVGIVLNSDWAEPLSPERPEDLRASERFLHFMLGWFAHPVFVDGDYPATLRTQIQQMNRQCSHPVAQLPEFTEAEKQLLKGSADFLGLSHYTSRLISNAPQNTCIPSYDTIGGFSQHVNHVWPQTSSSWIRVVPWGIRRLLQFVSLEYTRGKVPIYLAGNGMPIGESENLFDDSLRVDYFNQYINEVLKAIKEDSVDVRSYIARSLIDGFEGPSGYSQRFGLHHVNFSDSSKSRTPRKSAYFFTSIIEKNGFLTKGAKRLLPPNTVNLPSKVRAFTFPSEVPSKAKVVWEKFSSQPKFERDLFYHGTFRDDFLWGVSSSAYQIEGAWDADGKGPSIWDNFTHTPGSNVKDNATGDIACDSYHQLDADLNMLRALKVKAYRFSISWSRIFPTGRNSSINSHGVDYYNRLINGLVASNIFPMVTLFHWDLPQALQDIGGWENPALIDLFDSYADFCFQTFGDRVKFWMTFNEPMYLAWLGYGSGEFPPGVKDPGWAPYRIAHAVIKAHARVYHTYDEKYRQEQKGVISLSLSTHWAEPKSPGVPRDVEAADRMLQFSLGWFAHPIFRNGDYPDTMKWKVGNRSELQHLATSRLPSFTEEEKRFIRATADVFCLNTYYSRIVQHKTPRLNPPSYEDDQEMAEEEDPSWPSTAMNRAAPWGTRRLLNWIKEEYGDIPIYITENGVGLTNPNTEDTDRIFYHKTYINEALKAYRLDGIDLRGYVAWSLMDNFEWLNGYTVKFGLYHVDFNNTNRPRTARASARYYTEVITNNGMPLAREDEFLYGRFPEGFIWSAASAAYQIEGAWRADGKGLSIWDTFSHTPLRVENDAIGDVACDSYHKIAEDLVTLQNLGVSHYRFSISWSRILPDGTTRYINEAGLNYYVRLIDTLLAASIQPQVTIYHWDLPQTLQDVGGWENETIVQRFKEYADVLFQRLGDKVKFWITLNEPFVIAYQGYGYGTAAPVHGRLVCTSYFQEWRLQ

SEQ ID NO: 59945 - protein, 643 aa, Homo sapiens
MATTAELFEEPFVADEYIERLVWRTPGGGSRGGPEAFDPKRLLEEFVNHIQELQIMDERIQRKVEKLEQQCQKEAKEFAKKVQELQKSNQIKEAADIIQKLHLIAQELPFDRFSEVKSKIASKYHDLECQLIQEFTSAQRRGEISRMREVAAVLLHFKGYSHCVDVYIKQCQEGAYLRNDIFEDAGILCQRVNKQVGDIFSNPETVLAKLIQNVFEIKLQSFVKEQLEECRKSDAEQYLKNLYDLYTRTTNLSSKLMEFNLGTDKQTFLSKLIKSIFISYLENYIEVETGYLKSRSAMILQRYYDSKNHQKRSIGTGGIQDLKERIRQRTNLPLGPSIDTHGETFLSQEVVVNLLQETKQAFERCHRLSDPSDLPRNAFRIFTILVEFLCIEHIDYALETGLAGIPSSDSRNANLYFLDVVQQANTIFHLFDKQFNDHLMPLISSSPKLSECLQKKKEIIEQMEMKLDTGIDRTLNCMIGQMKHILAAEQKKTDFKPEDENNVLIQYTNACVKVCAYVRKQVEKIKNSMDGKNVDTVLMELGVRFHRLIYEHLQQYSYSCMGGMLAICDVAEYRKCAKDFKIPMVLHLFDTLHALCNLLVVAPDNLKQVCSGEQLANLDKNILHSFVQLRADYRSARLARHFS

SEQ ID NO: 59946 - protein, 157 aa, Homo sapiens
MPSLLLLFTAALLSSWAQLLTDANSWWSLALNPVQRPEMFIIGAQPVCSQLPGLSPGQRKLCQLYQEHMAYIGEGAKTGIKECQHQFRQRRWNCSTADNASVFGRVMQIGSRETAFTHAVSAAGVVNAISRACREGELSTCGCSRTARPKDLPRDWL

SEQ ID NO: 59947 - protein, 43 aa, Homo sapiens
MLRVLCLLRPWRPLRARGCASDGAAGGSEIQVRALAGPDQAGH

SEQ ID NO: 59948 - protein, 194 aa, Homo sapiens
MANFQEHLSCSSSPHLPFSESKTFNGLQDELTAMGNHPSPKLLEDQQEKGMVRTELIESVHSPVTTTVLTSVSEDSRDQFENSVLQLREHDESETAVSQGNSNTVDGESTSGTEDIKIQFSRSGSGSGGFLEGLFGCLRPVWNIIGKAYSTDYKLQQQGVFVLRPHVIVLSWNTVPMDNSTRSYELAGRSHLDC

SEQ ID NO: 59949 - protein, 114 aa, Homo sapiens
MDLSFMAAQNKDKSRISPSVCDPREDPELAPGKGCVWPGRLPMMGGAFMDSPNEDFSTEYSLFNSSANVHAAANGQGQPEDPPRSSNDAVLLWIAIIATLGNIVVVGVVYAFTF

SEQ ID NO: 59950 - protein, 65 aa, Homo sapiens
TAQSLVLIDEFGKGTNTVDGLALLAAVLRHWLARGPTCPHIFVATNFLSLVQLQLLPQGPLVQYL

SEQ ID NO: 59951 - protein, 155 aa, Homo sapiens
VRGDPGTLKIISLPGSPGPPGTPGEPGMQGEPGPPGPPGNLGPCGPRGKPGKDGKPGTPGPAGEKGNKGSKGEPGPAGSDGLPGLKGKRGDSGSPATWTTRGFVFTRHSQTTAIPSCPEGTVPLYSGFSFLFVQGNQRAHGQDLDALFVKVLRSP

SEQ ID NO: 59952 - protein, 2046 aa, Homo sapiens
MELAHSLLLNEEAYNQLGEVQKAEFIFEWLRYLEKLLLATSRNDVREKQKTLVEQLLSLLNSSPGPPTRKLLAKNLAILYSIGDTFSVHEAIDKCNDLIRSKDDSPSYLPTKLAAVVCLGSLYKKLGRILGNTFTDTVGNILKAMKSAESQGRYEIMLSLQNILNGLGAAAAPCHRDVYKAARSCLTDRSMAVRCAAAKCLLELQNEAIFMWSTDLDSVATLCFKSFEGSNYDVRISVSKLLGIILAKAVISKHPGTAASRQSIRRVSLEEVLELLGTGFLRGSSGFLRASGDMLKGTSSVSRDVRVGVTQAYVVFVSTLGGAWLEKNFAAFFSHILSLASPSHPKATQTQIDAVCCRRCVSFILRTTIGGLLGEKAQLAAVKDICQAIWKLKKVMDAVMSDGNLETRLGSTDVAASQHMLVCALQELGNLIHNLGTTAAPLLQDSSTGLLDSILSVILHPSISVRLAAAWCLHCIAVALPSYLTPLLDRCLERLTGHKSSPEAVTGFSFAVAALLGAVKHCPLGIPHGKGKIIMTLAEDLLCSAAQNSRLSAQRTQAGWLLISALMTLGPAVVSHHLARVLLLWKCVFPASPKDLETEKSRGDSFTWQVTLEGRAGALCAIKSFVSHCGDLLTEEVTQRLLPPLPCAVDLLTQLSSILKMYGSPLKTPSVVYRQRLYELLILLPPETYEGNLCAILRELAADLTAPDIQVAASTFLLPPLCHQDDLLILSPFLQETDHRFIEEQLLLGNGVACGSLEYDPYSIYEKDVEGDSVPKPLPPALSVISSASKLFGVVCAHVGETQRLLILEQLLDSIKHTKGARQQVVQLHVVSSVSSFLKYVAGSKGCLGPEEMKRFALTLVMGALESPNPLLRCAAAESWARLAQVVDDGAFTAGLAQVSFDKLKSARDVVTRTGHSLALGSLHRYLGGISSSQHLNSCIGILYTLAQDSTSPDVQTWALHSLSLIIDSAGPLYYVHVEPTLSLIIMLLLNVPPTHAEVHQSLGRCLNALITTLGPELQGNSTSISTLRTSCLLGCAVMQDNPDCLVQAQAISCLQQLHMFAPRHVNLSSLVSCLCVNLCSPYLLLRRAVLACLRQLVQREAAEVSEHAVMLAKDSREELTPDANIREVGLEGALLILLDKETDERLCHDIKETLNYMLTSMAVEKLSLWLKLCKDVLAASADFTAVTCVDTMQEEEGDKGDDASVLTTRRDEKSHPFTNPRWATRVFAAECVCRIINQCENANSAHFDIALAQEMKKRDSRNDFLVLHLADLIRMAFMAATDHSDQLRLSGLEMLLVVIRRFATVPEPEFPGHVILEQYQANVGAALRPAFTSETPPDVTAKACQVCSAWIASGVVSDLNDLRRVHQLLVSSLTKIQAGKEALSHLYNESASTMEILAVLKAWAEVYIIAVQRHKNHRQPLKTTTCLEDGIRNGSCSSDGLLDLVYADLGTLSRLWLAALQDFALLTLPSEFASQLPAEGGAFYTAETSENAKLHYYNSWALILHATALWLTSTGFVVADPDEGASNLSRPVTPTSMCQGSSSGATIKSPEDVYTDRFHLILGISVEFLCSLRSDATMESITACLHALQALLDVPWPRSKIGSDQDLGIELLNVLHRVILTRESPSIQLASLEVVRQIICAAQEHVKEKRRSAEVDDGAAEKETLPEFGEGKDTGGLVPGKSLVFATLELCVCILVRQLPELNPKLTGSPGVKATKPQILLEDGSRLVSAALVILSELPAVCSPEGSISILPTILYLTIGVLRETAVKLPGGQLSSTVAASLQALKGILSSPMARAEKSRTAWTDLLRSALTTILDCWDPVDETHQELDEVSLLTAITVFILSTSPEVTTIPCLQKRCIDKFKATLEIKDPVVQIKTYQLLHSIFQYPNPAVSYPYIYSLASCIMEKLQEIDKRKPENTAELEIFQEGIKVLETLVTVAEEHHRAQLVACLLPILISFLLDENSLGSATSIMRNLHDFALQNLMQIGPQYSSVFKSLVASSPALKARLEAAIKGNQESVKVKIPTSKYTKSPGKNSSIQLKTSFL

SEQ ID NO: 59953 - protein, 164 aa, Homo sapiens
MTDTSVLDQWKASFFVEDFLEKKTITRMVTQINCEFEEVVPSSNPDSQIEVEEVSLYTHMDYNEVFTPVSCLEKCSALQNQNQDLFIDDKGILFVSSRKHLPTLPTLLSRLKLFLVKDPLLDFKGQIFTEANFSRECFSLQETLEAFVKEDFCMDKVNFCQEKL

SEQ ID NO: 59954 - protein, 86 aa, Homo sapiens
  MOD_RES (1)..(1): Any amino acid
XRGDMEQNDSDNRRIIRYPDSHQLFVGNLPHDIDENELKEFFMTTRPTLIVQKGVDDLSHMFLSDCLVLIWPGSVVFRRNSWINQS

SEQ ID NO: 59955 - protein, 70 aa, Homo sapiens
  MOD_RES (1)..(1): Any amino acid
XPEVVASPLVPCPSTPRLASASHPEELCELEIRIKELELLTITGDGFDSQSFLGLWTTCADAGRIPQPTS

SEQ ID NO: 59956 - protein, 143 aa, Homo sapiens
MGTSLSPNDPWPLNPLSIQQTTLLLLLSVLATVHVGQRLLRQRRRQLRSAPPGPFAWPLIGNAAAVGQAAHLSFARLARRYGDVFQIRLGSCPIVVLNGERAIHQALVQQGSAFADRPAFASFRVVSGGRSMAFGHYSEHWKV

SEQ ID NO: 59957 - protein, 116 aa, Homo sapiens
MQWLRVRESPGEATGHRVTMGTAALGPVWAALLLFLLMCEIPMVELTFDRAVASGCQRCCDSEDPLDPAHVSSASSSGRPHALPEIRPYINITILKGRGRTRFPSRLWWLTAVTRP

SEQ ID NO: 59958 - protein, 46 aa, Homo sapiens
MPEIRVTPLGAGQDVGRSCILVSIAGKNVMLDCGMHMGFNDDSCLD

SEQ ID NO: 59959 - protein, 1283 aa, Homo sapiens
MAELEEVTLDGKPLQALRVTDLKAALEQRGLAKSGQKSALVKRLKGALMLENLQKHSTPHAAFQPNSQIGEEMSQNSFIKQYLEKQQELLRQRLEREAREAAELEEASAESEDEMIHPEGVASLLPPDFQSSLERPELELSRHSPRKSSSISEEKGDSDDEKPRKGERRSSRVRQARAAKLSEGSQPAEEEEDQETPSRNLRVRADRNLKTEEEEEEEEEEEEDDEEEEGDDEGQKSREAPILKEFKEEGEEIPRVKPEEMMDERPKTRSQEQEVLERGGRFTRSQEEARKSHLARQQQEKEMKTTSPLEEEEREIKSSQGLKEKSKSPSPPRLTEDRKKASLVALPEQTASEEETPPPLLTKEASSPPPHPQLHSEEEIEPMEGPAPAVLIQLSPPNTDADTRELLVSQHTVQLVGGLSPLSSPSDTKAESPAEKVPEESVLPLVQKSTLADYSAQKDLEPESDRSAQPLPLKIEELALAKGITEECLKQPSLEQKEGRRASHTLLPSHRLKQSADSSSSRSSSSSSSSSRSRSRSPDSSGSRSHSPLRSKQRDVAQARTHANPRGRPKMGSRSTSESRSRSRSRSRSASSNSRKSLSPGVSRDSSTSYTETKDPSSGQEVATPPVPQLQVCEPKERTSTSSSSVQARRLSQPESAEKHVTQRLQPERGSPKKCEAEEAEPPAATQPQTSETQTSHLPESERIHHTVEEKEEVTMDTSENRPENDVPEPPMPIADQVSNDDRPEGSVEDEEKKESSLPKSFKRKISVVSATKGVPAGNSDTEGGQPGRKRRWGASTATTQKKPSISITTESLKSLIPDIKPLAGQEAVVDLHADDSRISEDETERNGDDGTHDKGLKICRTVTQVVPAEGQENGQREEEEEEKEPEAEPPVPPQVSVEVALPPPAEHEVKKVTLGDTLTRRSISQQKSGVSITIDDPVRTAQVPSPPRGKISNIVHISNLVRPFTLGQLKELLGRTGTLVEEAFWIDKIKSHCFVTYSTVEEAVATRTALHGVKWPQSNPKFLCADYAEQDELDYHRGLLVDRPSETKTEEQGIPRPLHPPPPPPVQPPQHPRAEQREQERAVREQWAEREREMERRERTRSEREWDRDKVREGPRSRSRSRDRRRKERAKSKEKKSEKKEKAQEEPPAKLLDDLFRKTKAAPCIYWLPLTDSQIVQKEAERAERAKEREKRRKEQEEEEQKEREKEAERERNRQLEREKRREHSRERDRERERERERDRGDRDRDRERDRERGRERDRRDTKRHSRSRSRSTPVRDRGGRR

SEQ ID NO: 59960 - protein, 128 aa, Homo sapiens
MVMIISTMEPQVSNGPTSNTSNGPSSNNRNCPSPMQTGATTDDSKTNLIVNYLPQNMTQEEFRSLFGSIGEIESCKLVRDKITGQSLGYGFVNYIDPKDAEKAINTLNGLRLQTKTIKATVYLCFSLL

SEQ ID NO: 59961 - protein, 566 aa, Homo sapiens
MSLAAYCVICCRRIGTSTSPPKSGTHWRDINPFSTVDIEDHECAVWLLLRKSKSDDKTTRLEAVREMSETHHWHDYQYRIIAQACDPKTLIGLARSEESDLRFFLLPPPLPSLKEDSSTEEELRQLLASLPQTELDECIQYFTSLALSESSQSLAAQKGGLWCFGGNGLPYAESFGEVPSATVEMFCLEAIVKHSEISTHCDKIEANGGLQLLQRLYRLHKDCPKVQRNIMRVIGNMALNEHLHSSIVRSGWVSIMAEAMKSPHIMESSHAARILANLDRETVQEKYQDGVYVLHPQYRTSQPIKADVLFIHGLMGAAFKTWRQQDSEQAVIEKPMEDEDRYTTCWPKTWLAKDCPALRIISVEYDTSLSDWRARCPMERKSIAFRSNELLRKLRAAGVGDRPVVWISHSMGGLLVKKMLLEASTKPEMSTVINNTRGIIFYSVPHHGSRLAEYSVNIRYLLFPSLEVKELSKDSPALKTLQDDFLEFAKDKNFQVLNFVETLPTYIGSMIKLHVVPVESADLGIGDLIPVDVNHLNICKPKKKDAFLYQRTLQFIREALAKDLEN

SEQ ID NO: 59962 - protein, 14 aa, Homo sapiens
  MOD_RES (1)..(1): Any amino acid
XCKAETPACMESAF

SEQ ID NO: 59963 - protein, 137 aa, Homo sapiens
MAALMTPGTGAPPAPGDFSGEGSQGLPDPSPEPKQLPELIRMKRDGGRLSEADIRGFVAAVVNGSAQGAQIGAMLMAIRLRGMDLEETSVLTQALAQSGQQLEWPEAWRQQLVDKHSTGGVGDKVSLVLAPALAACG

SEQ ID NO: 59964 - protein, 478 aa, Homo sapiens
MAALRALCGFRGVAAQVLRPGAGVRLPIQPSRGVRQWQPDVEWAQQFGGAVMYPSKETAHWKPPPWNDVDPPKDTIVKNITLNFGPQHPAAHGVLRLVMELSGEMVRKCDPHIGLLHRGTEKLIEYKTYLQALPYFDRLDYVSMMCNEQAYSLAVEKLLNIRPPPRAQWIRVLFGEITRLLNHIMAVTTHALDLGAMTPFFWLFEEREKMFEFYERVSGARMHAAYIRPGGVHQDLPLGLMDDIYQFSKNFSLRLDELEELLTNNRIWRNRTIDIGVVTAEEALNYGFSGVMLRGSGIQWDLRKTQPYDVYDQVEFDVPVGSRGDCYDRYLCRVEEMRQSLRIIAQCLNKMPPGEIKVDDAKVSPPKRAEMKSFTLIAQTGVQSRLTATSASQTSMESLIHHFKLYTEGYQVPPGATYTAIEAPKGEFGVYLVSDGSSRPYRCKIKAPGFAHLAGLDKMSKGHMLADVVAIIGTRPIV

SEQ ID NO: 59965 - protein, 807 aa, Homo sapiens
  MOD_RES (1)..(1): Any amino acid
XLAQGHGVVLSENMNDRNYADSMSQQDSRNMNYVMLGKPMNNGLMEKMVEESDEEVCLSSLECLRNQCFDLARKLSETNPQERNPQQNMNIRQHVRPEEDFPGRTPDRNYSDMLNLMRLEEQLSPRSRVFASCAKEDGCHERDDDTTSVNSDRSEEVFDMTKGNLTLLEKAIALETERAKAMREKMAMEAGRRDNMRSYEDQSPRQLPGEDRKPKSSDSHVKKPYYDPSRTEKKESKCPTPGCDGTGHVTGLYPHHRSLSGCPHKDRVPPEILAMHESVLKCPTPGCTGRGHVNSNRNSHRSLSGCPIAAAEKLAKAQEKHQSCDVSKSSQASDRVLRPMCFVKQLEIPQYGYRNNVPTTTPRSNLAKELEKYSKTSFEYNSYDNHTYGKRAIAPKVQTRDISPKGYDDAKRYCKDPSPSSSSTSSYAPSSSSNLSCGGGSSASSTCSKSSFDYTHDMEAAHMAATAILNLSTRCREMPQNLSTKPQDLCATRNPDMEVDENGTLDLSMNKQRPRDSCCPILTPLEPMSPQQQAVMNNRCFQLGEGDCWDLPVDYTKMKPRRIDEDESKDITPEDLDPFQEALEERRYPGEVTIPSPKPKYPQCKESKKDLITCPTPGCDGSGHVTGNYASHRSLSGCPLADKSIRSMLATSSQELKCPTPGCDGSGHITGNYASHRSLSGCPRAKKSGIRIAQSKEDKEDQEPIRCPVPGCDGQGHITGKYASHRSASGCPLAAKRQKDGYLNGSQFSWKSVKTEGMSCPTPGCDGSGHVSGSFLTHRSLSGCPRATSAMKKAKLSGEQMLTIKQR

SEQ ID NO: 59966 - protein, 916 aa, Homo sapiens
MRALAVLSVTLVMACTEAFFPFISRGKELLWGKPEESRVSSVLEESKRLVDTAMYATMQRNLKKRGILSPAQLLSFSKLPEPTSGVIARAAEIMETSIQAMKRKVNLKTQQSQHPTDALSEDLLSIIANMSGCLPYMLPPKCPNTCLANKYRPITGACNNRDHPRWGASNTALARWLPPVYEDGFSQPRGWNPGFLYNGFPLPPVREVTRHVIQVSNEVVTDDDRYSDLLMAWGQYIDHDIAFTPQSTSKAAFGGGSDCQMTCENQNPCFPIQLPEEARPAAGTACLPFYRSSAACGTGDQGALFGNLSTANPRQQMNGLTSFLDASTVYGSSPALERQLRNWTSAEGLLRVHARLRDSGRAYLPFVPPRAPAACAPEPGIPGETRGPCFLAGDGRASEVPSLTALHTLWLREHNRLAAALKALNAHWSADAVYQEARKVVGALHQIITLRDYIPRILGPEAFQQYVGPYEGYDSTANPTVSNVFSTAAFRFGHATIHPLVRRLDASFQEHPDLPGLWLHQAFFSPWTLLRGGGLDPLIRGLLARPAKLQVQDQLMNEELTERLFVLSNSSTLDLASINLQRGRDHGLPGYNEWREFCGLPRLETPADLSTAIASRSVADKILDLYKHPDNIDVWLGGLAENFLPRARTGPLFACLIGKQMKALRDGDWFWWENSHVFTDAQRRELEKHSLSRVICDNTGLTRVPMDAFQVGKFPEDFESCDSITGMNLEAWRETFPQDDKCGFPESVENGDFVHCEESGRRVLVYSCRHGYELQGREQLTCTQEGWDFQPPLCKDVNECADGAHPPCHASARCRNTKGGFQCLCADPYELGDDGRTCVDSGRLPRVTWISMSLAALLIGGFAGLTSTVICRWTRTGTKSTLPISETGGGTPELRCGKHQAVGTSPQRAAAQDSEQ

SEQ ID NO: 59967 - protein, 94 aa, Homo sapiens
MSLKSERRGIHVDQSDLLCKKGCGYYGNPAWQGFCSKCWREEYHKARQKQIQEDWELAERVLLCYPGWSAMVQFQLTATSASWAQVILLLQPPK

SEQ ID NO: 59968 - protein, 241 aa, Homo sapiens
  MOD_RES (1)..(1): Any amino acid
XTVATKGLDFDPWSNNRGDDEVFDSKSREDETKPFGLAVEDRSPATTPDTTPARTPTDESTPTSEPNPFPFHEGKMFEMTRSGAIDMSKRDFVEERLQFFQIGPQSPCERTDIRMAIVADHLGLSWTELARELNFSVDEINQIRVENPNSLISQSFMLLKKWVTRDGKNATTDALTSVLTKINRIDIVTLLEGPIFDYGNISGTRSFADENNVFHDPVDGYPSLQVELETPTGLHYTPPTP

SEQ ID NO: 59969 - protein, 103 aa, Homo sapiens
MDSFDLALLQEWDLESLWGEDILNQRNDSLVVEFQSSASRCRSVYEPDRNALRRKERERRNQETQQDDGTFNSSYSLFSEPYKTNKGDELSNRIQNTLGNYDE

SEQ ID NO: 59970 - protein, 64 aa, Homo sapiens
MCELYSKRDTLGLRKKHIGPSCKVFFASDPIKIVRAQRQYMFDENGEQYLDCINNVAHDPKPTT

SEQ ID NO: 59971 - protein, 49 aa, Homo sapiens
MTSHYVIAIFALMSSCLATAGWSAMARSWLTATSASRVQAILLPQPPEY

SEQ ID NO: 59972 - protein, 81 aa, Homo sapiens
  MOD_RES (1)..(1): Any amino acid
XETRNVAGAEAPPPQKRYYRQRAHSNPMADHTLRYGTVTAVPRHTYSGSGDPGEGLRLCTRPDSGPTRSSCRWLPEHRLSP

SEQ ID NO: 59973 - protein, 201 aa, Homo sapiens
MRALVVDWLVQVHEYLGLAGDTLYLAVHLLDSYLSAGRVRLHRLQLLGVACLFVACKMEECVLPEPAFLCLLSADSFSRAELLRAERRILSRLDFRLHHPGPLLCLGLLAALAGSSPQVMLLATYFLELSLLEAEAAGWEPGRRAAAALSLAHRLLDGAGSRLQPELYRCSLGGGSVWGHRSFRDLPSWSFLRSRRMRDNY

SEQ ID NO: 59974 - protein, 175 aa, Homo sapiens
IGCVEGLKELVHLEWLNLAGNNLKTLLLHGNIITSLRMAPAYLPRSLAILSLAENEIRDLNEISFLASLTELEQLSIMNNPCVMATPSIPGFDYRPYIVSWCLNLRVLDGYVISQKESLKAEWLYSQGKGRAYRPGQHIQLVQYLATVCPLTSTLGLQTAEDAKLEKILSKQRGS

SEQ ID NO: 59975 - protein, 528 aa, Homo sapiens
MWRLRRAAVACEVCQSLVKHSSGIKGSLPLQKLHLVSRSIYHSHHPTLKLQRPQLRTSFQQFSSLTNLPLRKLKFSPIKYGYQPRRNFWPARLATRLLKLRYLILGSAVGGGYTAKKTFDQWKDMIPDLSEYKWIVPDIVWEIDEYIDFEKIRKALPSSEDLVKLAPDFDKIVESLSLLKDFFTSGHKLVSEVIGASDLLLLLGSPEETAFRATDRGSESDKHFRKGLLGELILLQQQIQEHEEEARRAAGQYSTSYAQQKRKVSDKEKIDQLQEELLHTQLKYQRILERLEKENKELRKLVLQKDDKGIHHRKLKKSLIDMYSEVLDVLSDYDASYNTQDHLPRVVVVGDQSAGKTSVLEMIAQARIFPRGSGEMMTRSPVKVTLSEGPHHVALFKDSSREFDLTKEEDLAALRHEIELRMRKNVKEGCTVSPETISLNVKGPGLQRMVLVDLPGVINTVTSGMAPDTKETIFSISKAYMQNPNAIILCIQVSFFYFFQMDLWMLNAVLLQTWSVKWTLMEGEPYSF

SEQ ID NO: 59976 - protein, 260 aa, Homo sapiens
MALSRVCWARSAVWGSAVTPGHFVTRRLQLGRSGLAWGAPRSSKLHLSPKADVKNLMSYVVTKTKAINGKYHRFLGRHFPRFYVLYTIFMKGIISIPPFANYLVFLLMYLFPRQLLIRHFWTPKQQTDFLDIYHAFRKQSHPEIISYLEKVIPLISDAGLRWRLTDLCTKIQRGTHPAIHDILALRECFSNHPLGMNQLQALHVKALSRAMLLTSYLPPPLLRHRLKTHTTVIHQLDKALAKLGIGQLTAQEVKSACYLR

SEQ ID NO: 59977 - protein, 132 aa, Homo sapiens
  MOD_RES (1)..(1): Any amino acid
XMMSPTMASPACRPWLVADCICLMALDKPQAVPVDVHMWHIAQRDYSWHPTTSQAKGPSPQTNKELGNFFRSLWGPYAGWAQATPPSYRCCSVPTCANPAMLRSHQQSAERVPKGRKARWGTLDKEIPQAPS

SEQ ID NO: 59978 - protein, 105 aa, Homo sapiens
MQNSEGGADSPASVALRPSAAAPPVPASPQRVLVQAASSNPKGAQMQPISLPRVQQVPQQVQPVQHVYPAQVQYVEGGDAVYTNGAIRTAYTYNPEPQMYAPSST

SEQ ID NO: 59979 - protein, 123 aa, Homo sapiens
MPPSKPHPPVVGKVTHHSIELYWDLEKKAKRQGPQEQWFRFSIEEEDPKMHTYGIIYTGYATKHVVEGLEPRTLYRFRLKVTSPSGECEYSPLVSVSTTREPISSEHLHRAVSVNDEDLLVRI

SEQ ID NO: 59980 - protein, 106 aa, Homo sapiens
MSRQTTSVGSSCLDLWREKNDRLVRQAKVAQNSGLTLRRQQLAQDALEGLRGLLHSLQGLPAAVPVLPLELTVTCNFIILRASLAQGFTEDQAQDIQRSLEREWSL

SEQ ID NO: 59981 - protein, 133 aa, Homo sapiens
MNNQKVVAVLLQECKQVLDQLLLEAPDVSEEDKSEDQRCRGVPEGLHPRSGLCGCGGYCVLGGPVPVWARRLWKTSAGRQRSPQVAASHANCPAGGYSPSPNLRELRKTFKSRVYSEQSNKQQWSNGYLAVQK

SEQ ID NO: 59982 - protein, 62 aa, Homo sapiens
  MOD_RES (1)..(1): Any amino acid
XVSDSGGQRTSDKIQEYPQAVQETWCRHLLLARASGSFYSCRKVKWEQICHTLIMKYQMKGL

SEQ ID NO: 59983 - protein, 78 aa, Homo sapiens
MDMFSLDMIISDPAAEASRAGKKQLRGVQNPCPSARARPRHKSLNIKDKISEWEGKKEVPTPAPSRRADGQEDYLPSS

SEQ ID NO: 59984 - protein, 40 aa, Homo sapiens
MALVLGSLLLLGLCGNSFSGGQPSSTDAPKAWNYELPATN

SEQ ID NO: 59985 - protein, 73 aa, Homo sapiens
MNTPKEEFQDWPIVRIAAHLPDLIVYGHFSPERPFMDYFDGVLMFVDISGKCKRDVCLMWMSNRLAWEFTCRA

SEQ ID NO: 59986 - protein, 335 aa, Homo sapiens
  MOD_RES (1)..(1): Any amino acid
XNKILQINKDDVTALHCKVVCLIQNGSFKEALNVINTHTKVLANNSLSFEKAYCEYRLNRIENALKTIESANQQTDKLKELYGQVLYRLERYDECLAVYRDLVRNSQDDYDEERKTNLSAVVAAQSNWEKVVPENLGLQEGTHELCYNTACALIGQGQLNQAMKILQKAEDLCRRSLSEDTDGTEEDPQAELAIIHGQMAYILQLQGRTEEALQLYNQIIKLKPTDVGLLAVIANNIITINKAEQCRKISASLQSQSPEHLLPVLIQAAQLCREKQHTKAIELLQEFSDQHPENAAEIKLTMAQLKISQGNISKACLILRSIEELKHKPGMVSAL

SEQ ID NO: 59987 - protein, 88 aa, Homo sapiens
MISKHSHEQSDRGEGVEVVQNEPFEDPHHGNGQFTEKRVYLNSKLPSWARAVVPKIFYVTEKAWNYYPYTITEYTCSFLPKFSIHIET

SEQ ID NO: 59988 - protein, 707 aa, Homo sapiens
MSTADALDDENTFKILVATDIHLGFMEKDAVRGNDTFVTLDEILRLAQENEVDFILLGGDLFHENKPSRKTLHTCLELLRKYCMGDRPVQFEILSDQSVNFGFSKFPWVNYQDGNLNISIPVFSIHGNHDDPTGADALCALDILSCAGFVNHFGRSMSVEKIDISPVLLQKGSTKIALYGLGSIPDERLYRMFVNKKVTMLRPKEDENSWFNLFVIHQNRSKHGSTNFIPEQFLDDFIDLVIWGHEHECKIAPTKNEQQLFYISQPGSSVVTSLSPGEAVKKHVGLLRIKGRKMNMHKIPLHTVRQFFMEDIVLANHPDIFNPDNPKVTQAIQSFCLEKIEEMLENAERERLGNSHQPEKPLVRLRVDYSGGFEPFSVLRFSQKFVDRVANPKDIIHFFRHREQKEKTGEEINFGKLITKPSEGTTLRVEDLVKQYFQTAEKNVQLSLLTERGMGEAVQEFVDKEEKDAIEELVKYQLEKTQRFLKERHIDALEDKIDEEVRRFRETRQKNTNEEDDEVREAMTRARALRSQSEESASAFSADDLMSIDLAEQMANDSDDSISAATNKGRGRGRGRRGGRGQNSASRGGSQRGRDTGLETSTRSRNSKTAVSASRNMSIIDAFKSTRQQPSRNVTTKNYSEVIEVDESDVEEDIFPTTSKTDQRWSSTSSSKIMSQSQVSKGVDFESSEDDDDDPFMNTSSLRRNRR

SEQ ID NO: 59989 - protein, 155 aa, Homo sapiens
  MOD_RES (1)..(1): Any amino acid
XEENLGIDKRVTRFVLPVGATINMDGTALYEAVAAIFIAQMNGVVLDGGQIVTVRDRMRTSVNVVGDSFGAGIVYHLSKSELDTIDSQHRVHEDIEMTKTQSIYDDMKNHRESNSNQCVYAAHNSVIVDECKVTLAANGKSADCSVEEEPWKREK

SEQ ID NO: 59990 - protein, 51 aa, Homo sapiens
MAPDPWFSTYDSTCQIAQEIAEKIQQRNQYERKGEKAPKNRTQALMPFPLS

SEQ ID NO: 59991 - protein, 300 aa, Homo sapiens
MSASQDSRSRDNGPDGMEPEGVIESNWNEIVDSFDDMNLSESLLRGIYAYGFEKPSAIQQRAILPCIKGYDVIAQAQSGTGKTATFAISILQQIELDLKATQALVLAPTRELAQQKVVMALGDYMGASCHACIGGTNVRAEVQKLQMEAPHIIVGTPGRVFDMLNRRYLSPKYIKMFVLDEADEMLSRGFKDQIYDIFQKLNSNTQVVLLSATMPSDVLEVTKKFMRDPIRILVKKEELTLEGIRQFYINVEREEWKLDTLCDLYETLTITQAVIFINTRRKVDWLTEKMHARDFTVSAM

SEQ ID NO: 59992 - protein, 98 aa, Homo sapiens
MRRAGLGEGVPPGNYGNYGYANSGYSACEEENERLTESLRSKVTAIKSLSIEIGHEVKTQNKLLAEMVSGYDFNFKKFDLIFANNRISTFIHFEIQRS

SEQ ID NO: 59993 - protein, 1296 aa, Homo sapiens
MKVTVCFGRTRVVVPCGDGHMKVFSLIQQAVTRYRKAIAKDPNYWIQVHRLEHGDGGILDLDDILCDVADDKDRLVAVFDEQDPHHGGDGTSASSTGTQSPEIFGSELGTNNVSAFQPYQATSEIEVTPSVLRANMPLHVRRSSDPALIGLSTSVSDSNFSSEEPSRKNPTRWSTTAGFLKQNTAGSPKTCDRKDEDGTEEDNSRVEPVGHADTGLEHIPNFSLDDMVKLVEVPNDGGPLGIHVVPFSARGGRTLGLLVKRLEKGGKAEHENLFRENDCIVRINDGDLRNRRFEQAQHMFRQAMRTPIIWFHVVPAANKEQYEQLSQSEKNNYYSSRFSPDSQYIDNRSVNSAGLHTVQRAPRLNHPPEQIDSHSRLPHSAHPSGKPPSAPASAPQNVFSTTVSSGYNTKKIGKRLNIQLKKGTEGLGFSITSRDVTIGGSAPIYVKNILPRGAAIQDGRLKAGDRLIEVNGVDLVGKSQEEVVSLLRSTKMEGTVSLLVFRQEDAFHPRELKAEDEDIVLTPDGTREFLTFEVPLNDSGSAGLGVSVKGNRSKENHADLGIFVKSIINGGAASKDGRLRVNDQLIAVNGESLLGKTNQDAMETLRRSMSTEGNKRGMIQLIVARRISKCNELKSPGSPPGPELPIETALDDRERRISHSLYSGIEGLDESPSRNAALSRIMGKYQLSPTVNMPQDDTVIIEDDRLPVLPPHLSDQSSSSSHDDVGFVTADAGTWAKAAISDSADCSLSPDVDPVLAFQREGFGRQSMSEKRTKQFSDASQLDFVKTRKSKSMDLGIADETKLNTVDDQKAGSPSRDVGPSLGLKKSSSLESLQTAVAEVTLNGDIPFHRPRPRIIRGRGCNESFRAAIDKSYDKPAVDDDDEGMETLEEDTEESSRSGRESVSTASDQPSHSLERQMNGNQEKGDKTDRKKDKTGKEKKKDRDKEKDKMKAKKGMLKGLGDMFRFGKHRKDDKIEKTGKIKIQESFTSEEERIRMKQEQERIQAKTREFRERQARERDYAEIQDFHRTFGCDDELMYGGVSSYEGSMALNARPQSPREGHMMDALYAQVKKPRNSKPSPVDSNRSTPSNHDRIQRLRQEFQQAKQDEDVEDRRRTYSFEQPWPNARPATQSGRHSVSVEVQMQRQRQEERESSQQAQRQYSSLPRQSRKNASSVSQDSWEQNYSPGEGFQSAKENPRYSSYQGSRNGYLGGHGFNARVMLETQELLRQEQRRKEQQMKKQPPSEGPSNYDSYKKVQDPSYAPPKGPFRQDVPPSPSQVARLNRLQTPEKGRPFYS

SEQ ID NO: 59994 - protein, 129 aa, Homo sapiens
MGGCFSKPKPVELKIEVVLPEKERGKEELSASGKGSPRAYQGNGTARHFHTEERLSTPHPYPSPQDCVEAAVCHVKDLENGQMREVELGWGKVLLVKDNGEFHALGHKCPHYGAPLVKGVLSRGRVRCP

SEQ ID NO: 59995 - protein, 76 aa, Homo sapiens
LQPIRFVKASAVECGGPKKCALTGQSKSCKHRIKLGDSSNYYYISPFCRYRITSVCNFFTYIRYIQQGLVKQQDVL

SEQ ID NO: 59996 - protein, 77 aa, Homo sapiens
MLSEQTAALGTGWESMNVQLDGAEPQVERGSQEERPWRTVPGPLEHLCCDLEEEPQSLQEKAQSAPWVPAIPQEGNT

SEQ ID NO: 59997 - protein, 52 aa, Homo sapiens
GPWTVNHGQDRRPHAPGRPARGKVQEGSARPPSAVACEDCSCRDEKVAPLAP

SEQ ID NO: 59998 - protein, 179 aa, Homo sapiens
MRRRIRIKDSGGVGEECIQPPNHEINKEMHNFEEELTCPICYSIFEDPRVLPCSHTFCRNCLENILQASGNFYIWRPLRIPLKCPNCRSITEIAPTGIESLPVNFALRAIIEKYQQEDHPDIVTCPEHYRQPLNVYCLLDKKLVCGHCLTIGQHHGHPIDDLQSAYLKEKDTPQKLLEQ

SEQ ID NO: 59999 - protein, 118 aa, Homo sapiens
MFVQGIFGQKLEDTVRYEKRYGNRLAPMLVEQCVDFIRQRGLKEEGLFRLPGQANLVKELQDAFDCGEKPSFDSNTDVHTVASLLKLYLRELPEPVIPYAKYEDFLSCAKLLSKEEEA

SEQ ID NO: 60000 - protein, 245 aa, Homo sapiens
  MOD_RES (1)..(1): Any amino acid
XRQCLMVSRNLGSVGYDPNEKTFDKILVANRGEIACRVIRTCKKMGIKTVAIHSDVDASSVHVKMADEAVCVGPAPTSKSYLNMDAIMEAIKKTRAQAVHPGYGFLSENKEFARCLAAEDVVFIGPDTHAIQAMGDKIESKLLAKKAEVNTIPGFDGVVKDAEEAVRIAREIDGVLLSLPRLECNGTISAHCNLCLPGSSDSPASASLVAGITGACHHAQLIFCIFSRDGVSLCWPGWSRTPDLR

SEQ ID NO: 60001 - protein, 16 aa, Homo sapiens
DDRGDKETRSDKLEDE

SEQ ID NO: 60002 - protein, 579 aa, Homo sapiens
MRTLLPPALLTCWLLAPVSAPATPAPRRLGPGSPLPRRALLPPVFAFLPGAGARAGSGRGSGVARGPELPPGEREALSSGPAGLRDSGWEAACALPRAPPSGVCWKRDRFFLDASTMSSFGAVPGAGSCGRLRGLRVSRGDRGWRWPQMPLGPSLYLLVNSIHPECRFHLEIQEEETKCAELLRSQTEKHKACSGVWDNITCWRPANVGETVTVPCPKVFSNFYSKAGNISKNCTSDGWSETFPDFVDACGYSDPEDESKITFYILVKAIYTLGYSVSLMSLATGSIILCLFRKLHCTRNYIHLNLFLSFILRAISVLVKDDVLYSSSGTLHCPDQPSSWVGCKLSLVFLQYCIMANFFWLLVEGLYLHTLLVAMLPPRRCFLAYLLIGWGLPTVCIGAWTAARLYLEDTGCWDTNDHSVPWWVIRIPILISIIVNFVLFISIIRILLQKLTSPDVGGNDQSQYKRLAKSTLLLIPLFGVHYMVFAVFPISISSKYQILFELCLGSFQGLVVAVLYCFLNSEVQCELKRKWRSRCPTPSASRDYRVCGSSFSRNGSEGALQFHRGSRAQSFLQTETSVI

SEQ ID NO: 60003 - protein, 99 aa, Homo sapiens
MVVKLLSNKRSQAVGILMSSLHLDMKDIQHAVVNLDNSVVDLETLQALYENRAQSDELEKIEKHGRSSKDKENAKSLDKPEQFLYELSLIPNFSERVFC

SEQ ID NO: 60004 - protein, 210 aa, Homo sapiens
MASLRNANPRLKNYFKENYIPQVCEALLCGILVTCPEDPLRYLEGMIMVIIKSGLQNLLWDMCITPSMKPNIRRLSETYLEQLFELDDQLMTPELMIKACSFYTGHLVKTHFCTWRDIARTNENVVLAEKMNRAVTCYNFRLQKSVFHHWHSYMEDQKEKLKNILLRIQQIIYCHKLTIILTKWRNTARHKSKKKEDELILKHELQLKKW

SEQ ID NO: 60005 - protein, 159 aa, Homo sapiens
  MOD_RES (1)..(1): Any amino acid
XADITQQLNQSELAVLLNLLQSQTDLSIPQMAQLLNIHSNPEMQQQLEALNQSISALTEATSQQQDSETMAPEESLKEAPSAPVILPSAEQTTLEASSTPADMQNILAVLLSQLMKTQEPAGSLEENNSDKNSGPQGPRRTPTMPQEEAAGRSNGGNAL

SEQ ID NO: 60006 - protein, 88 aa, Homo sapiens
MSIPLHSLRFNNTMREENVEPQNKQMAFCRPMTETRADVQILHSHVQLPIVSTSASDPGGTSTQLMTSPVFDTMSAPLMGVPNSGALS

SEQ ID NO: 60007 - protein, 51 aa, Homo sapiens
  MOD_RES (1)..(1): Any amino acid
XEKVTEFMLCAGLWTGGKDTCGHNSPIPVLSTCLLGTCYVTSIAVDPGKQQ

SEQ ID NO: 60008 - protein, 88 aa, Homo sapiens
  MOD_RES (1)..(1): Any amino acid
XTKATWYLASSSSCGSYCPPPCWWASSGCTGPHRTCMSGSLGSGSWYGAIGREPGWYGGSQTKTTPLLFSQVPGPGGHHHSLYSTPQT

SEQ ID NO: 60009 - protein, 112 aa, Homo sapiens
MPSLLLLFTAALLSSWAQLLTDANSWWSLALNPVQRPEMFIIGAQPVCSQLPGLSPGQRKLCQLYQEHMAYIGEGAKTGIKECQHQFRQRRWNCSTADNASVFGRVMQIGCV

SEQ ID NO: 60010 - protein, 197 aa, Homo sapiens
MRRLMSSRDWPRTRTGTGILSSQPEENPYWWNANMVFIPYCSSDVWSGASSKSEKNEYAFMGALIIQEVVRELLGRGLSGAKVLLLAGSSAGGTGVLLNVDRVAEQLEKLGYPAIQVRGLADSGWFLDNKQYRHTDCVDTITCAPTEAIRRGIRYWNGVVPERCRRQFQEGEEWNCFFGYKVYPTLRCPVFVVQWLF

SEQ ID NO: 60011 - protein, 108 aa, Homo sapiens
TNGNRCCAWSGIKSHPRSWTRPPRMRRMRTETSRCTSARAWPRLESPSAAGWRKGPWAQPIVSGVYGHGSGRGKGQSSLHPQFIPGPGPCRGTSGGCRDLRISGLLAD

SEQ ID NO: 60012 - protein, 2354 aa, Homo sapiens
AYFRQGVALQYLGRHADALAAFASGLAQDPKSLQLLVGMVEAAMKSPMRDSLEPTYQQLQKMKLDKSPFVVVSVVGQELLTAGHHGASVVVLEAALKIGTCSLKLRGSVFSALSSAYWSLGNTEKSTGYMQQDLDVAKTLGDQTGECRAHGNLGSAFFSKGNYREALTNHRHQLVLAMKLKDREAASSALSSLGHVYTAIGDYPNALASHKQCVLLAKQSKDELSEARELGNMGAVYIAMGDFENAVQCHEQHLKIAKDLGNKREEARAYSNLGSAYHYRRNFDKAMSYHNYVLELAQELMEKAIEMRAYAGLGHAARCMQDLERAKQYHEQQLGIAEDLKDRAAEGRASSNLGIIHQMKGDYDTALKLHKTHLCIAQELSDYAAQGRAYGNMGNAYNALGMYDQAVKYHRQELQISMEVNDRASQASTHGNLAVAYQALGAHDRALQHYQNHLNIARELRDIQSEARALSNLGNFHCSRGEYVQAAPYYEQYLRLAPDLQDMEGEGKVCHNLGYAHYCLGNYQEAVKYYEQDLALAKDLHDKLSQAKAYCNLGLAFKALLNFSKAEECQKYLLSLAQSLNNSQAKFRALGNLGDIFICKKDINGAIKFYEQQLGLAHQVKDRRLEASAYAALGTAYRMIQKYDKALGYHTQELEVYQELSDLPGECRAHGHLAAVYMALGKYTMAFKCYEEQLDLGQKLKDPSLEAQVYGNMGITKMNMNVMEEAIGYFEQQLAMLQQLSGNESVLDRGRAYGNLGDCYEALGDYEEAIKYYEQYLSVAQSLNRMQDQAKAYRGLGNGHRAMGSLQQALVCFEKRLVVAHELGEAFNKAQAYGELGSLHSQLGNYEQAISCLERQLNIARDMKDRALESDAACGLGGVYQQMGEYDTALQYHQLDLQIAEETNNPTCQGRAYGNLGLTYESLGTFERAVVYQEQHLSIAAQMNDLAAKTVSYSSLGRTHHALQNYSQAVMYLQEGLRLAEQLGRREDEAKIRHGLGLSLWASGNLEEAQHQLYRASALFETIRHEAQLSTDYKLSLFDLQTSSYQALQRVLVSLGHHDEALAVAERGRTRAFADLLVERQTGQQDSDPYSPVTIDQILEMVNGQRGLVLYYSLAAGYLYSWLLAPGAGIVKFHEHYLGENTVENSSDFQASSSVTLPTATGSALEQHIASVREALGVESHYSRACASSETESEAGDIMDQQFEEMNNKLNSVTDPTGFLRMVRRNNLFNRSCQSMTSLFSNTVSPTQDGTSSLPRRQSSFAKPPLRALYDLLIAPMEGGLMHSSGPVGRHRQLILVLEGELYLIPFALLKGSSSNEYLYERFGLLAVPSIRSLSVQSKSHLRKNPPTYSSSTSMAAVIGNPKLPSAVMDRWLWGPMPSAEEEAYMVSELLGCQPLVGSVATKERVMSALTQAECVHFATHISWKLSALVLTPSMDGNPASSKSSFGHPYTIPESLRVQDDASDGESISDCPPLQELLLTAADVLDLQLPVKLVVLGSSQESNSKVTADGVIALTRAFLAAGAQCVLVSLWPVPVAASKMFIHAFYSSLLNGLKASAALGEAMKVVQSSKAFSHPSNWAGFMLIGSDVKLNSPSSLIGQALTEILQHPERARDALRVLLHLVEKSLQRIQNGQRNAMYTSQQSVENKVGGIPGWQALLTAVGFRLDPPTSGLPAAVFFPTSDPGDRLQQCSSTLQSLLGLPNPALQALCKLITASETGEQLISRAVKNMVGMLHQVLVQLQAGEKEQDLASAPIQVSISVQLWRLPGCHEFLAALGFDLCEVGQEEVILKTGKQANRRTVHFALQSLLSLFDSTELPKRLSLDSSSSLESLASAQSVSNALPLGYQQPPFSPTGADSIASDAISVYSLSSIASSMSFVSKPEGGSEGGGPGGRQDHDRSKNAYLQRSTLPRSQLPPQTRPAGNKDEEEYEGFSIISNEPLATYQENRNTCFSPDHKQPQPGTAGGMRVSVSSKGSISTPNSPVKMTLIPSPNSPFQKVGKLASSDTGESDQSSTETDSTVKSQEESNPKLDPQELAQKILEETQSHLIAVERLQRSGGQVSKSNNPEDGVQAPSSTAVFRASETSAFSRPVLSHQKSQPSPVTVKPKPPARSSSLPKVSSGYSSPTTSEMSIKDSPSQHSGRPSPGCDSQTSQLDQPLFKLKYPSSPYSAHISKSPRNMSPSSGHQSPAGSAPSPALSYSSAGSARSSPADAPDIDKLKMAAIDEKVQAVHNLKMFWQSTPQHSTGPMKIFRGAPGTMTSKRDVLSLLNLSPRHNKKEEGVDKLELKELSLQQHDGAPPKAPPNGHWRTETTSLGSLPLPAGPPATAPARPLRLPSGNGYKFLSPGRFFPSSKC

SEQ ID NO: 60013 - protein, 234 aa, Homo sapiens
PGPGEPAAPGAQHFLYEVPPWVMCRFYKVMDALEPADWCQFAALIVRDQTELRLCERSGQRTASVLWPWINRNARVADLVHILTHLQLLRARDIITAWHPPAPLPSPGTTAPRPSSIPAPAEAEAWSPRKLPSSASTFLSPAFPGSQTHSGPELGLVPSPASLWPPPPSPAPSSTKQDPVSKRKTLGKVKYGCKSHGSVLARSENSEILQKVEQHPPPTSGQCLQALLGTCELA

SEQ ID NO: 60014 - protein, 374 aa, Homo sapiens
MSVAAHTCNLSTSGGQRSKRPGVRDQPGQHHGDLCLQNIKSVFVSFFQRNVGSSQFKTIEDDLVSALVRSGCIPENHGEDMRKMSFQRCARTDKGVSAAGQVVSLKVWLIDDILEKINSHLPSHIRILGLKRVTGGFNSKNRCDARTYCYLLPTFAFAHKDRDVQDETYRLSAETLQQVNRLLACYKGTHNFHNFTSQKGPQDPSACRYILEMYCEEPFVREGLEFAVIRVKGQSFMMHQIRKMVGLVVAIVKGYAPESVLERSWGTEKVDVPKAPGLGLVLERVHFEKYNQRFGNDGLHEPLDWAQEEGKVAAFKEEHIYPTIIGTERDERSMAQWLSTLPIHNFSATALTAGGTGAKVPSPLEGSEGDGDTD

SEQ ID NO: 60015 - protein, 63 aa, Homo sapiens
MPECWDGVGEGNAGAVKLAGLGDPRWSPGHLLSPGHQPHPPELRELTGGCERAAWSGAPSGGT

SEQ ID NO: 60016 - protein, 126 aa, Homo sapiens
MVSPPEKDDGQKGEEAVGSTEHPEEVTTQAEAAIEEGEVETEGEAAVEGEEEAVSYGDAESEEEYYYTETSSPEGQISAADTTYPYFSPPQELPGEEAYDSVSGEAGLQGFQQEATGPPESRERRV

SEQ ID NO: 60017 - protein, 86 aa, Homo sapiens
MPKVKALQCALALEISSVTCPGVVLKDKEDIYLSICVFGQYKKTQCVPATFPLVFNARMVFEKVFPDAVDPGDVVTQLEWYLSCSG

SEQ ID NO: 60018 - protein, 139 aa, Homo sapiens
MDAIHIGMSSTPLVKHTAGAGLKANRPRVMSKSGHSNVRIDKVDGIYLLYLQDLWTTVIDMKWRYKLTLFAATFVMTWFLFGVIYYAIAFIHGDLEPGEPISNHTPCIMKVDSLTGAFLFSLESQTTIGYGVRSITEEC

SEQ ID NO: 60019 - protein, 206 aa, Homo sapiens
MALYYDHQIEAPDAAGSPSFISWHPVHPFLAVAYISTTSTGSVDIYLEQGECVPDTHVERPFRVASLCWHPTRLVLAVGWETGEVTVFNKQDKEQHTMPLTHTADITVLLGFQEEPAGSEQRHLRGHPQRAGHVVTLPPASGRHAGLPESAECVLPVHGGRTQPAHRHAHQWSVCHQGCCRSLERKAGGDLRAFWSRDTECRDLLV

SEQ ID NO: 60020 - protein, 113 aa, Homo sapiens
MGAGIAVLFKKKFGGVQELLNQQKKSGEVAVLKRDGRYIYYLITKKRASHKPTYENLQKSLEAMKSHCLKNGVTDLSMPRIGCGLDRLQWENVSAMIEEVFEATDIKITVYTL

SEQ ID NO: 60021 - protein, 69 aa, Homo sapiens
MATPRGLGALLLLLLLPTSGQEKPTEGPRNTCLGSNNMYDIFNLNDKALCFTKCRQSGSDSCNVENLQR

SEQ ID NO: 60022 - protein, 729 aa, Homo sapiens
EERMDSARPCLHRQHHLLNDRGSEEPPGSKGSVTLSDLPGFLGDLASEEDSIEKDKEEAAISRELSEITTAEAEPVVPRGGFDSPFYRDSLPGSQRKTHSAASSSQGASVNPEPLHSSLDKLGPDTPKQAFTPIDLPCGSADESPAGDRECQTSLETSIFTPSPCKIPPPTRVGFGSGQPPPYDHLFEVALPKTAHHFVIRKTEELLKKAKGNTEEDGVPSTSPMEVLDRLIQQGADAHSKELNKLPLPSKSVDWTHFGGSPPSDEIRTLRDQLLLLHNQLLYERFKRQQHALRNRRLLRKVIKAAALEEHNAAMKDQLKLQEKDIQMWKVSLQKEQARYNQLQEQRDTMVTKLHSQIRQLQHDREEFYNQSQELQTKLEDCRNMIAELRIELKKANNKLSNSESVQQQMEFLNRQLLVLGEVNELYLEQLQNKHSDTTKEVEMMKAAYRKELEKNRSHVLQQTQRLDTSQKRILELESHLAKKDHLLLEQKKYLEDVKLQARGQLQAAESRYEAQKRITQVFELEILDLYGRLEKDGLLKKLEEEKAEAAEAAEERLDCCNDGCSDSMVGHNEEASGHNGETKTPRPSSARGSSGSRGGGGSSSSSSELSTPEKPPHQRAGPFSSRWETTMGEASASIPTTVGSLPSSKSFLGMKARELFRNKSESQCDEDGMTSSLSESLKTELGKDLGVEAKIPLNLDGPHPSPPTPDSVGQLHIMDYNETHHEHS

SEQ ID NO: 60023 - protein, 494 aa, Homo sapiens
MATSRGASRCPRDIANVMQRLQDEQEIVQKRTFTKWINSHLAKRKPPMVVDDLFEDMKDGVKLLALLEVLSGQKLPCEQGRRMKRIHAVANIGTALKFLEGRKSMHRGSPIKLVNINSTDIADGRPSIVLGLMWTIILYFQIEELTSNLPQLQSLSSSASSVDSIVSSETPSPPSKRKVTTKIQGNAKKALLKWVQYTAGKQTGIEVKDFGKSWRSGVAFHSVIHAIRPELVDLETVKGRSNRENLEDAFTIAETELGIPRLLDPEDVDVDKPDEKSIMTYVAQFLKHYPDIHNASTDGQEDDEILPGFPSFANSVQNFKREDRVIFKEMKVWIEQFERDLTRAQMVESNLQDKYQSFKHFRVQYEMKRKQIEHLIQPLHRDGKLSLDQALVKQSWDRVTSRLFDWHIQLDKSLPAPLGTIGAWLYRAEVALREEITVQQVHEETANTIQRKLEQHKKIEAIRKELPPAPTATSTHLRNCICARIHALHFCYYG

SEQ ID NO: 60024 - protein, 62 aa, Homo sapiens
MHYPTALLFLILANGAQAFRICAFNAQRLTLAKVAREQVMDTLVRDVILLGDFNADCASLTK

SEQ ID NO: 60025 - protein, 109 aa, Homo sapiens
DAPAPAASQPSGCGKHNSPERCAPLGQGWGAAGACRRLSRAGGRRGLPACGRSRVGRPARGCPRGRPKSGMRASRRSGCELWPRKGPRRGKFIWTIMQRLPWSQKLSRP

SEQ ID NO: 60026 - protein, 1554 aa, Homo sapiens
MTPACPLLLSVILSLRLATAFDPAPSACSALASGVLYGAFSLQDLFPTIASGCSWTLENPDPTKYSLYLRFNRQEQVCAHFAPRLLPLDHYLVNFTCLRPSPEEAVAQAESEVGRPEEEEAEAAAGLELCSGSGPFTFLHFDKNFVQLCLSAEPSEAPRLLAPAALAFRFVEVLLINNNNSSQFTCGVLCRWSEECGRAAGRACGFAQPGCSCPGEAGAGSTTTTSPGPPAAHTLSNALVPGGPAPPAEADLHSGSSNDLFTTEMRYGEEPEEEPKVKTQWPRSADEPGLYMAQTGDPAAEEWSPWSVCSLTCGQGLQVRTRSCVSSPYGTLCSGPLRETRPCNNSATCPVHGVWEEWGSWSLCSRSCGRGSRSRMRTCVPPQHGGKACEGPELQTKLCSMAACPVEGQWLEWGPWGPCSTSCANGTQQRSRKCSVAGPAWATCTGALTDTRECSNLECPATDSKWGPWNAWSLCSKTCDTGWQRRFRMCQATGTQGYPCEGTGEEVKPCSEKRCPAFHEMCRDEYVMLMTWKKAAAGEIIYNKCPPNASGSASRRCLLSAQGVAYWGLPSFARCISHEYRYLYLSLREHLAKGQRMLAGEGMSQVVRSLQELLARRTYYSGDLLFSVDILRNVTDTFKRATYVPSADDVQRFFQVVSFMVDAENKEKWDDAQQVSPGSVHLLRVVEDFIHLVGDALKAFQSSLIVTDNLVISIQREPVSAVSSDITFPMRGRRGMKDWVRHSEDRLFLPKEVLSLSSPGKPATSGAAGSPGRGRGPGTVPPGPGHSHQRLLPADPDESSYFVIGAVLYRTLGLILPPPRPPLAVTSRVMTVTVRPPTQPPAEPLITVELSYIINGTTDPHCASWDYSRADASSGDWDTENCQTLETQAAHTRCQCQHLSTFAVLAQPPKDLTLELAGSPSVPLVIGCAVSCMALLTLLAIYAAFWRFIKSERSIILLNFCLSILASNILILVGQSRVLSKGVCTMTAAFLHFFFLSSFCWVLTEAWQSYLAVIGRMRTRLVRKRFLCLGWGLPALVVAVSVGFTRTKGYGTSSYCWLSLEGGLLYAFVGPAAVIVLVNMLIGIIVFNKLMARDGISDKSKKQRAGSERCPWASLLLPCSACGAVPSPLLSSASARNAMASLWSSCVVLPLLALTWMSAVLAMTDRRSVLFQALFAVFNSAQGFVITAVHCFLRREVQDVVKCQMGVCRADESEDSPDSCKNGQLQILSDFEKDVDLACQTVLFKEVNTCNPSTITGTLSRLSLDEDEEPKSCLVGPEGSLSFSPLPGNILVPMAASPGLGEPPPPQEANPVYMCGEGGLRQLDLTWLRPTEPGSEGDYMVLPRRTLSLQPGGGGGGGEDAPRARPEGTPRRAAKTVAHTEGYPSFLSVDHSGLGLGPAYGSLQNPYGMTFQPPPPTPSARQVPEPGERSRTMPRTVPGSTMKMGSLERKKLRYSDLDFEKVMHTRKRHSELYHELNQKFHTFDRYRSQSTAKDKPSPGERPSLSQHRRHQSWSTFKSMTLGSLPPKPRERLTLHRAAAWEPTEPPDGDFQTEV

SEQ ID NO: 60027 - protein, 58 aa, Homo sapiens
  MOD_RES (1)..(1): Any amino acid
XLLMLLHSAARPETKVSEGPVLVLQPASGLSFPAMEALREEILSRALEGPRSPCPAVR

SEQ ID NO: 60028 - protein, 56 aa, Homo sapiens
  MOD_RES (1)..(1): Any amino acid
XTLSIMVTVFAINIHHRSSSTHNAMAPLVRKIFLHTLPKLLCMRSHVDRLLKIGNS

SEQ ID NO: 60029 - protein, 25 aa, Homo sapiens
MPANWTSPQKSSALAPEDHGSSYEC

SEQ ID NO: 60030 - protein, 218 aa, Homo sapiens
PPTTVGATGAVSSTDATAIAATTEATTVPIIPTVAPTTIATTTTVATTTTTTAAATTTTESPPTTTSGTKIHESAYTNNQADIATQGWFIGLMCAIALLVLILLIVCFIKRSRGGKYPVREKKDVPLGPEDPKEEDGSFDYSDEDNKPLQGSQTSLDGTIKQQESDDSLVDYGEGGEGQFNEDGSFIGQYTVKKDKEETEGNESSEATSPVNAIYSLA

SEQ ID NO: 60031 - protein, 70 aa, Homo sapiens
VPVIKWKKDGIHLALGMDERKQQLSNGSLLIQNILHSRHHKPDEGLYQCEASLGDSGSIISRTAKVAVAD

SEQ ID NO: 60032 - protein, 164 aa, Homo sapiens
MGAYARASGVCARGCLDSAGPWTMSRALRPPLPPLCFFLLLLAAAGARAGGYESRMTSSTPVCSTSWTRSSLPCWQIPPVASFTWRLPSSPVGGTSRQMPHRKSCETLCARMGFDGFFFGRLDYQDKWVRMQKLEMEQVWRASTSLKPPTADLFTGVLPNGYNP

SEQ ID NO: 60033 - protein, 199 aa, Homo sapiens
MRQISLVGAVDEEVGDYFPEFLDMLEESPFLKCTLPWGTLSSLKLQSRKDSDDGPIMWVRPGEQMIPVADMPKSPFKRKRTTNEIKNLQYLPRTSEPREMLFEDRTRAHADHIGQGFERQTTAAVGVLKAVHCGEWPDQPRITKDVICFHAEDFLEVVQRMQLDLHEPPLSQCVQWVDDAKLNQLRREGIRYARIQLYD

SEQ ID NO: 60034 - protein, 148 aa, Homo sapiens
MTWRHHVRLLFTVSLALQIINLGNSYQREKHNGGREEVTKVATQKHRQSPLNWTSSHFGEVTGSAEGWGPEEPLPYSRAFGEDPKDFLASHAHGPSAGGAPSLLLLLPCALLHRLLRPDAPAHPRSLVPSVLQRERRPCGRPGLGHRL

SEQ ID NO: 60035 - protein, 867 aa, Homo sapiens
MVVSAGPLSSEKAEMNILEINEKLRPQLAEKKQQFRSLKEKCFVTQLAGFLAKQQNKYKYEECKDLIKSMLRNELQFKEEKLAEQLKQAEELRQYKVLVHSQERELTQLREKLREGRDASRSLNEHLQALLTPDEPDKSQGQDLQEQLAEGCRLAQHLVQKLSPENDEDEDEDVQVEEDEKVLESSSPREMQKAEESKVPEDSLEECAITCSNSHGPCDSNQPHKNIKITFEEDKVNSSLVVDRESSHDECQDALNILPVPGPTSSATNVSMVVSAGPLSSEKAEMNILEINEKLRPQLAEKKQQFRSLKEKCFVTQVACFLAKQQNKYKYEECKDLLKSMLRNELQFKEEKLAEQLKQAEELRQYKVLVHSQERELTQLREKLREGRDASRSLNEHLQALLTPDEPDKSQGQDLQEQLAEGCRLAQHLVQKLSPENDNDDDEDVQVEVAEKVQKSSSPREMQKAEEKEVPEDSLEECAITCSNSHGPYDSNQPHRKTKITFEEDKVDSTLIGSSSHVEWEDAVHIIPENESDDEEEEEKGPVSPRNLQESEEEEVPQESWDEGYSTLSIPPERLASYQSYSSTFHSLEEQQVCMAVDIGRHRWDQVKKEDQEATGPRLSRELLAEKEPEVLQDSLDRCYSTPSGYLELPDLGQPYRSAVYSLEEQYLGLALDVDRIKKDQEEEEDQGPPCPRLSRELLEVVEPEVLQDSLDRCYSTPSSCLEQPDSCQPYRSSFYALEEKHVGFSLDVGEIEKKGKGKKRRGRRSKKKRRRGRKEGEEDQNPPCPRLNSVLMEVEEPEVLQDSLDRCYSTPSMYFELPDSFQHYRSVFYSFEEQHITFALDMDNSFFTLTVTSLHLVFQMGVIFPQ

SEQ ID NO: 60036 - protein, 117 aa, Homo sapiens
MTLSPDLHMRHGSILACAEVAYALYKLAAQENRPVTDHLDEQAVQGLKQIHQQLYDRQLYRGLGGQLMRQAVCVLIEKLSLSKMPFRGDTVIDGWQWLINDTLRHLHLISSHSRQQM

SEQ ID NO: 60037 - protein, 182 aa, Homo sapiens
  MOD_RES (1)..(1): Any amino acid
XVDGLVNFEKLRMIAKEIRHVGRMASVNMDPALMFRTRSLSQGSTNATVLDVAQTGGHKKRVRRSSFLNAKKLYEDAQMARKVKQYLSNLELEMDEESLQTLSLQCEPATNTLPKNPGDKKPVKSETSPVAPRAGSQQKAQSLPQPQQQPPPAHKINQGLQVPAVSLYPSRKKVPVKDLPPF

SEQ ID NO: 60038 - protein, 43 aa, Homo sapiens
MVLADLGRKITSALRSLSNATIINEEVLNAMLKEVCTALLEAD

SEQ ID NO: 60039 - protein, 65 aa, Homo sapiens
MRMSDTVTVKDETATMKDLEAEVKDTTRVENLIKSENYGKILVEKNEHCIENNIDLQGQNDAAEI

SEQ ID NO: 60040 - protein, 1224 aa, Homo sapiens
MVGVLAMAAAAAPPPVKDCEIEPCKKRKKDDDTSTCKTITKYLSPLGKTRDRVFAPPKPSNILDYFRKTSPTNEKTQLGKECKIKSPESVPVDSNKDCTTPLEMFSNVEFKKKRKRVNLSHQLNNIKTENEAPIEISSDDSKEDYSLNNDFVESSTSVLRYKKQVEVLAENIQDTKSQPNTMTSLQNSKKVNPKQGTTKNDFKKLRKRKCRDVVDLSESLPLAEELNLLKKDGKDTKQMENTTSHANSRDNVTEAAQLNDSIITVSYEEFLKSHKENKVEEIPDSTMSICVPSETVDEIVKSGYISESENSEISQQVRFKTVTVLAQVHPIPPKKTGKIPRIFLKQKQFEMENSLSDPENEQTVQKRKSNVVIQEEELELAVLEAGSSEAVKPKCTLEERQQFMKAFRQPASDALKNGVKKSSDKQKDLNEKCLYEVGRDDNSKKIMENSGIQMVSKNGNLQLHTDKGSFLKEKNKKLKKKNKKTLDTGAIPGKNREGNTQKKETTFFLKEKQYQNRMSLRQRKTEFFKSSTLFNNESLVYEDIANDDLLKVSSLCNNNKLSRKTSIPVKDIKLTQSKAESEASLLNVSTPKSTRRSGRISSTPTTETIRGIDSDDVQDNSQLKASTQKAANLSEKHSLYTAELITVPFDSESPIRMKFTRISTPKKSKKKSNKRSEKSEATDGGFTSQIRKASNTSKNISKAKQLIEKAKALHISRSKVTEEIAIPLRRSSRHQTLPERKKLSETEDSVIIIDSSPTALKHPEKNQKKLQCLNDVLGKKLNTSTKNVPGKMKVAPLFLVRKAQKAADPVPSFDESSQDTSEKSQDCDVQCKAKRDFLMSGLPDLLKRQIAKKAAALDVYNAVSTSFQRVVHVQQKDDGCCLWHLKPPSCPLLTKFKELNTKVIDLSKCGIALGEFSTLNSKLKSGNSAAVFMRTRKEFTEEVRNLLLEEIRWSNPEFSLKKYFPLLLKKQIEHQVLSSECHSKQELEADVSHKETKRKLVEAENSKSKRKKPNEYSKNLEKTNRKSEELSKRNNSSGIKLDSSKDSGTEDMLWTEKYQPQTASELIGNELAIKKLHSWLKDWKRRAELEERQNLKGKRDEKHEDFSGGIDFKGSSDDEEESRLCNTVLITGPTGVGKTAAVYACAQELGFKIFEVNASSQRSGRQILSQLKEATQSHQVDKQGVNSQKPCFFNSYYIGKSPKKISSPKKVVTSPRKVPPPSPK

SEQ ID NO: 60041 - protein, 246 aa, Homo sapiens
MTPGTANRATNPLNKELDWASINGFCEQLNEDFEGPPLATRLLAHKIQSPQEWEAIQALTVLETCMKSCGKRFHDEVGKFRFLNELIKVVSPKYLGSRTSEKVKNKILELLYSWTVGLPEEVKIAEAYQMLKKQGIVKSDPKLPDDTTFPLPPPRPKNVIFEDEEKSKMLARLLKSSHPEDLRAANKLIKEMVQEDQKRMEKISKRVNAIEEVNNNVKLLTEMVMSHSQGGAAAGSSEDLMKELYQ

SEQ ID NO: 60042 - protein, 143 aa, Homo sapiens
MQHVGIMHKANQPPHGVPQLSLYEHFNSPHPTPAPADISQKQVHRPLQTPDLSGFYSLTSGSMGQLPHTVSWFTHPSLMLGSGVPGHPAAIPHPAIVPPSGKQELQPFDRNLKTQAESKAEKEAKKPTIKKPLNAFMLYMKEM

SEQ ID NO: 60043 - protein, 119 aa, Homo sapiens
MWLAKACWSIQSEMPCIQAQYGTPAPSPGPRDHLASDPLTPEFIKPTMDLASPEAAPAAPTALPSFSTFMDGYTGEFDTFLYQLPGTVQPCSSASSSASSTSSSSATSPASASFKFEDF

SEQ ID NO: 60044 - protein, 103 aa, Homo sapiens
MKPHRIRMTHNLLLNYGLYRKMEIYRPHKATAEEMTKYHSDEYIKFLRSIRPDNMSEYSKQMQRFNVGEDCPVFDGLFEFCQLSTGGSVAGAVKLNRQQTDMA

SEQ ID NO: 60045 - protein, 142 aa, Homo sapiens
  MOD_RES (1)..(1): Any amino acid
XLSAGWLLDHLSFINKINYQLHQHHEPCCRKKEFTTSVHFESLQMDSVSSSGVCAAFIASDSSTKPENDDGGNYEMFTRKFVFRPELFDVTKPYITPAVHKECQQSNEKEDLMNGVKKEISISIIGKVESFKKYLFFSRKHN

SEQ ID NO: 60046 - protein, 134 aa, Homo sapiens
CKCSSAAHSTYRVQEPAVHIPGQEPLTASMLAAAPLHEQKQMIGTCYLVLKRWSDWMVLSFLPLLLSCDFEGSVSTPLSMMSTPSWLARSRACCWRLTTQSCCSCWSLQNPSMPRKGNPRFHGCQKDSVSGSQP

SEQ ID NO: 60047 - protein, 1503 aa, Homo sapiens
MAAPAEPCAGQGVWNQTEPEPAATSLLSLCFLRTAGVWVPPMYLWVLGPIYLLFIHHHGRGYLRMSPLFKAKMVLGFALIVLCTSSVAVALWKIQQGTPEAPEFLIHPTVWLTTMSFAVFLIHTERKKGVQSSGVLFGYWLLCFVLPATNAAQQASGAGFQSDPVRHLSTYLCLSLVVAQFVLSCLADQPPFFPEDPQQSNPCPETGAAFPSKATFWWVSGLVWRGYRRPLRPKDLWSLGRENSSEELVSRLEKEWMRNRSAARRHNKAIAFKRKGGSGMKAPETEPFLRQEGSQWRPLLKAIWQVFHSTFLLGTLSLIISDVFRFTVPKLLSLFLEFIGDPKPPAWKGYLLAVLMFLSACLQTLFEQQNMYRLKVLQMRLRSAITGLVYRKVLALSSGSRKASAVGDVVNLVSVDVQRLTESVLYLNGLWLPLVWIVVCFVYLWQLLGPSALTAIAVFLSLLPLNFFISKKRNHHQEEQMRQKDSRARLTSSILRNSKTIKFHGWEGAFLDRVLGIRGQELGALRTSGLLFSVSLVSFQVSTFLVALVVFAVHTLVAENAMNAEKAFVTLTVLNILNKAQAFLPFSIHSLVQARVSFDRLVTFLCLEEVDPGAVDSSSSGSAAGKDCITIQSATFAWSQESPPCLHRINLTVPQGCLLAVVGPVGAGKSSLLSALLGELSKVEGFVSIEGAVAYVPQEAWVQNTSVVENVCFGQELDPPWLERVLEACALQPDVDSFPEGIHTSIGEQGMNLSGGQKQRLSLARAVYRKAAVYLLDDPLAALDAHVGQHVFNQVIGPGGLLQGTTRILVTHALHILPQADWIIVLANGAIAEMGSYQELLQRKGALVCLLDQARQPGDRGEGETEPGTSTKDPRGTSAGRRPELRRERSIKSVPEKDRTTSEAQTEVPLDDPDRAGWPAGKDSIQYGRVKATVHLAYLRAVGTPLCLYALFLFLCQQVASFCRGYWLSLWADDPAVGGQQTQAALRGGIFGLLGCLQAIGLFASMAAVLLGGARASRLLFQRLLWDVVRSPISFFERTPIGHLLNRFSKETDTVDVDIPDKLRSLLMYAFGLLEVSLVVAVATPLATVAILPLFLLYAGFQSLYVVSSCQLRRLESASYSSVCSHMAETFQGSTVVRAFRTQAPFVAQNNARVDESQRISFPRLVADRWLAANVELLGNGLVFAAATCAVLSKAHLSAGLVGFSVSAALQVTQTLQWVVRNWTDLENSIVSVERMQDYAWTPKEAPWRLPTCAAQPPWPQGGQIEFQDFGLRYRPELPLAVQGVSFKIHAGEKVGIVGRTGAGKSSLASGLLRLQEAAEGGIWIDGVPIAHVGLHTLRSRISIIPQDPILFPGSLRMNLDLLQEHSDEAIWAALETVQLKALVASLPGQLQYKCADRGEDLSVGQKQLLCLARALLRKTQILILDEATAAVDPGTELQMQAMLGSWFAQCTVLLIAHRLRSVMDCARVLVMDKGQVAESGSPAQLLAQKGLFYRLAQESGLV

SEQ ID NO: 60048 - protein, 62 aa, Homo sapiens
  MOD_RES (1)..(1): Any amino acid
XENTIASLRNAASHGAAFVEFDVHLSKDFVPVVYHDLTCCLTMKKLSSALQLSASCIFLPEI

SEQ ID NO: 60049 - protein, 134 aa, Homo sapiens
MDMGNPGTLSPTKPGSQYYQYSSNNPRRRPLHSSAMEVQTKKVRKVPPGLPSSVYAPSASTADYNRDSPGYPSSKPATSTFPSSFFMQDGHHSSDPWSSSSGMNQPGYAGMLGNSSHIPQSSSYCSLHPHERLS

SEQ ID NO: 60050 - protein, 28 aa, Homo sapiens
MAMDEYLWMVILGFIIAFILAFSVGAND

SEQ ID NO: 60051 - protein, 165 aa, Homo sapiens
METWSVEQVCSWLVEKNLGELVHRFQEVSGAALLALNDRMVQQLVKKIGHQAVLMDLIKKYKQNTQGLKSPENPKKAALVMQTEAARDYRDEESSSPARHGEQMPSFYPAENLDNGLIDQRVLKQRNVKQILARSKALQWTKSYVLPEFPYDVKCMLAEQKCPDH

SEQ ID NO: 60052 - protein, 1061 aa, Homo sapiens
MPHLPLASFRPPFWGLRHSRGLPRFHSVSTQSEPHGSPISRRNREAKQKRLREKQATLEAEIAGESKSPAESIKAWRPKELVLYEIPTKPGEKKDVSGPLPPAYSPRYVEAAWYPWWVREGFFKPEYQARLPQATGETFSMCIPPPNVTGSLHIGHALTVAIQDALVRWHRMRGDQVLWVPGSDHAGIATQAVVEKQLWKERGVRRHELSREAFLREVWQWKEAKGGEICEQLRALGASLDWDRECFTMDVGSSVAVTEAFVRLYKAGLLYRNHQLVNWSCALRSAISDIEVENRPLPGHTQLRLPGCPTPVSFGLLFSVAFPVDGEPDAEVVVGTTRPETLPGDVAVAVHPDDSRYTHLHGRQLRHPLMGQPLPLITDYAVQPHVGTVKVTPAHSPADAEMGARHGLSPLNVIAEDGTMTSLCGDWLQGLHRFVAREKIMSVLSERGLFRGLQNHPMVLPICSRSGDVIEYLLKNQWFVRCQEMGARAAKAVESGALELSPSFHQKNWQHWFSHIGDWCVSRQLWWGHQIPAYLVVEDHAQGEEDCWVVGRSEAEAREVAAELTGRPGAELTLERDPDVLDTWFSSALFPFSALGWPQETPDLARFYPLSLLETGSDLLLFWVGRMVMLGTQLTGQLPFSKVLLHPMVRDRQGRKMSKSLGNVLDPRDIISGVEMQVLQEKLRSGNLDPAELAIVAAAQKKDFPHGIPECGTDALRFTLCSHGVQAGDLHLSVSEVQSCRHFCNKIWNALRFILNALGEKFVPQPAEELSPSSPMDAWILSRLALAAQECERGFLTRELSLVTHALHHFWLHNLCDVYLEAVKPVLWHSPRPLGPPQVLFSCADLGLRLLAPLMPFLAEELWQRLPPRPGCPPAPSISVAPYPSACSLEHWRQPELERRFSRVQEVVQVLRALQATYQLTKARPRVLLQSSEPGDQGLFEAFLEPLGTLGYCGAVGLLPPGAAAPSGWAQAPLSDTAQVYMELQGLVDPQIQLPLLAARRYKLQKQLDSLTARTPSEGEAGTQRQQKLSSLQLELSKLDKAASHLRQLMDEPPAPGSPEL

SEQ ID NO: 60053 - protein, 116 aa, Homo sapiens
MPKNKEYAQVIKMLGNGRLEAMCFDGVKRLCHIRGKLRKKVWINTSDIILVGLRDYQDNKADVILKYNADEARSLKAYGELPEHAKINETDTFGPGDDDEIQFDDIGDDDEDIDDI

SEQ ID NO: 60054 - protein, 111 aa, Homo sapiens
MAARLVSRCGAVRAAPHSGPLVSWRRWSGASTDTVYDVVVSGGGLVGAAMACALGYDIHFHDKKILLLEAGPKKVLEKLSETYSNRVSSISPGSATLLSSVGRLLRGPDNV

SEQ ID NO: 60055 - protein, 99 aa, Homo sapiens
MAMSQESLTFKDVFVDFTLEEWQQLDSAQKNLYRDVMLENYSHLVSVGHLVGKPDVIFRLGPGDESWMADGGTPVRTCAVEMGFLHVHQAGLELPASGD

SEQ ID NO: 60056 - protein, 171 aa, Homo sapiens
MSTYTRTQHRKKCQGPVSFAESWAAQQQAGRVRSPGAPGPLTLKEVEELEQLTQQLMQDMEHPQRQNVAVNELCGRCHQPLARAQPAVRALGQLFHIACFTCHQCAQQLQGQQFYSLEGAPYCEGCYTDTLEKCNTCGEPITDRMLRATGKAYHPHCFTCVVCARPLEGTS

SEQ ID NO: 60057 - protein, 113 aa, Homo sapiens
  MOD_RES (1)..(1): Any amino acid
XKEYLTLKTFIAKVIGLTCALGSGMPLGKEASSSASRSPPPSLQCGTTGGASSLPPSVPSSSGSWQSGTGMKRLLQPSSKPDSGSTSPLTCRSCQPLLSLVLLVASVEPSLST

SEQ ID NO: 60058 - protein, 270 aa, Homo sapiens
MVMTGSQGATRKYKVWMRHRYHSCCNRLGELLGHPSFQVKTLLIRGIIRYVASSTHRRVRSSFSLWLSSSASYSTARIVQPLELALSALLKFVQLEGAHPLEKSKWEGNYLFPRELFKLVVGGLLSPEEDQSLLLSQFREYLDYDDTRYHTMQAAVDAVARVTGQHPEVPPAFWNNAFTLLSAVSLPRREPTVSSFYVKRAELWDTWKVAHLKEHRRVFQAMWLSFLKHKLPLSLYKKVLLIVHDAILPQLAQPTLMIDFLTRACDLGEC

SEQ ID NO: 60059 - protein, 158 aa, Homo sapiens
MSDSWVPNSASGQDPGGRRRAWAELLGRWARQAAGVGGVRPGTVSPVPRSLPARASAGRIPGRRARGAVRGGRPAGAARLPRTRPLLRLGGRPQPPPAGRSLLSRTPPPPAALSGGPGVRGLGLPSAQRPPLASRPRAPLPRALLGRLPRRPRWGRLR

SEQ ID NO: 60060 - protein, 294 aa, Homo sapiens
MENLTISAAHWLTAPAPRPRPRRPRQLTRAYWHNHRSQLFCLATYAGLHVLLFGLAASAHRDLGASVMVAKGCGQCLNFDCSFIAVLMLRRCLTWLRATWLAQVLPLDQNIQFHQLMGYVVVGLSLVHTVAHTVNFVLQAQAEASPFQFWELLLTTRPGIGWVHGSASPTGVALLLLLLLMFICSSSCIRRSGHFEVFYWTHLSYLLVWLLLIFHGPNFWKWLLVPGILFFLEKAIGLAVSRMAAVCIMEVNLLPSKTLSGCTFGPKASGQTGCMSPSRHQTHWAVVLRGCRGV

SEQ ID NO: 60061 - protein, 77 aa, Homo sapiens
MGPLTFMDVAIEFSVEEWQCLDTAQQNLYRNVMLENYRNLVFLGIAVSKPDLITCLEQGKEPWNMERHEMVAKPPGR

SEQ ID NO: 60062 - protein, 369 aa, Homo sapiens
MFCCLGYEWLSGGCKTWHSAWVINTLADHRHRGTDFGGSPWLLIITVFLRSYKFAISLCTSYLCVSFLKTIFPSQNGHDGSTDVQQRARRSNRRRQEGIKIVLEDIFTLWRQVETKVRAKIRKMKVTTKVNRHDKINGKRKTAKEHLRKLSMKEREHGEKERQVSEAEENGKLDMKEIHTYMEMFQRAQALRRRAEDYYRCKITPSARKPLCNRVRMAAVEHRHSSGLPYWPYLTAETLKNRMGHQPPPPTQQHSIIDNSLSLKTPSERLLYPLPPSADDNLKTPPECLLTPLPPSALPSADDNLKTPAECLLYPLPPSADDNLKTPPECLFTPLPPSAPPSVDDNLKTPPECVCSLPFHPQRMIISRN

SEQ ID NO: 60063 - protein, 903 aa, Homo sapiens
MVSSAQMGFNLQALLEQLSQDELSKFKYLITTFSLAHELQKIPHKEVDKADGKQLVEILTTHCDSYWVEMASLQVFEKMHRMDLSERAKDEVREAALKSFNKRKPLSLGITRKERPPLDVDEMLERFKTEAQAFTETKGNVICLGKEVFKGKKPDKDNRCRYILKTKFREMWKSWPGDSKEVQVMAERYKMLIPFSNPRVLPGPFSYTVVLYGPAGLGKTTLAQKLMLDWAEDNLIHKFKYAFYLSCRELSRLGPCSFAELVFRDWPELQDDIPHILAQARKILFVIDGFDELGAAPGALIEDICGDWEKKKPVPVLLGSLLNRVMLPKAALLVTTRPRALRDLRILAEEPIYIRVEGFLEEDRRAYFLRHFGDEDQAMRAFELMRSNAALFQLGSAPAVCWIVCTTLKLQMEKGEDPVPTCLTRTGLFLRFLCSRFPQGAQLRGALRTLSLLAAQGLWAQTSVLHREDLERLGVQESDLRLFLDGDILRQDRVSKGCYSFIHLSFQQFLTALFYTLEKEEEEDRDGHAWDIGDVQKLLSGVERLRNPDLIQAGYYSFGLANEKRAKELEATFGCRMSPDIKQELLRCDISCKGGHSTVTDLQELLGCLYESQEEELVKEVMAQFKEISLHLNAVDVVPSSFCVKHCRNLQKMSLQVIKENLPENVTASESDAEVERSQDDQHMLPFWTDLCSIFGSNKDLMGLAINDSFLSASLVRILCEQIASDTCHLQRVVFKNISPADAHRNLCLALRGHKTVTYLTLQGNDQDDMFPALCEVLRHPECNLRYLGLVSCSATTQQWADLSLALEVNQSLTCVNLSDNELLDEGAKLLYTTLRHPKCFLQRLSLENCHLTEANCKDLAAVLVVSRELTHLCLAKNPIGNTGVKFLCEGLRYPECKLQTLV

SEQ ID NO: 60064 - protein, 45 aa, Homo sapiens
MAEYDLTTRIAHFLDRHLVFPLLEFLSVKEVVSAMWMEKHIGVYY

SEQ ID NO: 60065 - protein, 25 aa, Homo sapiens
MQSPAVLVTSRSPKSTARLRSFTRN

SEQ ID NO: 60066 - protein, 88 aa, Homo sapiens
DWSCCPTPWTSFQSSCYFISTGMQSWTKSQKNCSVMGADLVVINTREEQDFIIQNLKRNSSYFLGLSDPGGRRHWQWVDQTPYNENVT

SEQ ID NO: 60067 - protein, 11 aa, Homo sapiens
MSSLGGGSQDA

SEQ ID NO: 60068 - protein, 145 aa, Homo sapiens
MDQFSTAVVIVCLLAIGSSFAAGIRGGIFTLIFARLNIRLRNCLFRSLVSQETSFFDENRTGDLISRLTSDTTMVSDLVSQNINVFLRNTVKVTGVVVFMFSLSWQLSLVTFMGFPIIMMVSNIYGKYYKRLSKEVQNALARASN

SEQ ID NO: 60069 - protein, 121 aa, Homo sapiens
RWLDPNKPIRKQLKRGSPYSLNFRVKFFVSDPNKLQEEYTRYQYFLQIKQDILTGRLPCPSNTAALLASFAVQSELGDYDQSENLSGYLSDYSFIPNQPQDFEKEIAKLHQQHMIRVTMKL

SEQ ID NO: 60070 - protein, 224 aa, Homo sapiens
MSDFQYLAVHTEAGGKHTSMYDKVLMLRPEKEAFFHQELPLYIPPPIFSRLDAPVDYFYRPETQHREGYNNPPISGENLIGLSRARRPHNAIFVNFEDEEVPKQPLEAAAQTWRRVCTNPVDRKVEEELRKLFDIRPIWSRNAVKANISVHPDKLKVLLPFIAYYMITGPWRSLWIRFGYDPRKNPDAKIYQVLDFRIRCGMKHGYAPSDLPVKAKRSTYNYSL

SEQ ID NO: 60071 - protein, 70 aa, Homo sapiens
MVNVPKTRRTFCKKCGKHQPHKVTQYKKGKDSLYAQGKRRYDRKQSGYGGQTKPIFRKKRQKIEECALLS

SEQ ID NO: 60072 - protein, 91 aa, Homo sapiens
MAANMYRVGDYVYFENSSSNPYLIRRIEELNKTASGNVEAKVVCFYRRRDISNTLIMLADKHAKTEFRSCCPGWSAMARSRLTATSTSQIK

SEQ ID NO: 60073 - protein, 448 aa, Homo sapiens
MIPTFTALLCLGLSLGPRTHMQAGPLPKPTLWAEPGSVISWGNSVTIWCQGTLEAREYRLDKEESPAPWDRQNPLEPKNKARFSIPSMTEDYAGRYRCYYRSPVGWSQPSDPLELVMTGAYSKPTLSALPSPLVTSGKSVTLLCQSRSPMDTFLLIKERAAHPLLHLRSEHGAQQHQAEFPMSPVTSVHGGTYRCFSSHGFSHYLLSHPSDPLELIVSGSLEGPRPSPTRSVSTAAGPEDQPLMPTGSVPHSGLRRHWEVLIGVLVVSILLLSLLLFLLLQHWRQGKHRTLAQRQADFQRPPGAAEPEPKDGGLQRRSSPAADVQGENFSGAAVKDTQPEDGVEMDTRSPHDEDPQAVTYAKVKHSRPRREMASPPSPLSGEFLDTKDRQAEEDRQMDTEAAASEAPQDVTYARLHSFTLRQKATEPPPSQEGASPAEPSVYATLAIH

SEQ ID NO: 60074 - protein, 284 aa, Homo sapiens
MTSVTRSEIIDEQSASYQDRRQSWRRASMKETNRRKSLHPIHQGITELSRSISVDLAESKRLGCLLLSSFQFSIQKLEPFLRDTKGFSLESFRAKASSLSEELKHFADGLETDGTLQKCFEDSNGKASDFSLEASVAEMKEYITKFSLERQTWDQLLLHYQQEAKEILSRGSTEAKITEVKVEPMTYLGSSQNEVLNTKPDYQKILQNQSKVFDCMELVMDELQGSVKQLQAFMDESTQCFQKVSVQLGKRSMQQLDPSPARKLLKLQLQNPPAIHGSGSGSCQ

SEQ ID NO: 60075 - protein, 138 aa, Homo sapiens
MAWVPAESAVEELMPRLLPVEPCDLTEGFDPSVPPRTPQEYLRRVQIEAAQCPDVVVAQIDPKKLKRKQSVNISLSGCQPAPEGYSPTLQWQQQQVAQFSTVRQNVNKHRSHWKSQQLDSNVTMRWGFAMLARLVLNS

SEQ ID NO: 60076 - protein, 185 aa, Homo sapiens
MAEGDAGSDQRQNEEIEAMAAIYGEEWCVIDDCAKIFCIRISDDIDDPKWTLCLQVMLPNEYPGTAPPIYQLNAPWLKGQERADLSNSLEEIYIQNIGESILYLWVEKIRDVLIQKSQMTEPGPDVKKKTEEEDVECEDDLILACQPESSLKALDFDISETRTEVEELPPIDHGIPITDRRSTFQ

SEQ ID NO: 60077 - protein, 425 aa, Homo sapiens
MALPKPGGAHSLALVTVPSMGYAPVPPPTSLQPLLPQQPVFVVQETDGSVTLDNGIIRVKLDPTGRLTSLVLVASGREAIAEGAVGNQFVLFDDVPLYWDAWDVMDYHLETRKPVLGQAGTLAVGTEGGLRGSAWFLLQISPNSRLSQEVVLDVGCPYVRFHTEVHWHEAHKFLKVEFPARVRSSQATYEIQFGHLQRPTHYNTSWDWARFEVWAHRWMDLSEHGFGLALLNDCKYGASVRGSILSLSLLRAPKAPDATADTGRHEFTYALMPHKGSFQDAGVIQAAYSLNFPLLALPAPSPAPATSWSAFSVSSPAVVLETVKQAESSPQRRSLVLRLYEAHGSHVDCWLHLSLPVQEAILCDLLERPDPAGHLTSGQPPEAHLFSLPSAVPVARASASATLSPWGWGFVCRRLWGLLISASPA

SEQ ID NO: 60078 - protein, 296 aa, Homo sapiens
MKTPWKVLLGLLGAAALVTIITVPVVLLNKGTDDATADSRKTYTLTDYLKNTYRLKLYSLRWISDHEYLYKQENNILVFNAEYGNSSVFLENSTFDEFGHSINDYSISPDGQFILLEYNYVKQWRHSYTASYDIYDLNKRQLITEERIPNNTQWVTWSPVGHKLAYVWNNDIYVKIEPNLPSYRITWTGKEDIIYNGITDWVYEEEVFSAYSALWWSPNGTFLAYAQFNDTEVPLIEYSFYSDESLQYPKTVRVPYPKAGAVNPTVKFFVVNTDSLSSVTNATSIQITAPASMLIG

SEQ ID NO: 60079 - protein, 183 aa, Homo sapiens
MSYPADDYESEAAYDPYAYPSDYDMHTETRFRRVVQAGLELLTSGDPKQDLAYERQYEQQTYQVIPEVIKNFIQYFHKTVSDLIDQKVYELQASRVSSDVIDQKVYEIQDIYENSWTKLTERFFKNTPWPEAEAIAPQVGNDAVFLILYKELYYRHIYAKVSGGPSLEQRFESYYNYCNLFNY

SEQ ID NO: 60080 - protein, 768 aa, Homo sapiens
MANCQIAILYQRFQRVVFGISQLLCFSALISELTNQKEVAAWTYHYSTKAYSWNISRKYCQNRYTDLVAIQNKNEIDYLNKVLPYYSSYYWIGIRKNNKTWTWVGTKKALTNEAENWADNEPNNKRNNEDCVEIYIKSPSAPGKWNDEHCLKKKHALCYTASCQDMSCSKQGECLETIGNYTCSCYPGFYGPECEYVRECGELELPQHVLMNCSHPLGNFSFNSQCSFHCTDGYQVNGPSKLECLASGIWTNKPPQCLAVQCQHLEAPSEGTMDCVHPLTAFAYGSSCKFECQPGYRVRGLDMLRCIDSGHWSAPLPTCEAISCEPLESPVHGSMDCSPSLRAFQYDTNCSFRCAEGFMLRGADIVRCDNLGQWTAPAPVCQALQCQDLPVPNEARVNCSHPFGAFRYQSVCSFTCNEGLLLVGASVLQCLATGNWNSVPPECQAIPCTPLLSPQNGTMTCVQPLGSSSYKSTCQFICDEGYSLSGPERLDCTRSGRWTDSPPMCEAIKCPELFAPEQGSLDCSDTRGEFNVGSTCHFSCDNGFKLEGPNNVECTTSGRWSATPPTCKGIASLPTPGVQCPALTTPGQGTMYCRHHPGTFGFNTTCYFGCNAGFTLIGDSTLSCRPSGQWTAVTPACRAVKCSELHVNKPIAMNCSNLWGNFSYGSICSFHCLEGQLLNGSAQTACQENGHWSTTVPTCQAGPLTIQEALTYFGGAVASTIGLIMGGTLLALLRKRFRQKDDGKCPLNPHSHLGTYGVFTNAAFDPSP

SEQ ID NO: 60081 - protein, 630 aa, Homo sapiens
MEKARRGGDGVPRGPVLHIVVVGFHHKKGCQVEFSYPPLIPGDGHDSHTLPEEWKYLPFLALPDGAHNYQEDTVFFHLPPRNGNGATVFGISCYRQIEAKALKVRQADITRETVQKSVCVLSKLPLYGLLQAKLQLITHAYFEEKDFSQISILKELYEHMNSSLGGASLEGSQVYLGLSPRDLVLHFRHKVLILFKLILLEKKVLFYISPVNKLVGALMTVLSLFPGMIEHGLSDCSQYRPRKSMSEDGGLQESNPCADDFVSASTADVSHTNLGTIRKVMAGNHGEDAAMKTEEPLFQVEDSSKGQEPNDTNQYLKPPSRPSPDSSESDWETLDPSVLEDPNLKEREQLGSDQTNLFPKDSVPSESLPITVQPQANTGQVVLIPGLISGLEEDQYGMPLAIFTKGYLCLPYMALQQHHLLSDVTVRGFVAGATNILFRQQKHLSDAIVEVEEALIQIHDPELRKLLNPTTADLRFADYLVRHVTENRDDVFLDGTGWEGGDEWIRAQFAVYIHALLAATLQLDNEKILSDYGTTFVTAWKNTHNYRVWNSNKHPALAEINPNSVQNSERGKKIGNVMVTTSRNVVQTGKAVGQSVGGAFSSAKTAMSSWLSTFTTSTSQSLTEPPDEKP

SEQ ID NO: 60082 - protein, 661 aa, Homo sapiens
MAGLGPGVGDSEGGPRPLFCRKGALRQKVVHEVKSHKFTARFFKQPTFCSHCTDFIWGIGKQGLQCQVCSFVVHRRCHEFVTFECPGAGKGPQTDDPRNKHKFRLHSYSSPTFCDHCGSLLYGLVHQGMKCSCCEMNVHRRCVRSVPSLCGVDHTERRGRLQLEIRAPTADEIHVTVGEARNLIPMDPNGLSDPYVKLKLIPDPRNLTKQKTRTVKATLNPVWNETFVFNLKPGDVERRLSVEVWDWDRTSRNDFMGAMSFGVSELLKAPVDGWYKLLNQEEGEYYNVPVADADNCSLLQKFEACNYPLELYERVRMGPSSSPIPSPSPSPTDPKRCFFGASPGRLHISDFSFLMVLGKGSFGKVMLAERRGSDELYAIKILKKDVIVQDDDVDCTLVEKRVLALGGRGPGGRPHFLTQLHSTFQTPDRLYFVMEYVTGGDLMYHIQQLGKFKEPHAAFYAAEIAIGLFFLHNQGIIYRDLKLDNVMLDAEGHIKITDFGMCKENVFPGTTTRTFCGTPDYIAPEIIAYQPYGKSVDWWSFGVLLYEMLAGQFLTKHPGKRLGSGPDGEPTIRAHGFFRWIDWERLERLEIPPPFRPRPCGRSGENFDKFFTRAAPALTPPDRLVLASIDQADFQGFTYVNPDFVHPDARSPTSPVPVPVM

SEQ ID NO: 60083 - protein, 198 aa, Homo sapiens
MSWIKEGELSLWERFCANIIKAGPMPKHIAFIMDGNRRYAKKCQVERQEGHSQGFNKLAETLRWCLNLGILEVTVYAFSIENFKRSKSEVDGLMDLARQKFSRLMEEKEKLQKHGVCIRVLGDLHLLPLDLQELIAQAVQATKNYNKCFLNVCFAYTSRHEISNAVREMAWGVEQGLLDPSRDRFHHIGQASLELLTS

SEQ ID NO: 60084 - protein, 23 aa, Homo sapiens
VKEDPDQGESMKPVIFLPFTIQH

SEQ ID NO: 60085 - protein, 236 aa, Homo sapiens
MVLAAGLRKQEAQNEQTSEPSNMDGNSGDADCFQPAVKRAKLQESIEYEDLGKNNSVKTIALNLKKSDRYYHGPTPIQSLQYATSQDIINSFQSIRQEMEAYTPKLTQVLSSSAASSTITALSPGGALMQGGTQQAINQMVPNDIQSELKHLYVAVGELLRHFWSCFPVNTPFLEEKVVKMKSNLERFQVTKLCPFQEKIRRQYLSTNLVSHIEEMLQTAYNKLHTWQSRRLMKKT

SEQ ID NO: 60086 - protein, 169 aa, Homo sapiens
MGLFFPSNQQMHRKTASLNSPVSCKEKPDRVEEPPDYSLHWPEGLKGEEIKKCGREGITLNKYNQQYHKLFKDVPLEEVVLKVCSCALQRDFLLQGRLYISPNWLCFHASLFGKDIKVVIPVVSVQMIKKHKMARLLPNGLAITTNTSQKYIFVSLLSRDSVYDLLRRV

SEQ ID NO: 60087 - protein, 230 aa, Homo sapiens
LEKHLNLSAKKKESHLQEADTQIDREHQNFYEASLEYVFKIQEVQEKKKFEFVEPLLSFLQGLFTFYHEGYELAQEFAPYKQQLQFNLQNTRNNFESTRQEVERLMQRMKSANQDYRPPSQWTMEGYLYVQEKRPLGFTWIKHYCTYDKGSKTFTMSVSEMKSSGKMNGLVTSSPEMFKLKSCIRRKTDSIDKRFCFDIEVVERHGIITLQAFSEANRKLWLEAMDGKEP

SEQ ID NO: 60088 - protein, 212 aa, Homo sapiens
  MOD_RES (1)..(1): Any amino acid
XACFSQPPTAAQLLRALGPVELALTSILTLLALGSIAIFLEDAVYLYKNTLCPIKRRTLLWKSSAPTLATFKERCLECVGFASCVLAAKGFRSLRVSLPPSPAPAPSEQVVSVLCCFGLWIPRSLVLVEMTITSFYAVCFYLLMLVMVEGFGGKEAVLRTLRDTPMMVHTGPCCCCCPCCPRLLLTRKKLQLLMLGPFQYAFLKITLTLVGL

SEQ ID NO: 60089 - protein, 395 aa, Homo sapiens
GARRGTQSPERKRRSPVPRAPSTKLRPAAAARAMDPVAAEAPGEAFLARRRPEGGGGSARPRYSLLAEIGRGSYGVVYEAVAGRSGARVAVKKIRCDAPENVELALAEFWALTSLKRRHQNVVQFEECVLQRNGLAQRMSHGNKSSQLYLRLVETSLKGERILGYAEEPCYLWFVMEFCEGGDLNQYVLSRRPDPATNKSFMLQLTSAIAFLHKNHIVHRDLKPDNILITERSGTPILKVADFGLSKVCAGLAPRGKEGNQDNKNVNVNKYWLSSACGSDFYMAPEVWEGHYTAKADIFALGIIIWAMIERITFIDSETKKELLGTYIKQGTEIVPVGEALLENPKMELHIPQKRRTSMSEGIKQLLKDMLAANPQDRPDAFELETRMDQVTCAA

SEQ ID NO: 60090 - protein, 25 aa, Homo sapiens
MAMAPSPSLVQVYTSPAAVAVWEWQ

SEQ ID NO: 60091 - protein, 14 aa, Homo sapiens
MEAVKQGSATVGLK

SEQ ID NO: 60092 - protein, 109 aa, Homo sapiens
MMEEEELEFVEELEAVLQLTPEVQLAIEQVFPSQDPLDRADFNAVEYINTLFPTEQSLANIDEVVNKIRLKIRRLDDNIRTVVRGQTNVGQDGRQRRKWIPVSLDVLSP

SEQ ID NO: 60093 - protein, 557 aa, Homo sapiens
MLGGSGSHGRRSLAALSQIAYQRNDDDEEEAARERRRRARQERLRQKQEEESLGQVTDQVEVNAQNSVPDEEAKTTTTNTQVEGDDEAAFLERLARREERRQKRLQEALERQKEFDPTITDASLSLPSRRMQNDTAENETTEKEEKSESRQERYEIEETETVTKSYQKNDWRDAEENKKEDKEKEEEEEEKPKRGSIGENQGEEKGTKVQAKREKLQEDKPTFKKEEIKDEKIKKDKEPKEEVKSFMDRKKGFTEVKSQNGEFMTHKLKHTENTFSRPGGRASVDTKEAEGAPQVEAGKRLEELRRRRGETESEEFEKLKQKQQEAALELEELKKKREERRKVLEEEEQRRKQEEADRKLREEEEKRRLKEEIERRRAEAAEKRQKMPEDGLSDDKKPFKCFTPKGSSLKIEERAEFLNKSVQKSGVKSTHQAAIVSKIDSRLEQYTSAIEGTKSAKPTKPAASDLPVPAEGVRNIKSMWEKGNVFSSPTAAGTPNKETAGLKVGVSSRINEWLTKTPDGNKSPAPKPSDLRPGDVSSKRNLWEKQSVDKVTSPTKV

SEQ ID NO: 60094 - protein, 611 aa, Homo sapiens
MSLAAYCVICCRRIGTSTSPPKSGTHWRDISSLFLTYEVLALKKAVTLDTQVVEREKMKSYIYVHTVSLDKGENHDPFSTVDIEDHECAVWLLLRKSKSDDKTTRLEAVREMSETHHWHDYQYRIIAQACDPKTLIGLARSEESDLRFFLLPPPLPSLKEDSSTEEELRQLLASLPQTELDECIQYFTSLALSESSQSLAAQKGGLWCFGGNGLPYAESFGEVPSATVEMFCLEAIVKHSEISTHCDKIEANGGLQLLQRLYRLHKDCPKVQRNIMRVIGNMALNEHLHSSIVRSGWVSIMAEAMKSPHIMESSHAARILANLDRETVQEKYQDGVYVLHPQYRTSQPIKADVLFIHGLMGAAFKTWRQQDSEQAVIEKPMEDEDRYTTCWPKTWLAKDCPALRIISVEYDTSLSDWRARCPMERKSIAFRSNELLRKLRAAGVGDRPVVWISHSMGGLLVKKMLLEASTKPEMSTVINNTRGIIFYSVPHHGSRLAEYSVNIRYLLFPSLEVKELSKDSPALKTLQDDFLEFAKDKNFQVLNFVETLPTYIGSMIKLHVVPVESADLGIGDLIPVDVNHLNICKPKKKDAFLYQRTLQFIREALAKDLEN

SEQ ID NO: 60095 - protein, 44 aa, Homo sapiens
MAKQYDVLFRLLLIGDSGVGKTCLLCRFTDNEFHSSHISTIDAA

SEQ ID NO: 60096 - protein, 178 aa, Homo sapiens
MASFSMDCSPSFCVPGLWNPFIIFRSRSSRRRLHSLGLAAMPEKRPFERLPADVSPINYSLCLKPDLLDFTFEGKLEAAAQVRQATNQIVMNCADIDIITASYAPEGDEEIHATGFNYQNEDEKVTLSFPSTLQTGNNSFQYFVFCLVCHFLEVVTVNILLWFDGLGDLKPSKSVREP

SEQ ID NO: 60097 - protein, 177 aa, Homo sapiens
  MOD_RES (1)..(1): Any amino acid
XWISLVTALHLVLGLSAVLGLLLLRWQFPAHYSSQDIVQAPYDDKRGSAKSAPASKHFSLFYPVHQPFQTGFLHKRLRHALWPSLPDLHRVLGQYLRDTAALSPPKATVSDTCEEVEPSLLEILPKSSERTPLPLCSSQAQMDYRRLQPSCLGTMPLSVCPPMAESGSCCTTHIANH

SEQ ID NO: 60098 - protein, 281 aa, Homo sapiens
  MOD_RES (1)..(1): Any amino acid
XMNELNISSLQIATRNGHASLVNFLLSENVDLHQKVEPKESPLHLVVINNHITVVNSLLSAQHDIDILNQKQQTPLHVAADRGNVELVETLLKAGCDLKAVDKQGKTALAVASRSNHSLVVGMLIKAERYYAWREEHHESIRDPSTGFTLTFKQDHSLETRHIRTLLWDLAYHQLKANEWQRLARSWNFTDDQIRAIEEQWSGNESFREHGHRALLIWLHGTLMTQGDPAKQLYEELVHAGFPKLAAHFAKEKSSFESYFCIIKIYCKQWNDHIKKYYQLL

SEQ ID NO: 60099 - protein, 196 aa, Homo sapiens
MATLFYGLIDQTREFLHAAETPVPSVGEYLKKEIGQHVAGWTEDEETRKLKLAVLNSFFNLECCVSGTHSMDLVALAPFGEYTVLPGLDCTFSKGYQGLTNCMMAALPEDTVVFEKPVKTIHWNGSFQEAAFPGETFPVSVECEDGDRFPAHHVIVTVPLGLSTFSVGSLPDLSLSSWRLCRMKKYFCVSPKCSGE

SEQ ID NO: 60100 - protein, 216 aa, Homo sapiens
MSCQAFTSADTFIPLNSDASATLPLIMHHSAAECLPVSNHATNVMSTATGLHYSVPSCHYGNQPSTYGVMAGYTQTNVGEALAAVHGSEFSQTTICRFENLQLSFKNACKLKAILSKWLEEAEQVGALYNEKVGANERKRKRRTTISIAAKDALERHFGEQNKPSSQEIMRMAEELNLEKEVVRVWFCNRRQREKRVKTSLNQSLFSISKEHLECR

SEQ ID NO: 60101 - protein, 44 aa, Homo sapiens
MVQLIAPLEVMWNEAADLKPLALSRRLECSGGIMAHYSPDLLGP

SEQ ID NO: 60102 - protein, 202 aa, Homo sapiens
MGDILAHESELLGLVKEYLDFAEFEDTLKTFSKECKIKGKPLCKTVGGSFRDSKSLTIQKDLVAAFDNGDQKVFFDLWEEHISSSIRDGDSFAQKLEFYLHIHFAIYLLKYSVGRPDKEELDEKISYFKTYLETKGAALSQTTEFLPFYALPFVPNPMVHPSFKELFQDSWTPELKLKLIKFLALISKASNTPKLLTIYVSF

SEQ ID NO: 60103 - protein, 106 aa, Homo sapiens
RTPSRISMKKSSLLPITLRTTWTPLTYTKGPAPRRWSAVRTEGARPPRATAAVVGAARKAPWRAAPVTRCVVTAPPSPESRLRGWRRNSTGRTTYPGRGDVSWRPP

SEQ ID NO: 60104 - protein, 411 aa, Homo sapiens
MEFSERKRSRKSQSFKLVSRDYHHEVYKIPEFSNDVNGEAKETQPIFLGDESMEIKKQITGMRRLLNDSTGRIYQRVGKEGEKLKEEPQDLDLVWPPRLNSSAEAPQSLHPSSRGVWNELPPQSGQFSGQYGTRSRTFQSQPHPTTSSNGELPVVNSSAGSNCCTCNCQSTLQAILQELKTMRKLMQIQAVGTQNRQQPPISLICSQRTAVSRKRNKKKKVPPKTVEPLTVKQKPSGSEMEKKSVVASELSALQAAEHTSPEESRVLGFGIVLESPSSDPEVQLAEGFDVFMPKSQLDSILSNYTRSGSLLFRKLVCAFFDDKTLANSLPNGKRKRGLNDNRKGLDQNIVGAIKVFTEKYCTANHVDKLPGPRDWVQILQDQIKLARRRLKRGSEIADSDERLDGIALPPT

SEQ ID NO: 60105 - protein, 183 aa, Homo sapiens
MAASPGPAGVGGAGAVYGSGSSGFALDSGLEIKTRSVEQTLLPLVSQITTLINHKDNTKKSDKTLQAIQRVGQAVNLAVGRFVKVGEAIANENWDLKEEINIACIEAKQAGETIAALTDITNLNHLESDGQITIFTDKTGVIKAARLLLSSVTKVLLLADRVVIKQIITSRNKRLTIYNLRHS

SEQ ID NO: 60106 - protein, 221 aa, Homo sapiens
  MOD_RES (1)..(1): Any amino acid
XRLCSISVTARRLLGGPGPRAGDVASAAAARLPPSEGSGLCMVKEYLPKNFYSKDNEGSWFRSLFVHKVDPRKDAHSTLLSKKETSNLYKIQFHNVKPEYLDAYNSLTEAVLPKLHLDEDYPCSLVGNWNTWYGEQDQAVHLWRFSGGYPALMDCMNKLKNNKEYLEFRRERSQMLLSRRNQLLLEFSFWNEPQPRMGPNIYELRTYKLKPGTMIEWGNNW

SEQ ID NO: 60107 - protein, 91 aa, Homo sapiens
MGIQGGSVLFGLLLVLAVFCHSGHSLQCYNCPNPTADCKTAVNCSSDFDACLITKADTHPLRGGGQDSYACSYKLRSVVFQALHGIGVTSV

SEQ ID NO: 60108 - protein, 295 aa, Homo sapiens
  MOD_RES (1)..(1): Any amino acid
XHCVFCRRGPPLPAQKVCLRCEAPCCQSHVQTHLQQPSTARGHLLVEADDVRAWSCPQHNAYRLYHCEAEQVAVCQYCCYYSGAHQGHSVCDVEIRRNEIREKVNQLKEEVRLQYEKLHQLLDEDLRQTVEVLDKAQAKFCSENAAQALHLGERMQEAKKLLGSLQLLFDKTEDVSFMKNTKSVKILMDRTQTCTSSSLSPTKIGHLNSKLFLNEVAKKEKQLRKMLEGPFSTPVPFLQSVPLYPCGVSSSGAEKRKHSTAFPEASFLETSSGPVGGQYGAAGTASGEGQSGQPL

SEQ ID NO: 60109 - protein, 47 aa, Homo sapiens
DEEELLTSTGFEYQQVAFQPSILTEPPTEDHLLQNTLWPEVQKLASF

SEQ ID NO: 60110 - protein, 73 aa, Homo sapiens
MAMHFIFSDTAVLLFDFWSVHSPAGQETKAQRQEERLVQGHTAWPFRCWCSCFWLYCMKASRLAKPSCSTRYW

SEQ ID NO: 60111 - protein, 134 aa, Homo sapiens
MLEAHMQSYKGNDPLGEWERYIQWVEENFPENKEYLITLLEHLMKEFLDKKKYHNDPRFISYCLKFAEYNSDLHQFFEFLYNHGIGTLSSPLYIAWAGHLEAQGELQHASAVLQRGIQNQAEPREFLQQQYRLF

SEQ ID NO: 60112 - protein, 88 aa, Homo sapiens
  MOD_RES (1)..(1): Any amino acid
XKYKLFYGMSSEMAMKKYAGGVAEYRASEGKTVEVPFKGDVEHTIRDILGGIRSTCTYVGAAKLKELSRRTTFIRVTQQVNPIFSEAC

SEQ ID NO: 60113 - protein, 109 aa, Homo sapiens
MNRLRNAKIYVERAVKQKKIFTIQGCYPVIRCLLRRRGWVEKKMVHRSGPTLLPPQKDLDSSAMGDSDTTEDEDEDEDEEFQPSQLFDFDDLLKFDDLDGTHALMVGLC

SEQ ID NO: 60114 - protein, 159 aa, Homo sapiens
MALLAMHSWRWAAAAAAFEKRRHSAILIRPLVSVSGSGPQWRPHQLGALGTARAYQQIPESLKSITWQRLGKGNSGQFLDAAKALQVWPLIEKRTCWHGHAGGGLHTDPKEGLKDVDTRKIIKAMLSYVWPKDRPDLRARVAISLGFLGGAKAMNIVVP

SEQ ID NO: 60115 - protein, 122 aa, Homo sapiens
MADPDVLTEVPAALKRLAKYVIRGFYGIEHALALDILIRNSCVKEEDMLELLKFDRKQLRSVLNNLKGDKFIKCRMRVETAADGKTTRHNYYFINYRTLVNVVKYKLDHMRRRIETDERDST

SEQ ID NO: 60116 - protein, 151 aa, Homo sapiens
MESAAALHFSRPASLLLLLLSLCALVSAQFIVVGPTDPILATVGENTTLRCHLSPEKNAEDMEVRWFRSQFSPAVFVYKGGRERTEEQMEEYRGRTTFVSKDISRGSVALVIHNITAQENGTYRCYFQEGRSYDEAILHLVVAELLEAEVY

SEQ ID NO: 60117 - protein, 361 aa, Homo sapiens
MHRAVDPPGARAAREAFALGGLSCAGAWSSCPPHPPPRSAWLPGGRCSASIGQPPLPAPLPPSHGSSSGHPSKPYYAPGAPTPRPLHGKLESLHGCVQALLREPAQPGLWEQLGQLYESEHDSEEATRCYHSALRYGGSFAELGPRIGRLQQAQLWNFHTGSCQHRAKVLPPLEQVWNLLHLEHKRNYGAKRGGPPVKRAAEPPVVQPVPPAALSGPSGEEGLSPGGKRRRGCNSEQEQRHSLPHPYPYPAPAYTAHPPGHRLVPAAPPGPGPRPPGAESHGCLPATRPPGSDLRESRVQRSRMDSSVSPAATTACVPYAPSRPPGLPGTTTSSSSSSSSNTGLRGVEPNPGIPGADHYQT

SEQ ID NO: 60118 - protein, 64 aa, Homo sapiens
  MOD_RES (1)..(1): Any amino acid
XGVTLYELLTHCDSSQSPPTVYHLMKNCWETEASFRPTFENLIPILKTVHEKYQGQAPSVFSVC

SEQ ID NO: 60119 - protein, 228 aa, Homo sapiens
GDHRVELYKVLSSLGYHVVTFDYRGWGDSVGTPSERGMTYDALHVFDWIKARSGDNPVYIWGHSLGTGVATNLVRRLCERETPPDALILESPFTNIREEAKSHPFSVIYRYFPGFDWFFLDPITSSGIKFANDENVKHISCPLLILHAEDDPVVPFQLGRKLYSIAAPARSFRDFKVQFVPFHSDLGYRHKYIYKSPELPRILSCFLKGRGAPDCPALAGHGRQPREP

SEQ ID NO: 60120 - protein, 84 aa, Homo sapiens
MVKLSIVLTPQFLSHDQGQLTKELQQHVKSVTCPCEYLRKVINTLADHHHRGTDFGGSPWLHVIIAFPTSYKVVITLWIVYLWV

SEQ ID NO: 60121 - protein, 130 aa, Homo sapiens
MDTFTVQDSTAMSWWRNNFWIILAVAIIVVSVGLGLILYCVCKWQLRRGKKWEIAKPLKHKQVDEEKMYENVLNESPVQLPPLPPRNWPSLEDSYGVLLCHPGWSAMARSRLTASSASRVHAILLPQPPE

SEQ ID NO: 60122 - protein, 116 aa, Homo sapiens
MPGPRGAAGGLAPEMRGAGAAGLLALLLLLLLLLLGLGGRVEGGPAGERGAGGGGALARERFKVVFAPVICKRTCLKGQCRDSCQQGSNMTLIGENGHSTDTLTGSGFRWCALSPA

SEQ ID NO: 60123 - protein, 504 aa, Homo sapiens
MTPALTALLCLGLSLGPRTRVQAGPFPKPTLWAEPGSVISWGSPVTIWCQGSLEAQEYQLDKEGSPEPLDRNNPLEPKNKARFSIPSMTQHHAGRYRCHYYSSAGWSEPSDPLELVMTGFYNKPTLSALPSPVVASGGNMTLRCGSQKGYHHFVLMKEGEHQLPRTLDSQQLHSGGFQALFPVGPVTPSHRWRFTCYYYYTNTPRVWSHPSDPLEILPSGVSRKPSLLTLQGPVLAPGQSLTLQCGSDVGYDRFVLYKEGERDFLQRPGQQPQAGLSQANFTLGPVSPSHGGQYRCYGAHNLSSEWSAPSDPLNILMAGQIYDTVSLSAQPGPTVASGENVTLLCQSRGYFDTFLLTKEGAAHPPLRLRSMYGAHKYQAEFPMSPVTSAHAGTYRCYGSYSSNPHLLSFPSEPLELMVSGHSGGSSLPPTGPPSTPGESLRPRGERGLPQGSLSLPKDPTPLPSRTGLCPRGSEAGLVKSGGFKAERDVGAQPGGGAGLMWGAR

SEQ ID NO: 60124 - protein, 264 aa, Homo sapiens
MAACTASGAPTGAPRSRKLLPRGLTTPWRRLERPIAETIDKRPAREDLLEETFGIRSAWISGRSKEDGLWTRNSPGSSQHPESPRLPNPLWDRGKIGKVEGHQHIQDFSQKSHLPSIVVESSEVNEESGDLHLPHEELLLLTDGEEEDAEAFFQDQSEEPGWAWSPQDPRSPLRTFNAGLSWGQDQDEEDACWILEDTACLEATNHCPFWDSTGSRVCRSGFVEYSHLLPPNSFEGAEEEAVQTPAGVESGAASEAPGGRGCDR

SEQ ID NO: 60125 - protein, 70 aa, Homo sapiens
  MOD_RES (1)..(1): Any amino acid
XDLIPRHQQVFSTNQYFSGVKIPDPEDMEPLELKFPNISYPALGLLKLQYLPQLTGSSILPALDNKKYYC

SEQ ID NO: 60126 - protein, 571 aa, Homo sapiens
MLETILRMLDNDSILVDAIRKIKDDVEYYVDSSQDPDFEENEFLYDDLDLEDIPQALVATSPPSHSHMEDEIFNQSSSTPTSTTSSSPIPPSPANCTTENSEDDKKRGRSTDSEVSQSPAKNGSKPVHSNQHPQSPAVPPTYPSGPPPAASALSTTPGNNGVPAPAAPPSALGPKASPAPSHNSGTPAPYAQAVAPPAPSGPSTTQPRPPSVQPSGGGGGGSGGGGSSSSSNSSAGGGAGKQNGATSYSSVVADSPAEVALSSSGGNNASSQALGPPSGPHNPPPSTSKEPSAAAPTGAGGVAPGSGNNSGGPSLLVPLPVNPPSSPTPSFSDAKAAGALLNGPPQFSTAPEIKAPEPLSSLKSMAERAAISSGIEDPVPTLHLTERDIILSSTSAPPASAQPPLQLSEVNIPLSLGVCPLGPVPLTKEQLYQQAMEEAAWHHMPHPSDSERIRQYLPRNPCPTPPYHHQMPPPHSDTVEFYQRLSTETLFFIFYYLEPRDVRTAWVDSEAGPLRHTSAPLPVAHWLTRGPSPALLQQPQSRPTPLCSLAHSQASLETTGELSSPLPTPLL

SEQ ID NO: 60127 - protein, 212 aa, Homo sapiens
  MOD_RES (1)..(1): Any amino acid
XTDASSAVKVKRAVQKTSDLIVLGLPWKTTEQDLKEYFSTFGEVLMVQVKKDLKTGHSKGFGFVRFTEYETQVKVMSQRHMIDGRWCDCKLPNSKQSQDEPLRSRKVFVGRCTEDMTEDELREFFSQYGDVMDVFIPKPFRAFAFVTFADDQIAQSLCGEDLIIKGISVHISNAEPKHNSNRQLERSGRFGGNPVHLISNVYGRSTSLKVVL

SEQ ID NO: 60128 - protein, 55 aa, Homo sapiens
MPGGYALSQPVSCMEATPNPMESLRHLHPHVGRTLTSADPFYQNTPHSSRCVAHS

SEQ ID NO: 60129 - protein, 54 aa, Homo sapiens
APSSKSERNSGAGSGGGGPGGAGGKRAAGRRREHVLKQLERVKSPCRWLWASSA

SEQ ID NO: 60130 - protein, 68 aa, Homo sapiens
  MOD_RES (1)..(1): Any amino acid
XIDGQLFLIKHLLILREQIAPFHTEFTIKEISLDLKKTRGFSVKNNGQSGRPQVYSLTAALGTTSKGQ

SEQ ID NO: 60131 - protein, 16 aa, Homo sapiens
  MOD_RES (1)..(1): Any amino acid
XHPAVSSMQENSVNSG

SEQ ID NO: 60132 - protein, 332 aa, Homo sapiens
MNLSLVLAAFCLGIASAVPKFDQNLDTKWYQWKATHRRLYGANEEGWRRAVWEKNMKMIELHNGEYSQGKHGFTMAMNAFGDMTNEEFRQMMGCFRNQKFRKGKVFREPLFLDLPKSVDWRKKGYVTPVKNQCGSCWAFSATGALEGQMFRKTGKLVSLSEQNLVDCSRPQGNQGCNGGFMARAFQYVKENGGLDSEESYPYVAVDEICKYRPENSVANDTGFTVVAPGKEKALMKAVATVGPISVAMDAGHSSFQFYKSGIYFEPDCSSKNLDHGVLVVGYGFEGANSNNSKYWLVKNSWGPEWGSNGYVKIAKDKNNHCGIATAASYPNV

SEQ ID NO: 60133 - protein, 72 aa, Homo sapiens
MEQSNDSLRVNHNDGEESKTSAQVFEHLICMDSRDSSFGQNDSPTVLPITTREANNSLISQNIPGPLTQTQT

SEQ ID NO: 60134 - protein, 242 aa, Homo sapiens
MSGRSGKKKMSKLSRSARAGVIFPVGRLMRYLKKGTFKYRISVGAPVYMAAVIEYLAAEILELAGNAARDNKKARIAPRHILLAVANDEELNQSKPKDSDKEGTSNSTSEDGPGDGFTILSSKSLVLGQKLSLTQSDISHIGSMRVEGIVHPTTAEIDLKEDIGKALEKAGGKEFLETVKELRKSQGPLEVAEAAVSQSSGLAAKFVIHCHIPQWGSDKCEEQLEETIKNCLSAAEDKKLKS

SEQ ID NO: 60135 - protein, 124 aa, Homo sapiens
MLTEVMEVWHGLVIAVVSLFLQACFLTAINYLLSRHMDDSDTPSDSLDSSCSSPPACQATEDVDYTQVVFSDPGELKNDSPLDYENIKEITDYVNVNPERHKPSFWYFVNPALSEPAEYDQVAM

SEQ ID NO: 60136 - protein, 111 aa, Homo sapiens
MSYFGEHFWGEKNHGFEVLYHSVKQGPISTKELADFIRERATIEETYSKAMAKLSKLASNGTPMGTFAPLWEVFRVSSDKLALCHLELTRKLQDLIKDVLRYGEEQLKTHK

SEQ ID NO: 60137 - protein, 33 aa, Homo sapiens
SGVPYSPAIPNKRKDTPTKKPVKRPGCPGWADA

SEQ ID NO: 60138 - protein, 290 aa, Homo sapiens
METPLDVLSRAASLVHADDEKREAALRGEPRIQTLPVASALSSHRTGPPPISPSKRKFSMEPGDEDLDCDNDHVSKMSRIFNPHLNKTANGDCRRDPRERSRSPIERAVAPTMSLHGSHLYTSLPSLGLEQPLALTKNSLDASRPAGLSPTLTPGERQQNRPSVITCASAGARNCNLSHCPIAHSGCAAPGPASYRRPPSAATTCDPVVEEHFRRSLGKNYKEPEPAPNSVSITGSVDDHFAKALGDTWLQIKAAKDGASSSPESASRRGQPASPSAHMVSHSHSPSVVS

SEQ ID NO: 60139 - protein, 108 aa, Homo sapiens
MDRRDHPLPEVAHVKHLSASQKALKEKEKASWSSLSMDEKVELYRIKFKESFAEMNRGSNEWKTVVGGAMFFIGFTALVIMWQKHYVYGPLPQSFDKEWVAKQTKRML

SEQ ID NO: 60140 - protein, 3324 aa, Homo sapiens
MVKRKSSEGQEQDGGRGIPLPIQTFLWRQTSAFLRPKLGKQYEASCVSFERVLVENKLHGLSPALSEAIQSISRWELVQAALPHVLHCTATLLSNRNKLGHQDKLGVAETKLLHTLHWMLLEAPQDCNNERFGGTDRGSSWGGSSSAFIHQVENQGSPGQPCQSSSNDEEENNRRKIFQNSMATVELFVFLFAPLVHRIKESDLTFRLASGLVIWQPMWEHRQPGVSGFTALVKPIRNIITAKRSSPINSQSRTCESPNQDARHLEGLQVVCETFQSDSISPKATISGCHRGNSFDGSLSSQTSQERGPSHSRASLVIPPCQRSRYATYFDVAVLRCLLQPHWSEEGTQWSLMYYLQRLRHMLEEKPEKPPEPDIPLLPRPRSSSMVAAAPSLVNTHKTQDLTMKCNEEEKSLSSEAFSKVSLTNLRRSAVPDLSSDLGMNIFKKFKSRKEDRERKGSIPFHHTGKRRPRRMGVPFLLHEDHLDVSPTRSTFSFGSFSGLGEDRRGIEKGGWQTTILGKLTRRGSSDAATEMESLSARHSHSHHTLVSDLPDPSNSHGENTVKEVRSQISTITVATFNTTLASFNVGYADFFNEHMRKLCNQVPIPEMPHEPLACANLPRSLTDSCINYSYLEDTEHIDGTNNFVHKNGMLDLSVVLKAVYLVLNHDISSRICDVALNIVECLLQLGVVPCVEKNRKKSENKENETLEKRPSEGAFQFKGVSGSSTCGFGGPAVSGAGDGGGEEGGGGDGGGGGGDGGGGGGGGGGPYEKNDKNQEKDESTPVSNHRLALTMLIKIVKSLGCAYGCGEGHRGLSGDRLRHQVFRENAQNCLTKLYKLDKMQFRQTMRDYVNKDSLNNVVDFLHALLGFCMEPVTDNKAGFGNNFTTVDNKSTAQNVEGIIVSAMFKSLITRCASTTHELHSPENLGLYCDIRQLVQFIKEAHGNVFRRVALSALLDSAEKLAPGKKVEENEQESKPAGSKRSEAGSIVDKGQVSSAPEECRSFMSGRPSQTPEHDEQMQGANLGRKDFWRKMFKSQSAASDTSSQSEQDTSECTTAHSGTTSDRRARSRSRRISLRKKLKLPIGNWLKRSSLSGLADGVEDLLDISSVDRLSFIRQSSKVKFTSAVKLSEGGPGSGMENGRDEEENFFKRLGCHSFDDHLSPNQDGGKSKNVVNLGAIRQGMKRFQFLLNCCEPGTIPDASILAAALDLEAPVVARAALFLECARFVHRCNRGNWPEWMKGHHVNITKKGLSRGRSPIVGNKRNQKLQWNAAKLFYQWGDAIGVRLNELCHGESESPANLLGLIYDEETKRRLRKEDEEEDFLDDSTVNPSKCGCPFALKMAACQLLLEITTFLRETFSCLPRPRTEPLVDLESCRLRLDPELDRHRYERKISFAGVLDENEDSKDSLHSSSHTLKSDAGVEEKKVPSRKIRIGGSRLLQIKGTRSFQVKKGGSLSSIRRVGSLKSSKLSRQDSESEAEELQLSQSRDTVTDLEGSPWSASEPSIEPEGMSNAGAEENYHRNMSWLHVMILLCNQQSFICTHVDYCHPHCYLHHSRSCARLVRAIKLLYGDSVDSLRESSNISSVALRGKKQKECSDKSCLRTPSLKKRVSDANLEGKKDSGMLKYIRLQVMSLSPAPLSLLIKAAPILTEEMYGDIQPAAWELLLSMDEHMAGAAAAMFLLCAVKVPEAVSDMLMSEFHHPETVQRLNAVLKFHTLWRFRYQVWPRMEEGAQQIFKIPPPSINFTLPSPVLGMPSVPMFDPPWVPQCSGSVQDPINEDQSKSFSARAVSRSHQRAEHILKNLQQEEEKKRLGREASLITAIPITQEACYEPTCTPNSEPEEEVEEVTNLASRRLSVSPSCTSSTSHRNYSFRRGSVWSVRSAVSAEDEEHTTEHTPNHHVPQPPQAVFPACICAAVLPIVHLMEDGEVREDGVAVSAVAQQVLWNCLIEDPSTVLRHFLEKLTISNRQDELMYMLRKLLLNIGDFPAQTSHILFNYLVGLIMYFVRTPCEWGMDAISATLTFLWEVVGYVEGLFFKDLKQTMKKEQCEVKLLVTASMPGTKTLVVHGQNECDIPTQLPVHEDTQFEALLKECLEFFNIPESQSTHYFLMDKRWNLIHYNKTYVRDIYPFRRSVSPQLNLVHMHPEKGQELIQKQVFTRKLEEVGRVLFLISLTQKIPTAHKQSHVSMLQEDLLRLPSFPRSAIDAEFSLFSDPQAGKELFGLDTLQKSLWIQLLEEMFLGMPSEFPWGDEIMLFLNVFNGALILHPEDSALLRQYAATVINTAVHFNHLFSLSGYQWILPTMLQVYSDYESNPQLRQAIEFACHQFYILHRKPFVLQLFASVAPLLEFPDAANNGPSKGVSAQCLFDLLQSLEGETTDILDILELVKAEKPLKSLDFCYGNEDLTFSISEAIKLCVTVVAYAPESFRSLQMLMVLEALVPCYLQKLKRQTSQVETVPAAREEIAATAALATSLQALLYSVEVLTRPMTAPQMSRCDQGHKGTTTANHTMSSGVNTRYQEQGAKLHFIRENLHLLEEGQGIPREELDERIAREEFRRPRESLLNICTEFYKHCGPRLKILQNLAGEPRVIALELLDVKSHMRLAEIAHSLLKLAPYDTQTMESRGLRRYIMEMLPITDWTAEAVRPALILILKRLDRMFNKIHKMPTLRRQVEWEPASNLIEGVCLTLQRQPIISFLPHLRSLINVCVNLVMGVVGPSSVADGLPLLHLSPYLSPPLPFSTAVVRLVALQIQALKEDFPLSHVISPFTNQERREGMLLNLLIPFVLTVGSGSKDSPWLEQPEVQLLLQTVINVLLPPRIISTSRSKNFMLESSPAHCSTPGDAGKDLRREGLAESTSQAAYLALKVILVCFERQLGSQWYWLSLQVKEMALRKVGGLALWDFLDFIVRTRIPIFVLLRPFIQCKLLAQPAENHEELSARQHIADQLERRFIPRPLCKSSLIAEFNSELKILKEAVHSGSAYQGKTSISTVGTSTSAYRLSLATMSRSNTGTGTVWEQDSEPSQQASQDTLSRTDEEDEENDSISMPSVVSEQEAYLLSAIGRRRFSSHVSSMSVPQAEVGMLPSQSEPNVLDDSQGLAAEGSLSRVASIQSEPGQQNLLVQQPLGRKRGLRQLRRPLLSRQKTQTEPRNRQGARLSTTRRSIQPKTKPSADQKRSVTFIEAQPEPAAAPTDALPATGQLQGCSPAPSRKPEAMDEPVLTSSPAIVVADLHSVSPKQSENFPTEEGEKEEDTEAQGATAHSPLSAQLSDPDDFTGLETSSLLQHGDTVLHISEENGMENPLLSSQFTFTPTELGKTDAVLDESHV

SEQ ID NO: 60141 - protein, 201 aa, Homo sapiens
  MOD_RES (1)..(1): Any amino acid
XAVSGNQAGELILWQEAKAVATAQEDLGVLTSLDWAPDGHFLILAKADLKLLCMKPGDAPSEIWSSYTENPMILSTHKEYGIFVLQPKDPGVLSFLRQKESGEFEERLNFDINLENPSRTLISITQAKPESESSFLCASSDGILWNLAKCSPEGEWTTGNMWQKKANTPETQTPGTDPSTCRESDASMDSDASMDSEPTPH

SEQ ID NO: 60142 - protein, 94 aa, Homo sapiens
MDHHVSTIKPRRIQNQNVIHRLERRRISSGKADQTSLEIYEYQGCQAAEDLLQGYEGEILSNGNDQRSVNIRGRLFERFFVLLHITNVAANGDS

SEQ ID NO: 60143 - protein, 222 aa, Homo sapiens
MLGGSLGSRLLRGVGGSHGRFGARGVREGGAAMAAGESMAQRMVWVDLEMTGLDIEKDQIIEMACLITDSDLNILAEGPNLIIKQPDELLDSMSDWCKEHHGKQAEYEFLSFVRQQTPPGLCPLAGNSVHEDKKFLDKYMPQFMKHLHYRIIDVSTVKELCRRWYPEEYEFAPKKAASHRALDDISESIKELQFYRNNIFKKKIDEKKRKIIENGENEKTVS

SEQ ID NO: 60144 - protein, 55 aa, Homo sapiens
MSFLIDSSIMITSQPRLSGDWPAAVRVPTRHPSPEFRSTFGSGPPTSRLRAGAAS

SEQ ID NO: 60145 - protein, 179 aa, Homo sapiens
MSGKDRIEIFPSRMAQTIMKARLKGAQTGRNLLKKKSDALTLRFRQILKKIIETKMLMGEVMREAAFSLAEAKFTAGDFSTTVIQNVNKAQVKIRAKKDNVAGVTLPVFEHYHEGTDSYELTGLARGGEQLAKLKRNYAKAVELLVELASLQSSFPGLNVLLLISSQSWMRESEKSSIG

SEQ ID NO: 60146 - protein, 270 aa, Homo sapiens
MDLLRELKAMPITLHLLQSTRVGMSVNALRKQSSDEEVIALAKSLIKSWKKLLDASDAKARERGRGMPLPTSSRDASEAPDPSRKRPELPRAPSTPRITTFPPVPVTCDAVRNKCREMLTAALQTDHDHVAIGADCERLSAQIEECIFRDVGNTDMKYKNRVRSRISNLKDAKNPDLRRNVLCGAITPQQIAVMTSEEMASDELKEIRKAMTKEAIREHQMARTGGTQTDLFTCGKCRKKNCTYTQVQTRSSDEPMTTFVVCNECGNRWK

SEQ ID NO: 60147 - protein, 356 aa, Homo sapiens
  MOD_RES (1)..(1): Any amino acid
XNDVINAILKQHTEEKEFVEKHFNDLNMKAVEQDEPIPQKPQSAFYYCRLLLSILGMNSWDKRRSFHLLKKNEKLLRELRNLDSRQCRETHKIAVFYVAEGQEDKHSILTNTGGSQAYEDFVAGLGWEVNLTNHCGFMGGLQKNKSTGLTTPYFATSTVEVIFHVSTRMPSDSDDSLTKKLRHLGNDEVHIVWSEHTRDYRRGIIPTEFGDVLIVIYPMKNHMFSIQIMKKPEVPFFGPLFDGAIVNGKVLPIMVRATAINASRALKSLIPLYQNFYEERARYLQTIVQHHLEPTTFEDFAAQVFSPAPYHHLPSDAVERNAVIVLFLPKPPLENIGHLKAPTQRFYPVKLPQQRR

SEQ ID NO: 60148 - protein, 276 aa, Homo sapiens
  MOD_RES (1)..(1): Any amino acid
XPKPGKFQRTRVPRAESGDSLGSEDRDLLYRSQRFKETERPSIKQVIVRKEDVTSKLDEKNNAFPCQVNIKQKMQELNNEINMQQTVIYQASQALNCCVDEEHGKGSLEEAEAERLLLIATGKRTLLIDELNKLKNEGPQRKNKASPQSEFMPSKGSVTLSEIRLPLKADFVCSTVQKPDAANYYYLIILKAGAENMVATPLASTSNSLNGDALTFTTTFTLQDVSNDFEINIEVYSLVQKKDPSGLDKKKKTSKSKAITPKRLLTSITTKSNIHS

SEQ ID NO: 60149 - protein, 535 aa, Homo sapiens
MARGGAACKSDARLLLGRDALRPAPALLAPAVLLGAALGLGLGLWLGCRAGRQRTRHQKDDTQNLLKNLESNAQTPSETGSPSRRRKREVQMSKDKEAVDECEPPSNSNITAFALKAKVIYPINQKFRPLADGSSNPSLHENLKQAVLPHQPVEASPSSSLGSLSQGEKDDCSSSSSVHSATSDDRFLSRTFLRVNAFPEVLACESVDVDLCIYSLHLKDLLHLDTALRQEKHMMFIQIFKMCLLDLLPKKKSDDELYQKILSKQEKDLEELEKGLQVKLSNTEMSGAGDSEYITLADVEKKEREYSEQLIDNMEAFWKQMANIQHFLVDQFKCSSSKARQLMMTLTERMIAAEGLLCDSQELQALDALERTMGRAHMAKVIEFLKLQVQEETRCRLAAISHGLELLAGEGKLSGRQKEELLTQQHKAFWQEAERFSREFVQRGKDLVTASLAHQVEGTAKLTLAQEEEQRSFLAEAQPTADPEKFLEAFHEVLERQRLMQCDLEEEENVRATEAVVALCQKAMRRHRDTGKEAV

SEQ ID NO: 60150 - protein, 87 aa, Homo sapiens
MTLEELEDHEDEFNEEDERAIEMYRRRRLAEWKATKLKNKFGEVLEISGKDYVQEVTKAGEGLWVILHLYKQGIPLCALINQHLSGL

SEQ ID NO: 60151 - protein, 464 aa, Homo sapiens
MDVLLTYLPKNYAKSELGAVIFWGQNQTLDPNNMTILNRTFQDEPLIMDFNGDLIPDIFGITNESNQPQILLGGNLSWHPALTTTSKMRIPHSHAFIDLTEDFTADLFLTTLNATTSTFQFEIWENLDGNFSVSTILEKPQNMMVVGQSAFADFDGDGHMDHLLPGCEDKNCQKSTIYLVRSGMKQWVPVLQDFSNKGTLWGFVPFVDEQQPTEIPIPITLHIGDYNMDGYPDALVILKNTSGSNQQAFLLENVPCNNASCEEARRMFKVYWELTDLNQIKDAMVATFFDIYEDGILDIVVLSKGYTKNDFAIHTLKNNFEADAYFVKVIVLSGLCSNDCPRKITPFGVNQPGPYIMYTTVDANGYLKNGSAGQLSQSAHLALQLPYNVLGLGRSANFLDHLYVGIPRPSGEKSIRKQEWTAIIPNSQLIVIPYPHNVPRSSHRCLCFHLGNNWHFTLAGKESR

SEQ ID NO: 60152 - protein, 317 aa, Homo sapiens
MENEIFTPLLEQFMTSPLVTWVKTFGPLAAGNGTNLDEYVALVDGVFLNQVMLQINPKLESQRVNKKVNNDASLRMHNLSILVRQIKFYYQETLQQLIMMSLPNVLIIGKNPFSEQGTEEVKKLLLLLLGCAVQCQKKEEFIERIQGLDFDTKAAVAAHIQETIIELSEERDGLHFLPHASSSAQSPCGSPGMKRTESRQHLSVELADAKAKIRRLRQELEEKTEQLLDCKQELEQMEIELKRLQQENMNLLSDARSARMYRDELDALREKAVRVDKLESEVSRYKERLHDIEFYKARVEELKEDNQVLLETKTMLE

SEQ ID NO: 60153 - protein, 286 aa, Homo sapiens
MIRNGRGAAGGAEQPGPGGRRAVRVWCDGCYDMVHYGHSNQLRQARAMGDYLIVGVHTDEEIAKHKGPPVFTQEERYKMVQAIKWVDEVVPAAPYVTTLETLDKYNCDFCVHGNDITLTVDGRDTYEEVKQAGRYRECKRTQGVSTTDLVGRMLLVTKAHHSSQCPGGRNPWTGVSQFLQTSQKIIQFASGKEPQPGETVIYVAGAFDLFHIGHVDFLEKVHRLAERPYIIAGLHFDQEVNHYKGKNYPIMNLHERTLSVLACRYVSEVVIGAPYAVTAELLSHFK

SEQ ID NO: 60154 - protein, 495 aa, Homo sapiens
VKVAQSIEDHHQEVIGFCRENGFHGLVAYDSDYALCNIPYYFSAHALKLSRNGKSLTTSQYLMHEVAKQLDLNPNRFPIFAALLGNHILPDEDLASFHWSLLGPEHPLASLKVRAHQLVLPPCDVVIKAVADYVRNIQDTSDLDAIAKDVFQHSQSRTDDKVIRFKRAIGYYSATSKPMSFHPPHYLAARPGPFGMPGMVPPHVPPQMLNIPQTSLQAKPVAPQVPSPGGAPGQGPYPYSLSEPAPLTLDTSGKNLTEQNSYSNIPHEGKHTPLYERSSPINPAQSGSPNHVDSAYFPGSSTSSSSDNDEGSGGATNHISGNKIGWEKTGSHSEPQARGDPGDQTKAEGSSTASSGSQLAEGKGSQMGTVQPIPCLLSMPTRNHMDITTPPLPPVAPEVLRVAEHRHKKGLMYPYIFHVLTKGEIKIAVSIEDEANKDLPPAALLYRPVRQYVYGVLFSLAESRKKTERLAFRKNRLPPECMYCNNPLFVFLGTS

SEQ ID NO: 60155 - protein, 387 aa, Homo sapiens
MATVIPGPLSLGEDFYREAIEHCRSYNARLCAERSLRLPFLDSQTGVAQNNCYIWMEKTHRGPGLAPGQIYTYPARCWRKKRRLNILEDPRLRPCEYKIDCEAPLKKEGGLPEGPVLEALLCAETGEKKIELKEEETIMDCQKQQLLEFPHDLEVEDLEDDIPRRKNRAKGKAYGIGGLRKRQDTASLEDRDKPYVCDICGKRYKNRPGLSYHYTHTHLAEEEGEENAERHALPFHRKNNHKQFYKELAWVPEAQRKHTAKKAPDGTVIPNGYCDFCLGGSKKTGCPEDLISCADCGRSGHPSCLQFTVNMTAAVRTYRWQCIECKSCSLCGTSENDDQLLFCDDCDRGYHMYCLSPPMAEPPEGSWSCHLCLRHLKEKASAYITLT

SEQ ID NO: 60156 - protein, 85 aa, Homo sapiens
MRRAGLGEGVPPGNYGNYGYANSGYSACEEENERLTESLRSKVTAIKSLSIEIGHEVKTQNKLLAEMWILQVPGISPVAVKAYFC

SEQ ID NO: 60157 - protein, 55 aa, Homo sapiens
  MOD_RES (1)..(1): Any amino acid
XSSSSCSTQHSIIITKGDSQPAAAAPHPEPSLSFQAHHLLPNTSPISPTQPLTPS

SEQ ID NO: 60158 - protein, 916 aa, Homo sapiens
MPAKPFLSSVLLSWKVLDFSGPGPQGTGQPCSCGHWAEGQGGPPEPAGGPNVLAKALYDNVAESPDELSFRKGDIMTVLEQDTQGLDGWWLCSLHGRQGIVPGNRLKILVGMYDKKPAGPGPGPPATPAQPQPGLHAPAPPASQYTPMLPNTYQPQPDSVYLVPTPSKAQQGLYQVPGPSPQFQSPPAKQTSTFSKQTPHHPFPSPATDLYQVPPGPGGPAQDIYQVPPSAGMGHDIYQVPPSMDTRSWEGTKPPAKVVVPTRVGQGYVYEAAQPEQDEYDIPRHLLAPGPQDIYDVPPVRGLLPSQYGQEVYDTPPMAVKGPNGRDPLLEVYDVPPSVEKGLPPSNHHAVYDVPPSVSKDVPDGPLLREETYDVPPAFAKAKPFDPARTPLVLAAPPPDSPPAEDVYDVPPPAPDLYDVPPGLRRPGPGTLYDVPRERVLPPEVADGGVVDSGVYAVPPPAEREAPAEGKRLSASSTGSTRSSQSASSLEVAGPGREPLELEVAVEALARLQQGVSATVAHLLDLAGSAGATGSWRSPSEPQEPLVQDLQAAVAAVQSAVHELLEFARSAVGNAAHTSDRALHAKLSRQLQKMEDVHQTLVAHGQALDAGRGSSGATLEDLDRLVACSRAVPEDAKQLASFLHGNASLLFRRTKATAPGPEGGGTLHPNPTDKTSSIQSRPLPSPPKFTSQDSPDGQYENSEGGWMEDYDYVHLQGKEEFEKTQKELLEKGSITRQGKSQLELQQLKQFERLEQEVSRPIDHDLANWTPAQPLAPGRTGGLGPSDRQLLLFYLEQCEANLTTLTNAVDAFFTAVATNQPPKIFVAHSKFVILSAHKLVFIGDTLSRQAKAADVRSQVTHYSNLLCDLLRGIVATTKAAALQYPSPSAAQDMVERVKELGHSTQQFRRVLGQLAAA

SEQ ID NO: 60159 - protein, 22 aa, Homo sapiens
MKENYCLQAALVCLGMLCHSHA

SEQ ID NO: 60160 - protein, 78 aa, Homo sapiens
  MOD_RES (1)..(1): Any amino acid
XQARLGCRSRAITQGHRIMVMRSHCHQPDLAGLEALRQRERLPTTAQQEDPEKIQVQLCFKTCSPESQQIYGKSQPLV

SEQ ID NO: 60161 - protein, 264 aa, Homo sapiens
IVGASTNWRDHVKAMEERKLLHSFLAKSQDGLPPRRMKDSYIEVLLPLGSEPELREKYLTVQNTVRFGRILEDLDSLGDMCKKSLSPEQDIKFSGHVSWVGKTSMEVKMQMFQLHGDEFCPVLDATFVMVARDSENKGPAFVNPLIPESPEEEELFRQGELNKGRRIAFSSTSLLKMAPSAEERTTIHEMFLSTLDPKTISFRSRVLPSNAVWMENSKLKSLEICHPQERNIFNRIFGGFLMRKAYELAWATACSFGGSRPFVV

SEQ ID NO: 60162 - protein, 222 aa, Homo sapiens
CESASRLLFLSMHWARSIPAFQALGQDCNTSLVRACWNELFTLGLAQCAQVMSLSTILAAIVNHLQNSIQEDKLSGDRIKQVMEHIWKLQEFCNSMAKLDIDGYEYAYLKAIVLFSPDHPGLTSTSQIEKFQEKAQMELQDYVQKTYSEDTYRSNQTTHSFFPKIFLMCSMISLLLLVSTSTRTCSPESGNGKHGAEEKQNSQRTQPQKVVIWDLLLVAETF

SEQ ID NO: 60163 - protein, 226 aa, Homo sapiens
MSFCSFFGGEVFQNHFEPGVYVCAKCGYELFSSRSKYAHSSPWPAFTETIHADSVAKRPEHNRSEALKVRGHRGGGGTGAARESREPVPPSSLCLPHSSRGLEASIPGLLPLPGSCHPRLSGEPGLLVQMWETGQVSCTGSRTKVNLLCRRSAWEIGVWEETPSASPSKGLHCGCIMARSSPSCLVIFPGVLWQVWQWVGPRVPERRPQAGAVPILNIQQLAEVCP

SEQ ID NO: 60164 - protein, 189 aa, Homo sapiens
  MOD_RES (1)..(1): Any amino acid
XRAHQVTYSQSPKIATLMKSVSTSLEKKGHVYLVGWQTLGIIAIMDGVECIHTFGADFRDVRGFLIGDHSDMFNQKAELTNQGPQFTFSQEDFLTSILPSLTEIDTVVFIFTLDDNLTEVQTIVEQVKEKTNHIQALAHSTVGQTLLIPLKKLFPSIISITWPLLFFEYEGNFIQRSGFSTLPRLFANS

SEQ ID NO: 60165 - protein, 97 aa, Homo sapiens
MPNSEPASLLELFNSIATQGELVRSLKAGNASKDEIDSAVKMLVSLKMSYKAAAGEDYKADCPPGNPAPTSNHGPDATEAEEDFVDPWTVQTSSAKG

SEQ ID NO: 60166 - protein, 98 aa, Homo sapiens
MSSLGGGSQDAGGSSSSSTNGSGGSGSSGPKAGAADKSAVVAAAAPASVADDTPPPERRNKSGIISEPLNKSLRRSRPLSHYSSFGSSGGSGGGSMMG

SEQ ID NO: 60167 - protein, 144 aa, Homo sapiens
MAQQANVGELLAMLDSPMLGVRDDVTAVFKENLNSDRGPMLVNTLVDYYLETSSQPALHILTTLQEPHDKHLLDRINEYVGKAATRLSILSLLGHVIRLQPSWKHKLSQAPLLPSLLKCLKDGSTIGFICYSTMQIDFCVCQEG

SEQ ID NO: 60168 - protein, 163 aa, Homo sapiens
MTQPPPEKTPAKKHVRLQERRGSNVALMLDVRSLGAVEPICSVNTPREVTLHFLRTAGHPLTRWALQRQPPSPKQLEEEFLKIPSNFVSPEDLDIPGHASKDRYKTILPNPQSRVCLGRAQSQEDGDYINANYIRGYDGKEKVYIATQGPMPNTVSDFWEMVW

SEQ ID NO: 60169 - protein, 283 aa, Homo sapiens
MAGRSLCLTRSSVPGTPFPPPVQQPSTPGPDLLALEEEYKRLNAELQAKTADVVQQAKEIIRDRQEVRSRPVSTQMKSCDDEDDYSLRGLLPSEGIVHLHSETKPKTKNIDPVNKVQNKLHSANKGRKTNSSVKLKYSDVQTADDVAIPEDFSDFSLAKTISKIEGQLEEEGLPEYIDDIFSGVSNDIGTEAQIRFLKAKLHVMQEELDNVVCECNKKEDEIQNLKSQVKNFEEDFMRQQRTINMQQSQVEKYKTLFEEANKKYDGLQQQLSSVERVIIWYFS

SEQ ID NO: 60170 - protein, 145 aa, Homo sapiens
MGSRNSSSAGSGSGDPSEGLPRRGAGLRRSEEEEEEDEDVDLAQVLAYLLRRPSWTQRKRMTELGMVVLGIDTTHLWMLPLTPGSWNSMRSRHKWNWPQGSWGLGGPPRSTAFLECCTSFLPNDLGFTDSYSQKAFCGIYSKDGQ

SEQ ID NO: 60171 - protein, 273 aa, Homo sapiens
MSMSPTVIILACLGFFLDQSVWAHVGGQDKPFCSAWPSAVVPQGGHVTLRCHYRRGFNIFTLYKKDGVPVPELYNRIFWNSFLISPVTPAHAGTYRCRGFHPHSPTEWSAPSNPLVIMVTGLYEKPSLTARPGPTVRTGENVTLSCSSQSSFDIYHLSREGEAHELRLPAVPSINGTFQADFPLGPATHGETYRCFGSFHGSPYEWSDASDPLPVSVTGNPSSSWPSPTEPSFKTGIARHLHAVIRYSVAIILFTILPFFLLHRWCSKKKMLL

SEQ ID NO: 60172 - protein, 140 aa, Homo sapiens
  MOD_RES (1)..(1): Any amino acid
XAASQAVEEMRSRVVLGEFGVRNVHTTDFPGNYSGYDDAWDQDRFEKNFRVDVVHMDENSLEFDMVGIDAAIANAFRRILLAEVPTMAVEKVLVYNNTSIVQDEILAHRLGLIPIHADPRLFEYRNQVYTRHMTWIPLGN

SEQ ID NO: 60173 - protein, 224 aa, Homo sapiens
MRVTAPRTLLLLLWGAVALTETWAGSHSMRYFYTAMSRPGRGEPRFITVGYVDDTLFVRFDSDATSPRKEPRAPWIEQEGPEYWDRETQISKTNTQTYRENLRTALRYYNQSEAGSHIIQRMYGCDVGPDGRLLRGYDQDAYDGKDYIALNEDLSSWTAADTAAQITQRKWEAARVAEQLRAYLEGLCVESLRRYLENGKETLQRADQEQKSLFPAQRLELSNE

SEQ ID NO: 60174 - protein, 142 aa, Homo sapiens
MAFYSYNSVLAIARTRFPSHFVHPTCSSYSPSCAFLHLPDSHLNKTCMKNYESKKYSDPSQPGNTVLHPGTRLIQKLHTSTCWLQEVPGKPQLEQATKHPQVTSPQATKETGMEIKEGKQSYRQKIMDELKYYYNGFYLLWI

SEQ ID NO: 60175 - protein, 120 aa, Homo sapiens
MTTRKLSAHSAATPGYKAVTHKHHTGWARMAKTGLPEKLPPSTSQALSALCWLFSAARWLTPRTLVTCRAWAWLHSGSPSPSPSSRMETSPALRTPRCSPGMSPRLATWHRPHVLRARGA

SEQ ID NO: 60176 - protein, 754 aa, Homo sapiens
MAAQVGAVRVVRAVAAQEEPDKEGKEKPHAGVSPRGVKRQRRSSSGGSQEKRGRPSQEPPLAPPHRRRRSRQHPGPLPPTNAAPTVPGPVEPLLLPPPPPPSLAPAGPAVAAPLPAPSTSALFTFSPLTVSAAGPKHKGHKERHKHHHHRGPDGDPSSCGTDLKHKDKQENGERTGGVPLIKAPKRETPDENGKTQRADDFVLKKIKKKKKKKHREDMRGRRLKMYNKEVQTVCAGLTRISKEILTQGQINSTSGLNKESFRYLKDEQLCRLNLGMQEYRVPQGVQTPFMTHQEHSIRRNFLKTGTKFSNFIHEEHQSNGGALVLHAYMDELSFLSPMEMERFSEEFLALTFSENEKNAAYYALAIVHGAAAYLPDFLDYFAFNFPNTPVKMEILGKKDIETTTISNFHTQVNRTYCCGTYRAGPMRQISLVGAVDEEVGDYFPEFLDMLEESPFLKMTLPWGTLSSLRLQCRSQSDDGPIMWVRPGEQMIPTADMPKSPFKRRRSMNEIKNLQYLPRTSEPREVLFEDRTRAHADHVGQGFDWQSTAAVGVLKAVQFGEWSDQPRITKDVICFHAEDFTDVVQRLQLDLHEPPVSQCVQWVDEAKLNQMRREGIRYARIQLCDNDIYFIPRNVIHQFKTVSAVCSLAWHIRLKQYHPVVEATQNTESNSNMDCGLTGKRELEVDSQCVRIKTESEEACTEIQLLTTASSSFPPASELNLQQDQKTQPIPVLKVESRLDSDQQHNLQEHSTTSV

SEQ ID NO: 60177 - protein, 130 aa, Homo sapiens
MKVEREIAILKLIEHPHVLKLHDVYENKKYLYLVLEHVSGGELFDYLVKKGRLTPKEARKFFRQIISALDFCHSHSICHRDLKPENLLLDEKNNIRIADFGMASLQVGDSLLETSCGSPHYACPEVIRGE

SEQ ID NO: 60178 - protein, 35 aa, Homo sapiens
MDDAYDRLTRHRCRMVERGIAAQPLYAGYCNHENM

SEQ ID NO: 60179 - protein, 137 aa, Homo sapiens
MDNARMNSFLEYPILSSGDSGTCSARAYPSDHRITTFQSCAVSANSCGGDDRFLVGRGVQIGSPHHHHHHHHRHPQPATYQTSGNLGVSYSHSSCGPSYGSQNFSAPYSPYALNQEADPPRSLSLPRIGDIFSSADF

SEQ ID NO: 60180 - protein, 181 aa, Homo sapiens
MGSQHSAAARPSSCRRKQEDDRDGLLAEREQEEAIAQFPYVEFTGRDSITCLTCQGTGYIPTEQVNELVALIPHSDQRLRPQRTKQYVLLSILLCLLASGLVVFFLFPHSVLVDDDGIKVVKVTFNKQDSLVILTIMATLKIRNSNFYTVAVTSLSSQIQYMNTVVNFTGKAEMGGPFSYV

SEQ ID NO: 60181 - protein, 129 aa, Homo sapiens
MDVLVSECSARLLQQEEEIKSLTAEIDRLKNCGCLGASPNLEQLQEENLKLKYRLNILRKSLQAERNKPTKNMINIISRLQEVFGHAIKAAYPDLENPPLLVTPSQQAKFGDYQCNSAMGISQVLLMST

SEQ ID NO: 60182 - protein, 60 aa, Homo sapiens
  MOD_RES (1)..(1): Any amino acid
XQKRPSQRHGSKYLATASTMDHARHGFLPRHRDTGILDSIGRFFGGDRGAPKRGSGKDCP

SEQ ID NO: 60183 - protein, 372 aa, Homo sapiens
MDQGYGGYGAWSAGPANTQGAYGTGVASWQGYENYNYYGAQNTSVTTGATYSYGPASWEAAKANDGGLAAGAPAMHMASYGPEPCTDNSDSLIAKINQRLDMMSKEGGRGGSGGGGEGIQDRESSFRFQPFESYDSRPCLPEHNPYRPSYSYDYEFDLGSDRNGSFGGQYSECRDPARERGSLDGFMRGRGQGRFQDRSNPGTFMRSDPFVPPAASSEPLSTPWNELNYVGGRGLGGPSPSRPPPSLFSQSMAPDYGVMGMQGAGGYDSTMPYGCGRSQPRMRDRDRPKRRGFDRFGPDGTGRKRKQFQLYEEPDTKLARVDSEGDFSENDDAAGDFRSGDEEFKGEDELCDSGRQRGTCLLQERRRTRTRM

SEQ ID NO: 60184 - protein, 200 aa, Homo sapiens
MHVFFVFLSLLETLRRLPVADVSVPHTGENCSPRMEAALTKNTVDIAEGLEQVQMGSLPGTISENSPSPSERNRRVNSDLVTNGLINKPQSLESRERQKSSDILEELIVQGIIQSHSKVFRNGESYDVTLTTTEKPLRKPPSRLKKLKIKKQVKDFTMKDIEEKMEAAEERRKTKEEEIRKRLRSDRLLPSANHSDSAEL

SEQ ID NO: 60185 - protein, 181 aa, Homo sapiens
MTDTVFSNSSNRWMYPSDRPLQSNDKEQLQAGWSVHPGGQPDRQRKQEELTDEEKEIINRVIARAEKMEEMEQERIGRLVDRLENMRKNVAGDGVNRCILCGEQLGMLGSACVVCEDCKKNVCTKCGVETNNRLHSVWLCKICIEQREVWKRSGAWFFKGFPKQVLPQPMPIKKTKPQQPV

SEQ ID NO: 60186 - protein, 125 aa, Homo sapiens
MAVTKELLQMDLYALLGIEEKAADKEVKKAYRQKALSCHPDKNPDNPRAAELFHQLSQALEVLTDAAARAAYDKVRKAKKQAAERTQKLDEKRKKVKLDRTPERRGFPAAGGTAEAHPGADTPGA

SEQ ID NO: 60187 - protein, 249 aa, Homo sapiens
MNPFWSMSTSSVRKRSEGEEKTLTGDVKTSPPRTAPKKQLPSIPKNALPITKPTSPAPAAQSTNGTHASYGPFYLEYSLLAEFTLVVKQKLPGVYVQPSYRSALMWFGVIFIRHGLYQDGVFKFTVYIPDNYPDGDCPLSRGTSVLCSSFRHAIRALFLCSGSAREAGCLPSCSTHQRLVFDIPVFHPLVDPTSGELDVKRAFAKWRRNHNHIWQVLMYARRVFYKIDTASPLNPEAAVLYEKDIQLFK

SEQ ID NO: 60188 - protein, 16 aa, Homo sapiens
APVTEAPQMTPIHTPR

SEQ ID NO: 60189 - protein, 164 aa, Homo sapiens
DALTEPRSSIKISAFKCDSKLPAIDQTSVKQKHKSTMTVRKAEKVDPSEPSPGGSSKHPLFCVEYTPYCSVFAFSPVLQPNTNYCCLLLPLVPPASPVAQEPPDCPLPLVTVPSFTSTASTSPDPVPESPAVLCYFPISCPTPAETPVLCLQGPRRPSRIYLMW

SEQ ID NO: 60190 - protein, 258 aa, Homo sapiens
  MOD_RES (1)..(1): Any amino acid
XHKKPVNYSQFDHSDSDDDFVSATVPLNKKSRTAPKELKQDKPKPNLNNLRKEEIPVQEKTPKKRMALDDKLYQRDLEVALALSVKELPTVTTNVQNSQDKSIEKHGSSKIETMNKSPHISNCSVASDYLDLDKITVEDDVGGVQGKRKAASKAAAQQRKILLEGSDGDSANDTEPDFAPGEDSEDDSDFCESEDNDEDFSMRKSKVKEIKKKEVKVKSPVEKKEKKSKSKCNALDTTRKPLEIRSPSAESKKPKWVP

SEQ ID NO: 60191 - protein, 134 aa, Homo sapiens
MATHPDGFRLEGPLAAAHSPGPCTVLYEGPVRGLCPFAPRNSNTMAAAALAAPSLGFDGVIGVLVADTSLTDMHVVDVELSGPRGPTGRSFAVHTRRENPAEPGAVTGSATVTAFWQSLLACCQLPSRPGIHLC

SEQ ID NO: 60192 - protein, 1666 aa, Homo sapiens
MHPGLWLLLVTLCLTEELAAAGEKSYGKPCGGQDCSGSCQCFPEKGARGRPGPIGIQGPTGPQGFTGSTGLSGLKGERGFPGLLGPYGPKGDKGPMGVPGFLGINGIPGHPGQPGPRGPPGLDGCNGTQGAVGFPGPDGYPGLLGPPGLPGQKGSKGDPVLAPGSFKGMKGDPGLPGLDGITGPQGAPGFPGAVGPAGPPGLQGPPGPPGPLGPDGNMGLGFQGEKGVKGDVGLPGPAGPPPSTGELEFMGFPKGKKGSKGEPGPKGFPGISGPPGFPGLGTTGEKGEKGEKGIPGLPGPRGPMGSEGVQGPPGQQGKKGTLGFPGLNGFQGIEGQKGDIGLPGPDVFIDIDGAVISGNPGDPGVPGLPGLKGDEGIQGLRGPSGVPGLPALSGVPGALGPQGFPGLKGDQGNPGRTTIGAAGLPGRDGLPGPPGPPGPPSPEFETETLHNKESGFPGLRGEQGPKGNLGLKGIKGDSGFCACDGGVPNTGPPGEPGPPGPWGLIGLPGLKGARGDRGSGGAQGPAGAPGLVGPLGPSGPKGKKGEPILSTIQGMPGDRGDSGSQGFRGVIGEPGKDGVPGLPGLPGLPGDGGQGFPGEKGLPGLPGEKGHPGPPGLPGNGLPGLPGPRGLPGDKGKDGLPGQQGLPGSKGITLPCIIPGSYGPSGFPGTPGFPGPKGSRGLPGTPGQPGSSGSKGEPGSPGLVHLPELPGFPGPRGEKGLPGFPGLPGKDGLPGMIGSPGLPGSKGATGDIFGAENGAPGEQGLQGLTGHKGFLGDSGLPGLKGVHGKPGLLGPKGERGSPGTPGQVGQPGTPGSSGPYGIKGKSGLPGAPGFPGISGHPGKKGTRGKKGPPGSIVKKGLPGLKGLPGNPGLVGLKGSPGSPGVAGLPALSGPKGEKGSVGFVGFPGIPGLPGIPGTRGLKGIPGSTGKMGPSGRAGTPGEKGDRGNPGPVGIPSPRRPMSNLWLKGDKGSQGSAGSNGFPGPRGDKGEAGRPGPPGLPGAPGLPGIIKGVSGKPGPPGFMGIRGLPGLKGSSGITGFPGMPGESGSQGIRGSPGLPGASGLPGLKGDNGQTVEISGSPGPKGQPGESGFKGTKGRDGLIGNIGFPGNKGEDGKVGVSGDVGLPGAPGFPGVAGMRGEPGLPGSSGHQGAIGPLGSPGLIGPKGPSITGVPGPAGLPGPKGEKGYPGIGIGAPGKPGLRGQKGDRGFPGLQGPAGLPGAPGISLPSLIAGQPGDPGRPGLDGERGRPGPAGPPGPPGPSSNQGDTGDPGFPGIPGPKGPKGDQGIPGFSGLPGELGLKGMRGEPGFMGTPGKVGPPGDPGFPGMKGKAGPRGSSGLQGDPGQTPTAEAVQVPPGPLGLPGIDGIPGLTGDPGAQGPVGLQGSKGLPGIPGKDGPSGLPGPPGALGDPGLPGLQGPPGFEGAPGQQGPFGMPGMPGQSMRVGYTLVKHSQSEQVPPCPIGMSQLWVGYSLLFVEGQEKAHNQDLGFAGSCLPRFSTMPFIYCNINEVCHYARRNDKSYWLSTTAPIPMMPVSQTQIPQYISRCSVCEAPSQAIAVHSQDITIPQCPLGWRSLWIGYSFLMHTAAGAEGGGQSLVSPGSCLEDFRATPFIECSGARGTCHYFANKYSFWLTTVEERQQFGELPVSETLKAGQLHTRVSRCQVCMKSL

SEQ ID NO: 60193 - protein, 454 aa, Homo sapiens
MAVLGVQLVVTLLTATLMHRLAPHCSFARWLLCNGSLFRYKHPSEEELRALAGKPRPRGRKERWANGLSEEKPLSVPRDAPFQLETCPLTTVDALEAYYYMLGPAKETNIAVFWCLLTVTFSIKMFLTVTRLYFSAEEGGERSVCLTFAFLFLLLAMLVQVVREETLELGLEPGLASMTQNLEPLLKKQGWDWALPVAKLAIRVGLAVVGSVLGAFLTFPGLRLAQTHRDALTMSEDRPMLQFLLHTSFLSPLFILWLWTKPIARDFLHQPPFGETRFSLLSDSAFDSGRLWLLVVLCLLRLAVTRPHLQAYLCLAKARVEQLRREAGRIEAREIQQRVVRVYCYVTVVSLQYLTPLILTLNCTLLLKTLGGYSWGLGPAPLLSPDPSSASAAPIGSGEDEVQQTAARIAGALGGLLTPLFLRGVLAYLIWWTAACQLLASLFGLYFHQHLAGS

SEQ ID NO: 60194 - protein, 111 aa, Homo sapiens
MRKKDKQSIRDVRDIFGVSESPPRDTCGNHTNQLDGTKEERELPRVIKTSGSMPDDASLNSTTLSDASQDKEGSFAVPRSDSVAILETIPVLPVHSNGSPEPGQPVQNAIS

SEQ ID NO: 60195 - protein, 162 aa, Homo sapiens
MNRPIQVKPADSESRGGSSCLRQPPSQDRKLFVGMLNKQQSEDDVRRLFEAFGNIEECTILRGPDGNSKGCAFVKYSSHAEAQAAINALHGSQTMPGASSSLVVKFADTDKERTMRRMQQMAGQMGMFNPMAIPFGAYGAYAQALMQQQAALMASVAQGGYL

SEQ ID NO: 60196 - protein, 91 aa, Homo sapiens
MGSCCSCPDKDTVPDNHRNKFKVINVDDDGNELGSGIMELTDTELILYTRKRDSVKWHYLCLRRYGYDSNLFSFESGRRCQTGQGIFAFKC

SEQ ID NO: 60197 - protein, 861 aa, Homo sapiens
MPHTELGTKPLQAPGFREKPLFTRDASQLKGTFLSTTLKKSNMGFGFTIIGGDEPDEFLQVKSVIPDGPAAQDGKMETGDVIVYINEVCVLGHTHADVVKLFQSVPIGQSVNLVLCRGYPLPFDPEDPANSMVPPLAIMERPPPVMVNGRHNYETYLEYISRTSQSVPDITDRPPHSLHSMPTDGQLDGTYPPPVHDDNVSMASSGATQAELMTLTIVKGAQGFGFTIADSPTGQRVKQILDIQGCPGLCEGDLIVEINQQNVQNLSHTEVVDILKDCPIGSETSLIIHRGGFFSPWKTPKPIMDRWENQGSPQTSLSAPAIPQNLPFPPALHRSSFPDSTEAFDPRKPDPYELYEKSRAIYESPDYKELDVHLRRMESGFGFRILGGDEPGQPILIGAVIAMGSADRDGRLHPGDELVYVDGIPVAGKTHRYVIDLMHHAARNGQVNLTVRRKVLCGGEPCPENGRSPGSVSTHHSSPRSDYATYTNSNHAAPSSNASPPEGFASHSLQTSDVVIHRKENEGFGFVIISSLNRPESGSTITVPHKIGRIIDGSPADRCAKLKVGDRILAVNGQSIINMPHADIVKLIKDAGLSVTLRIIPQEELNSPTSAPSSEKQSPMAQQSPLAQQSPLAQPSPATPNSPIAQPAPPQPLQLQGHENSYRSEVKARQDVKPDIRQPPFTDYRQPPLDYRQPPGGDYQQPPPLDYRQPPLLDYRQHSPDTRQYPLSDYRQPQDFDYFTVDMEKGAKGFGFSIRGGREYKMDLYVLRLAEDGPAIRNGRMRVGDQIIEINGESTRDMTHARAIELIKSGGRRVRLLLKRGTGQVPEYGTFHVLIHPFALPSVNHKCLWLFIKLHQFSTST

SEQ ID NO: 60198 - protein, 253 aa, Homo sapiens
KKDEKDQSKEKEKKVKKTIPSWATLSASQLARAQKQTPMASSPRPKMDAILTEAIKACFQKSGASVVAIRKYIIHKYPSLELERRGYLLKQALKRELNRGVIKQNRSSAVDPEPQVKLEDVLPLAFTRLCEPKEASYSLIRKYVSQYYPKLRVDIRPQLLKNALQRAVERGQLEQITGKGASGTFQLKKSGEKPLLGGSLMEYAILSAIAAMNEPKTCSTTALKKYVLENHPGTNSNYQMHLLKKTLQKCEKN

SEQ ID NO: 60199 - protein, 116 aa, Homo sapiens
MGPLPCSPLRNTFMVSKRGFSPPQAPNFPTRPENLRTTAGVGDPARTQALLLLGAAALACLALDLLFLLFYSFWLCCRRRKSEEHLDADCCCTAWCVIIATLVCSAGIAVGFYGNG

SEQ ID NO: 60200 - protein, 1252 aa, Homo sapiens
MSTTVNVDSLAEYEKSQIKRALELGTVMTVFSFRKSTPERRTVQVIMETRQVAWSKTADKIEGFLDIMEIKEIRPGKNSKDFERAKAVRQKEDCCFTILYGTQFVLSTLSLAADSKEDAVNWLSGLKILHQEAMNASTPTIIESWLRKQIYSVDQTRRNSISLRELKTILPLINFKVSSAKFLKDKFVEIGAHKDELSFEQFHLFYKKLMFEQQKSILDEFKKDSSVFILGNTDRPDASAVYLHDFQRFLIHEQQEHWAQDLNKVRERMTKFIDDTMRETAEPFLFVDEFLTYLFSRENSIWDEKYDAVDMQDMNNPLSHYWISSSHNTYLTGDQLRSESSPEAYIRCLRMGCRCIELDCWDGPDGKPVIYHGWTRTTKIKFDDVVQAIKDHAFVTSSFPVILSIEEHCSVEQQRHMAKAFKEVFGDLLLTKPTEASADQLPSPSQLREKIIIKHKKLGPRGDVDVNMEDKKDEHKQQGELYMWDSIDQKWTRHYCAIADAKLSFSDDIEQTMEEEVPQDIPPTELHFGEKWFHKKVEKRTSAEKLLQEYCMETGGKDGTFLVRESETFPNDYTLSFWRSGRVQHCRIRSTMEGGTLKYYLTDNLTFSSIYALIQHYRETHLRCAEFELRLTDPVPNPNPHESKPWYYDSLSRGEAEDMLMRIPRDGAFLIRKREGSDSYAITFRARGKVKHCRINRDGRHFVLGTSAYFESLVELVSYYEKHSLYRKMRLRYPVTPELLERYNMERDINSLYDVSRMYVDPSEINPSMPQRTVKALYDYKAKRSDELSFCRGALIHNVSKEPGGWWKGDYGTRIQQYFPSNYVEDISTADFEELEKQIIEDNPLGSLCRGILDLNTYNVVKAPQGKNQKSFVFILEPKQQGDPPVEFATDRVEELFEWFQSIREITWKIDTKENNMKYWEKNQSIAIELSDLVVYCKPTSKTKDNLENPDFREIRSFVETKADSIIRQKPVDLLKYNQKGLTRVYPKGQRVDSSNYDPFRLWLCGSQMVALNFQTADKYMQMNHALFSLNGRTGYVLQPESMRTEKYDPMPPESQRKILMTLTVKVLGARHLPKLGRSIACPFVEVEICGAEYDNNKFKTTVVNDNGLSPIWAPTQEKVTFEIYDPNLAFLRFVVYEEDMFSDPNFLAHATYPIKAVKSGFRSVPLKNGYSEDIELASLLVFCEMRPVLESEEELYSSCRQLRRRQEELNNQLFLYDTHQNLRNANRDALVKEFSVNENQSSCTRRNATRG

SEQ ID NO: 60201 - protein, 344 aa, Homo sapiens
MALRLLKLAATSASARVVAAGAQRVRGIHSSVQCKLRYGMWHFLLGDKASKRLTERSRVITVDGNICTGKGKLAKEIAEKLGFKHFPEAGIHYPDSTTGDGKPLATDYNGNCSLEKFYDDPRSNDGNSYRLQSWLYSSRLLQYSDALEHLLTTGQGVVLERSIFSDFVFLEAMYNQGFIRKQCVDHYNEVKSVTICDYLPPHLVIYIDVPVPEVQRRIQKKGDPHEMKITSAYLQDIENAYKKTFLPEMSEKCEVLQYSAREAQDSKKVVEDIEYLKFDKGPWLKQDNRTLYHLRLLVQDKFEVLNYTSIPIFLPEVTIGAHQTDRVLHQFREAQQLPDKGTRG

SEQ ID NO: 60202 - protein, 139 aa, Homo sapiens
MEAAAEPGNLAGVRHIILVLSGKGGVGKSTISTELALALRHAGKKAVPLLAGGNPGCGPVWPQYPPHARGAGQGCAPVRPRLGTRLPGPGAEHLAHVCGLPAGEAGRGRGVERPQEKRADKAVCVRRGLGGAGLPGGGH

SEQ ID NO: 60203 - protein, 173 aa, Homo sapiens
METWSVEQVCSWLVEKNLGELVHRFQEEEVSGAALLALNDRMVQQLVKKIGHQAVLMDLIKKYKQNTQGLKSPENPKKAALVMQTEAARDYRDEESSSPARHGEQMPSFYPAENLDNGLIDQRVLKQRRNVKQILARSKALQWTKSYVLPEFPYDVKCMLAEQKCPDHSMRIR

SEQ ID NO: 60204 - protein, 584 aa, Homo sapiens
MSLDFGSVALPVQNEDEEYDEEDYEREKELQQLLTDLPHDMLDDDLSSPELQYSDCSEDGTDGQPHHPEQLEMSWNEQMLPKSQSVNGYNEIQSLYAGEKCGNVWEENRSKTEDRHPVYHPEEGGDEGGSGYSPPSKCEQTDLYHLPENFRPYTNGQKQEFNNQATNVIKFSDPQWNHFQGPSCQGLEPYNKVTYKPYQSSAQNNGSPAQEITGSDTFEGLQQQFLGANENSAENMQIIQLQVLNKAKERQLENLIEKLNESERQIRYLNHQLVIIKDEKDGLTLSLRESQKLFQNGKEREIQLEAQIKALETQIQALKVNEEQMIKKSRTTEMALESLKQQLVDLHHSESLQRAREQHESIVMGLTKKYEEQVLSLQKNLDATVTALKEQEDICSRLKDHVKQLERNQEAIKLEKTEIINKLTRSLEESQKQCAHLLQSGSVQEVAQLQFQLQQAQKAHAMSANMNKALQEELTELKDEISLYESAAKLGIHPSDSEGELNIELTESYVDLGIKKVNWKKSKVTSIVQEEDPNEELSKDEFILKLKAEVQRLLGSNSMKRHLVSQLQNDLKDCHKKIEDLHQV

SEQ ID NO: 60205 - protein, 171 aa, Homo sapiens
MNDTHVNEDLKAIKFSEADYFGNVLQTRKYLAQSDFFWLRKAVPKTEWFTNPTTVNAFYSASTNQIRFPAGELQKPFFWGTEYPRSLSYGAIGVIVGHEFTHGFDNNGRKYDKNGNLDPWWSTESEEKFKEKTKCMINQYSNYYWKKAGLNVKGKRTLGENIADNGGLREA

SEQ ID NO: 60206 - protein, 54 aa, Homo sapiens
MQDEQPSDSFQGQAAQSGVWNDDSMLGPSQNFEAESIQDNAHMAEGTGFYPSEP

SEQ ID NO: 60207 - protein, 122 aa, Homo sapiens
  MOD_RES (1)..(1): Any amino acid
XPWPAGEEPVRCDACPEGAALPAALSCLSCLASFCPAHLGPHERSPALRGHRLVPPLRRLEESLCPRHLRPLERYCRAERVCLCEACAAQEHRGHELVPLEQERALQEVGSGGTLGLSSPKS

SEQ ID NO: 60208 - protein, 163 aa, Homo sapiens
MSNKEGSGGFRKRKHDNFPHNQRREGKDVNSSSPVMLAFKSFQQELDARHDKYERLVKLSRDITVESKRTIFLLHRITSSQYLDHSAPDMEDILTESEIKLDGVRQKIFQVAQELSGEDMHQFHRAITTGLQEYVEAVSFQHFIKTRSLISMDEINKQLIFTT

SEQ ID NO: 60209 - protein, 235 aa, Homo sapiens
PKQSVYDAYRKYCESLACCRPLSTANFGKIIREIFPDIKARRLGGRGQSKYCYSGIRRKTLVSMPPLPGLDLKGSESPEMGPEVTPAPRDELVEAACALTCDWAERILKRSFSSIVEVARFLLQQHLISARSAHAHVLKAMGLAEEDEHAPRERSSKPKNGLENPEGGAHKKPERLAQPPKDLEARTGAGPLARGERKKSVVESSAPGANNLQEVHSPLYRQLSHPVYLVPGCCL

SEQ ID NO: 60210 - protein, 322 aa, Homo sapiens
MWRLPGLLGRALPRTLGPSLWRVTPKSTSPDGPQTTSSTLLVPVPNLDRSGPHGPGTSGGPRSHGWKDAFQWMSSRVSPNTLWDAISWGTLAVLALQLARQIHFQASLPAGPQRVEHCSWHSPLDRFFSSPLWHPCSSLRQHILPSPDGPAPRHTGLREPRLGQEEASAQPRNFSHNSLRGARPQDPSEEGPGDFGFLHASSSIESEAKPAQPQPTGEKEQDKSKTLSLEEAVTSIQQLFQLSVSIAFNFLGTENMKSGDHTAAFSYFQKAAARGYSKAQYNAGLCHEHGRGTPRDISKLAASQGHSLAQYRYARCLLRDPA

SEQ ID NO: 60211 - protein, 240 aa, Homo sapiens
MQSTSNHLWLLSDILGQGATANVFRGRHKKTGDLFAIKVFNNISFLRPVDVQMREFEVLKKLNHKNIVKLFAIEEETTTRHKVLIMEFCPCGSLYTVLEEPSNAYGLPESEFLIVLRDVVGGMNHLRENGIVHRDIKPGNIMRVIGEDGQSVYKLTDFGAARELEDDEQFVSLYGTEEYLHPDMYERAVLRKDHQKKYGATVDLWSIGVTFYHAATGSLPFRPFEGPRRNKEVIFFRWKN

SEQ ID NO: 60212 - protein, 180 aa, Homo sapiens
QVIPINSGDLFVHPLWNRSCVACGNDIALIKLSRSAQLGDAVQLASLPPAGDILPNETPCYITGWGRLYTNGPLPDKLQEALLPVVDYEHCSRWNWWGSSVKKTMVCAGGDIRSGCNGDSGGPLNCPTEDGGWQVHGVTSFVSAFGCNTRRKPTVFTRVSAFIDWIEEKLQGNKAPESRT

SEQ ID NO: 60213 - protein, 156 aa, Homo sapiens
MSSRPGREDVGAAGARRPREPPEQELQRRREQKRRRHDAQQLQQLKHLESFYEKPPPGLIKEDETKPEDCIPDVPGNEHAREFLAHAPTKGLWMPLGKEVKVMQCWRCKRYGHRTGDKECPFFIKGNQKLEQFRVAHEDPMYDIIRDNKRHEKDVR

SEQ ID NO: 60214 - protein, 72 aa, Homo sapiens
MKDVPGFLQQSQNSGPGQPAVWHRLEELYTKKLWHQLTLQVLDFVQDPCFAQGDGLIKGEPFVPRGNHSSCS

SEQ ID NO: 60215 - protein, 69 aa, Homo sapiens
LQGDRDLCSLDTQDLQDQLKRSEAEKLTLVTRVQQLQGLLQNQSLQLQEQEKLLTKKVQRTAFRIRQPQ

SEQ ID NO: 60216 - protein, 999 aa, Homo sapiens
MDSTLTASEIRQRFIDFFKRNEHTYVHSSATIPLDDPTLLFANAGMNQFKPIFLNTIDPSHPMAKLSRAANTQKCIRAGGKHNDLDDVGKDVYHHTFFEMLGSWSFGDYFKELACKMALELLTQEFGIPIERLYVTYFGGDEAAGLEADLECKQIWQNLGLDDTKILPGNMKDNFWEMGDTGPCGPCSEIHYDRIGGRDAAHLVNQDDPNVLEIWNLVFIQYNREADGILKPLPKKSIDTGMGLERLVSVLQNKMSNYDTDLFVPYFEAIQKGTGARPYTGKVGAEDADGIDMAYRVLADHARTITVALADGGRPDNTGRGYVLRRILRRAVRYAHEKLNASRGFFATLVDVVVQSLGDAFPELKKDPDMVKDIINEEEVQFLKTLSRGRRILDRKIQSLGDSKTIPGDTAWLLYDTYGFPVDLTGLIAEEKGLVVDMDGFEEERKLAQLKSQGKGAGGEDLIMLDIYAIEELRARGLEVTDDSPKYNYHLDSSGSYVFENTVATVMALRREKMFVEEVSTGQECGVVLDKTCFYAEQGGQIYDEGYLVKVDDSSEDKTEFTVKNAQVRGGYVLHIGTIYGDLKVGDQVWLFIDEPRRRPIMSNHTATHILNFALRSVLGEADQKGSLVAPDRLRFDFTAKGAMSTQQIKKAEEIANEMIEAAKAVYTQDCPLAAAKAIQGLRAVFDETYPDPVRVVSIGVPVSELLDDPSGPAGSLTSVEFCGGTHLRNSSHAGAFVIVTEEAIAKGIRRIVAVTGAEAQKALRKAESLKKCLSVMEAKVKAQTAPNKDVQREIADLGEPCSRDPMDPVLGPWTFPAAPSAASRRALPKHALATAVIPQWQKDELRETLKSLKKVMDDLDRASKADVQKRVLEKTKQFIDSNPNQPLVILEMESGASAKALNEALKLFKMHSPQTSAMLFTVDNEAGKITCLCQVPQNAANRGLKASEWVQQVSGLMDGKGGGKDVSAQATGKNVGCLQEALQLATSFAQLRLGDVKN

SEQ ID NO: 60217 - protein, 189 aa, Homo sapiens
MGPPSLVLCLLSATVFSLLGGSSAFLSHHRLKGRFQRDRRNIRPNIILVLTDDQDVELGSMQVMNKTRRIMEQGGAHFINAFVTTPMCCPSRSSILTGKYVHNHNTYTNNENCSSPSWQAQHESRTFAVYLNSTGYRTAFFGKYLNEYNGSYVPPGWKEWVGLLKNSRFYNYTLCRNGVKEKHGSDYSK

SEQ ID NO: 60218 - protein, 43 aa, Homo sapiens
MGFCLALAWTLLVGAWTPLGAQNPISWEVQRFDGWYNNLMEHR

SEQ ID NO: 60219 - protein, 291 aa, Homo sapiens
MVHVVSQAGGPEGKDYCILYNPQWAHLPHDLSKASFLQLRNWTASLLCSAADLPARGFSNQIPLVARGNCTFYEKVRLAQGSGARGLLIVSRERLVPPGGNKTQYDEIGIPVALLSYKDMLDIFTRFGRTVRAALYAPKEPVLDYNMVIIFIMAVGTVAIGGYWAGSRDVKKRYMKHKRDDGPEKQEDEAVDVTPVMTCVFVVMCCSMLVLLYYFYDLLVYVVIGIFCLASATGLYSCLAPCVRRLPFGKCRIPNNSLPYFHKRPQARMLLLALFCVAVSVVWGVFRNEDQ

SEQ ID NO: 60220 - protein, 1525 aa, Homo sapiens
MLLPSGSLFFLRIVHGRKSRPDEGVYVCVARNYLGEAVSHNASLEVAILRDDFRQNPSDVMVAVGEPAVMECQPPRGHPEPTISWKKDGSPLDDKDERITIRGGKLMITYTRKSDAGKYVCVGTNMVGERESEVAELTVLERPSFVKRPSNLAVTVDDSAEFKCEARGDPVPTVRWRKDDGELPKSRYEIRDDHTLKIRKVTAGDMGSYTCVAENMVGKAEASATLTVQVGSEPPHFVVKPRDQVVALGRTVTFQCEATGNPQPAIFWRREGSQNLLFSYQPPQSSSRFSVSQTGDLTITNVQRSDVGYYICQTLNVAGSIITKAYLEVTDVIADRPPPVIRQGPVNQTVAVDGTFVLSCVATGSPVPTILWRKDGVLVSTQDSRIKQLENGVLQIRYAKLGDTGRYTCIASTPSGEATWSAYIEVQEFGVPVQPPRPTDPNLIPSAPSKPEVTDVSRNTVTLSWQPNLNSGATPTSYIIEAFSHASGSSWQTVAENVKTETSAIKGLKPNAIYLFLVRAANAYGISDPSQISDPVKTQDVLPTSQGVDHKQVQRELGNAVLHLHNPTVLSSSSIEVHWTVDQQSQYIQGYKILYRPSGANHGESDWLVFEVRTPAKNSVVIPDLRKGVNYEIKARPFFNEFQGADSEIKFAKTLEEGNAPPQGVTVSKNDGNGTAILVSWQPPPEDTQNGMVQEYKVWCLGNETRYHINKTVDGSTFSVVIPFLVPGIRYSVEVAASTGAGSGVKSEPQFIQLDAHGNPVSPEDQVSLAQQISDVVKQPAFIAGIGAACWIILMVFSIWLYRHRKKRNGLTSTYAGIRKVTYQRGGEAVSSGGRPGLLNISEPAAQPWLADTWPNTGNNHNDCSISCCTAGNGNSDSNLTTYSRPADCIANYNNQLDNKQTNLMLPESTVYGDVDLSNKINEMKTFNSPNLKDGRFVNPSGQPTPYATTQLIQSNLSNNMNNGSGDSGEKHWKPLGQQKQEVAPVQYNIVEQNKLNKDYRANDTVPPTIPYNQSYDQNTGGSYNSSDRGSSTSGNQGHKKGARTPKVPKQGGMNWADLLPPPPAHPPPHSNSEEYNISVDESYDQEMPCPVPPARMYLQQDELEEEEDERGPTPPVRGAASSPAAVSYSHQSTATLTPSPQEELQPMLQDCPEETGHMQHQPDRRRQPVSPPPPPRPISPPHTYGYISGPLVSDMDTDAPEEEEDEADMEVAKMQTRRLLLRGLEQTPASSVGDLESSVTGSMINGWGSASEEDNISSGRSSVSSSDGSFFTDADFAQAVAAAAEYAGLKVARRQMQDAAGRRHFHASQCPRPTSPVSTDSNMSAAVMQKTRPAKKLKHQPGHLRRETYTDDLPPPPVPPPAIKSPTAQSKTQLEVRPVVVPKLPSMDARTDRSSDRKGSSYKGREVLDGRQVVDMRTNPGDPREAQEQQNDGKGRGNKAAKRDLPPAKTHLIQEDILPYCRPTFPTSNNPRDPSSSSSMSSRGSGSRQREQANVGRRNIAEMQVLGGYERGEDNNEELEETES

SEQ ID NO: 60221 - protein, 46 aa, Homo sapiens
MRSIRKRWTICTISLLLIFYKTKEIARTEEHQETQLIGASGGGVDS

SEQ ID NO: 60222 - protein, 812 aa, Homo sapiens
MLSGASSQARGSNPTCPRQDGYSSLLEPGTEAPIKEAHRQDLRSHMPSPSQGRNPKGKASCHRWAARSSQEMARVSPAQPSSPESLNTGSRAVTGSLARLGRWREARLPFSRFLDEVTVRVLDPGTLEAFRVPRGRSPEPSAVDRGQGLAQEALTRAAAPGEKDPALSSQLSSEAATEAASRVGPGQAVGTSGPCLGSGKRGGRTASPWRSPGRASAADMEKLSALQEQKGELRKRLSYTTHKLEKLETEFDSTRHYLEIELRRAQEELEKVTEKLRRIQSNYMALQRINQELEDKLYRMGQHYEEEKRALSHEIVALNSHLLEAKVTIDKLSEDNELYRKDCNLAAQLLQCSQTYGRVHKVSELPSDFQERVSLHMEKHGCSLPSPLCHPAYADSVPTCVIAKVLEKPDPASLSSRLSDASARDLAFCDGVEKPGPRPPYKGDIYCSDTALYCPEERRRDRRPSVDAPVTDVGFLRAQNSTDSAAEEEEEAEAAAFPAGFQHEAFPSYAGSLPTSSSYSSFSATSEEKEHAQASTLTASQQAIYLNSRDELFDRKPPATTYEGSPRFAKATAAVAAPLEAEVAPGFGRTMSPYPAETFRFPASPGPQQALMPPNLWSLRAKPGTARLPGEDMRGQWRPLSVEDIGAYSYPVSAAGRASPCSFSERYYGGAGGSPGKKADGRASPLYASYKADSFSEGDDLSQGHLAEPCFLRAGGDLSLSPGRSADPLPGYAPSEGGDGDRLGVQLCGTASSPEPEQGSRDSLEPSSMEASPEMHPAARLSPQQAFPRTGGSGLSRKDSLTKAQLYGTLLN

SEQ ID NO: 60223 - protein, 67 aa, Homo sapiens
MQSEPIRVLVTGAAGQIAYSLLYSIGNGSVFGKDQPIILVLLDITPMMGVLDGVLMELQDCALPLLK

SEQ ID NO: 60224 - protein, 93 aa, Homo sapiens
  MOD_RES (1)..(1): Any amino acid
XENPPYVPGVVGGTLQAATICASSHQFLSTHYNLHNLYGLTEAIASHRALVKARGTRPFVISRSTFAGHGRYAGHWTGDVWSSWEQLASSVPA

SEQ ID NO: 60225 - protein, 401 aa, Homo sapiens
  MOD_RES (1)..(1): Any amino acid
XKDALHLLVFTTDDVPHIALDGKLGGLVQPHDGQCHLNEANEYTASNQMDYPSLALLGEKLAENNINLIFAVTKNHYMLYKNFTALIPGTTVEILDGDSKNIIQLIINAYNASFEVSLEARSCPSRHTEHVFALRPVGFRDSLEVGVTYNCTCGCSVGLEPNSARCNGSGTYVCGLCECSPGYLGTRCECQDGENQSVYQNLCREAEGKPLCSGRGDCSCNQCSCFESEFGKIYGPFCECDNFSCARNKGVLCSGHGECHCGECKCHAGYIGDNCNCSTDISTCRGRDGQICSERGHCLCGQCQCTEPGAFGEMCEKCPTCPDACSTKRDCVECLLLHSGKPDNQTCHSLCRDEVITWVDTIVKDDQEAVLCFYKTAKDCVMMFTYVELPSGKSNLTVLRE

SEQ ID NO: 60226 - protein, 141 aa, Homo sapiens
MASGPGSQEREGLLIVKLEEDCAWSQELPPPDPGPSPEASHLRFRRFRFQEAAGPREALSRLQELCHGWLRPEMRTKEQILELLVLEQFLTILPQEIQSRVQELHPESGEEAVTLVEDMQRELGRLRQQLPESLEDVAMYI

SEQ ID NO: 60227 - protein, 61 aa, Homo sapiens
  MOD_RES (1)..(1): Any amino acid
XTTEVSPTSQKTTTKTTTPNAQATRSTPVSRTTKHFHETTPNKGSGTTSGTTRLLSAIFSC

SEQ ID NO: 60228 - protein, 77 aa, Homo sapiens
MRNYICRTKLADRYPQSCQMLLNQLREITGIQDPSFLHEALKASNGDITQAVSLLTDERVKEPSQDTVATEPSEVEG

SEQ ID NO: 60229 - protein, 112 aa, Homo sapiens
MRFKTTAKDGLLLWRGDSPMRPNSDFISLGLRDGALVFSYNLGSGVASIMVNGSFNDGRWHRVKAVRDGQSGKITVDDYGARTGKSPGMMRQLNINGALYVGGMKEIALHTN

SEQ ID NO: 60230 - protein, 301 aa, Homo sapiens
DFEFTGSHLTVRNGYSCVPVALAEGLDIKLNTAVRQVRYTASVFSHPTSAGCEVIAVNTRSTSQTFIYKCDAVLCTLPLGVLKQQPPAVQFVPPLPEWKTSAVQRMGFGNLNKVVLCFDRVFWDPSVNLFGHVGSTTASRGELFLFWNLYKAPILLALVAGEAAGIMENISDDVIVGRCLAILKGIFGSSAVPQPKETVVSRWRADPWARGSYSYVAAGSSGNDYDLMAQPITPGPSIPGAPQPIPRLFFAGEHTIRNYPATVHGALLSGLREAGRIADQFLGAMYTLPRQATPGVPAQQS

SEQ ID NO: 60231 - protein, 92 aa, Homo sapiens
MGLLLPLALCILVLCCGAMSPPQLALNPSALLSRGCNDSDVLAVAGFALRDINKDRKDGYVLRLNRVNDAQEYRRARWPGISVLSYTGCARD

SEQ ID NO: 60232 - protein, 44 aa, Homo sapiens
MTLAAKLEDFELTLEHLLMDVFMTEGRRCQVHLLDDRKLELLVQ

SEQ ID NO: 60233 - protein, 200 aa, Homo sapiens
MLSEVLLVSAPGKVILHGEHAVVHGKVALAVSLNLRTFLRLQPHSNGKVDLSLPNIGIKRAWDVARLQSLDTSFLEQGDVTTPTSEQVEKLKEVAGLPDDCAVTERLAVLAFLYLYLSICRKQRALPSLDIVVWSELPPGAGLGSSAAYSVCLAAALLTVCEEIPNPLKDGDCVNRWTKEDLELINKWAFQGERMIHGNP

SEQ ID NO: 60234 - protein, 161 aa, Homo sapiens
MFLISSSVHGSDEHGRLLRRTLMRYVNLTSLLIFRSVSTAVYKRFPTMDHVVEAGFMTTDERKLFNHLKSPHLKYWVPFIWFGNLATKARNEGRIRDSVDLQSLMTEMNRYRSWCSLLFGYDWVGIPLVYTQVAEQLINPFGEDDDDFETNWCIDRNLQVS

SEQ ID NO: 60235 - protein, 257 aa, Homo sapiens
MAAAAVQGGRSGGSGGCSGAGGASNCGTGSGRSGLLDKRQALTILPRLDSSSWAQAVLPPQPPKYLGWQWKIDDKPVKIDKWDGSAVKNSLDDSAKKVLLEKYKYVENFGLIDGRLTICTISCFFAIVALIWDYMHPFPESKPVLALCVISYFVMMGILTIYTSYKEKSIFLVAHRKDPTGMDPDDIWQLSSSLKRFDDKYTLKLTFISGRTKQQREAEFTKSIAKFFDHSGTLVMDAYEPEISRLHDSLAIERKIK

SEQ ID NO: 60236 - protein, 135 aa, Homo sapiens
MAKRLSQIGVENTEENRRLYRQVLFSADDRVKKCIGGVIFFHETLYQKDDNGVPFVRTIQDKGIVVGIKVDKGVVPLAGTDGETTTQGLDGLSERCAQYKKDGADFAKWRCVLKISERTPSALAILENANVLARY

SEQ ID NO: 60237 - protein, 47 aa, Homo sapiens
MESVLEDRCLYLRSDNVVEGNCADELLQNSHRVVEEYFVAPPGNISL

SEQ ID NO: 60238 - protein, 50 aa, Homo sapiens
LLEPVLLLGKERFAGVDIRVRVKGGGHVAQIYAIRQSISKALVAYYQKCE

SEQ ID NO: 60239 - protein, 108 aa, Homo sapiens
MAAAWGSSLTAATQRAVTPWPRGRLLTASLGPQARREASSSSPEAGEGQIRLTDSCVQRLLEITEGSEFLRLQVEGGGCSGFQYKFSLDTVINPDDRQGGRGWGKSGG

SEQ ID NO: 60240 - protein, 60 aa, Homo sapiens
  MOD_RES (1)..(1): Any amino acid
XAEGGPCGRPCLPCSAGSGMGWLTLPAGYSPWARQPPRLAHHPAVCSWTAASPATGMTTA

SEQ ID NO: 60241 - protein, 77 aa, Homo sapiens
FECKECGKTFICGSDLTRHHRIHTGEKPYECKECGKAFSSGSNFTRHQRIHTEKWITIHFPEICFFTFNCTFWIFLQ

SEQ ID NO: 60242 - protein, 925 aa, Homo sapiens
MPVRKQDTQRALHLLEEYRSKLSQTEDRQLRSSIERVINIFQSNLFQALIDIQEFYEVTLLDNPKCIDRSKPSEPIQPVNTWEISSLPSSTVTSETLPSSLSPSVEKYRYQDEDTPPQEHISPQITNEVIGPELVHVSEKNLSEIENVHGFVSHSHISPIKPTEAVLPSPPTVPVIPVLPVPAENTVILPTIPQANPPPVLVNTDSLETPTYVNGTDADYEYEEITLERGNSGLGFSIAGGTDNPHIGDDSSIFITKIITGGAAAQDGRLRVNDCILRVNEVDVRDVTHSKAVEALKEAGSIVRLYVKRRKPVSEKIMEIKLIKGPKGLGFSIAGGVGNQHIPGDNSIYVTKIIEGGAAHKDGKLQIGDKLLAVNNVCLEEVTHEEAVTALKNTSDFVYLKVAKPTSMYMNDGYAPPDITNSSSQPVDNHVSPSSFLGQTPASPARYSPVSKAVLGDDEITREPRKVVLHRGSTGLGFNIVGGEDGEGIFISFILAGGPADLSGELRKGDRIISVNSVDLRAASHEQAAAALKNAGQAVTIVAQYRPEEYSRFEAKIHDLREQMMNSSISSGSGSLRTSQKRSLYVRALFDYDKTKDSGLPSQGLNFKFGDILHVINASDDEWWQARQVTPDGESDEVGVIPSKRRVEKKERARLKTVKFNSKTRDKGSFNDKRKKNLFSRKFPFYKNKDQSEQETSDADQHVTSNASDSESSYRGQEEYVLSYEPVNQQEVNYTRPVIILGPMKDRINDDLISEFPDKFGSCVPHTTRPKRDYEVDGRDYHFVTSREQMEKDIQEHKFIEAGQYNNHLYGTSVQSVREVAEKGKHCILDVSGNAIKRLQIAQLYPISIFIKPKSMENIMEMNKRLTEEQARKTFERAMKLEQEFTEHFTAIVQGDTLEDIYNQVKQIIEEQSGSYIWVPAKEKL

SEQ ID NO: 60243 - protein, 46 aa, Homo sapiens
MDAPKAGYAFEYLIETLNDSSHKKFFDVSKLGTKYVEYQQWWILLL

SEQ ID NO: 60244 - protein, 846 aa, Homo sapiens
MDLYSTPAAALDRFVARRLQPRKEFVEKARRALGALAAALRERGGRLGAAAPRVLKTVKGGSSGRGTALKGGCDSELVIFLDCFKSYVDQRARRAEILSEMRASLESWWQNPVPGLRLTFPEQSVPGALQFRLTSVDLEDWMDVSLVPAFNVLGQAGSGVKPKPQVYSTLLNSGCQGGEHAACFTELRRNFVNIRPAKLKNLILLVKHWYHQVCLQGLWKETLPPVYALELLTIFAWEQGCKKDAFSLAEGLRTVLGLIQQHQHLCVFWTVNYGFEDPAVGQFLQRQLKRPRPVILDPADPTWDLGNGAAWHWDLLAQEAASCYDHPCFLRGMGDPVQSWKGPGLPRAGCSGLGHPIQLDPNQKTPENSKSLNAVYPRAGSKPPSCPAPGPTGAASIVPSVPGMALDLSQIPTKELDRFIQDHLKPSPQFQEQVKKAIDIILRCLHENCVHKASRVSKGGSFGRGTDLRDGCDVELIIFLNCFTDYKDQGPRRAEILDEMRAQLESWWQDQVPSLSLQFPEQNVPEALQFQLVSTALKSWTDVSLLPAFDAVGQLSSGTKPNPQVYSRLLTSGCQEGEHKACFAELRRNFMNIRPVKLKNLILLVKHWYRQVAAQNKGKGPAPASLPPAYALELLTIFAWEQGCRQDCFNMAQGFRTVLGLVQQHQQLCVYWTVNYSTEDPAMRMHLLGQLRKPRPLVLDPADPTWNVGHGSWELLAQEAAALGMQACFLSRDGTSVQPWDVMPALLYQTPAGDLDKFISEFLQPNRQFLAQVNKAVDTICSFLKENCFRNSPIKVIKVVKASWSLAPGPALKSTSTSSTATAMRASTPPASQSYNGTSSSLALPS

SEQ ID NO: 60245 - protein, 163 aa, Homo sapiens
MRPRKAFLLLLLLGLVQLLAVAGAEGPDEDFRQVQANSRRTRPGSGKGEGEPLERRGEGVKKQVRVLWNSKHSFSKCDSSNRENAIEDEEEEEEEDDDEEEDDLEVKEENGVLVLNDANFDNFVADKDTVLLEFYAPWCGHCKQFAPEYEKIANILKDKDPPI

SEQ ID NO: 60246 - protein, 88 aa, Homo sapiens
MAAINPWASWGALTDQSWGMTAVDPWASWGESRAWSAVGCHIVASGCSALPQLGNRMGTRWGFRAGGPDLSLCRAGTRRNQKTSGQAW

SEQ ID NO: 60247 - protein, 598 aa, Homo sapiens
  MOD_RES (1)..(1): Any amino acid
XRVDENTEENHCGETSSQIPDDTLNKKTSPGVKSCESSVCGEVFVGHSSLNRHIRADTAHKPSEYQEYGQEPYKCQQRKKAFRCHPSFQMQEKAHTGEKLYDCKECGKTFISHSSIQRHMIMHNGDGTYKCKFCGKACPCLSIYLIHERVHTGEKPYKCKQCGKAFSYSTSLQIHERTHTGEKPYECKECGKAFGSPNSLYEHRRTHTGEKPYECKQCGKAFRWFHSFQIHERTHSEEKAYECTKCGKAFKCPSYLCRHEVTHSGKKPCECKQCGKALSYLNFQRHMKMHTRMRPYKCKTVEKPLILPVRFEDMKELTLERNLMNASTVVKPSIVPVPFTIMKGLTLERNPMNVSSVVKPSFLPLPFDIMKGLTLERNRMSVSNVGKPSDLPHTFKCMEGLTLKRNPMNVSSVVKPSFFPLPFDIMKGLTLERNPMSVSNVGKPSHLPHTFKCMKGLTLESNCMNLNNVKKPLDLSETFKFMKRHTLERNPIRNMEKHSTISLPFKYMQQCTEDRMPMNVKSVTKHSYLPRSFEYMQEHTLERNPMNVRNAEKRSIIFLLCVYTKGCTLERNHINVRIVGKHSVCLVPFVDIKGLTLE

SEQ ID NO: 60248 - protein, 84 aa, Homo sapiens
  MOD_RES (1)..(1): Any amino acid
XRTVYPEEHSRWRDRSRTRSRSRTPFRLSEKDRMELLEIAKTNAAKALGTTNIDLPASLRTVPSAKETSRGIGVSSNGAKPEKS

SEQ ID NO: 60249 - protein, 105 aa, Homo sapiens
MRSEKEGAGGLRAAVAARGPSGREKLSALEVQFHRDSQQQEAETPPTSSSGCGGGAGKPREEKRTALSKVVIRRLPPGLTKEQLEEQLRPLPAHDYFEFFAADLR

SEQ ID NO: 60250 - protein, 167 aa, Homo sapiens
  MOD_RES (1)..(1): Any amino acid
XLVNEERTLEVEIEPGVRDGMEYPFIGEGEPHVDGEPGDLRFRIKVVKHPIFERRGDDLYTNVTISLVESLVGFEMDITHLDGHKVHISRDKITRPGAKLWKKGEGLPNFDNNNIKGSLIITFDVDFPKEQLTEEAREGIKQLLKQGSVQKAEWFEDDVIQRKRELW

SEQ ID NO: 60251 - protein, 57 aa, Homo sapiens
LLEPELPGSALRSLWSSLCLGPAPAPPGPVSPEGRLAAAWDALIVRPVRRWRRVAVG

SEQ ID NO: 60252 - protein, 2263 aa, Homo sapiens
QQLCILPPHHVNVLPPLHIKTEQSFRLIPLQHSKVASVVRDQNLSNVWTVEYALELLFIGGLVPEAVWLAYKLGDWKTSVSIGVAFQLFCKRDSNFMRSKKKSLNLPLRMTPAQIFQEKLQCVLGQPASLEAKNEMGSKYKQFTDPIEEEDANLLFGSVQEVLKASVMADADILSETFQLLIDSAKDFSKRLWGLVPFGLYLPAPPLYCPQPAILSEEDGDDLLLKAEKNNRQKVSGILQRVLLLFRAAQCSFPVAQWYILQLRWARKVMQKIRMKGSLPSLSPFPQSLLNYCKGGIAFFRPGAAGDHKLDEVSIRAIGCFRELCALCWMLHVRDKLSYSCRQYQKARENVKGEKDLEVEFDSCMIEHCLSAVEWAYRMLPFSRFFNMEELIQDIILSLIGELPPIRKVAEIFVKAFPYPEDVRVPLRDKYHSLHQRLRHCVVKGPQTEEMMSVVMHSIQKVRVKALKRVQRNIGSFEVNIWEPIEEEKPDEAPGVDRYSLGTSLSRSTLTELGDSVVHSDADTFSEALSVEEKSRINIYQRNAPNHMELTSIHKPTDKRKMCNQKENPTKKEDHEKLSQNTLPVIGVWEFERDDDEYIKFLDLFLSYILERDLPYSRDADIPFLTSFSGKLREHELNSLLFDVHTTLKRHQSKTKSQNVFRAGSCFVVAPESYESEKSSSLNDEYGMHLENQKLSSSVLVNQGIKPFLQYPSNEVNKNEGMSGLFGLKQRSIYKIQDDTREKCLIQRSSNHIFWTPKSIKTRRCIFKAIQCNDINPQEDLPLALNTFGSIGRLLEWMIRWSNRRLLCDSGITESSSEYSPVIRVKTSTAAILTSLWLLEQPYFATYKAKNAIIKMVENRDTGCQIGPNIERESKSDAGGSVAVATPGGTEERNGQNKSCQNILNRMPTEAKNPDIKEINDDIISITHNTKKEFIDIDENLLEVEAFTEEEMDMHISDYEEDIEESVGGFRSPSLAICMMTLPQQLEEEFTEEVQCQREEPLETIMEEKSTEQKGMIEAFSHPGHTTPQSMQVDTSSEISSAQISTYKEKSSSVPLLISNGVNVASQPPAPTPQKTQRNEFTAQLPDCSESVRQMLQDEMFKLVQLQQINFMSLMQIVGSSFANLPDTQQLVQQSQSVHLGESQESNLRGCGDVEDSNKNLKERFFIKPQSMGENAREPRKNSPHCHEGTIPSGQNSTGNVQNVPHGSIPLCQLNGQPRKKGPIPSSQNLPSTSFYPAPAGNTHLYLLSTPSVVQKAPRLIPHAKTFSPGDGFPLLQFKSKQEFQPLFLHTGSIPQVPFRPLPQPREAWGLSDSFQPALPQRAAQTTPASHLNVSQYNTEARKKEVEQKTWAETVITEIPNHVNLDQYVGQENLTPQQDSSVFIKPEKLFDVKPGTLEISPHHSFGLPLLYLPLKPPNMFPSTSRASITVPSTPIQPIAEERKYPRLSLLHSHLSPENRCKKTQLIPLENLIAFKQSQQKLTHNLFEQGDAGHLQLLKVKIEPPEVRQGKDSKKRQRRRAEKELQEKRCEKLRRKPNVTFRPENSIINNDDSEIIKKPKEQQEHCGSHPLDDFDVPFEMLQDDNTSAGLHFMASVKKKAIGSQDASTNTDPEHEPLTAPQLLVPDVYLNLKLSSEMSEKPWSPSIPHTVTNLVGHTYINVIDIEANDLLQELPVREEPSNDNVIKQQSDHLAVPSSAELHYMAASVTNAVPPHNFKSQGLPKPEFRFKGQSTKSDSAEDYLLWKRLQGVSAACPAPSSAAHQLEHLSAKLQKIDEQLLAIQNIAENIEQDFPKPEMLDLHCDKIGPVDHIEFSSGPEFKKTLASKTISISEEVRFLTHMDEEDQSDKKETSEPEFSITENYSGQKTCVFPTADSAVSLSSSSDQNTTSPGMNSSDELCESVSVHPLQMTGLTDIADIIDDLIIKDGVSSEELGLTEQAMGTSRIQHYSGRHSQRTDKERREIQAWMKRKRKERMAKYLNELAEKRGQEHDPFCPRSNPLYMTSREIRLRQKMKHEKDRLLLSEHYSRRISQAYGLMNELLSESVQLPTLPQKPLPNKPSPTQSSSCQHCPSPRGENQHGHSFLINRPGKVKYMSKPSYIHKRKSFGQPQGSPWPHGTATFTIQKKAGGAKAAVRKATQSPVTFQKGSNAPCHSLQHTKKHGSAGLAPQTKQVCVEYEREETVVSPWTIPSEIHKILHESHNSLLQDLSPTEEEEPEHPFGVGGVDSVSESTGSILSKLDWNAIEDMVASVEDQGLSVHWALDL

SEQ ID NO: 60253 - protein, 424 aa, Homo sapiens
MYDNLYLHGIEDSEAGSADSYTSRPSDSDVSLEEDREAIRQEREQQAAIQLERAKSKPVAFAVKTNVSYCGALDEDVPVPSTAISFDAKDFLHIKEKYNNDWWIGRLVKEGCEIGFIPSPLRLENIRIQQEQKRGRFHGGKSSGNSSSSLGEMVSGTFRATPTSTAKQKQKVTEHIPPYDVVPSMRPVVLVGPSLKGYEVTDMMQKALFDFLKHRFDGRISITRVTADISLAKRSVLNNPSKRAIIERSNTRSSLAEVQSEIERIFELARSLQLVVLDADTINHPAQLIKTSLAPIIVHVKVSSPKVLQRLIKSRGKSQSKHLNVQLVAADKLAQCPPSQRMRHSNHSTENSPIERRSLMTSDENYHNERARKSRNRLSSSSQHSRDHYPLVEEDYPDSYQDTYKPHRNRGSPGGYSHDSRHRL

SEQ ID NO: 60254 - protein, 744 aa, Homo sapiens
MRVCSYECLPWEEAMRTELQLESRSSGSEREERQRLETILSLCAEYTKPDSRLSTGTTVEDVQKINKELEKLQLSDEESVFEEALMSPDTRYRCHRKDSLPDADLASCGSLSQSSASFFTPRSTRNDELLSDLTRTPPPPSSTFPKASSESSYLSILPKTPEGISEEQRSQELAAMEETRIVILNNLEELKQKIKDINDQMDESFRELDMECALLDGEQKSETTELMKEKEILDHLNRKIAELEKNIVGEKTKEKVKLDAEREKLERLQELYSEQKTQLDNCPESMREQLQQQLKRDADLLDVESKHFEDLEFQQLEHESRLDEEKENLTQQLLREVAEYQRNIVSRKEKISALKKQANHIVQQAQREQDHFVKEKNNLIMMLQREKENLCNLEKKYSSLSGGKGFPVNPNTLKEAHLPLGQSNSCGSVLPPSLAAMAKDSESRRMLRGYNHQQMSEGHRQKSEFYNRTASESNVYLNSFHYPDHSYKDQAFDTLSLDSSDSMETSISACSPDNISSASTSNIARIEEMERLLKQAHAEKTRLLESREREMEAKKRALEEEKRRREILEKRLQEETSQRQKLIEKEVKIRERQRAQARPLTRYLPVRKEDFDLRSHVETAGHNIDTCYHVSITEKTCRGFLIKMGGKIKTWKKRWFVFDRNKRTFSYYADKHETKLKGVIYFQAIEEVYYDHLKNANKSPNPLLTFSVKTHDRIYYMVAPSPEAMRIWMDVIVTGAEGYTHFLL

SEQ ID NO: 60255 - protein, 148 aa, Homo sapiens
  MOD_RES (1)..(1): Any amino acid
XWLYLFPHPPHPPHCGSGLYLQSHHLQQAWIPHSACSSAPGSGPSSPNNSSGSVSAENGIAPAVPSIPAETSLAHRLVAREGSAAPLPLYTSPSLPNITLGLPATGPSAGTAGQQDAERLTLPALQQRLSLFPGTHLTPYLSTSPLER

SEQ ID NO: 60256 - protein, 1566 aa, Homo sapiens
MYVRVSFDTKPDLLLHLMTKEWQLELPKLLISVHGGLQNFELQPKLKQVFGKGLIKAAMTTGAWIFTGGVNTGVIRHVGDALKDHASKSRGKICTIGIAPWGIVENQEDLIGRDVVRPYQTMSNPMSKLTVLNSMHSHFILADNGTTGKYGAEVKLRRQLEKHISLQKINTRIGQGVPVVALIVEGGPNVISIVLEYLRDTPPVPVVVCDGSGRASDILAFGHKYSEEGGLINESLRDQLLVTIQKTFTYTRTQAQHLFIILMECMKKKELITVFRMGSEGHQDIDLAILTALLKGANASAPDQLSLALAWNRVDIARSQIFIYGQQWPVGSLEQAMLDALVLDRVDFVKLLIENGVSMHRFLTISRLEELYNTRHGPSNTLYHLVRDVKKGNLPPDYRISLIDIGLVIEYLMGGAYRCNYTRKRFRTLYHNLFGPKRPKALKLLGMEDDIPLRRGRKTTKKREEEVDIDLDDPEINHFPFPFHELMVWAVLMKRQKMALFFWQHGEEAMAKALVACKLCKAMAHEASENDMVDDISQELNHNSRDFGQLAVELLDQSYKQDEQLAMKLLTYELKNWSNATCLQLAVAAKHRDFIAHTCSQMLLTDMWMGRLRMRKNSGLKVILGILLPPSILSLEFKNKDDMPYMSQAQEIHLQEKEAEEPEKPTKEKEEEDMELTAMLGRNNGESSRKKDEEEVQSKHRLIPLGRKIYEFYNAPIVKFWFYTLAYIGYLMLFNYIVLVKMERWPSTQEWIVISYIFTLGIEKMREILMSEPGKLLQKVKVWLQEYWNVTDLIAILLFSVGMILRLQDQPFRSDGRVIYCVNIIYWYIRLLDIFGVNKYLGPYVMMIGKMMIDMMYFVIIMLVVLMSFGVARQAILFPNEEPSWKLAKNIFYMPYWMIYGEVFADQIDRKQVYDSHTPKSAPCGQNETREDGKIIQLPPCKTGAWIVPAIMACYLLVANILLVNLLIAVFNNTFFEVKSISNQVWKFQRYQLIMTFHERPVLPPPLIIFSHMTMIFQHLCCRWRKHESDPDERDYGLKLFITDDELKKVHDFEEQCIEEYFREKDDRFNSSNDERIRVTSERVENMSMRLEEVNEREHSMKASLQTVDIRLAQLEDLIGRMATALERLTGLERAESNKIRSRTSSDCTDAAYIVRQSSFNSQEGNTFKLQESIDPAGEETMSPTSPTLMPRMRSHSFYSVNMKDKGGIEKLESIFKERSLSLHRATSSHSVAKEPKAPAAPANTLAIVPDSRRPSSCIDIYVSAMDELHCDIDPLDNSVNILGLGEPSFSTPVPSTAPSSSAYATLAPTDRPPSRSIDFEDITSMDTRSFSSDYTHLPECQNPWDSEPPMYHTIERSKSSRYLATTPFLLEEAPIVKSHSFMFSPSRSYYANFGVPVKTAEYTSITDCIDTRCVNAPQAIADRAAFPGGLGDKVEDLTCCHPEREAELSHPSSDSEENEAKGRRATIAISSQEGDNSERTLSNNITVPKIERANSYSAEEPSAPYAHTRKSFSISDKLDRQRNTASLRNPFQRSKSSKPEGRGDSLSMRRLSRTSAFQSFESKHN

SEQ ID NO: 60257 - protein, 474 aa, Homo sapiens
MWPQPRLPPHPAMSEKTQQGKLAAAKKKLKAYWQRKSPGIPAGANRKKKVNGSSPDTATSGGYHSPGDSATGIYGEGRASSTTLQDLESQYQELAVALDSSSAIISQLTENINSLVRTSKEEKKHEIHLVQKLGRSLFKLKNQTAEPLAPEPPAGPSKVEQLQDETNHLRKELESVGRQLQAEVENNQMLSLLNRRQEERLREQEERLHEQEERLHEQEERLLREQEERLCEQEERLREQEERLCEQEERLREQEERLCEQEERLCEQEERLCEQEKLPGQERLLEEVEKLLEQERRQEEQERLLERERLLDEVEELLEQERLRQQDERLWQQETLRELERLRELERLRELERMLELGWEALYEQRAEPRSGFEELNNENKSTLQLEQQVKELEKSGGAEEPRGSESAAAARPVPGAPVPQGAWMCGQAGWTPQEHPGLSGEAVGTGEAAGGAEEAACHSFRAAENRELNITII

SEQ ID NO: 60258 - protein, 175 aa, Homo sapiens
TQIKNQTAALISGFRSIIKPEWIRMFSTPELQRLISGDNAEIDLEDLKKHTVYYGGFHGSHRVIIWLWDILASDFTPDERAMFLKFVTSCSRPPLLGFAYLKPPFSIRCVEVSDDQQGRQLDPSEPSEEGPTVLTAGEPASPRETAHGLSPLSAAPFSFLPQGRVPGVGVGTCCF

SEQ ID NO: 60259 - protein, 88 aa, Homo sapiens
MKICTSRSQILEQQKSYPQRANKPGPTHSWEQRSTFLQSCSRRSPPVRDLWALGCIIYQLVAGLPPFRAGNEYLIFQKIIKLEYDFPE

SEQ ID NO: 60260 - protein, 157 aa, Homo sapiens
  MOD_RES (1)..(1): Any amino acid
XLAAKLLAKYKSLQWDKVLRLEEVQAKLGISLEEMLLVTEDALHPEPYNPEEICRCLGISLEELRTQILSPNTQDVLIFKLYQRAKHVYSEAARVLQFKKICEEAPENMVQLLGELMNQSHMSCRDMYECSCPELDQLVDICRCFGNTSQLMHLKII

SEQ ID NO: 60261 - protein, 103 aa, Homo sapiens
  MOD_RES (1)..(1): Any amino acid
XLRLRRLNCASAIFPASVGRARRRFWKLVLVGDGGTGKTTFVKRHLTGEFEKKYVATLGVEVHPLVFHTNRGPIKFNVWDTAGQEKFGGLRDGYYIQVCHHNV

SEQ ID NO: 60262 - protein, 72 aa, Homo sapiens
  MOD_RES (1)..(1): Any amino acid
XHLGQLALLGLLAMLLAVETFSELPQVRAMGKFFRPSGPVTAEDQGGILGQDELALSTLPPAAPASGQAPAC

SEQ ID NO: 60263 - protein, 100 aa, Homo sapiens
MSSGTELLWPGAALLVLLGVAASLCVRCSRPGAKRREDQQSFTGSRTYSLVGQAWPGPLADMAPTRKDKLLQFYPSLEDPASSRYQNFSKGSRHGSEEAY

SEQ ID NO: 60264 - protein, 853 aa, Homo sapiens
MSQSPAFGPRRGSSPRGAAGAAARRNESQDYLLMDSELGEDGCPQAPLPCYGYYPCFRGSDNRLAHRRQTVLREKGRRLANRGPAYMFSDRSTSLSIEEERFLDAAEYGNIPVVRKMLEECHSLNVNCVDYMGQNALQLAVANEHLEITELLLKKENLSRVGDALLLAISKGYVRIVEAILSHPAFAEGKRLATSPSQSELQQDDFYAYDEDGTRFSHDVTPIILAAHCQEYEIVHTLLRKGARIERPHDYFCKCNDCNQKQKHDSFSHSRSRINAYKGLASPAYLSLSSEDPVMTALELSNELAVLANIEKEFKNDYKKLSMQCKDFVVGLLDLCRNTEEVEAILNGDVETLQSGDHGRPNLSRLKLAIKYEVKKFVAHPNCQQQLLSIWYENLSGLRQQTMAVKFLVVLAVAIGLPFLALIYWFAPCSKMGKIMRGPFMKFVAHAASFTIFLGLLVMNAADRFEGTKLLPNETSTDNAKQLFRMKTSCFSWMEMLIISWVIARIKWDPSDPQIISEGLYAIAVVLSFSRIAYILPANESFGPLQISLGRTVKDIFKFMVIFIMVFVAFMIGMFNLYSYYIGAKQNEAFTTVEESFKTLFWAIFGLSEVKSVVINYNHKFIENIGYVLYGVYNVTMVIVLLNMLIAMINSSFQEIEDDADVEWKFARAKLWFSYFEEGRTLPVPFNLVPSPKSLFYLLLKLKKWISELFQGHKKGFQEDAEMNKINEEKKLGILGSHEDLSKLSLDKKQVGHNKQPSIRSSEDFHLNSFNNPPRQYQKIMKRLIKRYVLQAQIDKESDEVNEGELKEIKQDISSLRYELLEEKSQNTEDLAELIRELGEKLSMEPNQEETNR

SEQ ID NO: 60265 - protein, 165 aa, Homo sapiens
MPSPRPVLLRGARAALLLLLPPRLLARPSLLLRRSLSAASCPPISLPAAASRSSMDGAGAEEVLAPLRLAVRQQGDLVRKLKEDKAPQVDVDKAVAELKARKRVLEAKELALQPKDDIVDRAKMEDTLKRRFFYDQAFAIYGGSTLSKRNRSWRSIAPCSPLSQF

SEQ ID NO: 60266 - protein, 131 aa, Homo sapiens
MLGITSCSDQQAKEGEGLEGSSTGSSSGNHGGSGGGNGHKPGCEKPGNEARGSGESGIQGFRGQGVSSNMRGQGSSWGSGGGDAVGGVNTVNSETSPGMFNFDTFWKNFKSKLGFINWDAINKDQRSSRIP

SEQ ID NO: 60267 - protein, 42 aa, Homo sapiens
MAEDEPDAKSPKTGGRAPPGGAEAGEPTTLLQRLRARPCRTK

SEQ ID NO: 60268 - protein, 136 aa, Homo sapiens
  MOD_RES (1)..(1): Any amino acid
XLMLGCALPIYNKYWPLFVLFFYILSPIPYCIARRLVDDTDAMSNACKELAIFLTTGIVVSAFGLPIVFARAHLMESCSVAQPGVQWRDLTSLQALPPGFTPFSCLSLPSSWDYRCPPPRPADIFCVFSGDEVSPC

SEQ ID NO: 60269 - protein, 94 aa, Homo sapiens
MAWIKRKFGERPPPKRLTREAMRNYLKERGDQTVLILHAKVAQKSYGNEKRFFCPPPCVYLMGSGWKKKKEQMERDGCSEQESQPCAFIGIGNS

SEQ ID NO: 60270 - protein, 130 aa, Homo sapiens
MRQKHYLEAAARGLHDSCPGQARYLLWAYTSSHDDKSTFEETCPYCFQLLVLDNSRVRLKPKARLTPKIQKLLNREARNYTLSFKEAKMVKKFKDSKSVLNTYIWTVSIYLLLKEHQQNKETLLSTKNVT

SEQ ID NO: 60271 - protein, 315 aa, Homo sapiens
MYCAYTIPGMGGNSLMYYYNGKAVYAPSASTADYNRDSPGYPSSKPATSTFPSSFFMQDGHHSSDPWSSSSGMNQPGYAGMLGNSSHIPQSSSYCSLHPHERLSYPSHSSADINSSLPPMSTFHRSGTNHYSTSSCTPPANGTDSIMANRGSGAAGSSQTGDALGKALASIYSPDHTNNSFSSNPSTPVGSPPSLSGTAVWSRNGGQASSSPNYEGPLHSLQSRIEDRLERLDDAIHVLRNHAVGPSTAMPGGHGDMHGIIGPSHNGAMGGLGSGYGTGLLSANRHSLMVGTHREDGVALRGSHSLLPNQVPVPQ

SEQ ID NO: 60272 - protein, 143 aa, Homo sapiens
MEEPQSDPSVEPPLSQETFSDLWKLLPENNVLSPLPSQAMDDLMLSPDDIEQWFTEDPGPDEAPRMPEAAPPVAPAPAAPTPAAPAPAPSWPLSSSVPSQKTYQGSYGFRLGFLHSGTAKSVTCTMFCQLAKTCPVQLWVDST

SEQ ID NO: 60273 - protein, 239 aa, Homo sapiens
MISREAADQLLIVAEGSYLIRESQRQPGTYTLALRFGSQTRNFRLYYDGKHFVGEKRFESIHDLVTDGLITLYIETKAAEYIAKMTINPIYEHVGYTTLNREPAYKKHMPVLKETHDERDSTGQDGVSEKRLTSLVRRATLKENEQIPKYEKIHNFKVHTFRGPHWCEYCANFMWGLIAQGVKCAVLEARKSKIKLAAGSVSDCGLNVHKQCSKMVPNDCKPDLKHVKKVYSCDLTTLV

SEQ ID NO: 60274 - protein, 121 aa, Homo sapiens
MFCTLNTHKVDMDKLLGGQIGLEDFIFAHVKGQRKEVEVFKSEDALGLTITDNGAGYAFIKRIKEGSVIDHIHLISVGDMIEAINGQSLLGCRHYEVARLLKELPRGRTFTLKLTEPRKAF

SEQ ID NO: 60275 - protein, 104 aa, Homo sapiens
  MOD_RES (1)..(1): Any amino acid
XQLKISGFSTAEIRKDISAMEEEKDQLIKRVEHLKKRVETAQNHQWMLKIARQLRVEKEREEYLAQQKQEQKNQLFHAVQRLQRVQNQLKSMRQAAADAKPENK

SEQ ID NO: 60276 - protein, 41 aa, Homo sapiens
  MOD_RES (1)..(1): Any amino acid
XAVSTPEVERKNPLHKSNSEDSSVAQGIRGPAPAVGCPGPC

SEQ ID NO: 60277 - protein, 35 aa, Homo sapiens
DFVPFITKVGSGPVKAVSLGRPGLALPLAVHGRAE

SEQ ID NO: 60278 - protein, 69 aa, Homo sapiens
MAFTLYSLLQAALLCVNAIAVLHEERFLKNIGWGTDQGIGGFGEEPGIKSQLMNLIRSVRTVMRGKKKS

SEQ ID NO: 60279 - protein, 228 aa, Homo sapiens
MLTENGQVLSCGSNSFGQLGVPHGPRRCVVPQAIELHKEKVVCIAAGLRHAVAATASGIVFQWGTGLASCGRRLCPGQTLPLFFTAKEPSRVTGLENSKAMCVLAGSDHSASLTDAGEVYVWGSNKHGQLANEAAFLPVPQKIEAHCFQNEKVTAIWSGWTHLVAQTETGKMFTWGRADYGQLGRKLETYEGWKLEKQDSFLPCSRPPNSMPSSPHCLTGATEVGSDF

SEQ ID NO: 60280 - protein, 73 aa, Homo sapiens
MSNNGADLTFGYISCFVAILLFGSNFVPLKKFDTGDGNYFSLIVNVILFLKMKFLFWSFKSIATKINHVDLDT

SEQ ID NO: 60281 - protein, 309 aa, Homo sapiens
MGPLPAPSCTQRITWKGLLLTASLLNFWNPPTTAEVTIEAQPPKVSEGKDVLLLVHNLPQNLPGYFWYKGEMTDLYHYIISYIVDGKIIIYGPAYSGRETVYSNASLLIQNVTRKDAGTYTLHIIKRGDETREEIRHFTFTLYYGPDLPRIYPSFTYYRSGENLDLSCFTESNPPAEYFWTINGKFQQSGQKLFIPQITRNHSGLYACSVHNSATGKEISKSMTVKVSGKWIPASLAVGFYVESIWLSEKSQENIFIPSLCPMGTSKSQILLLNPPNLSLQTLFSLFFCFLMADLVSGLKKVGRGLYQP

SEQ ID NO: 60282 - protein, 41 aa, Homo sapiens
MLWWEEVEDCYEREDVQKKTFTKWVNAQFSKEYQKHMETFD

SEQ ID NO: 60283 - protein, 134 aa, Homo sapiens
THVQSQLEKLDLLEQEYNKLTTMQALAEKKMQELEAKLHEEEQERKRMQAKAAESTSPSHAVVANVQLVLHLMKQHSKALCNDRVINSIPLAKQVSSRGGKSKKLSVTPPSSNGINEELSEVLQTLQDEFGQMS

SEQ ID NO: 60284 - protein, 644 aa, Homo sapiens
MAAQGSPSSSPSDDSTTSGSLPELPPTSTATSRSPPESKGSSRSSLLQWTCPEDSLPLAVFYGPLDAKNPLLASCEKEIQELLGFMRKKKALATTEEEKHEFRRRCATSLFNIWTKYAPRLPADYYNEKLLKVGDSLCQMKFHALSGKNMCNYQLVCDSDENLKNKESVVQCLHILSSLRLIMQVALPQEHLCWIIFNGTIYIYTICRKLMVIGQSSKALEYLLWASMCMESLVPLLSLRYLTWRATLYTAVCQCCYDCHAGIHGEAFARRALAKIDELRQLELMSSSKSQEESRRYFREATMKMAVMIFKRGVFESRRKNKAVFRPKIRINLREVQTLSWPRTVTERLLDEMFDSTASQFLAVLEALSDSNRRILQTGPIVTDEVEIHDVVSELFMAGKELLIMSNIGADGMLDFPKTSLLELMIGRKDVISVDAAVKFIKLAFTYEEWSLFESSAVHLIYFLQRQDDPESKKAEKDLTLLIAMEPLINVKRNKGLIFPLENYKEGQSTQIYLKKIAVHDTCLKTCGYSEDIFHLAATLYVCVCTAPQDVQPDKEIVVDTIMFLWQKCKLGIQRLNISRNDYAKFTQKISTNKVFLSHSLSRVFFAIAYSSCHTHFKSKFFLFFTWLMTFICIYTYIKKIFFL

SEQ ID NO: 60285 - protein, 397 aa, Homo sapiens
MRPPQCLLHTPSLASPLLLLLLWLLGGGVGAEGREDAELLVTVRGGRLRGIRLKTPGGPVSAFLGIPFAEPPMGPRRFLPPEPKQPWSGVVDATTFQSVCYQYVDTLYPGFEGTEMWNPNRELSEDCLYLNVWTPYPRPTSPTPVLVWIYGGGFYSGASSLDVYDGRFLVQAERTVLVSMNYRVGAFGFLALPGSREAPGNVGLLDQRLALQWVQENVAAFGGDPTSVTLFGESAGAASVGMHLLSPPSRGLFHRAVLQSGAPNGPWATVGMGEARRRATQLAHLVGCPPGGTGGNDTELVACLRTRPAQVLVNHEWHVLPQESVFRFSFVPVVDGDFLSDTPEALINAGDFHGLQTRSTRRSASGRPSSTAGAPTWCTGRTSSTTTASRIAAQTCD

SEQ ID NO: 60286 - protein, 296 aa, Homo sapiens
MLWALWPRWLADKMLPLLGAVLLQKREKRGPLWRHWRRETYPYYDLQVKVLRATNIRGTDLLSKADCYVQLWLPTASPSPAQTRIVANCSDPEWNETFHYQIHGAVKNVLELTLYDKDILGSDQLSLLLFDLRSLKCGQPHKHTFPLNHQDSQELQVEFVLEKSQVPASEVITNGVLVAHPCLRIQGTLRGDGTAPREEYASHRARPPTHLYLPREPSAELQATRGADGAAGSCAEWPQRRVGGSDQQAGRGGHPALLSAPRPGGTVFCGPGGGPGGGSEHEGGNELRGPRPTPWL

SEQ ID NO: 60287 - protein, 42 aa, Homo sapiens
MADDKVAILTDDEEEQKRKYVLADPFNGISREPEPPSNETPS

SEQ ID NO: 60288 - protein, 113 aa, Homo sapiens
MQKSSIKYWQTESSSTSKSLSTMIKQNQVVLLDTLEQEISKFKECHSMLDINALFAEAKHYHAKLVNIRKEMLMLHEKTSKLKKRALKLQQKRQKEELEREQQREKEFEREKQ

SEQ ID NO: 60289 - protein, 35 aa, Homo sapiens
MATYSLANERLRALEDIEREIGAILQNAGGHRAAP

SEQ ID NO: 60290 - protein, 188 aa, Homo sapiens
MPVSTSLHQDGSQERPVSLTSTTSSSGSSCDSRSAMEEPSSSEAPAKNGAGSLRSRHLPNSNNNSSSWLNVKGPLSPFNSRAAAGPAHHKLSYLGRVVREIVETERMYVQDLRSIVEDYLLKIIDTPGLLKPEQVSALFGNIENIYALNSQLLRDLDSCNSDPVAVASCFVERSQEFDIYTQYCNNYP

SEQ ID NO: 60291 - protein, 156 aa, Homo sapiens
MQEQEIGFISKYNEGLCVNTDPVSILTSILDMSLHRQMGSDRDLQSSASSVSLPSVKKAPKKRRISIGSLFRRKKDNKRKSRELNGGVDGIASIESIHSEMCTDKNSIFSTNTSSDNGLTSISKQIGDFIECPLCLLRHSKDRFPDIMTCHHRSCV

SEQ ID NO: 60292 - protein, 144 aa, Homo sapiens
MAVFNQKSVSDMIKEFRKNWRALCNSERTTLCGADSMLLALQLSMAENNKQHSGEFTVSLSDVLLTWKYLLHEKLNLPVENMDVTDHYEDVRKIYDDFLKNSNMLDLIDVYQKCRALTSNCENYNTVSPGNFQCGEKVDRKIYP

SEQ ID NO: 60293 - protein, 55 aa, Homo sapiens
MRLLRRRHMPLRLAMVGCAFVLFLFLLHRDVSSREEATEKPWLKSLVSRKDHVLD

SEQ ID NO: 60294 - protein, 689 aa, Homo sapiens
MKFGAVTRIGGPPLGNQSPSSCSLLHEKDPPTTSGPQTDQPKKHLTNFKSATRRVARTQWLTADRQTWASISSVPWAQTISEKKPGGSLWETRSSPPTTAGTEEAMNTTSLLAPAAEIMATPGSPSQASPTLGAFTHGTQTPSPTKATAPRYPQTGDLSAEWPFTAGEEPVLVPRPHQVSRVRSSCCLSPILCSPAMIAFLLTSVLMIPHAGGHPLDTPHLPQELPPGLPNNINITFFSGMFKNVESVAEIFDCLGPHFTWLQAVFTNFPVLIQFVNGMKCVAGLCPRDFEDYGCTCRFEMEGLPVDESDSCCFQHRRCYEEAAEMDCLQDPAKLSTEVNCVSKKIICESKDNCEHLLCTCDKAAIECLARSSLNSSLNLLDTSFCLAQTPETTIKEDLTTLLPRVVPVEPTDTSLTALSGEVAAETEADRLITLSKKKAGHDQEGVGAARATSPPGSAEIVATRVTAKIVTLVPAGIKSLGLAVSSVENDPEETTEKACDRFTFLHLGSGDNMQVMPQLGEMLFCLTSRCPEEFESYGCYCGQEGRGEPRDDLDRCCLSHHCCLEQVRRLGCLLERLPWSPVVCVDHTPKCGGQSLCEKLLCACDQTAAECMTSASFNQSLKSPSRLGCPGQPAACEDSLHPVPAAPTLGSSSEEDSEEDPPQEDLGRAKRFLRKSLGPLGIGPLHGR

SEQ ID NO: 60295 - protein, 104 aa, Homo sapiens
MVKLSIVLTPQFLSHDQGQLTKELQQHVKSVTCPCEYLRKVINTLADHHHRGTDFGGSPWLHVIIAFPTSYKVVITLWIVYLWVSLLKTIFWSRNGHDGSTDVQ

SEQ ID NO: 60296 - protein, 1528 aa, Homo sapiens
MPLAFCGSENHSAAYRVDQGVLNNGCFVDALNVVPHVFLLFITFPILFIGWGSQSSKVHIHHSTWLHFPGHNLRWILTFMLLFVLVCEIAEGILSDGVTESHHLHLYMPAGMAFMAAVTSVVYYHNIETSNFPKLLIALLVYWTLAFITKTIKFVKFLDHAIGFSQLRFCLTGLLVILYGMLLLVEVNVIRVRRYIFFKTPREVKPPEDLQDLGVRFLQPFVNLLSKGTYWWMNAFIKTAHKKPIDLRAIGKLPIAMRALTNYQRLCEAFDAQRKDIQGTQGARAIWQALSHAFGRRLVLSSTFRILADLLGFAGPLCIFGIVDHLGKENDVFQPKTQFLGVYFVSSQEFLANAYVLAVLLFLALLLQRTFLQASYYVAIETGINLRGAIQIIVGVILLYYILGVSALIGAAVIILLAPVQYFVATKLSQAQRSTLEYSNERLKQTNEMLRGIKLLKLYAWENIFRTRVETTRRKEMTSLRAFAIYTSISIFMNTAIPIAAVLITFVGHVSFFKEADFSPSVAFASLSLFHILVTPLFLLSSVVRSTVKALVSVQKLSEFLSSAEIREEQCAPHEPTPQGPASKYQAVPLRVVNRKRPAREDCRGLTGPLQSLVPSADGDADNCCVQIMGGYFTWTPDGIPTLSNITIRIPRGQLTMIVGQVGCGKSSLLLAALGEMQKVSGAVFWSSLPDSEIGEDPSPERETATDLDIRKRGPVAYASQKPWLLNATVEENIIFESPFNKQRYKMVIEACSLQPDIDILPHGDQTQIGERGINLSGGQRQRISVARALYQHANVVFLDDPFSALDIHLSDHLMQAGILELLRDDKRTVVLVTHKLQYLPHADWIIAMKDGTIQREGTLKDFQRSECQLFEHWKTLMNRQDQELEKETVTERKATEPPQGLSRAMSSRDGLLQDEEEEEEEAAESEEDDNLSSMLHQRAEIPWRACAKYLSSAGILLLSLLVFSQLLKHMVLVAIDYWLAKWTDSALTLTPAARNCSLSQECTLDQTVYAMVFTVLCSLGIVLCLVTSVTVEWTGLKVAKRLHRSLLNRIILAPMRFFETTPLGSILNRFSSDCNTIDQHIPSTLECLSRSTLLCVSALAVISYVTPVFLVALLPLAIVCYFIQKYFRVASRDLQQLDDTTQLPLLSHFAETVEGLTTIRAFRYEARFQQKLLEYTDSNNIASLFLTAANRWLEVRMEYIGACVVLIAAVTSISNSLHRELSAGLVGLGLTYALMVSNYLNWMVRNLADMELQLGAVKRIHGLLKTEAESYEGLLAPSLIPKNWPDQGKIQIQNLSVRYDSSLKPVLKHVNALIAPGQKIGICGRTGSGKSSFSLAFFRMVDTFEGHIIIDGIDIAKLPLHTLRSRLSIILQDPVLFSGTIRFNLDPERKCSDSTLWEALEIAQLKLVVKALPGGLDAIITEGGENFSQGQRQLFCLARAFVRKTSIFIMDEATASIDMATENILQKVVMTAFADRTVVTIAHRVHTILSADLVIVLKRGAILEFDKPEKLLSRKDSVFASFVRADK

SEQ ID NO: 60297 - protein, 138 aa, Homo sapiens
MGQLRDWFPNTQDLAGNDQENIRHADRNNSDDNHLASEDTSAKQSGKPGIYEDRDPLRVSISREQSFFGSPLAHDPFSCLQLVGQENVCGDDYDEAVKLKESVVENHAVLSYAVEEEHAYLGPTVKPDDKSHFQSTWM

SEQ ID NO: 60298 - protein, 57 aa, Homo sapiens
MKDSSGNWREPPPPYPCIETGDSKMNLNDFISMDPKVGWGAVYTLSEFTHRFGSKNC

SEQ ID NO: 60299 - protein, 1777 aa, Homo sapiens
MQEESANDMECEQLPAEILRQVTVHRDPIYGFGFVAGSERPVVVRSVRPGGPSENKLLAGDQIVAINEEDVSEAPRERLIELIRSAKEFIVLTVLHTHQSPKSAFISAAKKAKLRSNPVKVRFSEQVAVGETDAKMMKKEALLLIPNVLKVFLENGQIKSFTFDGRTTVKDVMLTLQDRLSLRFIEHFALVLEYAGPEQNHKFLLLQDKQPLAYVVQRTHYHGMKCLFRISFFPKDPVELLRRDPAAFEYLYIQSRNDVIRERFGMDPKPEMLLGLAALHIYITVSATRPSQKISLKNVEKEWGLEPFLPPSLLQVIKEKNLRKSLSQQLKAHQTHPSCGTKGSAIQAKLQYLRILNELPTFTGVLFNTVGLDEKQSATTLLVGPRHGISHVIDLKTNLTTVLSEFSKISKIQLFRENQGVARVETSIMDAKPLVLLMEWPEATNFACLIAGYCRLLLDSRKMVFSRPASQPLPPPMIKADYMHSAHRPVTGGHLGKKESSYVGSVGTSPRKSSRCTPPPADSELVSFCYLHMREQRKEQESRTDVNENLIFFEETRPRTKSDPTSKSSGQGYEVVPDDFDAASLDHEPCASRARSYTLDNSLGAEALNFYCDSCKAKLQEQLGPRKGGKPGSSRDNIVDLMSLPPPGSEEEEEEEDETTSLLPAIAAPPPGFRDNSSDEDDPKRRAVQSQEQGRHLRGLLYDEIPVTLIDSVQTRTVRDHAQELDDALVSTLQALEALAASEDGPHPPPPQTAGLIVLATITPESSLDSGHETNSSELTDMSEMMSAMKQHQNTTYFLAQHLNKDSLLARKDLPFRIQSCAAQAVLTAPYSLGRPDPNPSLQPIATGQSPGPPGARRKLPQSEGQVQGERTYSLAVHPALSPQLSEQKNLSLLSPVPEDKGPGHTRAGLEMSLRAATSSLSEEQVSELRDNLPKEVRLSPKLILDPKSSVTPAIISAALQQVVHNKSLVTAGGALGNPPSRGERRLEASMGRPEVSMMSSSASKNLKFKISPSAPETSWNSQHQLGAEVSSSPRAPTGSRADSLHLSQQEDSLPVQNFPPKSYLLRTSRESVGKQATGEVAGKGGPVGGKPTLQKQGTISSQGEKAQLESTPKRSKLEETSLVPRATYPMALQSPSCQSRSHSPSCQPHGHSPSSQSRGQSPSCQPRGQSPLRSQAASRQVSTMPSRKLETTLNGAHSTSEGPAKPKSSRGPFRLRNLFSATFPTRQKKETDERQAQLQKVKQYELEFLEELLKPPSQGELPGTEYLQPPAPGRCSCQLRSSPVQQGPGMSREQRRSCDCKRICRGGRPQATQTPVPSLRGRERDRVLPSQRQPEAGPGVSLSSPINVQRIRSTSLESRECRSDPESGVSCLTTCASGGECLGAPNYRKLMRRYSISELDQGDRASLTSDVYPHPPLGMLPREAKEVEASLPIALGPKSRSLESPTLGDPSYVQVAPETKGPRQMAVFSLPEEVYRKPAELDEDSESSKCCSIRYCFYYRKCDMADDASDGKDELSYSIPMKILPGMKLDEQVVPVVSRTLQVLDAATCSSSSPEASRTQEIDLRVSTFEGSLAKINALRAHAYGLPDGFLAARLDTNELLTVLRQCVASPEARAPKPYVSQISEYKLELALKFKELRASCRRVANVDKSPTHMLAAITGSFQVLSSLIETFVRLVFIVRSEAQRQELLAKVEEVVRNYTFLLRAAEESTARNLNQQQQQQQQQQQQQQQQQQQQQQQQQQQVAAAAGAATEHPPGSPTSATVMSTFTHSLKTLIK

SEQ ID NO: 60300 - protein, 87 aa, Homo sapiens
MSSCVSSQPSSNRAAPQDELGGRGSSSSESQKPCEALRGLSSLSIHLGMESFIVVTECEPGCAVDLGLARDRPLEADGQEVPLDTSG

SEQ ID NO: 60301 - protein, 269 aa, Homo sapiens
MDCGARGVEGAMETWQEDSLATDDFLVDYFNEFLSLPYLFATYVAPSATLDIGLQQEKKKEIYMKIQPPFEDLFDTAEEYILLLLLEPWTKMVKSDQIAYKKVELVEETRQLDSTYFRKLQALHKETFSKKAEDTTCEIGTGILSLSNVSKRTEYWDNVPAEYKHFKFSDLLNNKLEFEHFRQFLETHSSSMDLMCWTDIEQFRRITYRDRNQRKAKSIYIKNKYLNKKYFFGPNSPASLYQQNQVMHLSGGWGKILHEQLDAPVLVEI

SEQ ID NO: 60302 - protein, 115 aa, Homo sapiens
MRGVSCLQVLLLLVLGAAGTQGRKSAACGQPRMSSRIVGGRDGRDGEWPWQASIQHRGAHVCGGSLIAPQWVLTAAHCFPSAPPRVATATRSKGAAAGLAHLRRPLPRGRGRAPG

SEQ ID NO: 60303 - protein, 353 aa, Homo sapiens
MPSSLPGSQVPHPTLDAVDLVEKTLRNEGTSSSAPVLEEGDTDPWTLPQLKDTSQPWKELRVAGRLRRVAGSVLKACGLLGSLYFFICSLDVLSSAFQLLGSKVAGDIFKDNVVLSNPVAGLVIGVLVTALVQSSSTSSSIVVSMVAAKLLTVRVSVPIIMGVNVGTSITSTLVSMAQSGDRDEFQRAFSGSAVHGIFNWLTVLVLLPLESATALLERLSELALGAASLTPRAQAPDILKVLTKPLTHLIVQLDSDMIMSSATGNATNSSLIKHWCGTTGQPTQENSSCGAFGPCTEKNSTAPADRLPCRHLFAGTELTDLAVGCILLAGSLLVLCGCLVLIVKLLNSVLRGR

SEQ ID NO: 60304 - protein, 107 aa, Homo sapiens
MEPQEERETQVNPRTTEILHHLSERNRVRDRDVYLVIEDLKQKASEYESEAKYLQDLLMESVNFSPANLSSTGSRYLNALVDSAVALETKDTSLASFIPAVNDLTSD

SEQ ID NO: 60305 - protein, 611 aa, Homo sapiens; identical to SEQ ID NO: 431

SEQ ID NO: 60306 - protein, 616 aa, Homo sapiens
MVKLAKAGKNQGDPKKMAPPPKEVEEDSEDEEMSEDEEDDSSGEEVVIPQKKGKKAAATSAKKVVVSPTKKVAVATPAKKAAVTPGKKAAATPAKKTVTPAKAVTTPGKKGATPGKALVATPGKKGAAIPAKGAKNGKNAKKEDSDEEEDDDSEEDEEDDEDEDEDEDEIEPAAMKAAAAAPASEDEDDEDDEDDEDDDDDEEDDSEEEAMETTPAKGKKAAKVVPVKAKNVAEDEDEEEDDEDEDDDDDEDDEDDDDEDDEEEEEEEEEEPVKEAPGKRKKEMAKQKAAPEAKKQKVEGTEPTTAFNLFVGNLNFNKSAPELKTGISDVFAKNDLAVVDVRIGMTRKFGYVDFESAEDLEKALELTGLKVFGNEIKLEKPKGKDSKKGESKTLVLSNLSYSATEETLQEVFEKATFIKVPQNQNGKSKGYAFIEFASFEDAKEALNSCNKREIEGRAIRLELQGPRGSPNARSQPSKTLFVKGLSEDTTEETLKESFDGSVRARIVTDRETGSSKGFGFVDFNSEEDAKAAKEAMEDGEIDGNKVTLDWAKPKGEGGFGGRGGGRGGFGGRGGGRGGRGGFGGRGRGGFGGRGGFRGGRGGGGDHKPQGKKTKFE

SEQ ID NO: 60307 - protein, 218 aa, Homo sapiens
MAAQGVGPGPGSAAPPGLEAARQKLALRRKKVLSTEEMELYELAQAAGGAIDPDVFKILVDLLKLNVAPLAVFQMLKSMCAGQRLASEPQDPAAVSLPTSSVPETREASFLSARNSSPPARPSFSSSPQPAASPVLLHSPAATHSPLSPGPPGSLRLSCCLFSPFAGRNKGSAALGGALALAERSSREGSSQRMPRQPSATRLPKGGGPGKSPTRGST

SEQ ID NO: 60308 - protein, 158 aa, Homo sapiens
MALHSPQYIFGDFSPDEFNQFFVTPRSSVELPPYSGTVLCGTQAVDKLPDELLENVTLIHKPVSLQPRGLINKGNWCYINATLQALVACPPMYHLMKFIPLYSKVQRPCTSTPMIDSFVRLMNEFTNMPVPPKPRQALGDKIVRDIRPGAAFEPTYIY

SEQ ID NO: 60309 - protein, 238 aa, Homo sapiens
MMAADIPRVTTPLSSLVQVPQEEDRQEEEVTTMILEDDSWVQEAVLQEDGPESEPFPQSAGKGGPQEEVTRGPQGALGRLRELCRRWLRPEVHTKEQMLTMLPKEIQAWLQEHRPESSEEAAALVEDLTQTLQDSDFEIQSENGENCNQDMFENESRKIFSEMPEGESAQHSDGESDFERDAGIQRLQGHSPGQDGGASPVLSHPREGKDPFYFQKVSGAQKLEEVQPGASVPVSFPL

SEQ ID NO: 60310 - protein, 99 aa, Homo sapiens
MRPAALRGALLGCLCLALLCLGGADKRLRDNHEWKKLIMVQHWPETVCEKIQNDCRDPPDYWTIHGLWPDKSEGCNRSWPFNLEEIKVLTFNYISTAEC

SEQ ID NO: 60311 - protein, 836 aa, Homo sapiens
MSPEKQHREEDEVDSVLLSASKILNSSEGVKESGCSDTEYGCIAESENQIQPQSALKVLQQQLESFQALRMQTLQNVSMVQSEISEILNKSIIEVENPQFSSEKNLVFGTRIEKDLPTENQEENLSMEKSHHFEDSKTLHSVEEKLSGDSVNSLPQSVNVPSQIHSEDTLTLRTSTDNLSSNIIIHPSENSDILKNYNNFYRFLPTAPPNVMSQADTVILDKSKITVPFLKHGFCENLDDICHSIKQMKEELQKSHDGEVALTNELQTLQTDPDVHRNGKYDMSPIHQDKMNFIKEENLDGNLNEDIKSKRISELEALVKKLLPFRETVSKFHVHFCRKCKKLSKSEMHRGKKNEKNNKEIPITGKNITDLKFHSRVPRYTLSFLDQTKHEMKDKERQPFLVKQGSIISENEKTSKVNSVTEQCVAKIQYLQNYLKESVQIQKKVMELESENLNLKSKMKPLIFTTQSLIQKVETYEKQLKNLVEEKSTIQSKLSKTEEYSKECLKEFKKIISKYNVLQGQNKTLEEKNIQLSLEKQQMMEALDQLKSKEHKTQSDMAIVNNENNRMSIEMEAMKTNILLIQDEKEMLEKKTHQLLKEKSSLGNELKESQLEIIQLKEKERLAKTEQETLLQIIETVKDEKLNLETTLQESTAARQIMEREIENIQTYQSTAEENFLQEIKNAKSEASIYKNSLSEIGKECEMLSKMVMETKTDNQILKEELKKHSQENIKFENSISRLTEDKILLENYVRSIENERDTLEFEMRHLQREYLSLSDKICNQHNDPSKTTYISRREKFHFDNYTHEDTSSPQSRPLASDLKGIPSKLYHLLPSKIYK

SEQ ID NO: 60312 - protein, 58 aa, Homo sapiens
  MOD_RES (1)..(1): Any amino acid
XEEGSFSHGSVIDGRFEGFIQTRGGTFYVEPAERYIKDRTLPFHSVIYHEDDISEGLN

SEQ ID NO: 60313 - protein, 61 aa, Homo sapiens
MERQSRVMSEKDEYQFQHQGAVELLVFNFLLILTILTIWLFKNHRFRFLHETGGAMVYDDI

SEQ ID NO: 60314 - protein, 385 aa, Homo sapiens
GFGTRSRNLKPWMIAVLIVLSLTVVAVTIGLLVHFLVFDPQINNNFGQSNTYQLKDLRETTENLVDEIFIDSAWKKNYIKNQVVRLTPEEDGVKVDVIMVFQFPSTEQRAVREKKIQSILNQKIRNLRALPINASSVQVNGCGKRVVPLNVNRIASGVIAPKAAWPWQASLQYDNIHQCGATLISNTWLVTAAHCFQKYKNPHQWTVSFGTKINPPLMKRNVRRFIIHEKYRSAAREYDIAVVQVSSRVTFSDDIRQICLPEASASFQPNLTVHITGFGALYYGGESQNDLREARVKIISDDVCKQPQVYGNDIKPGMFCAGYMEGIYDACRGDSGGPLVTRDLKDTWYLIGIVSWGDNCGQKDKPGVYTQVTYYRNWIASKTGI

SEQ ID NO: 60315 - protein, 100 aa, Homo sapiens
MTRAPLLLLCVALVLLGHVNGATVRNEDKWKPLNNPRNRDLFFRRLQAYFKGRGLDLGTFPNPFPTNENPRPLSFQSELTASASADYEEQKNSFHNYLKG

SEQ ID NO: 60316 - protein, 899 aa, Homo sapiens
MFCAAGKNMFLFVLENLGQTIVPDLGSLESQHDFRTPEFEEFNGKPDSLFFNDGQRRIDFVLVYEDESRKETNKKGTNEKQRRKRQAYESNLICHGLQLEATRSVLDDKLVFVKVHAPWEVLCTYAEIMHIKLPLKPNDLKNRSSAFGTLNWFTKVLSVDESIIKPEQEFFTAPFEKNRMNDFYIVDRDAFFNPATRSRIVYFILSRVKYQVINNVSKFGINRLVNSGIYKAAFPLHDCKFRRQSEDPSCPNERYLLYREWAHPRSIYKKQPLDLIRKYYGEKIGIYFAWLGYYTQMLLLAAVVGVACFLYGYLNQDNCTWSKEVCHPDIGGKIIMCPQCDRLCPFWKLNITCESSKKLCIFDSFGTLVFAVFMGVWVTLFLEFWKRRQAELEYEWDTVELQQEEQARPEYEARCTHVVINEITQEEERIPFTAWGKCIRITLCASAVFFWILLIIASVIGIIVYRLSVFIVFSAKLPKNINGTDPIQKYLTPQTATSITASIISFIIIMILNTIYEKVAIMITNFELPRTQTDYENSLTMKMFLFQFVNYYSSCFYIAFFKGKFVGYPGDPVYWLGKYRNEECDPGGCLLELTTQLTIIMGGKAIWNNIQEVLLPWIMNLIGRFHRVSGSEKITPRWEQDYHLQPMGKLGLFYEYLEMIIQFGFVTLFVASFPLAPLLALVNNILEIRVDAWKLTTQFRRLVPEKAQDIGAWQPIMQGIAILAVVTNAMIIAFTSDMIPRLVYYWSFSVPPYGDHTSYTMEGYINNTLSIFKVADFKNKSKGNPYSDLGNHTTCRYRDFRYPPGHPQEYKHNIYYWHVIAAKLAFIIVMEHVIYSVKFFISYAIPDVSKRTKSKIQREKYLTQKLLHENHLKDMTKNMGVIAERMIEAVDNNLRPKSE

SEQ ID NO: 60317 - protein, 469 aa, Homo sapiens
MLNVHNLNYSSSRTLLFQRFSVIFMDVLFVYAVRECCKCIDGKKVGKELTEKPKFILSVLLLWNFGLLIVDHIHFQYNGFLFGLMLLSIARLFQRQGLPILSRLVLNSWGQAILPRRLTKVLGLQKRHMEGAFLFAVLLHFKHIYLYVAPAYGVYLLRSYCFTANKPDGSIRWKSFSFVRVISLGLVVFLVSALSLGPFLALNQLPQVFSRLFPFKRGLCHAYWAPNFWALYNALDKVLSVIGLKLKFLDPNNIPKASMTSGLVQQFQHTVLPSVTPLATLICTLIAILPSIFCLWFKPQGPRGFLRCLTLCALSSFMFGWHVHEKAILLAILPMSLLSVGKAGDASIFLILTTTGHYSLFPLLFTAPELPIKILLMLLFTIYSISSLKTLFRKEKPLFNWMETFYLLGLGPLEVCCEFVFPFTSWKVKYPFIPLLLTSVYCAVGITYAWFKLYVSVLIDSAIGKTKKQ

SEQ ID NO: 60318 - protein, 449 aa, Homo sapiens
MIPTFTALLCLGLSLGPRTHMQAGPLPKPTLWAEPGSVISWGNSVTIWCQGTLEAREYRLDKEESPAPWDRQNPLEPKNKARFSIPSMTEDYAGRYRCYYRSPVGWSQPSDPLELVMTGAYSKPTLSALPSPLVTSGKSVTLLCQSRSPMDTFLLIKERAAHPLLHLRSEHGAQQHQAEFPMSPVTSVHGGTYRCFSSHGFSHYLLSHPSDPLELIVSGSLEGPRPSPTRSVSTAAGPEDQPLMPTGSVPHSGLRRHWEVLIGVLVVSILLLSLLLFLLLQHWRQGKHRTLAQRQADFQRPPGAAEPEPKDGGLQRRSSPAADVQGENFSGAAVKDTQPEDGVEMDTRQSPHDEDPQAVTYAKVKHSRPRREMASPPSPLSGEFLDTKDRQAEEDRQMDTEAAASEAPQDVTYARLHSFTLRQKATEPPPSQEGASPAEPSVYATLAIH

SEQ ID NO: 60319 - protein, 61 aa, Homo sapiens
MEAGEEPLLLAELKPGRPHQFDWKSSCETWSVAFSPDGSWFAWSQGHCIVKLIPWPLEEQL

SEQ ID NO: 60320 - protein, 139 aa, Homo sapiens
MHVSLAEALEVRGGPLQEEEIWAVLNQSAESLQELFRKVSLADPAALGFIISPWSLLLLPSGSVSFTDENISNQDLRAFTAPEVLQNQSLTSLSDVEKIHIYSLGMTLYWGADYEVPQSQPIKLGDHLNSILLGMCEDV

SEQ ID NO: 60321 - protein, 117 aa, Homo sapiens
YATNSAEVCQYVITHAKVNILLVENDQQLQKILSIPQSSLEPLKAIIQYRLPMKKNNNLYSWDDFMELGRSIPDTQLEQVIESQKANQCAVLIYTSGTTGIPKGVMLSHDNKNSLST

SEQ ID NO: 60322 - protein, 149 aa, Homo sapiens
GEPLPKRLKSSVVALDVDQPGANYRRGYDLPKYHMVRGITSLLPQDCVYPSQALPPKPRFLSSSEVDSPNVLTVQKPYGGSGPLYTCVPAGSPASSSTLEGLGGCQCLLPMKLNFTSSFEKRMVKATEISCDCTVHKTYEESARNTTVV

SEQ ID NO: 60323 - protein, 62 aa, Homo sapiens
MNSMNPMKPALPPAPHGDGSFAYESVPWQQSATQPAGSLSVVTTVWGVGNATQSQGVPLAAP

SEQ ID NO: 60324 - protein, 55 aa, Homo sapiens
MENVCEKVTNSVSSELQPYFQTLPVMTKIDSVAGINYGLVAPPATTAETLDVQMK

SEQ ID NO: 60325 - protein, 137 aa, Homo sapiens
MTSLTPGCRYSVRVSPQMANRIVDSARSILNKFIPDIYIYTDHMKGVNSGKSPGFGLSLVAETTSGTFLSAELASNPQGQGAAVLPEDLGRNCARLLLEEIYRGGCVDSTNQSLALLLMTLGQQDVSKVLLGPLSPY

SEQ ID NO: 60326 - protein, 87 aa, Homo sapiens
MPIMGSSVYITVELAIAVLAILGNVLVCWAVWLNSNLQNVTNYFVVSLAAADIAVGVLAIPFAITISTGFCAACHGCLFIACFVLVL

SEQ ID NO: 60327 - protein, 33 aa, Homo sapiens
DNIPGLLVLKSLAYRNKGSFDEAAKLKFMPLRL

SEQ ID NO: 60328 - protein, 36 aa, Homo sapiens
MSHCAWPETELELDVGEPVKEPLADLTRKGLRVPYR

SEQ ID NO: 60329 - protein, 203 aa, Homo sapiens
MKEDQVVAEEPGFQDEEESLFQDIDLLQKHGINVADIKKLKSVGICTIKGIQMTTRRALCNVKGLSEAKVDKIKEAANKLIEPGFLTAFEYSEKRKMVFHITTGSQEFDKLLGGGIESMAITEAFGEFRTGKTQLSHTLCGEHQMELLDYVAAKFHEEAGIFKLLIIDSIMALFRVDFSGRGELAERQQKLAQMLSRLQKISE

SEQ ID NO: 60330 - protein, 201 aa, Homo sapiens
MPKRKMLVPVTPEVKPKRTSSSRKMKTKSDMMEENIDTSAQAVAETKQEAVVEEDYNENAKNGEAKITEAPASEKEIVEVKEENIEDATEKGGEKKEAVAAEVKNEEEDQKEDEEDQNEEKGEAGKEDKDEKGEEDGKEDKNGNEKGEDAKEKEDGKKGEDGKGNGEDGKEKGEDEKEEEDRKETGDGKENEDGKEKGDKK

SEQ ID NO: 60331 - protein, 244 aa, Homo sapiens
MKSYAGFLTVNKTYNSNLFFWFFPAQIQPEDAPVVLWLQGGPGGSSMFGLFVEHGPYVVTSNMTLRDRDFPWTTTLSMLYIDNPVGTGFSFTDDTHGYAVNEDDVARDLYSALIQFFQIFPEYKNNDFYVTGESYAGKYVPAIAHLIHSLNPVREVKINLNGIAIGDGYSDPESIIGGYAEFLYQIGLLDEKQKKYFQKQCHECIEHIRKQNWFEAFEILDKLLDGDLTSDPSYFQNVTGCSNY

SEQ ID NO: 60332 - protein, 200 aa, Homo sapiens
MHIQFPSKPTLPRACWEGRITAGSPGMPPDEIEIEPVRQSSDKMLYCEAESPPTVEKVKPARENSETDLEIEDDEKFFTTGQKELYLEACKLMGVVPVSYFIRNMEESYVNLNHHGLGPRGTKAIAIALVSNMAVTKLELEDNCIMEEGVLSLVEMLQENYYLQEMEMTSRKTPQHCSAKPCRPITKLKSWISVTTNSLM

SEQ ID NO: 60333 - protein, 182 aa, Homo sapiens
  MOD_RES (1)..(1): Any amino acid
XSEVLLVSEDGKILAEADGLSTNHWLIGTDKCVERINEMVNRAKRKAGVDPLVPLRSLGLSLSGGDQEDAGRILIEELRDRFPYLSESYLITTDAAGSIATATPDGGVVLISGTGSNCRLINPDGSESGCGGWGHMMGDEGSAYWIAHQAVKIVFDSIDNLEAAPHDIGYVKQAMFHYFQIG

SEQ ID NO: 60334 - protein, 1233 aa, Homo sapiens
MANGGGGGGGSSGGGGGGGGSSLRMSSNIHANHLSLDASSSSSSSSSSSSSSSSSSSSSSVHEPKMDALIIPVTMEVPCDSRGQRMWWAFLASSMVTFFGGLFIILLWRTLKYLWTVCCHCGGKTKEAQKINNGSSQADGTLKPVDEKEEAVAAEVGWMTSVKDWAGVMISAQTLTGRVLVVLVFALSIGALVIYFIDSSNPIESCQNFYKDFTLQIDMAFNVFFLLYFGLRFIAANDKLWFWLEVNSVVDFFTVPPVFVSVYLNRSWLGLRFLRALRLIQFSEILQFLNILKTSNSIKLVNLLSIFISTWLTAAGFIHLVENSGDPWENFQNNQALTYWECVYLLMVTMSTVGYGDVYAKTTLGRLFMVFFILGGLAMFARYVPEIAALILSRNKFGGTFNKHGGRKHIVVCGHITLESVSNFLKDFLHKDRDDVNVEIVFLHNISPNLELEALFKRHFTQVEFYQGSVLNPHDLARVKIESADACLILANKYCADPDAEDASNIMRVISIKNYHPKIRIITQMLQYHNKAHLLNIPSWNWKEGDDAICLAELKLGFIAQSCLAQGLSTMLANLFSMRSFIKIEEDTWQKYYLEGVSNEMYTEYLSSAFVGLSFPTVCELCFVKLKLLMIAIEYKSANRESRILINPGNHLKIQEGTLGFFIASDAKEVKRAFFYCKACHDDITDPKRIKKCGCKRLIYFEDEQPSTLSPKKKQRNGGMRNSPNTSPKLMRHDPLLIPGNDQIDNMDSNVKKYDSTGMFHWCAPKEIEKVILTRSEAAMTVLSGHVVVCIFGDVSSALIGLRNLVMPLRASNFHYHELKHIVFVGSIEYLKREWETLHNFPKVSILPGTPLSRADLRAVNINLCDMCVILSANQNNIDDTSLQDKECILASLNIKSMQFDDSIGVLQANSQGFTPPGMDRSSPDNSPVHGMLRQPSITTGVNIPIITELVNDTNVQFLDQDDDDDPDTELYLTQPFACGTAFAVSVLDSLMSATYFNDNILTLIRTLVTGGATPELEALIAEENALRGGYSTPQTLANRDRCRVAQLALLDGPFADLGDGGCYGDLFCKALKTYNMLCFGIYRLRDAHLSTPSQCTKRYVITNPPYEFELVPTDLIFCLMQFDHNAGQSRASLSHSSHSSQSSSKKSSSVHSIPSTANRQNRPKSRESRDKQNATRMNRMGQEKKWFTDEPDNAYPRNIQIKPMSTHMANQINQYKSTSSLIPPIREVEDEC

SEQ ID NO: 60335 - protein, 1327 aa, Homo sapiens
  MOD_RES (1)..(1): Any amino acid
XEKLKKKAATVVSEEDHLKAEARGDMSEAELLILDEFTTLARDLYAFYPLLIRFVDYNRAKWLKEPNPEAEELFRMVAEVFIYWSKSHNFKREEQNFVVQNEINNMSFLITDTKSKMSKAAVSDQERKKMKRKGDRYSMQTSLIVAALKRLLPIGLNICAPGDQELIALAKNRFSLKDTEDEVRDIIRSNIHLQGKLEDPAIRWQMALYKDLPNRTDDTSDPEKTVERVLDIANVLFHLEQVEHPQRSKKAVWHKLLSKQRKRAVVACFRMAPLYNLPRHRAVNLFLQGYEKSWIETEEHYFEDKLIEDLAKPGAEPPEEDEGTKRVDPLHQLILLFSRTALTEKCKLEEDFLYMAYADIMAKSCHDEEDDDGEEEVKSFEVTGSQRSKEKEMEKQKLLYQQARLHDRGAAEMVLQTISASKGETGPMVAATLKLGIAILNGGNSTVQQKMLDYLKEKKDVGFFQSLAGLMQSCSVLDLNAFERQNKAEGLGMVTEEGSASHFESHRLRTGEKVLQDDEFTCDLFRFLQLLCEGHNSDFQNYLRTQTGNNTTVNIIISTVDYLLRVQESISDFYWYYSGKDVIDEQGQRNFSKAIQVAKQVFNTLTEYIQGPCTGNQQSLAHSRLWDAVVGFLHVFAHMQMKLSQDSSQIELLKELMDLQKDMVVMLLSMLEGNVVNGTIGKQMVDMLVESSNNVEMILKFFDMFLKLKDLTSSDTFKEYDPDGKGVISKRDFHKAMESHKHYTQSETEFLLSCAETDENETLDYEEFVKRFHEPAKDIGFNVAVLLTNLSEHMPNDTRLQTFLELAESVLNYFQPFLGRIEIMGSAKRIERVYFEISESSRTQWEKPQVKESKRQFIFDVVNEGGEKEKMELFVNFCEDTIFEMQLAAQISESDLNERSANKEESEKERPEEQGPRMAFFSILTVRSALFALRYNILTLMRMLSLKSLKKQMKKVKKMTVKDMVTAFFSSYWSIFMTLLHFVASVFRGFFRIICSLLLGGSLVEGAKKIKVAELLANMPDPTQDEVRGDGEEGERKPLEAALPSEDLTDLKELTEESDLLSDIFGLDLKREGGQYKLIPHNPNAGLSDLMSNPVPMPEVQEKFQEQKAKEEEKEEKEETKSEPEKAEGEDGEKEEKAKEDKGKQKLRQLHTHRYGEPEVPESAFWKKIIAYQQKLLNYFARNFYNMRMLALFVAFAINFILLFYKVSTSSVVEGKELPTRSSSENAKVTSLDSSSHRIIAVHYVLEESSGYMEPTLRILAILHTVISFFCIIGYYCLKVPLVIFKREKEVARKLEFDGLYITEQPSEDDIKGQWDRLVINTQSFPN

SEQ ID NO: 60336 - protein, 99 aa, Homo sapiens
MGCDRNCGLIAGAVIGAVLAVFGGILMPVGDLLIQKTIKKQVVLEEGTIAFKNWVKTGTEVYRQFWIFDVQNPQEVMMNSSCIPYLSKSICSNDPQFTY

SEQ ID NO: 60337 - protein, 3465 aa, Homo sapiens
MERSGWARQTFLLALLLGATLRARAAAGYYPRFSPFFFLCTHHGELEGDGEQGEVLISLHIAGNPTYYVPGQEYHVTISTSTFFDGLLVTGLYTSTSVQASQSIGGSSAFGFGIMSDHQFGNQFMCSVVASHVSHLPTTNLSFIWIAPPAGTGCVNFMATATHRGQVIFKDALAQQLCEQGAPTDVTVHPHLAEIHSDSIILRDDFDSYHQLQLNPNIWVECNNCETGEQCGAIMHGNAVTFCEPYGPRELITTGLNTTTASVLQFSIGSGSCRFSYSDPSIIVLYAKNNSADWIQLEKIRAPSNVSTIIHILYLPEDAKGENVQFQWKQENLRVGEVYEACWALDNILIINSAHRQVVLEDSLDPVDTGNWLFFPGATVKHSCQSDGNSIYFHGNEGSEFNFATTRDVDLSTEDIQEQWSEEFESQPTGWDVLGAVIGTECGTIESGLSMVFLKDGERKLCTPSMDTTGYGNLRFYFVMGGICDPGNSHENDIILYAKIEGRKEHITLDTLSYSSYKVPSLVSVVINPELQTPATKFCLRQKNHQGHNRNVWAVDFFHVLPVLPSTMSHMIQFSINLGCGTHQPGNSVSLEFSTNHGRSWSLLHTECLPEICAGPHLPHSTVYSSENYSGWNRITIPLPNAALTRNTRIRWRQTGPILGNMWAIDNVYIGPSCLKFCSGRGQCTRHGCKCDPGFSGPACEMASQTFPMFISESFGSSRLSSYHNFYSIRGAEVSFGCGVLASGKALVFNKDGRRQLITSFLDSSQSRFLQFTLRLGSKSVLSTCRAPDQPGEGVLLHYSYDNGITWKLLEHYSYLSYHEPRIISVELPGDAKQFGIQFRWWQPYHSSQREDVWAIDEIIMTSVLFNSISLDFTNLVEVTQSLGFYLGNVQPYCGHDWTLCFTGDSKLASSMRYVETQSMQIGASYMIQFSLVMGCGQKYTPHMDNQVKLEYSTNHGLTWHLVQEECLPSMPSCQEFTSASIYHASEFTQWRRVIVLLPQKTWSSATRFRWSQSYYTAQDEWALDSIYIGQQCPNMCSGHGSCDHGICRCDQGYQGTECHPEAALPSTIMSDFENQNGWESDWQEVIGGEIVKPEQGCGVISSGSSLYFSKAGKRQLVSWDLDTSWVDFVQFYIQIGGESASCNKPDSREEGVLLQYSNNGGIQWHLLAEMYFSDFSKPRFVYLELPAAAKTPCTRFRWWQPVFSGEDYDQWAVDDIIILSEKQKQIIPVINPTLPQNFYEKPAFDYPMNQMSVWLMLANEGMVKNETFCAATPSAMIFGKSDGDRFAVTRDLTLKPGYVLQFKLNIGCANQFSSTAPVLLQYSHDAGMSWFLVKEGCYPASAGKGCEGNSRELSEPTMYHTGDFEEWTRITIVIPRSLASSKTRFRWIQESSSQKNVPPFGLDGVYISEPCPSYCSGHGDCISGVCFCDLGYTAAQGTCVSNVPNHNEMFDRFEGKLSPLWYKITGAQVGTGCGTLNDGKSLYFNGPGKREARTVPLDTRNIRLVQFYIQIGSKTSGITCIKPRTRNEGLIVQYSNDNGILWHLLRELDFMSFLEPQIISIDLPQDAKTPATAFRWWQPQHGKHSAQWALDDVLIGMNDSSQTGFQDKFDGSIDLQANWYRIQGGQVDIDCLSMDTALIFTENIGKPRYAETWDFHVSASTFLQFEMSMGCSKPFSNSHSVQLQYSLNNGKDWHLVTEECVPPTIGCLHYTESSIYTSERFQNWKRITVYLPLSTISPRTRFRWIQANYTVGADSWAIDNVVLASGCPWMCSGRGICDAGRCVCDRGFGGPYCVPVVPLPSILKDDFNGNLHPDLWPEVYGAERGNLNGETIKSGTSLIFKGEGLRMLISRDLDCTNTMYVQFSLRFIAKSTPERSHSILLQFSISGGITWHLMDEFYFPQTTNILFINVPLPYTAQTNATRFRLWQPYNNGKKEEIWIVDDFIIDGNNVNNPVMLLDTFDFGPREDNWFFYPGGNIGLYCPYSSKGAPEEDSAMVFVSNEVGEHSITTRDLNVNENTIIQFEINVGCSTDSSSADPVRLEFSRDFGATWHLLLPLCYHSSSHVSSLCSTEHHPSSTYYAGTMQGWRREVVHFGKLHLCGSVRFRWYQGFYPAGSQPVTWAIDNVYIGPQCEEMCNGQGSCINGTKCICDPGYSGPTCKISTKNPDFLKDDFEGQLESDRFLLMSGGKPSRKCGILSSGNNLFFNEDGLRMLMTRDLDLSHARFVQFFMRLGCGKGVPDPRSQPVLLQYSLNGGLSWSLLQEFLFSNSSNVGRYIALEIPLKARSGSTRLRWWQPSENGHFYSPWVIDQILIGGNISGNTVLEDDFTTLDSRKWLLHPGGTKMPVCGSTGDALVFIEKASTRYVVSTDVAVNEDSFLQIDFAASCSVTDSCYAIELEYSVDLGLSWHPLVRDCLPTNVECSRYHLQRILVSDTFNKWTRITLPLPPYTRSQATRFRWHQPAPFDKQQTWAIDNVYIGDGCIDMCSGHGRCIQGNCVCDEQWGGLYCDDPETSLPTQLKDNFNRAPSSQNWLTVNGGKLSTVCGAVASGMALHFSGGCSRLLVTVDLNLTNAEFIQFYFMYGCLITPNNRNQGVLLEYSVNGGITWNLLMEIFYDQYSKPGFVNILLPPDAKEIATRFRWWQPRHDGLDQNDWAIDNVLISGSADQRTVMLDTFSSAPVPQHERSPADAGPVGRIAFDMFMEDKTSVNEHWLFHDDCTVERFCDSPDGVMLCGSHDGREVYAVTHDLTPTEGWIMQFKISVGCKVSEKIAQNQIHVQYSTDFGVSWNYLVPQCLPADPKCSGSVSQPSVFFPTKGWKRITYPLPESLVGNPVRFRFYQKYSDMQWAIDNFYLGPGCLDNCRGHGDCLREQCICDPGYSGPNCYLTHTLKTFLKERFDSEEIKPDLWMSLEGGSTCTECGILAEDTALYFGGSTVRQAVTQDLDLRGAKFLQYWGRIGSENNMTSCHRPICRKEGVLLDYSTDGGITWTLLHEMDYQKYISVRHDYILLPEDALTNTTRLRWWQPFVISNGIVVSGVERAQWALDNILIGGAEINPSQLVDTFDDEGTSHEENWSFYPNAVRTAGFCGNPSFHLYWPNKKKDKTHNALSSRELIIQPGYMMQFKIVVGCEATSCGDLHSVMLEYTKDARSDSWQLVQTQCLPSSSNSIGCSPFQFHEATIYNSVNSSSWKRITIQLPDHVSSSATQFRWIQKGEETEKQSWAIDHVYIGEACPKLCSGHGYCTTGAICICDESFQGDDCSVFSHDLPSYIKDNFESARVTEANWETIQGGVIGSGCGQLAPYAHGDSLYFNGCQIRQAATKPLDLTRASKIMFVLQIGSMSQTDSCNSDLSGPHAVDKAVLLQYSVNNGITWHVIAQHQPKDFTQAQRVSYNVPLEARMKGVLLRWWQPRHNGTGHDQWALDHVEVVLSCRTGMLMSRRVRTDGSKWLARREMKNPILRLNLIRLL

SEQ ID NO: 60338 - protein, 62 aa, Homo sapiens
MRRVTLFLNGSPKNGKVVAVYGTLSDLLSVASSKLGIKATSVYNGKGGLIDDIALIRSSDRF

SEQ ID NO: 60339 - protein, 109 aa, Homo sapiens
MKIFDAAKAPIQWEERNVTAIQGPGGKWMIPSEAKESMDKNKMGLKGPLKTPIAAGHPSMNLLLRKTFDLYANVRPCVSIEGYKTPYTDVNIVTIRENTEGEYSGIEHV

SEQ ID NO: 60340 - protein, 196 aa, Homo sapiens
MAQLFLPLLAALVLAQAPAALADVLEGDSSEDRAFRVRIAGDAPLQGVLGGALTIPCHVHYLRPPPSRRAVLGSPRVKWTFLSRGREAEVLVARGVRVKVNEAYRFRVALPAYPASLTDVSLALSELRPNDSGIYRCEVQHGIDDSSDAVEVKVKGIPSRPHERPVTETWMASPGSGTMVWWTRMTSMMCTVMLKT

SEQ ID NO: 60341 - protein, 604 aa, Homo sapiens
MEDRLHMDNGLVPQKIVSVHLQDSTLKEVKDQVSNKQAQILEPKPEPSLEIKPEQDGMEHVGRDDPKALGEEPKQRRGSASGSEPAGDSDRGGGPVEHYHLHLSSCHECLELENSTIESVKFASAENIPDLPYDYSSSLESVADETSPEREGRRVNLTGKAPNILLYVGSDSQEALGRFHEVRSVLADCVDIDSYILYHLLEDSALRDPWTDNCLLLVIATRESIPEDLYQKFMAYLSQGGKVLGLSSSFTFGGFQVTSKGALHKTVQNLVFSKADQSEVKLSVLSSGCRYQEGPVRLSPGRLQGHLENEDKDRMIVHVPFGTRGGEAVLCQVHLELPPSSNIVQTPEDFNLLKSSNFRRYEVLREILTTLGLSCDMKQVPALTPLYLLSAAEEIRDPLMQWLGKHVDSEGEIKSGQLSLRFVSSYVSEVEITPSCIPVVTNMEAFSSEHFNLEIYRQNLQTKQLGKVILFAEVTPTTMRLLDGLMFQTPQEMGLIVIAARQTEGKGRGGNVWLSPVGCALSTLLISIPLRSQLGQRIPFVQHLMSVAVVEAVRSIPEYQDINLRVKWPNDIYYSDLMKIGGVLVNSTLMGETFYILIVRLRWF

SEQ ID NO: 60342 - protein, 383 aa, Homo sapiens
MKRHEMVAKHLVMFYYFAQHLWPEQNIRDSFQKVTLRRYRKCGYENLQLRKGCKSVVECKQHKGDYSGLNQCLKTTLSKIFQCNKYVEVFHKISNSNRHKMRHTENKHFKCKECRKTFCMLSHLTQHKRIQTRVNFYKCEAYGRAFNWSSTLNKHKRIHTGEKPYKCKECGKAFNQTSHLIRHKRIHTEEKPYKCEECGKAFNQSSTLTTHNIIHTGEIPYKCEKCVRAFNQASKLTEHKLIHTGEKRYECEECGKAFNRSSKLTEHKYIHTGEKLYKCEECDKAFNLSSTLTKHKVIHTGEKLYKCKECGKAFKQFSHLAIHNIIHTGEKLYKCEECGKAFNLSSNLTAHKKNRTGEKPYKCEECGKANLSSTLTPHKTIHI

SEQ ID NO: 60343 - protein, 182 aa, Homo sapiens
VTRYAPDPGNLAALGSVPHGHSEGAPRQEQPASNQGQSTLQPLPPSHKQHSAQHHPSITSLNRNSLTNRRNQSPAPPAALPAELQTTPESVQLQDSWVLGSNVPLESRHFLFKTGTGTTPLFSTATPGYTMASGSVYSPPTRPLPRNTLSRSAFKFKKSSKYCSWKCTALCAVGVSVLLAIL

SEQ ID NO: 60344 - protein, 22 aa, Homo sapiens
MRVFLLCAYILLLMVSQLRAVS

SEQ ID NO: 60345 - protein, 104 aa, Homo sapiens
MRSLGQNPTEAELQDMINEVDADGNGTIDFPEFLTMMARKMKDTDSEEEIREAFRVFDKDGNGYISAAELRHVMTNLGEKLTDEEVDEMIREADIDGDGQVNYE

SEQ ID NO: 60346 - protein, 378 aa, Homo sapiens
  MOD_RES (1)..(1): Any amino acid
XAVLADIEVIWSHAIQKYLEIPLKDLKYYRCILLIPDIYNKQHVKELVNMILMKMGFSGIVVHQESVCATYGSGLSSTCIVDVGDQKTSVCCVEDGVSHRNTRIFSWNQDISGLQDHEFQIRHPDSPALLYQFRLGDEKLQAPMALFYPATFGIVGQKMTTLQHRSQGDPEDPHDEHYLLATQSKQEQSAKATADRKSASKPIGFEGDLRGQSSDLPERLHSQEVDLGSAQGDGLMAGNDSEEALTALMSRKTAISLFEGKALGLDKAILHSIDCCSSDDTKKKMYSSILVVGGGLMFHKAQEFLQHRILNKMPPSFRRIIENVDVITRPKDMDPRLIAWKGGAVLACLDTTQELWIYQREWQRFGVRMLRERAAFVW

SEQ ID NO: 60347 - protein, 137 aa, Homo sapiens
MEETQPPPQPKLPLCDSLMIWLQTFNTASPCQDVKQLTSGVAMAQVLHQIDAAWFNESWLSRIKEDVGDNWRIKASNVKKVLQGIMSYYHEFLGQQISEALIPDLNQITECSDPVELGRLLQLILGCAINCEKKQEH

SEQ ID NO: 60348 - protein, 114 aa, Homo sapiens
RVIVQRILPCLTSEFVNPDMVPFVLPNVLLIAEECTKEEYVKLILPELGPVFKQQEPIQILLIFLQKMDLLLTKTPPDEIKNSVLPMVYRALEAPSIQIQICLLKGEGMLPLSK

SEQ ID NO: 60349 - protein, 78 aa, Homo sapiens
  MOD_RES (1)..(1): Any amino acid
XVDELEDEEEGAETRGAGDPARYLSPGWGSASEEEPSRGHRTAQLPWLESQQVFSLKPFLLPTGIELTPENPWGSSVS

SEQ ID NO: 60350 - protein, 429 aa, Homo sapiens
MKDEDKPPDRVRLPKSLFRSLPGNRSVVRLAVTILDIGPGTLFKGPRLGLGDGSGVLNNRLVGLSVGQMHVTKLAEPLEIVFSHQRPPPNMTLTCVFWDVTKGTTGDWSSEGCSTEVRPEGTVCCCDHLTFFALLLRPTLDQSTVHILTRISQAGCGVSMIFLAFTIILYAFLRLSRERFKSEDAPKIHVALGGSLFLLNLAFLVNVGSGSKGSDAACWARGAVFHYFLLCAFTWMGLEAFHLYLLAVRVFNTYFGHYFLKLSLVGWGLPALMVIGTGSANSYGLYTIRDRENRTSLELCWFREGTTMYALYITVHGYFLITFLFGMVVLALVVWKIFTLSRATAVKERGKNRKKVLTLLGLSSLVGVTWGLAIFTPLGLSTVYIFALFNSLQGVFICCWFTILYLPSQSTTVSSSTARLDQAHSASQE

SEQ ID NO: 60351 - protein, 93 aa, Homo sapiens
MSYYQRPFSPSAYSLPASLNSSIVMQHGTSLDSTDTYPQHAQSLDGTTSSSIPLYRSSEEEKRVTVIKAPHYPGIGPVDESGIPTAIRTTVDR

SEQ ID NO: 60352 - protein, 52 aa, Homo sapiens
MYHCHSGSKPTEKGANEYAYAKWKLCSASAICFIFMIAEVVGGHIAGSLAVV

SEQ ID NO: 60353 - protein, 242 aa, Homo sapiens
MRGQRSLLLGPARLCLRLLLLLGYRRRCPPLLRGLVQRWRYGKVCLRSLLYNSFGGSDTAVDAAFEPVYWLVDNVIRWFGVGRNDIATVSICKKCIYPKPARTHHCSICNRCVLKMDHHCPWLNNCVGHYNHRYFFSFCFFMTLGCVYCSYGSWDLFREAYAAIEKMKQLDKNKLQAVANQTYHQTPPPTFSFRERMTHKSLVYLWFLCSSVALALGALTVWHAVLISRGETSIERHINKKE

SEQ ID NO: 60354 - protein, 130 aa, Homo sapiens
  MOD_RES (1)..(1): Any amino acid
XPGHACTQKFSHEEIAMATVTALRRTVPPAVTGITFLSGGQSEEEASINLNAINKCPLLKPWALTFSYGRALQASALKAWGGKKENLKAAQEEYVKRALANSLACQGKYTPSGQAGAAASESLFVSNHAY

SEQ ID NO: 60355 - protein, 144 aa, Homo sapiens
MDSKESLTPGREENPSSVLAQERGDVMDFYKTLRGGATVKVSASSPSLAVASQSDSKQRRLLVDFPKGSVSNAQQPDLSKAVSLSMGLYMGETETKVMGNDLGFPQQGQISLSSGETDLKLLEESIANLNRSTSVPENPKSSAS

SEQ ID NO: 60356 - protein, 17 aa, Homo sapiens
MSEETVPEAASPPPPQG

SEQ ID NO: 60357 - protein, 267 aa, Homo sapiens
MSAGPQAMLGRRVVLWATSSSMFLFGIAAAFAVDYYTFMAARFFLAMVASGYLVVGFVYVMEFIGMKSRTWASVHLHSFFAVGTLLVALTGYLVRTWWLYQMILSTVTVPFILCCWVLPETPFWLLSEGRYEEAQKIVDIMAKWNRASSCKLSELLSLDLQGPVSNSPTEVQKHNLSYLFYNWSITKRTLTVWLIWFTGSLGFYSFSLNSVNLGGNEYLNLFLLGVVEIPAYTFVCIAMDKVGRRTVLAYSLFCSALACGVVMVIPQ

SEQ ID NO: 60358 - protein, 217 aa, Homo sapiens
ALNDSMINETARDAARVQVASTLSVLVGLFQVGLGLIHFGFVVTYLSEPLVRGYTTAAAVQVFVSQLKYVFGLHLSSHSGPLSLIYTVLEVCWKLPQSKVGTVVTAAVAGVVLVVVKLLNDKLQQQLPMPIPGELLTLIGATGISYGMGLKHRFEVDVVGNIPAGGPQHPAVLKARGQRLHHRCGWVCHCHLTGEDLRPEARLPGGQQPGAGGPGPQ

SEQ ID NO: 60359 - protein, 66 aa, Homo sapiens
MAVTLDKDAYYRRVKRLYSNWRKGEDEYANVDAIVVSVGVDEEIVYAKSTALQQEKSGVLETDCQH

SEQ ID NO: 60360 - protein, 118 aa, Homo sapiens
DYIDKYNIELDPRFNDILGRHSRKRWERFVHSENQHLVSPEALDFLDKLLRYDHQSRLTAREAMEHPYFYTVVKDQARMGSSSMPGGSTPVSSANMMSEPQFEGQRDIHHAAVRLGQL

SEQ ID NO: 60361 - protein, 478 aa, Homo sapiens
MPARSRHRPRLHSGSPPRAPPPPLEALHSGEAGRAPDSDGGSDADSEVGPGSPTRTAEAAEEEMAGPNQLCIRRWTTKHVAVWLKDEGFFEYVDILCNKHRLDGITLLTLTEYDLRSPPLEIKVLGDIKRLMLSVRKLQKIHIDVLEEMGYNSDSPMGSMTPFISALQSTDWLCNGELSHDCDGPITDLNSDQYQYMNGKNKHSVRRLDPEYWKTILSCIYVFIVFGFTSFIMVIVHERVPDMQTYPPLPDIFLDSVPRIPWAFAMTEVCGMILCYIWLLVLLLHKHRSILLRRLCSLMGTVFLLRCFTMFVTSLSVPGQHLQCTGKIYGSVWEKLHRAFAIWSGFGMTLTGVHTCGDYMFSGHTVVLTMLNFFVTEYTPRSWNFLHTLSWVLNLFGIFFILAAHEHYSIDVFIAFYITTRLFLYYHTLANTRAYQQSRRARIWFPMFSFFECNVNGTVPNEYCWPFSKPAIMKRLIG

SEQ ID NO: 60362 - protein, 257 aa, Homo sapiens
MAEAHQAVGFRPSLTSDGAEVELSAPVLQEIYLSGLRSWKRHLSRFWNDFLTGVFPASPLSWLFLFSAIQLAWFLQLDPSLGLMEKIKELLPDWGGQHHGLRGVLAAALFASCLWGALIFTLHVALRLLLSYHGWLLEPHGAMSSPTKTWLALVRIFSGRHPMLFSYQRSLPRQPVPSVQDTVRKYLESVRPILSDEDFDWTAVLAQEFLRLQASLLQWYLRLKSWWASNYVSDWWEEFVYLRSRNPLMVNSNYYMM

SEQ ID NO: 60363 - protein, 155 aa, Homo sapiens
SNVMEANAARQATPAEWSQDDSNDMWEDQEEEEEEEEDGLAGQLLSDILATSKYEEDYYEDDEEDDPDALKDPLYQIDLQATLMTMRGEFYRPSASKKGSLSTFAPSGPAANHFAALTGLEMHFLLNLKWHLDPWPLASAVTLMTIQTRLTGAVT

SEQ ID NO: 60364 - protein, 117 aa, Homo sapiens
  MOD_RES (1)..(1): Any amino acid
XDLIDSSLIQQVLLRPSFWEARKHSLSVQQLSQALQELFQKAREENPGQVHPRAPELTLSLLTTMYNSKGTGFLQLMPAAAALITLSGDSPLSKYRATKRLLLQSKYSSKIHCKYSI

SEQ ID NO: 60365 - protein, 240 aa, Homo sapiens
MKDVGPESCGQPTPCWPSPALESVLGKASQHLGLESGQPLYLLELNWGGTECALSSTGRTAACFLPISLLPTSPAAWLGPEALCLPGRPGTTGLRDTGGPLLLPPPTLLQDTTRWCWMLVLWPAKVHGDSPHGILRDQAAGIGKEFHPDHCPSQVPRRPHHTPFQGQGSSKPRARILCCCLVESLPPCVGSVGQAECIGDRAVSMGLGVCELRPRCAVWRRVLSGKRCGFKVCVCRGWVC

SEQ ID NO: 60366 - protein, 19 aa, Homo sapiens
  MOD_RES (1)..(1): Any amino acid
XSSMWGPRAVQACPRHQGN

SEQ ID NO: 60367 - protein, 1566 aa, Homo sapiens
MCGEDASNAMPVRRETNICLKSGWAAHPCHFTQVRDSSVYKVRLFQANTAQHVQGLLCPGYQWGNRVIFGKSSGPEFLQEVYTAVTYHNKSPDFYEEVKIKLPAKLTVNHHLLFTFYHISCQQKQGASVETLLGYSWLPILLNERLQTGSYCLPVALEKLPPNYSMHSAEKVPLQNPPIKWAEGHKGVFNIEVQAVSSVHTQDNHLEKFFTLCHSLESQVTFPIRVLDQKISEMALEHELKLSIICLNSSRLEPLVLFLHLVLDKLFQLSVQPMVIAGQTANFSQFAFESVVAIANSLHNSKDLSKDQHGRNCLLASYVHYVFRLPEVQRDVPKSGAPTALLDPRSYHTYGRTSAAAVSSKLLQARVMSSSNPDLAGTHSAADEEVKNIMSSKIADRNCSRMSYYCSGSSDAPSSPAAPRPASKKHFHEELALQMVVSTGMVRETVFKYAWFFFELLVKSMAQHVHNMDKRDSFRRTRFSDRFMDDITTIVNVVTSEIAALLVKPQKENEQAEKMNISLAFFLYDLLSLMDRGFVFNLIRHYCSQLSAKLSNLPTLISMRLEFLRILCSHEHYLNLNLFFMNADTAPTSPCPSISSQNSSSCSSFQDQKIASMFDLTSEYRQQHFLTGLLFTELAAALDAEGEGISKVQRKAVSAIHSLLSSHDLDPRCVKPEVKVKIAALYLPLVGIILDALPQLCDFTVADTRRYRTSGSDEEQEGAGAINQNVALAIAGNNFNLKTSGIVLSSLPYKQYNMLNADTTRNLMICFLWIMKNADQSLIRKWIADLPSTQLNRILDLLFICVLCFEYKGKQSSDKVSTQVLQKSRDVKARLEEALLRGEGARGEMMRRRAPGNDRFPGLNENLRWKKEQTHWRQANEKLDKTKAELDQEALISGNLATEAHLIILDMQENIIQASSALDCKDSLLGGVLRVLVNSLNCDQSTTYLTHCFATLRALIAKFGDLLFEEEVEQCFDLCHQVLHHCSSSMDVTRSQACATLYLLMRFSFGATSNFARVKMQVTMSLASLVGRAPDFNEEHLRRSLRTILAYSEEDTAMQMTPFPTQVEELLCNLNSILYDTVKMREFQEDPEMLMDLMYRIAKSYQASPDLRLTWLQNMAEKHTKKKCYTEAAMCLVHAAALVAEYLSMLEDHSYLPVGSVSFQNISSNVLEESVVSEDTLSPDEDGVCAGQYFTESGLVGLLEQAAELFSTGGLYETVNEVYKLVIPILEAHREFRKLTLTHSKLQRAFDSIVNKDHKRMFGTYFRVGFFGSKFGDLDEQEFVYKEPAITKLPEISHRLEAFYGQCFGAEFVEVIKDSTPVDKTKLDPNKAYIQITFVEPYFDEYEMKDRVTYFEKNFNLRRFMYTTPFTLEGRPRGELHEQYRRNTVLTTMHAFPYIKTRISVIQKEEFVLTPIEVAIEDMKKKTLQLAVAINQEPPDAKMLQMVLQGSVGATVNQGPLEVAQVFLAEIPADPKLYRHHNKLRLCFKEFIMRCGEAVEKNKRLITADQREYQQELKKNYNKLKENLRPMIERKIPELYKPIFRVESQKRDSFHRSSFRKCETQLSQGS

SEQ ID NO: 60368 - protein, 1799 aa, Homo sapiens [sequence omitted]

SEQ ID NO: 60369 - protein, 321 aa, Homo sapiens
MVVGESGLGKSTLINSLFLTDLYPERVIPGAAEKIERTVQIEASTVEIEERGVKLRLTVVDTPGYGDAINCRDCFKTIISYIDEQFERYLHDESGLNRRHIIDNRVHCCFYFISPFGHGLKPLDVAFMKAIHNKVNIVPVIAKADTLTLKERERLKKRILDEIEEHNIKIYHLPDAESDEDEDFKEQTRLLKASIPFSVVGSNQLIEAKGKKVRGRLYPWGVVEVENPEHNDFLKLRTMLITHMQDLQEVTQDLHYENFRSERLKRGGRKVENEDMNKDQILLEKEAELRRMQEMIARMQAQMQMQMQGGDGDGGALGHHV

SEQ ID NO: 60370 - protein, 189 aa, Homo sapiens
LLAELSEEQKQILFFKMREEQIRRWKEREAAMERKESLPVKPRPKKENGKSVHWKLGADKEVWVWVMGEHHLDKPYDVLCNEIIAERARLKAEQEAEEPRKTHSEEFTNSLKTKSQYHDLQAPDNQQTKDIWKKVAEKEELEQGSRPAPTLEEEKIRKKESMKKKQDEEINQIEEERTKQICKSWKEDS

SEQ ID NO: 60371 - protein, 135 aa, Homo sapiens
MNPASDGGTSESIFDLDYASWGIRSTLMVAGFVFYLGVFVVCHQLSSSLNATYRSLVAREKVFWDLAATRAVFGVQSTAAGLWALLGDPVLHADKARGQQNWCWFHITTATGFFCFENVAVHLSNLIFRTFDLFL

SEQ ID NO: 60372 - protein, 23 aa, Homo sapiens
GGFVCRVISQCNVFGSGTKVTVL

SEQ ID NO: 60373 - protein, 1136 aa, Homo sapiens
MTLIGENGHSTDTLTGSGFRVVVCPLPCMNGGQCSSRNQCLCPPDFTGRFCQVPAGGAGGGTGGSGPGLSRTGALSTGALPPLAPEGDSVASKHAIYAVQVIADPPGPGEGPPAQHAAFLVPLGPGQISAEVQAPPPVVNVRVHHPPEASVQVHRIESSNAESAAPSQHLLPHPKPSHPRPPTQKPLGRCFQDTLPKQPCGSNPLPGLTKQEDCCGSIGTAWGQSKCHKCPQLQYTGVQKPGPVRGEVGADCPQGYKRLNSTHCQDINECAMPGVCRHGDCLNNPGSYRCVCPPGHSLGPSRTQCIADKPEEKSLCFRLVSPEHQCQHPLTTRLTRQLCCCSVGKAWGARCQRCPTDGTAAFKEICPAGKGYHILTSHQTLTIQGESDFSLFLHPDGPPKPQQLPESPSQAPPPEDTEEERGVTTDSPVSEERSVQQSHPTATTTPARPYPELISRPSPPTMRWFLPDLPPSRSAVEIAPTQVTETDECRLNQNICGHGECVPGPPDYSCHCNPGYRSHPQHRYCVDVNECEAEPCGPGRGICMNTGGSYNCHCNRGYRLHVGAGGRSCVDLNECAKPHLCGDGGFCINFPGHYKCNCYPGYRLKASRPPVCEDIDECRDPSSCPDGKCENKPGSFKCIACQPGYRSQGGGACRDVNECAEGSPCSPGWCENLPGSFRCTCAQGYAPAPDGRSCLDVDECEAGDVCDNGICSNTPGSFQCQCLSGYHLSRDRSHCEDIDECDFPAACIGGDCINTNGSYRCLCPQGHRLVGGRKCQDIDECSQDPSLCLPHGACKNLQGSYVCVCDEGFTPTQDQHGCEEVEQPHHKKECYLNFDDTVFCDSVLATNVTQQECCCSLGAGWGDHCEIYPCPVYSSAEFHSLCPDGKGYTQDNNIVNYGIPAHRDIDECMLFGSEICKEGKCVNTQPGYECYCKQGFYYDGNLLECVDVDECLDESNCRNGVCENTRGGYRCACTPPAEYSPAQRQCLSPEEMDVDECQDPAACRPGRCVNLPGSYRCECRPPWVPGPSGRDCQLPESPAERAPERRDVCWSQRGEDGMCAGPLAGPALTFDDCCCRQGRGWGAQCRPCPPRGAGSHCPTSQSESNSFWDTSPLLLGKPPRDEDSSEEDSDECRCVS

SEQ ID NO: 60374 - protein, 8 aa, Homo sapiens
MDPNSILL

SEQ ID NO: 60375 - protein, 66 aa, Homo sapiens
  MOD_RES (1)..(1): Any amino acid
XHAKIKDSMPLLEKNEPKMSEAKNYLSSILNHGRLSGLAVLLRLVSNSWAQAILLLQPPEALGLQE

SEQ ID NO: 60376 - protein, 41 aa, Homo sapiens
GPAAHPVQPWASLSPEGWQRGGPFWPQVTLNSQDRAKVLSP

SEQ ID NO: 60377 - protein, 61 aa, Homo sapiens
ALERSKAIEKNLKEDGISAAKDVKLLLLGAGESGKSTIVKQMKQYVLSVWKLLRFCVHLEV

SEQ ID NO: 60378 - protein, 33 aa, Homo sapiens
MAQGSHQIDFQVLHDLRQKFPEVPEVARGNRPD

SEQ ID NO: 60379 - protein, 123 aa, Homo sapiens
MSPSGRLCLLTIVGLILPTRGQTLKDTTSSSSADSTIMDIQVPTRAPGEERDTSIKILSLQITTATKIPNLDQTREFMDLCNEKVQMQSTQNSSPPLQPQPGLLMKHHNPRPRPSNWKERMGL

SEQ ID NO: 60380 - protein, 43 aa, Homo sapiens
MESLTLEDVAVDFTWEEWQFLSPAQKDLYRDVMLENYSNLVSV

SEQ ID NO: 60381 - protein, 87 aa, Homo sapiens
SWPAWSTTTTTQSREMKPDPTPLLTSRHNVFQNDEFDVFSRDSVDLSRVHKGKSTRKEENTRSLLNDKRAVAAQRQRYEQYSVVVEE

SEQ ID NO: 60382 - protein, 256 aa, Homo sapiens
  MOD_RES (1)..(1): Any amino acid
XKPCGGYCNVVMQGCMAGVVEIDKYWREYILSLEELVNGMYRIYDMENVLLGLFSTIHDSIQYVQKNAGKLTTTIGKLCAHSQQRQYRSAYYPEDLFIDKKVLKVAHVEHEETLSSRRRELIQKLKSFISFYSALPGYICSHSPVAENDTLCWNGQELVERYSQKAARNGMKNQFNLHELKMKGPEPVVSQIIDKLKHINQLLRTMSMPKGRVLDKNLDEEGFESGDCGDDEDECIGGSGDGMIKVKNQLRFLAGN

SEQ ID NO: 60383 - protein, 232 aa, Homo sapiens
MGRLVLLWGAAVFLLGGWMALGQGGAEGVQIQIIYFNLETVQVTWNASKYSRTNLTFHYRFNGDEAYDQCTNYLLQEGHTSGCLLDAEQRDDILYFSIRNGTHPVFTASRWMVYYLKPSSPKHVRFSWHQDAVTVTCSDLSYGDLLYEVQYRSPFDTEWQTQSRSVTQAGVQWCDLCLLQPSPPRFKRFSCLSLPSSWDYRHPPPRLANFCIISRDGVSPCWPGWSRTCDLR

SEQ ID NO: 60384 - protein, 150 aa, Homo sapiens
MDADKEKDLQKFLKNVDEISNLIQEMNSDDPVVQQKAVLETEKRLLLMEEDQEEDECRTTLNKTMISPPQTAMKSAEEINSEAFLASVEKDAKERAKRRRENKVLADALKEKGNEAFAEGNYETAILRYSEGLEKLKDMKVLYTNRAQQW

SEQ ID NO: 60385 - protein, 193 aa, Homo sapiens
MTRAGLSSTRRPVLARTHVQGRVYNFLERPTGWKCFVYHFAVFLIVLVCLIFSVLSTIEQYAALATGTLFWMEIVLVVFFGTEYVVRLWSAGCRSKYVGLWGRLRFARKPISIIDLIVVVASMVVLCVGSKGQVFATSAIRGIRFLQILRMLHVDRQGGTWRLLGSVVFIHRQELITTLYIGFLGLIFSSYFV

SEQ ID NO: 60386 - protein, 1247 aa, Homo sapiens
MMCEVMPTINEDTPMSQRGSQSSGSDSDSHFEQLMVNMLDERDRLLDTLRETQESLSLAQQRLQDVIYDRDSLQRQLNSALPQDIESLTGGLAGSKGADPPEFAALTKELNACREQLLEKEEEISELKAERNNTRLLLEHLECLVSRHERSLRMTVVKRQAQSPSGVSSEVEVLKALKSLFEHHKALDEKVRERLRVSLERVSALEEELAAANQEIVALREQNVHIQRKMASSEGSTESEHLEGMEPGQKVHEKRLSNGSIDSTDETSQIVELQELLEKQNYEMAQMKERLAALSSRVGEVEQEAETARKDLIKTEEMNTKYQRDIREAMAQKEDMEERITTLEKRYLSAQRESTSIHDMNDKLENELANKEAILRQMEEKNRQLQERLELAEQKLQQTMRKAETLPEVEAELAQRIAALTKAEERHGNIEERMRHLEGQLEEKNQELQRARQREKMNEEHNKRLSDTVDRLLTESNERLQLHLKERMAALEEKNVLIQESETFRKNLEESLHDKERLAEEIEKLRSELDQLKMRTGSLIEPTIPRTHLDTSAELRYSVGSLVDSQSDYRTTKVIRRPRRGRMGVRRDEPKVKSLGDHEWNRTQQIGVLSSHPFESDTEMSDIDDDDRETIFSSMDLLSPSGHSDAQTLAMMLQEQLDAINKEIRLIQEEKESTELRAEEIENRVASVSLEGLNLARVHPGTSITASVTASSLASSSPPSGHSTPKLTPRSPAREMDRMGVMTLPSDLRKHRRKIAVVEEDGREDKATIKCETSPPPTPRALRMTHTLPSSYHNDARSSLSVSLEPESLGLGSANSSQDSLHKAPKKKGIKSSIGRLFGKKEKARLGQLRGFMETEAAAQESLGLGKLGTQAEKDRRLKKKHELLEEARRKGLPFAQWDGPTVVAWLELWLGMPAWYVAACRANVKSGAIMSALSDTEIQREIGISNPLHRLKLRLAIQEMVSLTSPSAPPTSRTPSGNVWVTHEEMENLAAPAKTKESEEGSWAQCPVFLQTLAYGDMNHEWIGNEWLPSLGLPQYRSYFMECLVDARMLDHLTKKDLRVHLKMVDSFHRTSLQYGIMCLKRLNYDRKELERRREASQHEIKDVLVWSNDRVIRWIQAIGLREYANNILESGVHGSLIALDENFDYSSLALLLQIPTQNTQARQILEREYNNLLALGTERRLDESDDKNFRRGSTWRRQFPPREVHGISMMPGSSETLPAGFRLTTTSGQSRKMTTDDGVFSVYST

SEQ ID NO: 60387 - protein, 53 aa, Homo sapiens
MDAANFEQFLQERIKVNGKAGNLGGGVVTIERSKSKITVTSEVPFSKRRPALG

SEQ ID NO: 60388 - protein, 235 aa, Homo sapiens
LALPAGPAEAACALCQRAPREPVRADCGHRFCRACVVRFWAEEDGPFPCPECADDCWQRAVEPGRPPLSRRLLALEEAAAAPARDGPASEAALQLLCRADAGPLCAACRMAAGPEPPEWEPRWRKALRGKENKGSVEIMRKDLNDARDLHGQAESAAAVWKGHVMDRRKKALTDYKKLRAFFVEEEEHFLQEAEKEEGLPEDELADPTERFRSLLQAVSELEKKHRNLGLSMLLQ

SEQ ID NO: 60389 - protein, 156 aa, Homo sapiens
MVVPEKEQSWIPKIFKKKTCTTFIVDSTDPGGTLCQCGRPRTAHPAVAMEDAFGAAVVTVWDSDAHTTEKPTDAYGELDFTGAGRKHSNGSFPARYRWRGDPEDGVQFPLDYNYSAFFLVDDGTHGCLGGENRFRLRLESYISQQKTGVGGTGIDI

SEQ ID NO: 60390 - protein, 171 aa, Homo sapiens
MAQFGGQKNPPWATQFTATAVSQPAALGVQQPSLLGASPTIYTQQTALAAAGLTTQTPANYQLTQTAALQQQAAAAAAALQQQYSQPQQALYSVQQQLQQPQQTLLTQPAVALPTSLSLSTPQPTAQITVSYPTPRSSQQQTQPQKQRVFTGVVTKLHDTFGFVDEDVFFQ

SEQ ID NO: 60391 - protein, 83 aa, Homo sapiens
MDCFEVYSPEADQWTALPRLPTARAGVAVTALGKRIMVIGGVGTNQLPLKVVEMYNIDEGKWKKRSMLREAAMGISVTAKDYR

SEQ ID NO: 60392 - protein, 61 aa, Homo sapiens
MGDSKVKVAVRIRPMNRRETDLHTKCVVDVDANKVILNPVNTNLSKGDARLWKILYHDGHS

SEQ ID NO: 60393 - protein, 255 aa, Homo sapiens
MSNNLSELDTKIQEKAMKVDMDICRRIDITAKLCDVAQQRNCEDMIQMFQKKLVPSMGGRKRERKAAVEEDTSLSESEGPRQPDGDEEESTALSINEEMQRMLNQLREYDFEDDCDSLTWEETEETLLLWEDFSGYAMAAAEAQGEQEDSLEKVIKDTESLFKTREKEYQETIDQIELELATAKNDMNRHLHEYMEMCSMKRGLDVQMETCRRLITQSGDRKSPAFTAVPLSDPPPPPSEAEDSDRDVSSDSSMR

SEQ ID NO: 60394 - protein, 134 aa, Homo sapiens
MAGNAEPPPAGAACPQDRRSCSGRAGGDRVWEDGEHPAKKLKSGGDEERREKPPKRKIVLLMAYSGKGYHGMQRNVGSSQFKTIEDDLVSALVRSGCIPENHGEDMRKMSFQRCARTDKVPSPLEGSEGDGDTD

SEQ ID NO: 60395 - protein, 1084 aa, Homo sapiens
MGIQRRSGPLLTGLSVGLLLLFSWVTLVQPTSLSALVHHPHLCQTTRDVHGRHYPGFFCPRLSDSPEEAYCCHLQAAGGSCCTRAEFEALYQVNLSALPPPPILRGPGPLLVLGLYNLLVVTLMTVDLVHFCCGRGRSLGWSHRRPPSGSSAASSLQASSVEQLRKEGNELFKCGDYGGALAAYTQALGLDATPQDQAVLHRNRAACHLKLEDYDKAETEASKAIEKDGGDVKALYRRSQALEKLGRLDQAVLDLQRCVSLEPKNKVFQEALRNIGGQIQEKVRYMSSTDAKVEQMFQILLDPEEKGTEKKQKASQNLVVLAREDAGAEKIFRSNGVQLLQRLLDMGETDLMLAALRTLVGICSEHQSRTVATLSILGTRRVVSILGVESQAVSLAACHLLQVMFDALKEGVKKGFRGKEGAIIVDPARELKVLISNLLDLLTEVGVSGQGRDNALTLLIKAVPRKSLKDPNNSLTLWVIDQGLKKILEVGGSLQDPPGELAVTANSRMSASILLSKLFDDLKCDAERENFHRLCENYIKSWFEGQGLAGKLRAIQTVSCLLQGPCDAGNRALELSGVMESVIALCASEQEEEQLVAVEALIHAAGKAKRASFITANGVSLLKDLYKCSEKDSIRIRALVGLCKLGSAGGTDFSMKQFAEGSTLKLAKQCRKWLCNDQIDAGTRRWAVEGLAYLTFDADVKEEFVEDAAALKALFQLSRLEERSVLFAVASALVNCTNSYDYEEPDPKMVELAKYAKQHVPEQHPKDKPSFVRARVKKLLAAGVVSAMVCMVKTESPVLTSSCRELLSRVFLALVEEVEDRGTVVAQGGGRALIPLALEGTDVGQTKAAQALAKLTITSNPEMTFPGERIYEVVRPLVSLLHLNCSGLQNFEALMALTNLAGISERLRQKILKEKAVPMIEGYMFEEHEMIRRAATECMCNLAMSKEVQDLFEAQGNDRLKLLVLYSGEDDELLQRAAAGGLAMLTSMRPTLCSRIPQVTTHWLEILQALLLSSNQELQHRGAVVVLNMVEASREIASTLMESEMMEILSVLAKGDHSPVTRAAAACLDKAVEYGLIQPNQDGE

SEQ ID NO: 60396 - protein, 76 aa, Homo sapiens
MAARRALHFVFKVGNRFQTARFYRDVLGMKALRGVQLQERGELPLGIIGLGEGPNTISPRGVPTHVLSFKPLVNVY

SEQ ID NO: 60397 - protein, 197 aa, Homo sapiens
MSSEEDKSVEQPQPPPPPPEEPGAPAPSPAAADKRPRGRPRKDGASPFQRARKKPRSRGKTAVEDEDSMDGLETTETETIVETEIKEQSAEEDAEAEVDNSKQLIPTLQRSVSEESANSLVSVGVEAKISEQLCAFCYCGEKSSLGQGDLKQFRITPGFILPWRNQPSNKKDIDDNSNGTYEKMQNSAPRKQRGQRK

SEQ ID NO: 60398 - protein, 1952 aa, Homo sapiens
MFRQFYLWTCLASGIILGSLFEICLGQYDDDCKLARGGPPATIVAIDEESRNGTILVDNMLIKGTAGGPDPTIELSLKDNVDYWVLMDPVKQMLFLNSTGRVLDRDPPMNIHSIVVQVQCINKKVGTIIYHEVRIVVRDRNDNSPTFKHESYYATVNELTPVGTTIFTGFSGDNGATDIDDGPNGQIEYVIQYNPDDPTSNDTFEIPLMLTGNIVLRKRLNYEDKTRYFVIIQANDRAQNLNERRTTTTTLTVDVLDGDDLGPMFLPCVLVPNTRDCRPLTYQAAIPELRTPEELNPIIVTPPIQAIDQDRNIQPPSDRPGILYSILVGTPEDYPRFFHMHPRTAELSLLEPVNRDFHQKFDLVIKAEQDNGHPLPAFAGLHIEILDENNQSPYFTMPSYQGYILESAPVGATISDSLNLTSPLRIVALDKDIEDTKDPELHLFLNDYTSVFTVTQTGITRYLTLLQPVDREEQQTYTFSITAFDGVQESEPVIVNIQVMDANDNTPTFPEISYDVYVYTDMRPGDSVIQLTAVDADEGSNGEITYEILVGAQGDFIINKTTGLITIAPGVEMIVGRTYALTVQAADNAPPAERRNSICTVYIEVLPPNNQSPPRFPQLMYSLEISEAMRVGAVLLNLQATDREGDSITYAIENGDPQRVFNLSETTGILTLGKALDRESTDRYILIITASDGRPDGTSTATVNIVVTDVNDNAPVFDPYLPRNLSVVEEEANAFVGQVKATDPDAGINGQVHYSLGNFNNLFRITSNGSIYTAVKLNREVRDYYELVVVATDGAVHPRHSTLTLAIKVLDIDDNSPVFTNSTYTVLVEENLPAGTTILQIEAKDVDLGANVSYRIRSPEVKHFFALHPFTGELSLLRSLDYEAFPDQEASITFLVEAFDIYGTMPPGIATVTVIVKDMNDYPPVFSKRIYKGMVAPDAVKGTPITTVYAEDADPPGLPASRVRYRVDDVQFPYPASIFEVEEDSGRVITRVNLNEEPTTIFKLVVVAFDDGEPVMSSSATVKILVLHPGEIPRFTQEEYRPPPVSELATKGTMVGVISAAAINQSIVYSIVSGNEEDTFGINNITGVIYVNGPLDYETRTSYVLRVQADSLEVVLANLRVPSKSNTAKVYIEIQDENNHPPVFQKKFYIGGVSEDARMFTSVLRVKATDKDTGNYSVMAYRLIIPPIKEGKEGFVVETYTGLIKTAMLFHNMRRSYFKFQVIATDDYGKGLSGKADVLVSVVNQLDMQVIVSNVPPTLVEKKIEDLTEILDRYVQEQIPGAKVVVESIGARRHGDAFSLEDYTKCDLTVYAIDPQTNRAIDRNELFKFLDGKLLDINKDFQPYYGEGGRILEIRTPEAVTSIKKRGESLGYTEGALLALAFIIILCCIPAILVVLVSYRQRQAECTKTARIQAALPAAKPAVPAPAPVAAPPPPPPPPPGAHLYEELGDSSILFLLYHFQQSRGNNSVSEDRKHQQVVMPFSSNTIEAHKSAHVDGSLKSNKLKSARKFTFLSDEDDLSAHNPLYKENISQVSTNSDISQRTDFVDPFSPKIQAKSKSLRGPREKIQRLWSQSVSLPRRLMRKVPNRPEIIDLQQWQGTRQKAENENTGICTNKRGSSNPLLTTEEANLTEKEEIRQGETLMIEGTEQLKSLSSDSSFCFPRPHFSFSTLPTVSRTVELKSEPNVISSPAECSLELSPSRPCVLHSSLSRRETPICMLPIETERNIFENFAHPPNISPSACPLPPPPPISPPSPPPAPAPLAPPPDISPFSLFCPPPSPPSIPLPLPPPTFFPLSVSTSGPPTPPLLPPFPTPLPPPPPSIPCPPPPSASFLSTECVCITGVKCTTNLMPAEKIKSSMTQLSTTTVCKTDPQREPKGILRHVKNLAELEKSVANMYSQIEKNYLRTNVSELQTMCPSEVTNMEITSEQNKGSLNNIVEGTEKQSHSQSTSL

SEQ ID NO: 60399 - protein, 245 aa, Homo sapiens
MTKARLFRLWLVLGSVFMILLIIVYWDSAGAAHFYLHTSFSRPHTGPPLPTPGPDRDRELTADSDVDEFLDKFLSAGVKQSDLPRKETEQPPAPGSMEESVRGYDWSPRDARRSPDQGRQQAERRSVLRGFCANSSLAFPTKERAFDDIPNSELSHLIVDDRHGAIYCYVPKVACTNWKRVMIVLSGSLLHRGAPYRDPLRIPREHVHNASAHLTFNKFWRRYGKLSRHLMKVKLKKYTKFLFVR

SEQ ID NO: 60400 - protein, 92 aa, Homo sapiens
AWQRNLGYPLAMLCLLVLTGLSVLIVAIHILELLIDEAAMPRGMQVVLILYPSGNPSLPLFSKPVSWDSRPSTSWTFYLMVSSVVGFYSSPL

SEQ ID NO: 60401 - protein, 486 aa, Homo sapiens
MSSHGNSLFLRESGQRLGRVGWLQRLQESLQQRALRTRLRLQTMTLEHVLRFLRRNAFILLTVSAVVIGVSLAFALRPYQLTYRQIKYFSFPGELLMRMLQMLVLPLIVSSLVTGMASLDNKATGRMGMRAAVYYMVTTIIAVFIGILMVTIIHPGKGSKEGLHREGRIETIPTADAFMDLIRNMFPPNLVEACFKQFKTQYSTRVVTRTMVRTENGSEPGASMPPPFSVENGTSFLENVTRALGTLQEMLSFEETVPVPGSANGINALGLVVFSVAFGLVIGGMKHKGRVLRDFFDSLNEAIMRLVGIIICSATLPITFRCLEEGLGVDRRITRFVLPVGATVNMDGTALYEALAAIFIAQVNNYELNLGQITTISITATAASVGAAGIPQAGLVTMVIVLTSVGLPTEDITLIIAVDWFLDRLRTMTNVLGDSIGAAVIEHLSQRELELQEAELTLPSLGKPYKSLMAQEKGASRGRGGNESAM

SEQ ID NO: 60402 - protein, 58 aa, Homo sapiens
MRPADLPPRPMEESPASSSAPTETEEPGSSAAPDLCETFWVAMPESPSILLLSSTRSA

SEQ ID NO: 60403 - protein, 120 aa, Homo sapiens
MAALRQPQVAELLAEARRAFREEFGAEPELAVSAPGRVNLIGEHTDYNQGLVLPMALELMTVLVGSPRKDGLVSLLTTSEGADEPQRLQFPLPTAQRSLEPGTPRWANYVKGVIQYYPEP

SEQ ID NO: 60404 - protein, 131 aa, Homo sapiens
MRGMSNNTPQLNRSLSQGTQLPSHVTPTTGVPTMSLHTPPSPSRGILPMNPRNMMNHSQVGQGIGIPSRTNSMSSSGLGSPNRSSPSIICMPKQQPSRQPFTVNSMSGFGMNRNQAFGMNNSLSSNIFNGT

SEQ ID NO: 60405 - protein, 101 aa, Homo sapiens
MSYFGEHFWGEKNHGFEVLYHSVKQGPISTKELADFIRERATIEETYSKAMAKLSKLASNGTPMGTFAPLWEVFRVSSDKLALCHLELTRKLQDLIKDVLR

SEQ ID NO: 60406 - protein, 102 aa, Homo sapiens
  MOD_RES (1)..(1): Any amino acid
XKNQKLKLPGNSRLPSEALESSSGKSPLEISRFKVKNVKTGSASGCNSEKIRKLVAVKRQQEPLGEDCPSELREIIDECRAHDPSVRPSVDEILKKLSTFSK

SEQ ID NO: 60407 - protein, 119 aa, Homo sapiens
MHEIEKFQKGEGKDEEKYIDVVINKNMKLGQKVLIPVKQFPKDYDDGYGTAYDEQSYDSYDNSYSTPAQSGADYYDYGHGLSEETYDSYGQEEWTNSRHKAPSARTAKGVYRDQPYGRY

SEQ ID NO: 60408 - protein, 1754 aa, Homo sapiens
MNSLFRKRNKGKYSPTVQTRSISNKELSELIEQLQKNADQVEKNIVDTEAKMQSDLARLQEGRQPEHRDVTLQKVLDSEKLLYVLEADAAIAKHMKHPQGDMIAEDIRQLKERVTNLRGKHKQIYRLAVKEVDPQVNWAALVEEKLDKLNNQSFGTDLPLVDHQVEEHNIFHNEVKAIGPHLAKDGDKNSELRAKYQKLLAASQARQQHLSSLQDYMQRCTNELYWLDQQAKGRMQYDWSDRNLDYPSRRRQYENFINRNLEAKEERINKLHSEGDQLLAAEHPGRNSIEAHMEAVHADWKEYLNLLICEESHLKYMEDYHQFHEDVKDAQELLRKVDSDLNQKYGPDFKDRYQIELLLRELDDQEKVLDKYEDVVQGLQKRGQQVVPLKYRRETPLKPIPVEALCDFEGEQGLISRGYSYTLQKNNGESWELMDSAGNKLIAPAVCFVIPPTDPEALALADSLGSQYRSVRQKAAGSKRTLQQRYEVLKTENPGDASDLQGRQLLAGLDKVASDLDRQEKAITGILRPPLEQGRAVQDSAERAKDLKNITNELLRIEPEKTRSTAEGEAFIQALPGSGTTPLLRTRVEDTNRKYEHLLQLLDLAQEKVDVANRLEKSLQQSWELLATHENHLNQDDTVPESSRVLDSKGQELAAMACELQAQKSLLGEVEQNLQAAKQCSSTLASRFQEHCPDLERQEAEVHKLGQRFNNLRQQVERRAQSLQSAKAAYEHFHRGHDHVLQFLVSIPSYEPQETDSLSQMETKLKNQKNLLDEIASREQEVQKICANSQQYQQAVKDYELEAEKLRSLLDLENGRRSHVSKRARLQSPATKVKEEEAALAAKFTEVYAINRQRLQNLEFALNLLRQQPEVEVTHETLQRNRPDSGVEEAWKIRKELDEETERRRQLENEVKSTQEEIWTLRNQGPQESVVRKEVLKKVPDPVLEESFQQLQRTLAEEQHKNQLLQEELEALQLQLRALEQETRDGGQEYVVKEVLRIEPDRAQADEVLQLREELEALRRQKGAREAEVLLLQQRVAALAEEKSRAQEKVTEKEVVKLQNDPQLEAEYQQLQEDHQRQDQLREKQEEELSFLQDKLKRLEKERAMAEGKITVKEVLKVEKDAATEREVSDLTRQYEDEAAKARASQREKTELLRKIWALEEENAKVVVQEKVREIVRPDPKAESEVANLRLELVEQERKYRGAEEQLRSYQSELEALRRRGPQVEVKEVTKEVIKYKTDPEMEKELQRLREEIVDKTRLIERCDLEIYQLKKEIQALKDTKPQVQTKEVVQEILQFQEDPQTKEEVASLRAKLSEEQKKQVDLERERASQEEQIARKEEELSRVKERVVQQEVVRYEEEPGLRAEASAFAESIDVELRQIDKLRAELRRLQRRRTELERQLEELERERQARREAEREVQRLQQRLAALEQEEAEAREKVTHTQKVVLQQDPQQAREHALLRLQLEEEQHRRQLLEGELETLRRKLAALEKAEVKEKVVLSESVQVEKGDTEQEIQRLKSSLEEESRSKRELDVEVSRLEARLSELEFHNSKSSKELDFLREENHKLQLERQNLQLETRRLQSEINMAATETRDLRNMTVADSGTNHDSRLWSLERELDDLKRLSKDKDLEIDELQKRLGSVAVKREQRENHLRRSIVVIHPDTGRELSPEEAHRAGLIDWNMFVKLRSQECDWEEISVKGPNGESSVIHDRKSGKKFSIEEALQSGRLTPAQYDRYVNKDMSIQELAVLVSGQK

SEQ ID NO: 60409 - protein, 2308 aa, Homo sapiens
MKQRKGQGSGGSRGRKKRGLSDISPSTSLPPLVEGQLRCFLKLTVNRVIWKIAKPPTCVLVRVRWWGETSDGTLFCPRDALQTEPKAVRTTTRYAIRCGPKQFTSYLTDMAVLVLEVITKLDGLPIGRVQINGLAQLSPTHQINGFFTIVSSTSKKLGELQVSLALEPLSETYDSYHPLPTTDMTENVLLSKQGFRENTEPSSTQFQVPSRPRDIHTIKIDGKELAANSSRSTTPRGKDHVCFAENPDTIKDSSFGLQHSLNSGQSLESVTLKGRAPRKQMSLLNSSEFQPQIRTVAKSHSDSCILSSNNLPTKDLLSALLEQGNKLRNAMVISAMKSSPETSMLLDQVHPPINEDSLRASTQIRAFSRNRFKDHIEDHLLPSTENTFWRHDTKADTRAIQLLLGSAELSQGNFWDGLGSPPDSPSPGSDVYCISELNDPQYDQSLLENLFYTAPKSDTSISDFLSEEDDIVPSKKISQSTALARSSKVLESSDHKLKKRSAGKRNRNLVEQQMLSETPEDAQTMTLSVDRLALLGRTHSVRIIIETMGVPPDSPQMTPGKKSYAGPPPKVTTAKKRTFFVEYHFPVGFSESGLGKTALITEVVRLASSKITDGKVKFQQRFVFPVQFGGPMIEHWWNSNLTFQIYVKKTPQKKPEVIGSVSLSLRAVIQSELLSFSDQLPVQQENGQSPFGPLKVTMELITDNKDFTGINTKLSGNTHYTPLCAPTSPNKALPELNQDMTCTKNPQNLNQIHEETAKKAQNLVLPNRKSPSPVAPHPSTFVATPASHNLVNQTNGTTKESALLLHVLLMVPDGKDFISGESEKQSPCNVYLNCKLFSTEEVTRSVIAWGTTQPVFNFSQVIPVSLSSKYLERLKNNVMVIETWNKVRSPGQDKLLGLVKLPLHQFYMSFKDAKISRLLLDAQYPVVAVDSYMPVIDVFSGHQNGSLRVFLAMGSSNQIMALQRLKNEEGTLPPFSPRPAHFLDQPTAASVAMAEDRGNGLMEHCFEIHIEMVKGLAPLQATVWGEADCYVQYYFPVQHSQSSVLKGPEFLENGITLKPFRTATTLCVPDPIFNSEHHHSLLLPAEVPVQRLLLSAFSAQGLVPGGGVQFEIWCRYYYPNVRDQKVAKGTLPLSRICAMVTTQHREDVGIQTFNLPLTPRIENRKELRNQSSGLLDVGLRYRRSPRTAEGVLAARTVSISVQIIRACGLQAAAKALAEREPALQFSATVGVNASVTTHLSFLPQGEQRRTHPVACSFCPEFSHHVEFTCNLVTQHCSGEACFLAELLEFAEVIFAVYHENTKSASDIISIESCKEYLLGVVKVPTKELLIKRSGITGWYPIILPEDGGLPHGLELMQKIVGGLELSISFTHRGDRERVLEAAEHLGWSFENSLKDFVRMDEGEPATVTISTPRLWLPIHCVLLAGHNHIHKNTYCYLRYKFYDHEAFWTPLKKPKESVNKKQIMVTFKASKRAEVTRGPSLLWYFREERLEIQVWRAYGNDSVERPHQTDSWIGSAYVDLARLGERSARTLTVSGVYPLFGRNASNLSGAALRVHVVLSSLSSHLEPTHELDSMDCSSHSESEQLPRRNDEVQLSPPEVISCHQKSPASTQVPCSSTTAEVRLTQEGPADLDGTFAVSILVERAMHLSLKGSPLTERKVSIPSCCVSFATADESSPVYTQVVENTDSPIWNFQQQSRLSKELLLDPQQTLVFKVWHKGDEERVIGFASVDLSPLLSGFQFVCGWYNITDFSGECQGQIKVAVSPLESLIHFKEERQARRGVETSKSLIPIYSPFSFPASDTYAAFSSHMARQTLDQLAHASSKELDFSSPGRSDTTRSQASRHEEHVQNIRRFHESLHLQGEAPLPCDDKLTTSPLSSQTSILTSLRKNLSELDQIQRYFRQKLTKPFLPLSPQTQTAISQHQESCRDHLGPGASSLDPGSQCILEKSSNLVLQVSSLITDLQTITRDSQAALSSHRARSRSNKATTLPDAQDTEALQERCTMPDEPLVRAPDKGTDSPSPPPLEETSNGGRMLHESLRHAVPITRMQSSEDTEAGPAYSDEDYEEDIIEPRTLNEITTVTDKTSPWSSVISDTSEVISPQPDEVQREGPSCPSPGPFCREELMVKSSFLSSPERAVNPHLPRQGSPSQSLVACECEASKARVGGESASANPQPIPCPTLSGAQQSSTFVGWSSPQTDQNKEPKSEAPAENEAATSELGDSADSFKKLPLNLASQSRRENHKGPPIDSSDIRQRQVTTGSETSTKQSLLLPGPIVVPNFFLPPQQLEASLRMLSLSATLPPAATTDQL

SEQ ID NO: 60410 - protein, 438 aa, Homo sapiens
MSLTVVSMACVGFFLLQGAWPLMGGQDKPFLSARPSTVVPRGGHVALQCHYRRGFNNFMLYKEDRSHVPIFHGRIFQESFIMGPVTPAHAGTYRCRGSRPHSLTGWSTPSNPLVIMVTGNHRKPSLLAHPGPLLKSGETVILQCWSDVMFEHFFLHREGISEDPSRLVGQIHDGVSKANFSIGPLMPVLAGTYRCYGSVPHSPYQLSAPSDPLDIVITGLYEKPSLSAQPGPTVQAGENVTLSCSSWSSYDIYHLSREGEAHERRLRAVPKVNRTFQADFPLGPATHGGTYRCFGSFRDLPCVWSNSSDPLLVSVTGICRHLHVLIGTSVVIFLFILLLFFLLYRWCSNKKNAAVMDQEPAGDRTVNRQDSDEQDPQEVMYAQLDHCVFIQRKISRPSQRPKTPLTDTSVYTELPNAEPRSKVVSCPRAPQSGLEGVF

SEQ ID NO: 60411 - protein, 74 aa, Homo sapiens
MVWQIPDYTPMRNITEPIITLEGHSKRVGILSWHPTARNVLLSAGGDNVIIIWNVGTGEVLLSLDDMHPDVIHS

SEQ ID NO: 60412 - protein, 167 aa, Homo sapiens
MDMSDPNFWTVLSNFTLPHLRSGNRLRRTQSCRTSNRKSLIGNGQSPALPRPHSPLSAHAGNSPQDSPRNFSPSASAHFSFARRTDGRRWSLASLPSSGYGTNTPSSTVSSSCSSQEKLHQLPYQPTPDELHFLSKHFCTTESIATENRCRNTPMRPRSRSLSPGRS

SEQ ID NO: 60413 - protein, 105 aa, Homo sapiens
  MOD_RES (1)..(1): Any amino acid
XDKDGSKVTTVVATPGQGPDRPQEVSYTDTKVIGNGSFGVVYQAKLCDSGELVAIKKVLQDKRFKIPQLQVCWSLLEFHSRPWLPVYHQQRLQNNKYCRTANIAA

SEQ ID NO: 60414 - protein, 253 aa, Homo sapiens
TAPRTLLLLLWGAVALTETWAGSHSMRYFHTSVSRPGRGEPRFISVGYVDGTQFVRFDSDAASPRTEPRAPWIEQEGPEYWDRNTQISKTNTQTYRESLRNLRGYYNQSEAGSHTLQRMYGCDVGPDGRLLRGHDQSAYDGKDYIALNEDLSSWTAADTAAQITQRKWEAARVAEQLRAYLEGTCVEWLRRHLENGKETLQRAEPSSQSTIPIVGIVAGLAVLAVVVIGAVVATVMCRRKSSGRKGGSYSQAA

SEQ ID NO: 60415 - protein, 47 aa, Homo sapiens
MEASVLSPTSWEKRRAWLRQSRNWQTQVLEEEAAAALQDVPDPEPSS

SEQ ID NO: 60416 - protein, 51 aa, Homo sapiens
MLSRLGALLQEAVGATTPGPCWGAGRPSRHPGTWEVQALPVQVPTKARAQH

SEQ ID NO: 60417 - protein, 557 aa, Homo sapiens
MPLAFCGSENHSAAYRVDQGVLNNGCFVDALNVVPHVFLLFITFPILFIGWGSQSSKVHIHHSTWLHFPGHNLRWILTFMLLFVLVCEIAEGILSDGVTESHHLHLYMPAGMAFMAAVTSVVYYHNIETSNFPKLLIALLVYWTLAFITKTIKFVKFLDHAIGFSQLRFCLTGLLVILYGMLLLVEVNVIRVRRYIFFKTPREVKPPEDLQDLGVRFLQPFVNLLSKGTYWWMNAFIKTAHKKPIDLRAIGKLPIAMRALTNYQRLCEAFDAQRKDIQGTQGARAIWQALSHAFGRRLVLSSTFRILADLLGFAGPLCIFGIVDHLGKENDVFQPKTQFLGVYFVSSQEFLANAYVLAVLLFLALLLQRTFLQASYYVAIETGINLRGAIQTKIYNKIMHLSTSNLSMGEMTAGQICNLVAIDTNQLMWFFFLCPNLWAMPVQIIVGVILLYYILGVSALIGAAVIILLAPVQYFVATKLSQAQRSTLEYSNERLKQTNEMLRGIKLLKLYAWENIFRTRVETTRRKEMTSLRAFAIYTSISIFMNTAIPIAAVLIG

SEQ ID NO: 60418 - protein, 90 aa, Homo sapiens
PLTPLQWDEDQQLGDLKQLLSRLCGLLLEEGSHPGAPAKPVDLAPVDYRNLTFDPVSANRHFYLSRQDQQVESCSLKKTYSDPNPQDLWL

SEQ ID NO: 60419 - protein, 163 aa, Homo sapiens
MVLREVTECNIETQFLKASEGPKFAFLSFVEAMSFLPPSVFWSFIFFLMLLAMGLSSAIGIMQGIITPLQDTFSFFRKHTKLLIVGVFLLMFVCGLFFTRPSGSYFIRLLSDYWIVFPIIVVVVFETMAVSWAYGARRFLADLTILLGHPISPIFGWLWPHLC

SEQ ID NO: 60420 - protein, 1222 aa, Homo sapiens
MVKLSIVLTPQFLSHDQGQLTKELQQHVKSVTCPCEYLRKVINTLADHHHRGTDFGGSPWLHVIIAFPTSYKVVITLWIVYLWVSLLKTIFWSRNGHDGSTDVQQRAWRSNRRRQEGLRSICMHTKKRVSSFRGNKIVLKDVITLRRHVETKVRAKIRKRKVTTKINHHDKINGKRKTARKQKMFQRAQELRRRAEDYHKCKIPPSARKALCNWVRMAAAEHRHSSGLPYWPYLTAETLKNRMGHQPPPPTQQHSITDNSLSLKTPPECLLTPLPPSADDNLKTPPECVLTPLPPSADDNLKTPPECVLTPLPPSADDNLKTPPECLLTPLPPSADDKLKTPPECLLTPLPPSALPSAPPSADDNLKTRAECLLHPLPPSADDNLKTPSERQLTPLPPSAPPSADDNIKTPAERLRGPLPPSADDNLKTPSERQLTPLPPSAPPSADDNIKTPAERLRGPLPPSADDNLKTPSERQLTPLPPSAPPSADDNIKTPAERLRGPLPPSADDNLKTPSERQLTPLPPSAPPSADDNIKTPAERLRGPLPPSADDNLKTPSERQLTPLPPSAPPSADDNIKTPAERLRGPLPPSADDNLKTPSERQLTPLPPSAPPSADDNIKTPAFHPQRMIISRHLPSVSSLPFHPQLHPQQMIISRYLLSVCGFRFHHQPMIISRHLPSVSSLPFHPQLHPQQMIISRHLPSVCGGRFHPQRMIISRHLPSVSSLPFHPQLHPQQMIISRHLPSVCGGRFHPQRMIISRHLPSVSSLPFHPQLHPQQMIISRHLPSVCGGRFHPQRMIISRHLPSVSSLPFHTQLHPQQMIISRHLPSVCGERLRGPLPPSADDNLKTPSERQLTPLPPSAPPSADDNIKTPAERLRGPLPPSADDNLKTPSERQLTPLPPSAPPSADDNIKTPAERLRGPLPPSADDNLKTPSERQLTPLPPSAPPSADDNIKTPAERLRGPLPPSADDNLKTPSERQLTPLPPSAPPSADDNIKTPAERLRGPLPPSADDNLKTPSERQLTPLPPSAPPSADDNIKTPAERLRGPLPPSADDNLKTPSERQLTPLPPSAPPSADDNIKTPAERLRGPLPPSADDNLKTPPLATQEAEAEKPRKPKRQRAAEMEPPPEPKRRRVGDVEPSRKPKRRRAADVEPSSPEPKRRRVGDVEPSRKPKRRRAADVEPSSPEPKRRRVGDVEPSRKPKRRRAADVEPSLPEPKRRRLS

SEQ ID NO: 60421 - protein, 220 aa, Homo sapiens
MSNCLQNFLKITSTRLLCSRLCQQLRSKRKFFGTVPISRLHRRVVITGIGLVTPLGVGTHLVWDRLIGGESGIVSLVGEEYKSIPCSVAAYVPRGSDEGQFNEQNFVSKSDIKSMSSPTIMAIGAAELAMKDSGWHPQSEADQVATGVAIGMGMIPLEVVSETALNFQTKGYNKVSPFFVPKILVNMAAGQVSIRYKLKGPNHAVSTACTTGAHAVGDSF

SEQ ID NO: 60422 - protein, 123 aa, Homo sapiens
  MOD_RES (1)..(1): Any amino acid
XDALCSGEICNTEGISSVVQPDKYKPVPDEPPNPTNIEEILKRVRSNDKELEEVNLNNIQAVADMLRENRSLQSLNIESNFISSTGLMAVLKAVRENATLTELRVDNQVASKRRDNTAFPFTN

SEQ ID NO: 60423 - protein, 82 aa, Homo sapiens
MEKLAASTEPQGPRPVLGRESVQVPDDQDFRSFRSECEAECRMECCDVPAETLYDVLHDIEYRKKWDSNVIETFDIARLTVN

SEQ ID NO: 60424 - protein, 104 aa, Homo sapiens
MAENLKRLVSNETLRTLQEKLDFWLKEYNTNTCDQNLNHCLELIEQVAKVQGQLFGILTAAAQEGGRNDGVETIKSRLLPWLEASFTAASLGKSVDSKVPSLQA

SEQ ID NO: 60425 - protein, 125 aa, Homo sapiens
MASGLGSPSPCSAGSEEEDMDALLNNSLPPPHPENEEDPEEDLSETETPKLKKKKKPKKPRDPKIPKSKRQKKELGDSSGEGPEFVEEEEEVALRSDSEGSDYTPGKKKKKKLGPKKEKKSKSKR

SEQ ID NO: 60426 - protein, 43 aa, Homo sapiens
MWGFLKRPVVVTADINLSLVALTGMGLLSRLWRLTYPRAVVIQ

SEQ ID NO: 60427 - protein, 130 aa, Homo sapiens
MNDMMSLGIHRVWKDLLLWKMHPLPGTQLLDVAGGTGDIAFRFLNYVQSQHQRKQKRQLRAQQNLSWEEIAKEYQNEEDSLGGSRVVVCDINKEMLKVGKQKALAQGYRAGLAWVLGDAEELPFDDDKFD

SEQ ID NO: 60428 - protein, 160 aa, Homo sapiens
MEAPEYLDLDEIDFSDDISDNRSQGNRLQKLGLEDTDREDAMGFGSHRAKLTVVAALGACHCPENEYSVTSLKTIPELCRRCDTQNEDRSVSSSSWNCGISTLITNTQKPTGIADVYSKFRPVKRVSPLKHQPETLENNESDDQKNQKVVEYQKGGESDL

SEQ ID NO: 60429 - protein, 148 aa, Homo sapiens
MGRMHAPGKGLSQSALPYRRSVPTWLKLTSDDVKEQIYKLAKKGLTPSQIGVILRDSHGVAQVRFVTGNKILRILKSKGLAPDLPEDLYHLIKKAVAVRKHLERNRKRAGFTVWLDIIRPSESSLPIGNMNHLQPLPWSHKFVCVLKQ

SEQ ID NO: 60430 - protein, 95 aa, Homo sapiens
MAQQSSVCEIWTNQNAGFPFSAIHQVHNTGDWGEPSITLRPPNEATASTPVQYWQHHPEKLIFQSCDYKAFYLGSMLIKELRGTESTQDACAKMR

SEQ ID NO: 60431 - protein, 91 aa, Homo sapiens
MAAKSQPNIPKAKSLDGVTNDRTASQGQWGRAWEVDWFSLASVIFLLLFAPFIVYYFIMACDQYSCALTGPVVDIVTGHARLSDIWAKTPP

SEQ ID NO: 60432 - protein, 71 aa, Homo sapiens
KSHTDDWAPGPFSSKPQRSQLQIFSSVLQTSLLFLLMEFLVESGSQTHLFWSRISKVLSRASEALESGNPS

SEQ ID NO: 60433 - protein, 308 aa, Homo sapiens
  MOD_RES (1)..(1): Any amino acid
XEHPLSADIAMATRADEDGDTPLHIAVVQGNLPAVHRLVNLFQQGGRELDIYNNLRQTPLHLAVITTLPSVVRLLVTAGASPMALDRHGQTAAHLACEHRSPTCLRALLDSAAPGTLDLEARNYDGLTALHVAVNTECQETVQLLLERGADIDAVDIKSGRSPLIHAVENNSLSMVQLLLQHGANVNAQMYSGSSALHSASGRGLLPLVRTLVRSGADSSLKNCHNDTPLMVARSRRVSRGSCGHAPCTRVSAGWLQVIDILRGKATRPASTSQPDPSPDRSANTSPESSSRLSSNGLLSASPSSSPS

SEQ ID NO: 60434 - protein, 76 aa, Homo sapiens
MAQFVRNLVEKTPALVNAAVTYSKPRLATFWYYAKVELVPPTPAEIPRAIQSLKKIVNSAQTGSFKQLTVKKKSST

SEQ ID NO: 60435 - protein, 47 aa, Homo sapiens
MGTRLLPALFLVLLVLGFGEGISLQLLGVSKDSRPEPVREDIPARCR

SEQ ID NO: 60436 - protein, 250 aa, Homo sapiens
MWYEDALASSHPIILYLHGNAGTRSSCVREAARSQHRGRPSTETGLLRGQGRGPVWHQGWGDSVGTPSERGMTYDALHVFDWIKARSGDNPVYIWGHSLGTGVATNLVRRLCERETPPDALILESPFTNIREEAKSHPFSVIYRYFPGFDWFFLDPITSSGIKFANDENVKHISCPLLILHAEDDPVVPFQLGRKLYSIAAPARSFRDFKVQFVPFHSDLGYRHKYIYKSPELPRILREFLGKSEPEHQH

SEQ ID NO: 60437 - protein, 366 aa, Homo sapiens
MDGRRVPAQPAAEFSLTPGGYRSVGRSRRCSRGSIPRNIPKRSWKKPHPQLCSLQEEEPMLERRCRGPLAMGLAQPRLLSGPSQESPQTLGKESRGLRQQGTSVAQSGAQAPGRAHRCAHCRRHFPGWVALWLHTRRCQARLPLPCPECGRRFRHAPFLALHRQVHAAATPDLGFACHLCGQSFRGWVALVLHLRAHSAAKRPIACPKCERRFWRRKQLRAHLRRCHPPAPEARPFICGNCGRSFAQWDQLVAHKRVHVAEALEEAAAKALGPRPRGRPAVTAPRPGGDAVDRPFQCACCGKRFRHKPNLIAHRRVHTGERPHQCPECGKRFTNKPYLTSHRRIHTGEKPYPCKECGRRFRHKPNL

SEQ ID NO: 60438 - protein, 166 aa, Homo sapiens
MQAIKCVVVGDGAVGKTCLLISYTTNAFPGEYIPTVFDNYSANVMVDSKPVNLGLWDTAGQEDYDRLRPLSYPQTDVFLICFSLVSPASYENVRAKWFPEVRHHCPSTPIILVGTKLDLRDDKDTIEKLKEKKLAPITYPQGLALAKEIDSVKYLECSALTQRGLK

SEQ ID NO: 60439 - protein, 182 aa, Homo sapiens
MMTSVGTNRARGNWEQPQNQNQTQHKQRPQATAEQIRLAQMISDHNDADFEEKVKQLIDITGKNQDECVIALHDCNGDVNRAINVLLEGNPDTHSWEMVGKKKGVSGQKDGGQTESNEEGKENRDRDRDYSRRRGGPPRRGRGASRGREFRGQENGLDGTKSGGPSGRGTERGRRGRGRGRG

SEQ ID NO: 60440 - protein, 66 aa, Homo sapiens
MDVFLMIRRHKTTIFTDAKESSTVFELKRIVEGILKRPPDEQRLYKMTPLRPCASSRFPARQSCPM

SEQ ID NO: 60441 - protein, 350 aa, Homo sapiens
MLLARMNPQVQPENNGADTGPEQPLRARKTAELLVVKERNGVQCLLAPRDGDAQPRETWGKKIDFLLSVVGFAVDLANVWRFPYLCYKNGGGAFLIPYTLFLIIAGMPLFYMELALGQYNREGAATVWKICPFFKGVGYAVILIALYVGFYYNVIIAWSLYYLFSSFTLNLPWTDCGHTWNSPNCTDPKLLNGSVLGNHTKYSKYKFTPAAEFYERGVLHLHESSGIHDIGLPQWQLLLCLMVVVIVLYFSLWKGVKTSGKVWIDAATQIFFSLGAGFGVLIAFASYNKFDNNCYRDALLTSSINCITSFVSGFAIFSILGYMAHEHKVNIEDVATEDGRHGGCHHGPGR

SEQ ID NO: 60442 - protein, 76 aa, Homo sapiens
MAAAWPSGPSAPEAVTARLVGVLWFVSVTTGPWGAVATSAGGEESLKCEDLKVGQYPLWRTPPHGGEVELGSQIQK

SEQ ID NO: 60443 - protein, 285 aa, Homo sapiens
MDLLKAITSPLAAGSKPSKKTGEKSSGSSSHSESKKEHHRKKVSGSSGELPLEDGGSHKSKKMKPLYVNTETLTLREPDGLKMKLILSPKEKGSSSVDEESFQYPSQQATVKKSSKKSARDEQGALLLGHELQSFLKTARKKHKSSSDAHSSPGPEGCGSDASQFAESHSANLDLSGLEPILVESDSSSGGELEAGELVIDDSYREIKKKKKSKKSKKKKDKEKHKEKRHSKSKRSLGLSAVPVGEVTVTSGPPPSIPYAGAAAPPLPLPGLHTDGHSEKKKKKE

SEQ ID NO: 60444 - protein, 846 aa, Homo sapiens
MFRRARLSVKPNVRPGVGARGSTASNPQRGRESPRPPEPATDSASKPAEPTDVPTVDFGGAEPQEKAPRSSTEKTGGDNDVEESSRSSSTVSQRRKRISSTSSLVKSSVSVPSESHPLSTINQEAPQPTATSTKEKQPCSDRYRIYKAQKLREMLKEELRKEKKQWKNKYAINESQRPPDRSKMTMRDFIYYLPDNNPMTSSLEQEKKTEKPSTPVQTREQEGKSTPNAEDNEMEEETDDGPLLVPRVKVAEDGSIILDEESLTVEVLRTKGPCVVEENDPIFERGSTTTYSSFRKNYYSKPWSNKETDMFFLAISMVGTDFSMIGQLFPHRARIEIKNKFKREEKTNGWRIDKAFQEKRPFDFDFFAHLLQKVLAEEEKRKQKSVKNHSLKEKKSTKPRKNVKVKKVACEGVNNDPDESMSSRISDTERSQKDAQTVEEESLTLSREDAEQVALEVDLNQKKRRRKKQDGANELGVNNLLENATVQAGPSKGEKHKNKCQAIRPELKEGECSKEQMLSCTQNIDGIVGFASTEKVEKRTDPILSLSNQQDATSVATESSESSTSDLPSFEVGIRALCEVNNAEGSCIEERNVDLKNNSLEIDQTENVKPMLRGRFQRPKPNLSRAGKKSVLSQGKTESESKNSHSKTSVEKNHVEKDKMNTLDILRMETTERENPEAETVSVLGEKNCLQEGSQLKALRPVQVRGRLQKPKPNAGKAAERKEILISQEEIGANVEKNENESCADRDTPQHMEDQSRKDFEEEDVILQPEKNDSFQNVQPDEPKVLNECLSVQENNKANKLNQVPILRTRFQKPKPNIGRGTGRREISSKEEVLEKILSLGKWRQH

SEQ ID NO: 60445 - protein, 134 aa, Homo sapiens
MGNTTTKFRKALINGDENLACQIYENNPQLKESLDPNTSYGEPYQHNTPLHYAARHGMNKILGTFLGRDGNPNKRNVHNETSMHLLCMGPQIMISEGALHPRLARPTEDDFRRADCLQMILKWKGAKLDQGEYE

SEQ ID NO: 60446 - protein, 32 aa, Homo sapiens
MCGIWALFGSDDCLSVQCLSAMKIAHRGPDAF

SEQ ID NO: 60447 - protein, 922 aa, Homo sapiens
MEPNQNNWLRTNWISKGNAQRIFVELKFTLRDCNSLPGVLGTCKETFNLYYYETDYDTGRNIRENLYVKIDTIAADESFTQGDLGERKMKLNTEVREIGPLSKKGFYLAFQDVGACIALVSVKVYYKKCWSIIENLAIFPDTVTGSEFSSLVEVRGTCVSSAEEEAENAPRMHCSAEGEWLVPIGKCICKAGYQQKGDTCEPCGRGFYKSSSQDLQCSRCPTHSFSDKEGSSRCECEDGYYRAPSDPPYVACTRPPSAPQNLIFNINQTTVSLEWSPPADNGGRNDVTYRILCKRCSWEQGECVPCGSNIGYMPQQTGLEDNYVTVMDLLAHANYTFEVEAVNGVSDLSRSQRLFAAVSITTGQAAPSQVSGVMKERVLQRSVELSWQEPEHPNGVITEYEIKYYEKDQRERTYSTVKTKSTSASINNLKPGTVYVFQIRAFTAAGYGNYSPRLDVATLEEATGKMFEATAVSSEQNPVIIIAVVAVAGTIILVFMVFGFIIGRRHCGYSKADQEGDEELYFHFKFPGTKTYIDPETYEDPNRAVHQFAKELDASCIKIERVIGAGEFGEVCSGRLKLPGKRDVAVAIKTLKVGYTEKQRRDFLCEASIMGQFDHPNVVHLEGVVTRGKPVMIVIEFMENGALDAFLRKHDGQFTVIQLVGMLRGIAAGMRYLADMGYVHRDLAARNILVNSNLVCKVSDFGLSRVIEDDPEAVYTTTGGKIPVRWTAPEAIQYRKFTSASDVWSYGIVMWEVMSYGERPYWDMSNQDVIKAIEEGYRLPAPMDCPAGLHQLMLDCWQKERAERPKFEQIVGILDKMIRNPNSLKTPLGTCSRPISPLLDQNTPDFTTFCSVGEWLQAIKMERYKDNFTAAGYNSLESVARMTIEDVMSLGITLVGHQKKIMSSIQTMRAQMLHLHGTGIQV

SEQ ID NO: 60448 - protein, 146 aa, Homo sapiens
MSLKAPMSSRKKKLYLQQHCEAGAAFHHGEPSCQPPHRKMLRRRGSPGMGVHVGAALGALWFCLTGALEVQVPEDPVVALVGTDATLCCSFSPEPGFSLAQLNLIWQLTDTKQLVHSFAEGQDQGSAYANRTALFPDLLAQGNASL

SEQ ID NO: 60449 - protein, 199 aa, Homo sapiens
MWGSRDTLFQLKFTAKQLEKLAKKAEKDSKAEQAKVKKALLQKNVECARVYAENAIRKKNEGVNWLRMASRVDAVASKVQTAVTMKGVTKNMAQVTKALDKALSTMDLQKVSSVMDRFEQQVQNLDVHTSVMEDSMSSATTLTTPQEQVDSLIMQIAEENGLEVLDQLSQLPEGASAVGESSVRSQEDQLSRRLAALRN

SEQ ID NO: 60450 - protein, 111 aa, Homo sapiens
MASARKASRPMRDVFGDFSDVSLEDSTMEEIRNFQISRNLTKIAPGHSRFLKRNQTLDEKHLLLKENPVLGSGPRLASCRPPTTASRIRANAALMKLAQLETRIMNRKLQR

SEQ ID NO: 60451 - protein, 46 aa, Homo sapiens
  MOD_RES (1)..(1): Any amino acid
XGYGGGGPGYSGGSRGYGSGGQGYGNQGSGYGGSSSSSSYGSGRRF

SEQ ID NO: 60452 - protein, 122 aa, Homo sapiens
MELKVWVDGVQRIVCGVTEVTTCQEVVIALAQAIGRTGRYTLIEKWRDTERHLAPHENPIISLNKWGQYASDVQLILRRTGPSLSERPTSDSVARIPERTLYRQSLPPLAKLRPQIDKSIKR

SEQ ID NO: 60453 - protein, 179 aa, Homo sapiens
MFSPPVSSGKNGPTSLASGHFTGSNVEDRSSSGSWGNGGHPSPSRNYGDGTPYDHMTSRDLGSHDNLSPPFVNSRIQSKTERGSYSSYGRESNLQGCHQSLLGGDMDMGNPGTLSPTKPGSQYYQYSSNNPRRRPLHSSAMEVQTKKVRKVPPGLPSSVYAPSASTADYNRDSPGYPSS

SEQ ID NO: 60454 - protein, 49 aa, Homo sapiens
MARTAGDTLDVFTMIDIFKYVIYGIAAAFFVYGILLMVEGFFTTGAIKD

SEQ ID NO: 60455 - protein, 89 aa, Homo sapiens
MRFRYKCEGRSAGSIPGERSTDTTKTHPTIKINGYTGPGTVRISLVTKDPPHRPHPHELVGKDCRDGFYEAELCPDRCIHSFQNLGIQC

SEQ ID NO: 60456 - protein, 87 aa, Homo sapiens
MGNLLKVLTREIENYPHFFLDFENAQPTEGEREIWNQISAVLQDSESILADLQAYKGAGPEIRDAIQNPNDIQLQEKAWNAVCPLVV

SEQ ID NO: 60457 - protein, 152 aa, Homo sapiens
MTGRDLLKDRSLKPVKIAESDTDVKLSIFCEQDRVLQDLEDKIRALKENKDQLESVLEVLHRQMEQYRDQPQHLEKIAYQQKLLQEDLVHIRAELSRESTEMENAWNEYLKLENDVEQLKQTLQEQHRRAFFFQEKSQIQKDLWRIEDVTAG

SEQ ID NO: 60458 - protein, 190 aa, Homo sapiens
  MOD_RES (1)..(1): Any amino acid
XHESWPPPPATPGAGGLAVRTFVSHFRDRAVAGHLTRAVEPLRTFSVLEPGGPGGCAARRRATVEETARAADCRVAQNGGFFRMNSGECLGNVVSDERRVSSSGGLQNAQFGIRRDGTLVTGYLSEEEVLDTENPFVQLLSGVVWLIRNGSIYINESQATECDETQETARTTCGAVPAKCPPWCVCTNPA

SEQ ID NO: 60459 - protein, 94 aa, Homo sapiens
  MOD_RES (1)..(1): Any amino acid
XKHHPSDVLAGFAQGALVACCIVFFVSDLFKTKTTLSLPAPAIRKEILSPVDIIDRNNHHNMILIHGMLSGVHLYWQRSFMTMMLCLLSWKTPT

SEQ ID NO: 60460 - protein, 1451 aa, Homo sapiens
MEPSSPQDEGLRKKQPKKPVPEILPRPPRALFCLTLENPLRKACISIVEWKPFETIILLTIFANCVALAVYLPMPEDDNNSLNLGLEKLEYFFLIVFSIEAAMKIIAYGFLFHQDAYLRSGWNVLDFTIVFLGVFTVILEQVNVIQSHTAPMSSKGAGLDVKALRAFRVLRPLRLVSGVPSLQVVLNSIFKAMLPLFHIALLVLFMVIIYAIIGLELFKGKMHKTCYFIGTDIVATVENEEPSPCARTGSGRRCTINGSECRGGWPGPNHGITHFDNFGFSMLTVYQCITMEGWTDVLYWVNDAIGNEWPWIYFVTLILLGSFFILNLVLGVLSGEFTKEREKAKSRGTFQKLREKQQLDEDLRGYMSWITQGEVMDVEDFREGKLSLDEGGSDTESLYEIAGLNKIIQFIRHWRQWNRIFRWKCHDIVKSKVFYWLVILIVALNTLSIASEHHNQPLWLTRLQDIANRVLLSLFTTEMLMKMYGLGLRQYFMSIFNRFDCFVVCSGILEILLVESGAMTPLGISVLRCIRLLRIFKITKYWTSLSNLVASLLNSIRSIASLLLLLFLFIVIFALLGMQLFGGRYDFEDTEVRRSNFDNFPQALISVFQVLTGEDWTSMMYNGIMAYGGPSYPGMLVCIYFIILFVCGNYILLNVFLAIAVDNLAEAESLTSAQKAKAEEKKRRKMSKGLPDKSEEEKSTMAKKLEQKPKGEGIPTTAKLKIDEFESNVNEVKDPYPSADFPGDDEEDEPEIPLSPRPRPLAELQLKEKAVPIPEASSFFIFSPTNKIRVLCHRIVNATWFTNFILLFILLSSAALAAEDPIRADSMRNQILKHFDIGFTSVFTVEIVLKMTTYGAFLHKGSFCRNYFNMLDLLVVAVSLISMGLESSAISVVKILRVLRVLRPLRAINRAKGLKHVVQCMFVAISTIGNIVLVTTLLQFMFACIGVQLFKGKFFRCTDLSKMTEEECRGYYYVYKDGDPMQIELRHREWVHSDFHFDNVLSAMMSLFTVSTFEGWPQLLYKAIDSNAEDVGPIYNNRVEMAIFFIIYIILIAFFMMNIFVGFVIVTFQEQGETEYKNCELDKNQRQCVQYALKARPLRCYIPKNPYQYQVWYIVTSSYFEYLMFALIMLNTICLGMQHYNQSEQMNHISDILNVAFTIIFTLEMILKLMAFKARGYFGDPWNVFDFLIVIGSIIDVILSEIDTFLASSGGLYCLGGGCGNVDPDESARISSAFFRLFRVMRLIKLLSRAEGVRTLLWTFIKSFQALPYVALLIVMLFFIYAVIGMQMFGKIALVDGTQINRNNNFQTFPQAVLLLFRCATGEAWQEILLACSYGKLCDPESDYAPGEEYTCGTNFAYYYFISFYMLCAFLVINLFVAVIMDNFDYLTRDWSILGPHHLDEFKAIWAEYDPEAKGRIKHLDVVTLLRRIQPPLGFGKFCPHRVACKDVLVS

SEQ ID NO: 60461 - protein, 61 aa, Homo sapiens
AVGELPEKSKQQEIYQELTRLKAAVGELPEKSKQQEIYQELTQLKAAVGMVWTRVLLPRSL

SEQ ID NO: 60462 - protein, 316 aa, Homo sapiens
VHSPYESTTKCKICEWAFESEPLFLQHMKDTHKPGEMPYVCQKRNVYHCNKCRLQFLFAKDKIEHKLQHHKTFRKPKQLEGLKPGTKVTIRASRGQPRTVPVSSNDTPPSALQEAAPLTSSMDPLPVFLYPPVQRSIQKRAVRKMSVMGRQTCLECSFEIPDFPNHFPTYVHCSLCRYSTCCSRAYANHMINNHVPRKSPKYLALFKNSVSGIKLACTSCTFVTSVGDAMAKHLVFNPSHRSSSILPRGLTWIAHSRHGQTRDRVHDRNVKNMYPPPSFPTNKAATVKSAGATPAEPEELLTPLAPALPSPASTAT

SEQ ID NO: 60463 - protein, 101 aa, Homo sapiens
  MOD_RES (1)..(1): Any amino acid
XRRASGFPALGRGGTVPVGVWGGAGQGREGRSWGEGPRGPGLGRRDLSSADPAVLGATMESRCYGCAVKFTLFKKEGLCEGPLKCFSTAVRIVAGPSVQAA

SEQ ID NO: 60464 - protein, 90 aa, Homo sapiens
  MOD_RES (1)..(1): Any amino acid
XSSLVNGSTFVLQKKGIVRAKRRGTSYLTDIVWWAGTIAMAVGQIGNFLAYTAVPTVLVTPLGALGVPFGQMPKSLQRSVSMMGVLKFTP

SEQ ID NO: 60465 - protein, 95 aa, Homo sapiens
MQIENLKEELAYLKKNHEEEMNALRGQVGGEINVEMDAAPGVDLSRILNEMRDQYEKMAEKNRKDAEDWFFSKTEELNREVATNSELVQSGKSEI

SEQ ID NO: 60466 - protein, 37 aa, Homo sapiens
MISLASVQDKSELDMISTRVMDIKLREAAEGLGEDST

SEQ ID NO: 60467 - protein, 156 aa, Homo sapiens
MSKSESPKEPEQLRKLFIGGLSFETTDESLRSHFEQWGTLTDCVVMRDPNTKRSRGFGFVTYATVEEVDAAMNARPHKVDGRVVEPKRAVSREDSQRPGAHLTVKKIFVGGFGGSRGGGGYGGSGDGYNGFGNDGSNFGGGGSYNDFGNYNNQSSN

SEQ ID NO: 60468 - protein, 162 aa, Homo sapiens
MAAARDPPEVSLREATQRKLRRFSELRGKLVARGEFWDIVAITAADEKQELAYNQQLSEKLKRKELPLGVQYHVFVDPAGAKIGNGGSTLCALQCLEKLYGDKWNSFTILLIHSGHDAIVTLLKHYKRPQDELPCNEYSQPGGDGSYVSVPSPLGKIKSMTK

SEQ ID NO: 60469 - protein, 695 aa, Homo sapiens
MQSTSNHLWLLSDILGQGATANVFRGRHKKTGDLFAIKVFNNISFLRPVDVQMREFEVLKKLNHKNIVKLFAIEEETTTRHKVLIMEFCPCGSLYTVLEEPSNAYGLPESEFLIVLRDVVGGMNHLRENGIVHRDIKPGNIMRVIGEDGQSVYKLTDFGAARELEDDEQFVSLYGTEEYLHPDMYERAVLRKDHQKKYGATVDLWSIGVTFYHAATGSLPFRPFEGPRRNKEVMYKIITGKPSGAISGVQKAENGPIDWSGDMPVSCSLSRGLQVLLTPVLANILEADQEKCWGFDQFFAETSDILHRMVIHVFSLQQMTAHKIYIHSYNTATIFHELVYKQTKIISSNQELIYEGRRLVLEPGRLAQHFPKTTEENPIFVVSREPLNTIGLIYEKISLPKVHPRYDLDGDASMAKAITGVVCYACRIASTLLLYQELMRKGIRWLIYEKLMKINLEAAELGEISDIHTKLLRLSSSQGTIETSLQDIDSRLSPGGSLADAWAHQEGTHPKDRNVEKLQVLLNCMTEIYYQFKKDKAERRLAYNEEQIHKFDKQKLYYHATKAMTHFTDECVKKYEAFLNKSEEWIRKMLHLRKQLLSLTNQCFDIEEEVSKYQEYTNELQETLPQKMFTASSGIKHTMTPIYPSSNTLVEMTLGMKKLKEEMEGVVKELAENNHILERFGSLTMDGGLRNVDCL

SEQ ID NO: 60470 - protein, 187 aa, Homo sapiens
MEFFSSCSFTRSRKICMPITMEEHDIETTHGVVHVTIRGLPKGNRPVILTYHDIGLNHKSCFNAFFNFEDMQEITQHFAVCHVDAPGQQEGAPSFPTGYQYPTMDELAEMLPPVLTHLSLKSIIGIGVGAGAYILSRFALNHPELVEGLVLINVDPCAKGWIDWAASKLSGLTTNVVDIILAHHFGQ

SEQ ID NO: 60471 - protein, 134 aa, Homo sapiens
MACTQAGERTAIYCLTQNEWRLDEATDSFFQNPDSLHRESMRNAVDKKKLERLYGRYKDPQDENKIGVDGIQQFCDDLSLDPASISVLVIAWKFRAATQCEFSRKEFLDGMTELGCDSMEKLKALLPRLEQELK

SEQ ID NO: 60472 - protein, 381 aa, Homo sapiens
MGTFCSVIKFENLQELKRLCHWGPIIALGVIAICSTMAMIDSVLWYWPLHTTGGSVNFIMLINWTVMILYNYFNAMFVGPGFVPLGWKPEISQDTMYLQYCKVCQAYKAPRSHHCRKCNRCVMKMDHHCPWINNCCGYQNHASFTLFLLLAPLGCIHAAFIFVMTMYTQLYHRLSFGWNTVKIDMSAARRDPLPIVPFGLAAFATTLFALGLALGTTIAVGMLFFIQMKIILRNKTSIESWIEEKAKDRIQYYQLDEVFVFPYDMGSRWRNFKQVFTWSGVPEGDGLEWPVREGCHQYSLTIEQLKQKADKRVRSVRYKVIEDYSGACCPLNKGIKTFFTSPCTEEPRIQLQKGEFILATRGLRYWLYGDKILDDSFIEVL

SEQ ID NO: 60473 - protein, 64 aa, Homo sapiens
  MOD_RES (1)..(1): Any amino acid
XGGMNHLRENGIVHRDIKPGNIMRVIGEDGQSVYKLTDFGAARELEDDEQFVSLYGTEEYLILF

SEQ ID NO: 60474 - protein, 101 aa, Homo sapiens
  MOD_RES (1)..(1): Any amino acid
XVDECALGTHNCSEAETCHNIQGSFRCLRFECPPNYVQVSKTKCERTKWKLARWATAVAGALWVRLGDDLRTRDTRPCWGSWTPLDDPSPKLTFHFMFHCD

SEQ ID NO: 60475 - protein, 111 aa, Homo sapiens
MSFVECPYHSPAERLVAEADEGGPSAITEILKELDECYERFSRETDGAQKRRMLHCVQRALIRSQELGDEKIQIVSQMVELVENRTRQVDSHVELFEAQQELGDTAGNSGK

SEQ ID NO: 60476 - protein, 159 aa, Homo sapiens
MAEELVLERCDLELETNGRDHHTADLCREKLVVRRGQPFWLTLHFEGRNYEASVDSLTFSVVTGPAPSQEAGTKARFPLRDAVEEGDWTATVVDQQDCTLSLQLTTPANAPIGLYRLSLEASTGYQGSSFVLGHFILLFNAWCPADAVYLDSEEERQEY

SEQ ID NO: 60477 - protein, 387 aa, Homo sapiens
MTVKTEAAKGTLTYSRMRGMVAILIAFMKQRRMGLNDFIQKIANNSYACKHPEVQSILKISQPQEPELMNANPSPPPSPSQQINLGPSSNPHAKPSDFHFLKVIGKGSFGKVLLARHKAEEVFYAVKVLQKKAILKKKELFYHLQRERCFLEPRARFYAAEIASALGYLHSLNIVYRDLKPENILLDSQGHIVLTDFGLCKENIEHNSTTSTFCGTPEYLAPEVLHKQPYDRTVDWWCLGAVLYEMLYGLPPFYSRNTAEMYDNILNKPLQLKPNITNSARHLLEGLLQKDRTKRLGAKDDFMEIKSHVFFSLINWDDLINKKITPPFNPNVSGPNDLRHFDPEFTEEPVPNSIGKSPDSVLVTASVKEAAEAFLGFSYAPPTDSFL

SEQ ID NO: 60478 - protein, 1481 aa, Homo sapiens
MEKLHGHVSAHPDILSLENRCLAMLPDLQPLEKLHQHVSTHSDILSLKNQCLATLPDLKTMEKPHGYVSAHPDILSLENQCLATLSDLKTMEKPHGHVSAHPDILSLENRCLATLSSLKSTVSASPLFQSLQISHMTQADLYRVNNSNCLLSEPPSWRAQHFSKGLDLSTCPIALKSISATETAQEATLGRWFDSEEKKGAETQMPSYSLSLGEEEEVEDLAVKLTSGDSESHPEPTDHVLQEKKMALLSLLCSTLVSEVNMNNTSDPTLAAIFEICRELALLEPEFILKASLYARQQLNVRNVANNILAIAAFLPACRPHLRRYFCAIVQLPSDWIQVAELYQSLAEGDKNKLVPLPACLRTAMTDKFAQFDEYQLAKYNPRKHRAKRHPRRPPRSPGMEPPFSHRCFPRYIGFLREEQRKFEKAGDTVSEKKNPPRFTLKKLVQRLHIHKPAQHVQALLGYRYPSNLQLFSRSRLPGPWDSSRAGKRMKLSRPETWERELSLRGNKASVWEELIENGKLPFMAMLRNLCNLLRVGISSRHHELILQRLQHAKSVIHSRQFPFRFLNAHDAIDALEAQLRNQALPFPSNITLMRRILTRNEKNRPRRRFLCHLSRQQLRMAMRIPVLYEQLKREKLRVHKARQWKYDGEMLNRYRQALETAVNLSVKHSLPLLPGRTVLVYLTDANADRLCPKSNPQGPPLNYALLLIGMMITRAEQVDVVLCGGDTLKTAVLKAEEGILKTAIKLQAQVQEFDENDGWSLNTFGKYLLSLAGQRVPVDRVILLGQSMDDGMINVAKQLYWQRVNSKCLFVGILLRRVQYLSTDLNPNDVTLSGCTDAILKFIAEHGASHLLEHVGQMDKIFKIPPPPGKTGVQSLRPLEEDTPSPLAPVSQQGWRSIRLFISSTFRDMHGERDLLLRSVLPALQARAAPHRISLHGIDLRWGVTEEETRRNRQLEVCLGEVENAQLFVGILGSRYGYIPPSYNLPDHPHFHWAQQYPSGRSVTEMEVMQFLNRNQRLQPSAQALIYFRDSSFLSSVPDAWKSDFVSESEEAARRISELKSYLSRQKGITCRRYPCEWGGVAAGRPYVGGLEEFGQLVLQDVWNMIQKLYLQPGALLEQPVSIPDDDLVQATFQQLQKPPSPARPRLLQDTVQRLMLPHGRLSLVTGQSGQGKTAFLASLVSALQAPDGAKVASLVFFHFSGARPDQGLALTLLRRLCTYLRGQLKEPGALPSTYRSLVWELQQRLLPKSAESLHPGQTQVLIIDGADRLVDQNGQLISDWIPKKLPRCVHLVLSVSSDAGLGETLEQSQGAHVLALGPLEASARARLVREELALYGKRLEESPFNNQMRLLLVKRESGRPLYLRLVTDHLRLFTLYEQVSERLRTLPATVPLLLQHILSTLEKEHGPDVLPQALTALEVTRSGLTVDQLHGVLSVWRTLPKGTKSWEEAVAAGNSGDPYPMGPFACLVQSLRSSALEDM

SEQ ID NO: 60479 - protein, 135 aa, Homo sapiens
MDSDDEMVEEAVEGHLDDDGLPHGFCTVTYSSTDRFEGNFVHGEKNGRGKFFFFDGSTLEGYYVDDALQGQGVYTYEDGGVLQGTYVDGELNGPAQEYDTDGRLIFKGQYKDNIRHGVCWIYYPVSRVTVHSAGK

SEQ ID NO: 60480 - protein, 850 aa, Homo sapiens
MGLLQLLAFSFLALCRARVRAQEPEFSYGCAEGSCYPATGDLLIGRAQKLSVTSTCGLHKPEPYCIVSHLQEDKKCFICNSQDPYHETLNPDSHLIENVVTTFAPNRLKIWWQSENGVENVTIQLDLEAEFHFTHLIMTFKTFRPAAMLIERSSDFGKTWGVYRYFAYDCEASFPGISTGPMKKVDDIICDSRYSDIEPSTEGEVIFRALDPAFKIEDPYSPRIQNLLKITNLRIKFVKLHTLGDNLLDSRMEIREKYYYAVYDMVVRGNCFCYGHASECAPVDGFNEEVEGMVHGHCMCRHNTKGLNCELCMDFYHDLPWRPAEGRNSNACKKCNCNEHSISCHFDMAVYLATGNVSGGVCDDCQHNTMGRNCEQCKPFYYQHPERDIRDPNFCERCTCDPAGSQNEGICDSYTDFSTGLIAGQCRCKLNVEGEHCDVCKEGFYDLSSEDPFGCKSCACNPLGTIPGGNPCDSETGHCYCKRLVTGQHCDQCLPEHWGLSNDLDGCRPCDCDLGGALNNSCFAESGQCSCRPHMIGRQCNEVEPGYYFATLDHYLYEAEEANLGPGVSIVERQYIQDRIPSWTGAGFVRVPEGAYLEFFIDNIPYSMEYDILIRYEPQLPDHWEKAVITVQRPGRIPTSSRCGNTIPDDDNQVVSLSPGSRYVVLPRPVCFEKGTNYTVRLELPQYTSSDSDVESPYTLIDSLVLMPYCKSLDIFTVGGSGDGVVTNSAWETFQRYRCLENSRSVVKTPMTDVCRNIIFSISALLHQTGLACECDPQGSLSSVCDPNGGQCQCRPNVVGRTCNRCAPGTFGFGPSGCKRRFLKSIVMHSFRLTQPLWQGSIAAEPMLPS

SEQ ID NO: 60481 - protein, 611 aa, Homo sapiens
MFRCGGLAAGALKQKLVPLVRTVCVRSPRQRNRLPGNLFQRWHVPLELQMTRQMASSGASGGKIDNSVLVLIVGLSTVGAGAYAYKTMKEDEKRYNERISGLGLTPEQKQKKAALSEGEEVPQDKAPSHVPFLLIGGGTAAFAAARSIRARDPGARVLIVSEDPELPYMRPPLSKELWFSDDPNVTKTLRFKQWNGKERSIYFQPPSFYVSAQDLPHIENGGVAVLTGKKVVQLDVRDNMVKLNDGSQITYEKCLIATGGTPRSLSAIDRAGAEVKSRTTLFRKIGDFRSLEKISREVKSITIIGGGFLGSELACALGRKARALGTEVIQLFPEKGNMGKILPEYLSNWTMEKVRREGVKVMPNAIVQSVGVSSGKLLIKLKDGRKVETDHIVAAVGLEPNVELAKTGGLEIDSDFGGFRVNAELQARSNIWVAGDAACFYDIKLGRRRVEHHDHAVVSGRLAGENMTGAAKPYWHQSMFWSDLGPDVGYEAIGLVDSSLPTVGVFAKATAQDNPKSATEQSGTGIRSESETESEASEITIPPSTPAVPQAPVQGEDYGKGVIFYLRDKVVVGIVLWNIFNRMPIARKIIKDGEQHEDLNEVAKLFNIHED

SEQ ID NO: 60482 - protein, 150 aa, Homo sapiens
MTRWSSYLLGWTTFLLYSYESSGDYPRCIFPFIYRGKAYNSCISQGSFLGSLWCSVTSVFDEKQQWKFCETNEYGGNSLRKPCIFPSIYRNNVVSDCMEDESNKLWCPTTENMDKDGKWSFCADTRISALVPGFPCHFPFNYKNKNYFNC

SEQ ID NO: 60483 - protein, 507 aa, Homo sapiens
MATCIWLRSCGARRLGSTFPGCRLRPRAGGLVPASGPAPGPAQLRCYAGRLAGLSAALLRTDSFVGGRWLPAAATFPVQDPASGAALGMVADCGVREARAAVRAAYEAFCRWREVSAKGKPLKEAHGEILYSAFFLEWFSEEARRVYGDIIHTPAKDRRALVLKQPIGVAAVITPWNFPSAMITRKVGAALAAGCTVVVKPAEDTPFSALALAELASQAGIPSGVYNVIPCSRKNAKEVGEAICTDPLVSKISFTGSTTTGKILLHHAANSVKRVSMELGGLAPFIVFDSANVDQAVAGAMASKFRNTGQTCVCSNQFLVQRGIHDAFVKAFAEAMKKNLRVGNGFEEGTTQGPLINEKAVEKVEKQVNDAVSKGATVVTGGKRHQLGKNFFEPTLLCNVTQDMLCTHEETFGPLAPVIKFDTEEEAIAIANAADVGLAGYFYSQDPAQIWRVAEQLEVGMVGVNEGLISSVECPFGGVKQSGLGREGSKYGIDEYLELKYVCYGGL

SEQ ID NO: 60484 - protein, 197 aa, Homo sapiens
LCFASLALVRRYLHHLLLWVESLDSLLGVLLFVVGFIVVSFPCGWGYIVLNVAAGYLYGFVLGMGLMMVGVLIGTFIAHVVCKRLLTAWVAARIQSSEKLSAVIRVVEGGSGLKVVALARLTPIPFGLQNAVFSIIISIGLMFYVVHRAQVELNAAIVACEMELKSSLVKGNQPNTSGSSFYNKRTLTFSGGGINVV

SEQ ID NO: 60485 - protein, 121 aa, Homo sapiens
MTTPNKTPPGADPKQLERTGTVREIGSQAVWSLSSCKPGFGVDQLRDDNLETYWQSDGSQPHLVNIQFRRKTTVKTLCIYADYKSDESYTPSKISVRVGNNFHNLQEIRFCRDGVLPCCLG

SEQ ID NO: 60486 - protein, 165 aa, Homo sapiens
MPTTIEREFEELDTQRRWQPLYLEIRNESHDYPHRVAKFPENRNRNRYRDVSPYDHSRVKLQNAENDYINASLVDIEEAQRSYILTQGPLPNTCCHFWLMVWQQKTKAVVMLNRIVEKESVKCAQYWPTDDQEMLFKETGFSVKLLSEDVKSYYTVHLLQLENIN

SEQ ID NO: 60487 - protein, 52 aa, Homo sapiens
MSATSVDTQRTKGQDNKVQNGSLHQKDTVHDNDFEPYLTGQSNQERQSRNKQ

SEQ ID NO: 60488 - protein, 17 aa, Homo sapiens
MRLLGPSQEREIPPLLG

SEQ ID NO: 60489 - protein, 114 aa, Homo sapiens [sequence omitted]

SEQ ID NO: 60490 - protein, 641 aa, Homo sapiens
MLHEKATKKTKEKETRMALPQGCLTFRDVAIEFSLEEWKCLNPAQRALYRAVMLENYRNLESVDSSLKSMTEFSSTGHGNTGEVIHTGTLQRHKSHHIGDFCFPEIKKDIHDFEFQWQEIKRNGHEAPMTKIKKLTGSTDRRDQRHAGNKPIKDQLGSSFYSHLPELHEFQTEGKIDNQVEKSINNASLVSTSQRISCRLKTHISNRYGKNFLHSSLLTQIQEEHMREKPFQCNECGKAFNYSSHLRRHHVTHSGEKQYKCDVCGKVFHQKQYLAWHHRVHTGEKPYKCNECSKTFGHKSSLTRHHRLHTGEKPYKCNECGKTFSQTSSLVGHRRRHTGEKPYKCEGCDKVYSCRSQLETHRRIHTGEKPYKCKVCDKAFRHNSCLSRHNRVHTEEKPYTCNECGKVFQRDSYLAQHQRVHTGEKPYTCNECGKVFNQKAHLACHYRLHTGEKPYKCNECGKTFSQKSSLVGHRRLHTGEKPYNCHECGKTFARNSSLLIHKAIHTGEKPYKCNECGKVFNQQSNLAQHQRVHTGEKPYRCNECGKTFSHMSSFVYHYRLHSGEKPYKCNECGKTFSHMSSFVCHHRLHTGENPYKCNECGKAFSGQSSLIHHQAIHGIGKLYKCNDSHKVLSNATSIANH

SEQ ID NO: 60491 - protein, 391 aa, Homo sapiens
MGTKGKVIKCKAAIAWEAGKPLCIEEVEVAPPKAHEVRIQIIATSLCHTDATVIDSKFEGLAFPVIVGHEAAGIVESIGPGVTNVKPGDKVIPLYAPLCRKCKFCLSPLTNLCGKISNLKSPASDQQLMEDKTSRFTCKGKPVYHFFGTSTFSQYTVVSDINLAKIDDDANLERVCLLGCGFSTGYGAAINNAKVTPGSTCAVFGLGGVGLSAVMGCKAAGASRIIGIDINSEKFVKAKALGATDCLNPRDLHKPIQEVIIELTKGGVDFALDCAGGSETMKAALDCTTAGWGSCTFIGVAAGSKGLTIFPEELIIGRTINGTFFGGWKSVDSIPKLVTDYKNKKFNLDALVTHTLPFDKISEAFDLMNQGKSVRTILIFRCQEQFRILSD

SEQ ID NO: 60492 - protein, 38 aa, Homo sapiens
MLGFPPGRPQLPVQLRPQTRMATALRDPASAVQWKKRL

SEQ ID NO: 60493 - protein, 206 aa, Homo sapiens
MVHHSGSIQSFKQQKGMNISKSEITKETSLKPSRRSLPCLAQSYAYSKSLSQSTSLFQSTESESQAPTSITLISTDKAEQVNTEENKNDSVLRCSFADLSDFCLALGKDKDYTDESEHATYDRSRLINDFVIKDKSEFKTKLSKNDMNYIASSGPLFKDGKKRIDYILVYRKTNIQYDKRNTFEKNLRAEGLMLEKEVGALLLLVM

SEQ ID NO: 60494 - protein, 252 aa, Homo sapiens
  MOD_RES (1)..(1): Any amino acid
XMPSKGSVTLSEIRLPLKADFVCSTVQKPDAANYYYLIILKAGAENMVATPLASTSNSLNGDALTFTTTFTLQDVSNDFEINIEVYSLVQKKDPSGLDKKKKTSKSKAITPKRLLTSITTKSNIHSSVMASPGGLSAVRTSNFALVGSYTLSLSSVGNTKFVLDKINYDVRERELLGYLFQEKVPFLSSLEGHIYLKIKCQVNSSVEERGFLTIFEDVSGFGAWHRRWCVLSGNCISYWTYPDDEKRKNPIG

SEQ ID NO: 60495 - protein, 268 aa, Homo sapiens
GRGRGRRPAAAEAQGQSPPLPEAHAAADREVQPALRGHPGGANGHADLRDATGIENLGWKTNKGKKRRRDPDSKSGEVDATSDQEESVAWALAPAVPQSPLKNELRRKYLTQVDILLQGAEYFECAGNRAGRDVRVTPLPSLASPAVPAPGYCSRISRKSPGDPAKPASSPREWDPLHPSSTDMALVPRNDSLSLQETSSSSFLSSQPFEDDDICNVTISDLYAGMLHSMSRLLSTKPSSIISTKTFIMQNWNSRRRHRYKSRMNKTY

SEQ ID NO: 60496 - protein, 402 aa, Homo sapiens
MAAPVVAPPGVVVSRANKRSGAGPGGSGGGGARGAEEEPPPPLQAVLVADSFDRRFFPISKDQPRVLLPLANVALIDYTLEFLTATGVQETFVFCCWKAAQIKEHLLKSKWCRPTSLNVVRIITSELYRSLGDVLRDVDAKALVRSDFLLVYGDVISNINITRALEEHRLRRKLEKNVSVMTMIFKESSPSHPTRCHEDNVVVAVDSTTNRVLHFQKTQGLRRFAFPLSLFQGSSDGVEVRYDLLDCHISICSPQVAQLFTDNFDYQTRDDFVRGLLVNEEILGNQIHMHVTAKEYGARVSNLHMYSAVCADVIRRWVYPLTPEANFTDSTTQSCTHSRHNIYRGPEVSLGHGSILEENVLLGSGTVIGSNCFITNSVIGPGCHIGLCSAVGTLSYPEVFPS

SEQ ID NO: 60497 - protein, 88 aa, Homo sapiens
MAPVKISHVVSFSSQDPKYPVENLLNPDSPRRPWLGCPQDKSGQLKVELQLERAVPTGYIDVGNCGCAFLQIDVGHSSWPLDRPFITL

SEQ ID NO: 60498 - protein, 175 aa, Homo sapiens
  MOD_RES (1)..(1): Any amino acid
XEAQRKLAPSPRCSAVRSWPHCAQGEGCHPTSCSSSSEIMSVLFFYIMRYKQSDPENPDNDRFVLAKRLSFVDVATGWLGQGLGVACGMAYTGKYFDRASYRVFCLMSDGESSEGSVWEAMAFASYYSLDNLVAIFDVNRLGHSGALPAEHCINIYQRRCEAFGWNTYVVDGRDV

SEQ ID NO: 60499 - protein, 28 aa, Homo sapiens
  MOD_RES (1)..(1): Any amino acid
XGTVDIVPSVGFDTGLQHQDKSKESPWY

SEQ ID NO: 60500 - protein, 254 aa, Homo sapiens
MESRKDITNQEEIWKMKPRRNLEDNDYLHEDTGETSMLKRPVLLHLQQTAHADEFDCPSELQHAQELFPQWHLPIKIAAVMASLTFLYTLLREVIHPLATSHQQYFYKIPILVINKVLPMVSITLLALVYLPGVIAAIVQVHNGTKYKKFPHWLDKWMLTRKQFGLLSLFFAVLHAIYTLSYAMRRSYRYKLLNWAYQQVQQNKEDAWIEHDVWRMEIYVSLGIVGLAILALLAVTSIPSVSDSLTWREFHYIQ

SEQ ID NO: 60501 - protein, 223 aa, Homo sapiens
MCVCLNKEVTCKREKCPVLSRDCALAIKQRGACCEQCKGCTYEGNTYNSSFKWQSPAEPCVLRQCQEGVVTESGVRCVVHCKNPLEHLGMCCPTCPGCVFEGVQYQEGEEFQPEGSKCTKCSCTVRGKCLTSLLGAASFEVMFMTMDPHFCTITAQLVPAGTLLWFARGSAPTLVAVTKARRAVVKSASYECPQKTSKYANLATRFSRMERCGPLSIVPSVLV

SEQ ID NO: 60502 - protein, 154 aa, Homo sapiens
  MOD_RES (1)..(1): Any amino acid
XRIERLCNPSLSELPAFLVAEGGLNSGFMIAHCTAAALVSENKALCHPSSVDSLSTSAATEDHVSMGGWAARKALRVIEHVEQVLAIELLAACQGIEFLRPLKTTTPLEKVYDLVRSVVRPWIKDRFMAPDIEAAHRLLLEQKASWLLGLFLNF

SEQ ID NO: 60503 - protein, 104 aa, Homo sapiens
MVTQLRYESFCLHQFQEQDGESIPENQELASKQEILKEMEHLGDSKLQRDVSLDSKYRETCKRDSKAEKQQAHSTGERRHRCNECGKSFTKSSVLIEHQRIHTG

SEQ ID NO: 60504 - protein, 235 aa, Homo sapiens
MVRPVRHKKPVNYSQFDHSDSDDDFVSATVPLNKKSRTAPKELKQDKPKPNLNNLRKEEIPVQEKTPKKRMALDDKLYQRDLEVALALSVKELPTVTTNVQNSQDKSIEKHGSSKIETMNKSPHISNCSVASDYLDLDKITVEDDVGGVQGKRKAASKAAAQQRKILLEGSDGDSANDTEPDFAPGEDSEDDSDFCESEDNDEDFSMRKSKVKEIKKKEVKRHLEVAEVAAAHWW

SEQ ID NO: 60505 - protein, 263 aa, Homo sapiens
MNCEREQLRGNQEAAAAPDTMAQPYASAQFAPPQNGIPAEYTAPHPHPAPEYTGQTTVPEHTLNLYPPAQTHSEQSPADTSAQTVSGTATQTDDAAPTDGQPQTQPSENTENKSQPKRLHVSNIPFRFRDPDLRQMFGQFGKILDVEIIFNERGSKGFGFVTFENSADADRAREKLHGTVVEGRKIEVNNATARVMTNKKTVNPYTNGWKLNPVVGAVYSPEFYAGTVLLCQANQEGSSMYSAPSSLVYTSAMPGFPYPAATA

SEQ ID NO: 60506 - protein, 418 aa, Homo sapiens
MQLPRWWELGDPCAWTGQGRGTRRMSPATTGTFLLTVYSIFSKVHSDRNVYPSAGVLFVHVLEREYFKGEFPPYPKPGEISNDPITFNTNLMGYPDRPGWLRYIQRTPYSDGVLYGSPTAENVGKPTIIEITAYNRRTFETARHNLIINIMSAEDFPLPYQAEFFIKNMNVEEMLASEVLGDFLGAVKNVWQPERLNAINITSALDRGGRVPLPINDLKEGVYVMVGADVPFSSCLREVENPQNQLRCSQEMEPVITCDKKFRTQFYIDWCKISLVDKTKQVSTYQEVIRGEGILPDGGEYKPPSDSLKSRDYYTDFLITLAVPSAVALVLFLILAYIMCCRREGVEKRNMQTPDIQLVHHSAIQKSTKELRDMSKNREIAWPLSTLPVFHPVTGEIIPPLHTDNYDSTNMPLMQTQQ

SEQ ID NO: 60507 - protein, 198 aa, Homo sapiens
MLTCLVLSGVAQPVAFGQGQQFLPVHPQNPGFVQNPSGALPKAYPDNHLSQVDVNELFSKLLKTGILKLSQTDSATTQVSEVTAQPPPEEEEDQNEDQDVPDLTNFTVEELKQRYDSVINRLYTGIQCYSCGMRFTTSQTDVYADHLDWHYRQNRTEKDVSRKVTHRRWYYSLTDWIEFEEIADLEERAKSQFFEKVH

SEQ ID NO: 60508 - protein, 517 aa, Homo sapiens
LLSSQYVERHFSREGTTQHSTGAGDHCYYQGKLRGNPHSFAALSTCQGLHGVFSDGNLTYIVEPQEVAGPWGAPQGPLPHLIYRTPLLPDPLGCREPGCLFAVPAQSAPPNRPRLRRKRQVRRGHPTVHSETKYVELIVINDHQLFEQMRQSVVLTSNFAKSVVNLADVIYKEQLNTRIVLVAMETWADGDKIQVQDDLLETLARLMVYRREGLPEPSDATHLFSGRTFQSTSSGAAYVGGICSLSHGGGVNEYGNMGAMAVTLAQTLGQNLGMMWNKHRSSAGDCKCPDIWLGCIMEDTGFYLPRKFSRCSIDEYNQFLQEGGGSCLFNKPLKLLDPPECGNGFVEAGEECDCGSVQECSRAGGNCCKKCTLTHDAMCSDGLCCRRCKYEPRGVSCREAVNECDIAETCTGDSSQCPPNLHKLDGYYCDHEQGRCYGGRCKTRDRQCQVLWGHAAADRFCYEKLNVEGTERGSCGRKGSGWVQCSKQPQQGRAVWLPPLCQHLWSSSARGPGGRHQ

SEQ ID NO: 60509 - protein, 145 aa, Homo sapiens
MGILSVDLLITLQILPVFFSNCLFLALYDSVILLKHVVLLLSRSKSTRGEWRRMLTSEGLRCVWKSFLLDAYKQLNCPPSGFSKDGHILLVYEAYKSRLLVYSHLDLWMTDSVVLTLNFPRQISLCFGKNSAAELYIVSKKEKVP

SEQ ID NO: 60510 - protein, 178 aa, Homo sapiens
MATRVRTASIWVPPLQERNSSWDRIRKLQGQESILGQGTPGLQPLPGTPRQKQKSRRIEKVLEWLFISQEQPKITKSWEWQLLDPAQKCLYRSVMLENYSNLVSLGYQHTKPDIIFKLEQGEELCMVQAQVPNQTCPILKAGKSKAKVLAGLVSGEGLLCASKMTPCCCILWRHSLEN

SEQ ID NO: 60511 - protein, 45 aa, Homo sapiens
MAAGFGRCCRVLRSISRFHWRSQHTKANRQREPGLGFSFVSSPPN

SEQ ID NO: 60512 - protein, 71 aa, Homo sapiens
LTLDNRLDSQGVLSTPYFPSYYSPQTHCSWHLTVPSLDYGLALWFDAYALRRQKYDLPCTQGQWTIQNRRV

SEQ ID NO: 60513 - protein, 165 aa, Homo sapiens
MENRALDPGTRDSYGATSHLPNKGALAKVKNNFKDLMSKLTEGQYVLCRWTDGLYYLGKIKRVSSSKQSCLVTFEDNSKYWVLWKDIQHAGVPGEEPKCNICLGKTSGPLNEILICGKCGLGYHQQCHIPIAGSADQPLLTPWFCRRCIFALAVRKGGALKKGAI

SEQ ID NO: 60514 - protein, 354 aa, Homo sapiens
KTGSLQLICKSEPNTDQLDYDVGEEHQSPGGISSEEEEEEEEEMLISEEEIPFKDDPRDETYKPHLERETPKPRRKSGKVKEEKEKKEIKVEVEVEVKEEENEIREDEEPPRKRGRRRKDDKSPRLPKRRKKPPIQYVRCEMEGCGTVLAHPRYLQHHIKYQHLLKKKYVCPHPSCGRLFRLQKQLLRHAKHHTDQRDYICEYCARAFKSSHNLAVHRMIHTGEKPLQCEICGFTCRQKASLNWHMKKHDADSFYQFSCNICGKKFEKKDSVVAHKAKSHPEVLIAEALAANAGALITSTDILGTNPESLTQPSDGQGLPLLPEPLGNSTSGECLLLEAEGMSKSYCSGTERLS

SEQ ID NO: 60515 - protein, 44 aa, Homo sapiens
MSSQKGNVARSRPQKHQNTFSFKNDKFDKSVQTKSLSANSSHDV

SEQ ID NO: 60516 - protein, 233 aa, Homo sapiens
MGKAKVPASKRAPSSPVAKPGPVKTLTRKKNKKKKRFWKSKAREVSKKPASGPGAVVRPPKAPEDFSQNWKALQEVPRWTGGRQYLAPRPVEQSTIRKEPRKGQMVILFQNEGTSSIRSGKLRRQPQPHPPREELEVVQKEVAEMLKGRILVGHALHNDLKVLFLDHPKKKIRDTQKYKPFKSQVKSGRPSLRLLSEKILGLQVQQAEHCSIQDAQAAMRLYVMVKKEWESMA

SEQ ID NO: 60517 - protein, 1399 aa, Homo sapiens
MGLLQLLAFSFLALCRARVRAQEPEFSYGCAEGSCYPATGDLLIGRAQKLSVTSTCGLHKPEPYCIVSHLQEDKKCFICNSQDPYHETLNPDSHLIENVVTTFAPNRLKIWWQSENGVENVTIQLDLEAEFHFTHLIMTFKTFRPAAMLIERSSDFGKTWGVYRYFAYDCEASFPGISTGPMKKVDDIICDSRYSDIEPSTEGEVIFRALDPAFKIEDPYSPRIQNLLKITNLRIKFVKLHTLGDNLLDSRMEIREKYYYAVYDMVVRGNCFCYGHASECAPVDGFNEEVEGMVHGHCMCRHNTKGLNCELCMDFYHDLPWRPAEGRNSNACKKCNCNEHSISCHFDMAVYLATGNVSGGVCDDCQHNTMGRNCEQCKPFYYQHPERDIRDPNFCERCTCDPAGSQNEGICDSYTDFSTGLIAGQCRCKLNVEGEHCDVCKEGFYDLSSEDPFGCKSCACNPLGTIPGGNPCDSETGHCYCKRLVTGQHCDQCLPEHWGLSNDLDGCRPCDCDLGGALNNSCFAESGQCSCRPHMIGRQCNEVEPGYYFATLDHYLYEAEEANLGPGVSIVERQYIQDRIPSWTGAGFVRVPEGAYLEFFIDNIPYSMEYDILIRYEPQLPDHWEKAVITVQRPGRIPTSSRCGNTIPDDDNQVVSLSPGSRYVVLPRPVCFEKGTNYTVRLELPQYTSSDSDVESPYTLIDSLVLMPYCKSLDIFTVGGSGDGVVTNSAWETFQRYRCLENSRSVVKTPMTDVCRNIIFSISALLHQTGLACECDPQGSLSSVCDPNGGQCQCRPNVVGRTCNRCAPGTFGFGPSGCKPCECHLQGSVNAFCNPVTGQCHCFQGVYARQCDRCLPGHWGFPSCQPCQCNGHADDCDPVTGECLNCQDYTMGHNCERCLAGYYGDPIIGSGDHCRPCPCPDGPDSGRQFARSCYQDPVTLQLACVCDPGYIGSRCDDCASGYFGNPSEVGGSCQPCQCHNNIDTTDPEACDKETGRCLKCLYHTEGEHCQFCRFGYYGDALQQDCRKCVCNYLGTVQEHCNGSDCQCDKATGQCLCLPNVIGQNCDRCAPNTWQLASGTGCDPCNCNAAHSFGPSCNEFTGQCQCMPGFGGRTCSECQELFWGDPDVECRACDCDPRGIETPQCDQSTGQCVCVEGVEGPRCDKCTRGYSGVFPDCTPCHQCFALWDVIIAELTNRTHRFLEKAKALKISGVIGPYRETVDSVERKVSEIKDILAQSPAAEPLKNIGNLFEEAEKLIKDVTEMMAQVEVKLSDTTSQSNSTAKELDSLQTEAESLDNTVKELAEQLEFIKNSDIRGALDSITKYFQMSLEAEERVNASTTEPNSTVEQSALMRDRVEDVMMERESQFKEKQEEQARLLDELAGKLQSLDLSAAAEMHPC

SEQ ID NO: 60518 - protein, 789 aa, Homo sapiens
MDSTLTASEIRQRFIDFFKRNEHTYVHSSATIPLDDPTLLFANAGMNQFKPIFLNTIDPSHPMAKLSRAANTQKCIRAGGKHNDLDDVGKDVYHHTFFEMLGSWSFGDYFKELACKMALELLTQEFGIPIERLYVTYFGGDEAAGLEADLECKQIWQNLGLDDTKILPGNMKDNFWEMGDTGPCGPCSEIHYDRIGGRDAAHLVNQDDPNVLEIWNLVFIQYNREADGILKPLPKKSIDTGMGLERLVSVLQNKMSNYDTDLFVPYFEAIQKGTGARPYTGKVGAEDADGIDMAYRVLADHARTITVALADGGRPDNTGRGYVLRRILRRAVRYAHEKLNASRGFFATLVDVVVQSLGDAFPELKKDPDMVKDIINEEEVQFLKTLSRGRRILDRKIQSLGDSKTIPGDTAWLLYDTYGFPVDLTGLIAEEKGLVVDMDGFEEERKLAQLKSQGKGAGGEDLIMLDIYAIEELRARGLEVTDDSPKYNYHLDSSGSYVFENTVATVMALRREKMFVEEVSTGQECGVVLDKTCFYAEQGGQIYDEGYLVKVDDSSEDKTEFTVKNAQVRGGYVLHIGTIYGDLKVGDQVWLFIDEPRRRPIMSNHTATHILNFALRSVLGEADQKGSLVAPDRLRFDFTAKGAMSTQQIKKAEEIANEMIEAAKAVYTQDCPLAAAKAIQGLRAVFDETYPDPVRVVSIGVPVSELLDDPSGPAGSLTSAPAELESCRSFCDRDGRSHCQGYPEDCGCHRCRGPEGPQESRELEEMSLCHGSQSEGSDCSKQGCAEGDR

SEQ ID NO: 60519 - protein, 300 aa, Homo sapiens
MPVRKQDTQRALHLLEEYRSKLSQTEDRQLRSSIERVINIFQSNLFQALIDIQEFYEVTLLDNPKCIDRSKPSEPIQPVNTWEISSLPSSTVTSETLPSSLSPSVEKYRYQDEDTPPQEHISPQITNEVIGPELVHVSEKNLSEIENVHGFVSHSHISPIKANPPPVLVNTDSLETPTYVNGTDADYEYEEITLERGNSGLGFSIAGGTDNPHIGDDSSIFITKIITGGAAAQDGRLRVNDCILRVNEVDVRDVTHSKAVEALKEAGSIVRLYVKRRKPVSEKIMEIKLIKGPKGMWSWV

SEQ ID NO: 60520 - protein, 96 aa, Homo sapiens
MSSVAVLTQESFAEHRSGLVPQQIKVATLNSEEESDPPTYKDAFPPLPEKAACLESAQEPAGAWGNKIRPIKASVITQVFHVPLEERKYKDMNQFG

SEQ ID NO: 60521 - protein, 121 aa, Homo sapiens
MALAGLAMGCIDTVANMQLVRMYQKDSAVFLQVLHFFVGFGALLSPLIADPFLSEANCLPANSTANTTSRGHLFHVSRVLGQHHVDAKPWSNQTFPGLTPKDGAGTRVSYAFWIMALINLP

SEQ ID NO: 60522 - protein, 160 aa, Homo sapiens
MAPAASRLRAEAGLGALPRRALAQYLLFLRLYPVLTKAATSGILSALGNFLAQMIEKKRKKENSRSLDVGGPLRYAVYGSGCSSPTWQLCSGMPTWPPWGSDDRWENIRCTVDVGLGVSPAQREQNQSSQDVTDSKSGDSRCPKMMDRETEISECQNPVF

SEQ ID NO: 60523 - protein, 227 aa, Homo sapiens
MAPKKRPETQKTSEIVLRPRNKRSRSPLELEPEAKKLCAKGSGPSRRCDSDCLWVGLAGPQILPPCRSIVRTLHQHKLGRASWPSVQQGLQQSFLHTLDSYRILQKAAPFDRRATSLAWHPTHPSTVAVGSKGGDIMLWNFGIKDKPTFIKGIGAGGSITGLKFNPLNTNQFYASSMEGTTRLQDFKGNILRVFASSDTINIWFCSLDVSASSRMVVTGDNVGNVIL

SEQ ID NO: 60524 - protein, 342 aa, Homo sapiens
MSGRSGKKKMSKLSRSARAGVIFPVGRLMRYLKKGTFKYRISVGAPVYMAAVIEYLAAEILELAGNAARDNKKARIAPRHILLAVANDEELNQLLKGVTIASGGVLPRIHPELLAKKRGTKGKSETILSPPPEKRGRKATSGKKGGKKSKAAKPRTSKKSKPKDSDKEGTSNSTSEDGPGDGFTILSSKSLVLGQKLSLTQSDISHIGSMRVEGIVHPTTAEIDLKEDIAAVSQSSGLAAKFVIHCHIPQWGSDKCEEQLEETIKNCLSAAEDKKLKSVAFPPFPSGRNCFPKQTAAQVTLKAISAHFDDSSASSLKNVYFLLFDSESIGIYVQEMAKLDAK

SEQ ID NO: 60525 - protein, 178 aa, Homo sapiens
FIGIFLIDGVTGRIIHSSVQKKAKGPVHIVHSENWVVYQYWNTKARRNEFTVLELYEGTEQYNATAFSSLDRPQLPQVLQQSYIFPSSISAMEATITERGITSRHLLSFAGSPPPRDPNRTKQMYRYTQSDSSTITRQFLECEVSTQLPRVWSPLVWLWPMVWTFTKLESTHPSSLTF

SEQ ID NO: 60526 - protein, 580 aa, Homo sapiens
  MOD_RES (1)..(1): Any amino acid
XKVKKKGEWKVLVVDQLSMRMLSSCCKMTDIMTEGITIVEDINKRREPLPSLEAVYLITPSEKSVHSLISDFKDPPTAKYRAAHVFFTDSCPDALFNELVKSRAAKVIKTLTEINIAFLPYESQVYSLDSADSFQSFYSPHKAQMKNPILERLAEQIATLCATLKEYPAVRYRGEYKDNALLAQLIQDKLDAYKADDPTMGEGPDKARSQLLILDRGFDPSSPVLHELTFQAMSYDLLPIENDVYKYETSGIGEARVKEVLLDEDDDLWIALRHKHIAEVSQEVTRSLKDFSSSKRMNTGEKTTMRDLSQMLKKMPQYQKELSKYSTHLHLAEDCMKHYQGTVDKLCRVEQDLAMGTDAEGEKIKDPMRAIVPILLDANVSTYDKIRIILLYIFLKNGITEENLNKLIQHAQIPPEDSEIITNMAHLGVPIVTDSTLRRRSKPERKERISEQTYQLSRWTPIIKDIMEDTIEDKLDTKHYPYISTRSSASFSTTAVSARYGHWHKNKAPGEYRSGPRLIIFILGGVSLNEMRCAYEVTQANGKWEVLIAPVIKLSAPCLHMYCMNVVLLTFLLPPNFSWT

SEQ ID NO: 60527 - protein, 16 aa, Homo sapiens
GEEDTAVAGHELPQYQ

SEQ ID NO: 60528 - protein, 118 aa, Homo sapiens
MEGLLHYINPAHAISLLSALNEERLKGQLCDVLLIVGDQKFRAHKNVLAASSEYFQSLFTNKENESQTVFQLDFCEPDAFDNVLNYIYSSSLFVEKSSLAAVQELGYSLGISFLTNIV

SEQ ID NO: 60529 - protein, 110 aa, Homo sapiens
CPSDVLPEQEGVCLPLSRHTVDMLQCLRFPGLAPPHTRAPSPLGPTRDPVATFLETCREPGSQPAGPASLRAEYLPPSVASIKVSAELLRAALKDGHSVMFFKPIYGSVT

SEQ ID NO: 60530 - protein, 834 aa, Homo sapiens
MPAFLGLKCLGKLCSSEKSKVTSSERTSARGSNRKRLIVEDRRVSGTSFTAHRRATITHLLYLCPKDYCPRGRVCNSVDPFVAHPQDPHHPSEKPVIHCHKCGEPCKGEVLRVQTKHFHIKCFTCKVCGCDLAQGGFFIKNGEYLCTLDYQRMYGTRCHGCGEFVEGEVVTALGKTYHPNCFACTICKRPFPPGDRVTFNGRDCLCQLCAQPMSSSPKETTFSSNCAGCGRDIKNGQALLALDKQWHLGCFKCKSCGKVLTGEYISKDGAPYCEKDYQGLFGVKCEACHQFITGKVLEAGDKHYHPSCARCSRCNQMFTEGEEMYLQGSTVWHPDCKQSTKTEEKLRLLSPPCLVNFNKNPRQPTRTSSESIYSRPGSSIPGSPGHTIYAKVDNEILDYKDLAAIPKVKAIYDIERPDLITYEPFYTSGYDDKQERQSLGESPRTLSPTPSAEGYQDVRDRMIHRSTSQGSINSPVYSRHSYTPTTSRSPQHFHRPELLSPGVQRLSYLRTSSLSPTHSDSRPNPPFRHHFIPHIKGNEPSSGRNSPLPYRPDSRPLTPTYAQAPKHFHVPDQGINIYRKPPIYKQHAALAAQSKSSEDIIKFSKFPAAQAPDPSETPKIETDHWPGPPSFAVVGPDMKRRSSGREEDDEELLRRRQLQEEQLMKLNSGLGQLILKEEMEKESRERSSLLASRYDSPINSASHIPSSKTASLPGYGRNGLHRPVSTDFAQYNSYGDVSGGVRDYQTLPDGHMPAMRMDRGVSMPNMLEPKIFPYEMLMVTNRGRNKILREVDRTRLERHLAPEVFREIFGMSIQEFDRLPLWRRNDMKKKAKLF

SEQ ID NO: 60531 - protein, 97 aa, Homo sapiens
MGDGKAVRISVAEMKSYYLYSEWCSWLLSVAEDEIMHQDIVPLCAADIQDQLKKRFAYLSGGRGQDGSPVITFPDYPAFSEIPDKEFQNVMTYLTSI

SEQ ID NO: 60532 - protein, 282 aa, Homo sapiens
LKRKVAEQEERQGMKVQALARENEVLKVQLKKYVGAVQMLKREGQTAEVPNLWSVDGEVTVAEQKPGEIAEELASSYERKLIEVAEMHGELIEFNERLHRALVAKEALVSQMRQELIDLRGPVPGDLSQTSEDQSLSDFEISNRALINVWIPSVFLRGKAANAFHVYQVYIRIKDDEWNIYRRYTEFRSLHHKLQNKYPQVRAYNFPPKKAIGNKDAKFVEERRKQLQNYLRSVMNKVIQMVPEFAASPKKETLIQLMPFFVDWISLFGNGRDSSREEFSSS

SEQ ID NO: 60533 - protein, 192 aa, Homo sapiens
  MOD_RES (1)..(1): Any amino acid
XLQRLLRGPLWRDRQQLRLIPGPGQGLGLLWQQEPLLPWGQPKPGAQRCCTAGRRPPGRLRGHRLRQRRAGAQVSLRVPTRGHPSGHRQQEPPGPAQRGDGPRDPEGARPGAGADQGAKQQVRLLHRQDRVLFLVLEIQVRFLEQQNQVLETKWNLLQQLDLNNCRKNLEPIYEGYISNLQKQLEMLSGDGV

SEQ ID NO: 60534 - protein, 1002 aa, Homo sapiens
MRVHPRPHSRLAAKLAGLEPETPYPGFEFSELVTGATGTGDLTRKEPTELGASEMADEALAGLDEGALRKLLEVTADLAERRRIRSAIRELQRQELEREEEALASKRFRAERQDNKENWLHSQQREAEQRAALARLAGQLESMNDVEELTALLRSAGEYEERKLIRAAIRRVRAQEIEAATLAGRLYSGRPNSGSREDSKGLAAHRLEQCEVPEREEQEQQAEVSKPTPTPEGTSQDVTTVTLLLRAPPGSTSSSPASPSSSPTPASPEPPLEPAEAQCLTAEVPGSPEPPPSPPKTTSPEPQESPTLPSTEGQVVNKLLSGPKETPAAQSPTRGPSDTKRADVAGPRPCQRSLSVLSPRQPAQNRESTPLASGPSSFQRAGSVRDRVHKFTSDSPMAARLQDGTPQAALSPLTPARLLGPSLTSTTPASSSSGSSSRGPSDTSSRFSKEQRGVAQPLAQLRSCPQEEGPRGRGLAARPLENRAGGPVARSEEPGAPLPVAVGTAEPGGSMKTTFTIEIKDGRGQASTGRVLLPTGNQRAELTLGLRAPPTLLSTSSGGKSTITRVNSPGTLARLGSVTHVTSFSHAPPSSRGGCSIKAAEDAGTPVAHPPAFSTRRRSSTGTTRSTSLMEAEPAEPLAAAVEAANGAEQTRVNKAPEGRSPLSAEELMTIEDEGVLDKMLDQSTDFEERKLIRAALRELRQRKRDQRDKERERRLQEARGRPGEGRGNTATETTTRHSQRAADGSAVSTVTKTERLVHSNDGTRTARTTTVESSFVRRSENGSGSTMMQTKTFSSSSSSKKMGSIFDREDQASPRAGSLAALEKRQAEKKKELMKAQSLPKTSASQARKAMIEKLEKEGAAGSPGGPRAAVQRSTSFGVPNANSIKQMLLDWCRAKTRGYEHVDIQNFSSSWSDGMAFCALVHNFFPEAFDYGQLSPQNRRQNFEVAFSSAEMLVDCVPLVEVDDMMIMGKKPDPKCVFTYVQSLYNHLRRHELRLRGKNV

SEQ ID NO: 60535 - protein, 37 aa, Homo sapiens
MAQSINITELNLPQLEMLKNQLDQTEFRSVAQAGAQW

SEQ ID NO: 60536 - protein, 274 aa, Homo sapiens
MHSPGADGTQVSPGAHYCSPTGAGCPRPCADTPGPQPQPMDLRVGQRPPVEPPPEPTLLALQRPQRLHHHLFLAGLQQQRSVEPMRLSMDTPMPELQVGPQEQELRQLLHKDKSKRSAVASSVVKQKLAEVILKKQQAALERTVHPNSPGIPYSLPSDPPEHFPLRKTVSEPNLKLRYKPKKSLERRKNPLLRKESAPPSLRRRPAETLGDSSPSSSSTPASGCSSPNDSEHGPNPILGSEADSDRRTHPTLGPRGPILGSPHTPLFLPHGLEP

SEQ ID NO: 60537 - protein, 294 aa, Homo sapiens
MRPEGSLTYWVPERLRQGFCGVGRAAQALVCASAKEGTAFRMEAVQEGAAGVESEQAALGEEAVLLLDDIMAEVEVVAEEEGLVERREEAQRAQQAVPGPGPMTPESALEELLAVQVELEPVNAQARKAFSRQREKMERRRKPHLDRRGAVIQSVPGFWANVIANHPQMSALITDEDEDMLSYMVSLEVEEEKHPVHLCKIMLFFRSNPYFQNKVITKEYLVNITEYRASHSTPIEWYLDYEVEAYRRRHHNSSLNFFNWFSDHNFAGSNKIAESPDRSYVRTCGAIPCNTTRG

SEQ ID NO: 60538 - protein, 213 aa, Homo sapiens
MLGSRAAGFARGLRAVALAWLPGWRGRSFALARAAGAPHGGDLQPPACPEPRGRQLSLSAAAVVDSAPRPLQPYLRLMRLDKPIGTWLLYLPCTWSIGLAAEPGCFPDWYMLSLFGTGAILMRGAGCTINDMWDQDYDKKVTRTANRPIAAGDISTFQSFVFLGGQLTLALGVLLCLNYYSIALGAGSLLLVITYPLMKRISYWPQLALGQKR

SEQ ID NO: 60539 - protein, 141 aa, Homo sapiens
  MOD_RES (1)..(1): Any amino acid
XTSVPPAQVQENQQSIDSEDSFVPGRRASLSDLTDLEDIEGLTVRQLKEILARNFVNYKGCCEKWELMERVTRLYKDQKGLQHLVSGAEDQNGGAVPSGLEENLCKICMDSPIDCVLLECGHMVTCTKCGKRMNECPICRQ

SEQ ID NO: 60540 - protein, 136 aa, Homo sapiens
MNPFWSMSTSSVRKRSEGEEKTLTGDVKTSPPRTAPKKQLPSIPKNALPITKPTSPAPAAQSTNGTHASYGPFYLEYSLLAEFTLVVKQKLPGVYVQPSYRSALMWFGVIFIRHGLYQDGVFKFTVYIPDNYPDGD

SEQ ID NO: 60541 - protein, 652 aa, Homo sapiens
  MOD_RES (1)..(1): Any amino acid
XSEKLKERPSSREDTPSRLSRMGATPTPFKSTGDIAGTVVPETNKEPRYQEDPPAPQPKAAPRTFLRPSPEDEAIYGPNTKMVRFKKGDSVGLRLAGGNDVGIFVAGIQEGTSAEQEGLQEGDQILKVNTQDFRGLVREDAVLYLLEIPKGEMVTILAQSRADVYRDILACGRGDSFFIRSHFECEKETPQSLAFTRGEVFRVVDTLYDGKLGNWLAVRIGNELEKGLIPNKSRAEQMASVQNAQRDNAGDRADFWRMRGQRSGVKKNLRKSREDLTAVVSVSTKFPAYERVLLREAGFKRPVVLFGPIADIAMEKLANELPDWFQTAKTEPKDAGSEKSTGVVRLNTVRQIIEQDKHALLDVTPKAVDLLNYTQWFPIVIFFNPDSRQGVKTMRQRLNPTSNKSSRKLFDQANKLKKTCAHLFTATINLNSANDSWFGSLKDTIQHQQGEAVWVSEGKAKTQNKEESYDFSKSYEYKSNPSAVAGNETPGASTKGYPPPVAAKPTFGRSILKPSTPIPPQEGEEVGESSEEQDNAPKSVLGKVKIFEKMDHKARLQRMQELQEAQNARIEIAQKHPDIYAVPIKTHKPDPGTPQHTSSRPPEPQKAPSRPYQDTRGSYGSDAEEEEYRQQLSEHSKRGYYGQSARYRDTEL

SEQ ID NO: 60542 - protein, 381 aa, Homo sapiens
FSSHSKLITPAPSSLPHSRRALSPEMHAVTSEWISLTVGVPGRRSLALTPPLPPLPEASIYNTDHLALSPRASPSLSLSLPHLSWSDRPTPRSVASPLALPSPHKTYSLAPTSQASLHMNGDGGVHTPSSGIHQDSFLQLPLGSSDSVISQLSDAFSSQSKRQPWREESGQYERKAERGAGERGPGGPKISKKSCLKPSDVVRCLSTEQRLSDLNTPEESRPGKPLGSAFPGSEAEQTERHRGGEQAGRKAARRGGSQEAVCNEIINIAEKSVHYCSTVSHPLDFHHKVSPSDNKSSLIISQQPQAQQRRVTPDRSQTSQDLFSYQALYSYIPQNDDELELRDGDIVDVMEKCDDGWFVGTSRRTKQFGTFPGNYVKPLYL

SEQ ID NO: 60543 - protein, 198 aa, Homo sapiens
MANVTWPQGPFTTWSTPGDAPVINLSRLLPLKYVELRIYDRLQRILRVRTVTEKIYYLKLHEKHPEIVFQFWVRLVKILQKGLSITTKDPRIKFTHCLVPKMPTNSTETTTEPCPVTQAGVQWRDLGSLQLPPPKFKRFLCLSLQSSWDYSLKTASCHPPSPASPSCCWRLSRPVAVSHSSQESPSSQQTGTMTLPLK

SEQ ID NO: 60544 - protein, 393 aa, Homo sapiens
  MOD_RES (1)..(1): Any amino acid
XEKDILTAIAADLCKSEFNVYSQEVITVLGEIDFMLENLPEWVTAKPVKKNVLTMLDEAYIQPQPLGVVLIIGAWNYPFVLTIQPLIGAIAAGNAVIIKPSELSENTAKILAKLLPQYLDQDLYIVINGGVEETTELLKQRFDHIFYTGNTAVGKIVMEAAAKHLTPVTLELGGKSPCYIDKDCDLDIVCRRITWGKYMNCGQTCIAPDYILCEASLQNQIVWKIKETVKEFYGENIKESPDYERIINLRHFKRILSLLEGQKIAFGGETDEATRYIAPTVLTDVDPKTKVMQEEIFGPILPIVPVKNVDEAINFINEREKPLALYVFSHNHKLIKRMIDETSSGGVTGNDVIMHFTLNSFPFGGVGSEQRLCLAAHRLGCEEPLCLATPSGK

SEQ ID NO: 60545 - protein, 146 aa, Homo sapiens
MSWVEAAGVSSTALEDRIVAKHEEVPEVSVQYEEKFQNHHKLPSQLSSFSWDNCDEGKDPAVIRSLTLEPDPIIVPGNVTLSVMGSTSVPLSSPLKVDLVLEKEVAGLWIKIPCTDYIGSCTFEHFCDVLDMLIPTGEPCPEPLRT

SEQ ID NO: 60546 - protein, 121 aa, Homo sapiens
MGFSSELCSPQGHGVLQQMQEAELRLLEGMRKWMAQRVKSDREYAGLLHHMSLQDSGGQSRAISPDSPISQVGLYGTLVGAGCICLLLPLLGALWGSGWRSGRPMLGSHCAPLPASPICAV

SEQ ID NO: 60547 - protein, 123 aa, Homo sapiens
PAACTGAHERTFLAVKPDGVQRRLVGEIVRRFERKGFKLVALKLVQVGARPPRSCCVSTTPSCVNARSTAALSSIWPPGRWWPWYGRGWTWCAPRGRSSEPRTRPTPRPAPSAGISASRLART

SEQ ID NO: 60548 - protein, 652 aa, Homo sapiens
  MOD_RES (1)..(1): Any amino acid
XTPILTVLICLGLSLGPRTHVQAGHLPKPTLWAEPGSVITQGSPVTLRCQGGQETQEYRLYREKKTALWITRIPQELVKKGQFPIPSITWEHAGRYRCYYGSDTAGRSESSDPLELVVTGAYIKPTLSAQPSPVVNSGGNVILQCDSQVAFDGFSLCKEGEDEHPQCLNSQPHARGSSRAIFSVGPVSPSRRWWYRCYAYDSNSPYEWSLPSDLLELLVLGVSKKPSLSVQPGPIVAPEETLTLQCGSDAGYNRFVLYKDGERDFLQLAGAQPQAGLSQANFTLGPVSRSYGGQYRCYGAHNLSSEWSAPSDPLDILIAGQFYDRVSLSVQPGPTVASGENVTLLCQSQGWMQTFLLTKEGAADDPWRLRSTYQSQKYQAEFPMGPVTSAHAGTYRCYGSQSSKPYLLTHPSDPLELVVSGPSGGPSSPTTGPTSTSAGPEDQPLTPTGSDPQSGLGRHLGVVIGILVAVILLLLLLLLLFLILRHRRQGKHWTSTQRKADFQHPAGAVGPEPTDRGLQWRSSPAADAQEENLYAAVKHTQPEDGVEMDTRQSPHDEDPQAVTYAEVKHSRPRREMASPPSPLSGEFLDTKDRQAEEDRQMDTEAAASEAPQDVTYAQLHSLTLRREATEPPPSQEGPSPAVPSIYATLAIH

SEQ ID NO: 60549 - protein, 455 aa, Homo sapiens
MANRELAFKAGDVIKVLDASNKDWWWGQIDDEEGWFPASFVRLWVNQEDEVEEGPSDVQNGHLDPNSDCLCLGRPLQNRDQMRANVINEIMSTERHYIKHLKDICEGYLKQCRKRRDMFSDEQLKVIFGNIEDIYRFQMGFVRDLEKQYNNDDPHLSEIGPCFLEHQDGFWIYSEYCNNHLDACMELSKLMKDSRYQHFFEACRLLQQMIDIAIDGFLLTPVQKICKYPLQLAELLKYTAQDHSDYRYVAAALAVMRNVTQQINERKRRLENIDKIAQWQASVLDWEGEDILDRSSELIYTGEMAWIYQPYGRNQQRVFFLFDHQMVLCKKDLIRRDILYYKGRIDMDKYEVVDIEDGRDDDFNVSMKNAFKLHNKETEEIHLFFAKKLEEKIRWLRAFREERKMVQEDEKIGFEISENQKRQAAMTVRKVPKQKGPTIGHLQAEEQGSQSESQS

SEQ ID NO: 60550 - protein, 139 aa, Homo sapiens
PKPKRPAILTYHDVGLNYKSCFQPLFQFEDMQEIIQNFVRVHVDAPGMEEGAPVFPLGYQYPSLDQLADMIPCVLQYLNFSTIIGVGVGAGAYILARYALNHPDTVEGLVLINIDPNAKGWMDWAAHKLSLGWAAWGLA

SEQ ID NO: 60551 - protein, 69 aa, Homo sapiens
MEVDTEEKRHRTRSKGVRVPVEPAIQELFSCPTPGCDGSGHVSGKYARHRRRPSNELSQYSNNARHRKG

SEQ ID NO: 60552 - protein, 114 aa, Homo sapiens
MCSSVAAKLWFLTDRRIREDYPQKEILRALKAKCCEEELDFRAVVMDEVVLTIEQGNLGLRINGELITAYPQVVVVRVPTPWVQSDSDITVLRHLEKMGCRLMNRPQAILNCVN

SEQ ID NO: 60553 - protein, 83 aa, Homo sapiens
MILSSYAGILMNSIPIEEVFKIYGADSSADSGTIKVPRVSSLCLSLHPFAMLTAPKAAAYARKQSVKSRKVTTNKNATSISAK

SEQ ID NO: 60554 - protein, 254 aa, Homo sapiens
  MOD_RES (1)..(1): Any amino acid
XQKRKKKKMPEILSLRGRQRAHSKLANKPVVQPVEEQEPKGPQASEERNLEPPSSEQLEPTVTFLFTLLNTSEPTEPKDPESDSEIQEYQFLDQEDWGPQRTSKEIRQLQNDCMRLRESLNTTQVHNLALGEKLQNLPTLLYKSLKEGAQAIQEEAQAIQDEVKALQEESQALPEVALLRCAGSHGSGEGRGGCPMLLTRAVSACSDPNPRKAGLLFKLPDLPHDHRDQGQAWPGPRPEVGHLLGRPLLQPAPP

SEQ ID NO: 60555 - protein, 497 aa, Homo sapiens
  MOD_RES (1)..(1): Any amino acid
XLALAFHDGSVHIVHRLSLQTMAVFYSSAAPRPVDEPAMKRPRTAGPAVHLKAMQLSWTSLALVGIDSHGKLSVLRLSPSMGHPLEVGLALRHLLFLLEYCMVTGYDWWDILLHVQPSMVQSLVEKLHEEYTRQTAALQQVLSTRILAMKASLCKLSPCTVTRVCDYHTKLFLIAISSTLKSLLRPHFLNTPDKSPGDRLTEICTKITDVDIDKVMINLKTEEFVLDMNTLQALQQLLQWVGDFVLYLLASLPNQGSLLRPGHSFLRDGTSLGMLRELMVVIRIWGLLKPSCLPVYTATSDTQDSMSLLFRLLTKLWICCRDEGPASEPDEALVDECCLLPSQLLIPSLDWLPASDGLVSRLQPKQPLRLQFGRAPTLPGSAATLQLDGLARAPGQPKIDHLRRLHLGACPTEECKACTRCGCVTMLKSPNRTTAVKQWEQRWIKNCLAVEGRGPDACVTSRASEEAPAFVQLGPQSTHHSPRTPRSLDHLHPKDRP

SEQ ID NO: 60556 - protein, 86 aa, Homo sapiens
MDLVKSHLMYAVREEVEVLKEQIKELIEKNSQLEQENNLLKTLASPEQLAQFQAQLQTGSPPATTQPQGTTQPPAQPASQGSGPTA

SEQ ID NO: 60557 - protein, 579 aa, Homo sapiens
MPQLNGGGGDDLGANDELISFKDEGEQEEKSSENSSAERDLADVKSSLVNESETNQNSSSDSEAERRPPPRSESFRDKSRESLEEAAKRQDGGLFKGPPYPGYPFIMIPDLTSPYLPNGSLSPTARTYLQMKWPLLDVQAGSLQSRQALKDARSPSPAHIVSNKVPVVQHPHHVHPLTPLITYSNEHFTPGNPPPHLPADVDPKTGIPRPPHPPDISPYYPLSPGTVGQIPHPLGWLVPQQGQPVYPITTGGFRHPYPTALTVNASMSRFPPHMVPPHHTLHTTGIPHPAIVTPTVKQESSQSDVGSLHSSKHQDSKKEEEKKKPHIKKPLNAFMLYMKEMRAKVVAECTLKESAAINQILGRRWHALSREEQAKYYELARKERQLHMQLYPGWSARDNYGKKKKRKRDKQPGETNDLSAPKKCRARFGLDQQNNWCGPCRRKKKCVRYIQGEGSCLSPPSSDGSLLDSPPPSPNLLGSPPRDAKSQTEQTQPLSLSLKPDPLAHLSMMPPPPALLLAEATHKASALCPNGALDLPPAALQPAAPSSSIAQPSTSSLHSHSSLAGTQPQPLSLVTKSLE

SEQ ID NO: 60558 - protein, 849 aa, Homo sapiens
MHKHQHCCKCPECYEVTRLAALRRLEPPGYGDWQVPDPYGPGGGNGASAGYGGYSSQTLPSQAGATPTPRTKAKLIPTGRDVGPVPPKPVPGKSTPKLNGSGPSWWPECTCTNRDWYEQARPAPLLVNPETLKHSLSVNGSDGMFKYEEIVLERGNSGLGFSIAGGIDNPHVPDDPGIFITKIIPGGAAAMDGRLGVNDCVLRVNEVDVSEVVHSRAVEALKEAGPVVRLVVRRRQPPPETIMEVNLLKGPKGLGFSIAGGIGNQHIPGDNSIYITKIIEGGAAQKDGRLQIGDRLLAVNNTNLQDVRHEEAVASLKNTSDMVYLKVAKPGSLHLNDMYAPPDYASTFTALADNHISHNSSLGYLGAVESKVSYPAPPQVPPTRYSPIPRHMLAEEDFTREPRKIILHKGSTGLGFNIVGGEDGEGIFVSFILAGGPADLSGELRRGDRILSVNGVNLRNATHEQAAAALKRAGQSVTIVAQYRPEEYSRFESKIHDLREQMMNSSMSSGSGSLRTSEKRSLYVRALFDYDRTRDSCLPSQGLSFSYGDILHVINASDDEWWQARLVTPHGESEQIGVIPSKKRVEKKERARLKTVKFHARTGMIESNRDFPGLSDDYYGAKNLKGVTSNTSDSESSSKGQEDAILSYEPVTRQEIHYARPVIILGPMKDRVNDDLISEFPHKFGSCVPHTTRPRRDNEVDGQDYHFVVSREQMEKDIQDNKFIEAGQFNDNLYGTSIQSVRAVAERGKHCILDVSGNAIKRLQQAQLYPIAIFIKPKSIEALMEMNRRQTYEQANKIYDKAMKLEQEFGEYFTAIVQGDSLEEIYNKIKQIIEDQSGHYIWVPSPEKL

SEQ ID NO: 60559 - protein, 98 aa, Homo sapiens
MKSRIPVVLLACGSFNPITNMHLRMFEVARDHLHQTDFCLSRPLFPRVHFSQHNQGKKKMGKSVHEVVGARLCLCPQKHQASPSKSPRTEVCKREEAN

SEQ ID NO: 60560 - protein, 193 aa, Homo sapiens
MTDQAFVTLTTNDAYAKGALVLGSSLKQHRTTRRLVVLATPQVSDSMRKVLETVFDEVIMVDVLDSGDSAHLTLMKRPELGVTLTKLHCWSLTQYSKCVFMDADTLVLANIDDLFDREELSAAPDPGWPDCFNSGVFVYQPSVETYNQLLHLASEQGLVQVPKLCISWDESNHGIILMIPKQKVSKVRPMIPT

SEQ ID NO: 60561 - protein, 516 aa, Homo sapiens
MAEAVFHAPKRKRRVYETYESPLPIPFGQDHGPLKEFKIFRAEMINNNVIVRNAEDIEQLYGKGYFGKGILSRSRPSFTISDPKLVAKWKDMKTNMPIITSKRYQHSVEWAAELMRRQGQDESTVRRILKDYTKPLEHPPVKRNEEAQVHDKLNSGMVSNMEGTAGGERPSVVNGDSGKSGGVGDPREPLGCLQEGSGCHPTTESFEKSVREDASPLPHVCCCKQDALILQRGLHHEDGSQHIGLLHPGDRGPDHEYVLVEEAECAMSEREAAPNEELVQRNRLICRRNPYRIFEYLQLSLEEAFFLVYALGCLSIYYEKEPLTIVKLWKAFTVVQPTFRTTYMAYHYFRSKGWVPKVGLKYGTDLLLYRKGPPFYHASYSVIIELVDDHFEGSLRRPLSWKSLAALSRVSVNVSKELMLCYLIKPSTMTDKEMESPECMKRIKVQSRSVVQAGVQCCDLGSLQPLPAGFKRFSCLSLLSSWDYRHAPPHTANFCIFSRDGVSLCWPGWSGTPDLK

SEQ ID NO: 60562 - protein, 101 aa, Homo sapiens
MPLEDEVVPPQVLSEPNEEAGAALSPLPEVPPWTGEVSPAQRDGGALGRGPWDSSDRSALLKSKLRALLTAPRSLRRSSCFGGRMDRIGAQSGLGCNSFRY

SEQ ID NO: 60563 - protein, 559 aa, Homo sapiens
MKKQRKNKKRTLKQVCIQSVYISKIISSDRDLLAVVFYGTEKDKNSVNFKNIYVLQELDNPGAKRILELDQFKGQQGQKRFQDMMGHGSDYSLSEVLWVCANLFSDVQFKMSHKRIMLFTNEDNPHGNDSAKASRARTKAGDLRDTGIFLDLMHLKKPGGFDISLFYRDIISIAEDEDLRVHFEESSKLEDLLRKVRAKETRKRALSRLKLKLNKDIVISVGIYNLVQKALKPPPIKLYRETNEPVKTKTRTFNTSTGGLLLPSDTKRSQIYGSRQIILEKEETEELKRFDDPGLMLMGFKPLVLLKKHHYLRPSLFVYPEESLVIGSSTLFSALLIKCLEKEVAALCRYTPRRNIPPYFVALVPQEEELDDQKIQVTPPGFQLVFLPFADDKRKMPFTEKIMATPEQVGKMKAIVEKLRFTYRSDSFENPVLQQHFRNLEALALDLMEPEQAVDLTLPKVEAMNKRLGSLVDEFKELVYPPDYNPEGKVTKRKHDNEGSGSKRPKVEYSEEELKTHISKGTLGKFTVPMLKEACRAYGLKSGLKKQELLEALTKHFQD

SEQ ID NO: 60564 - protein, 360 aa, Homo sapiens
MGYPDRPGWLRYIQRTPYSDGVLYGSPTAENVGKPTIIEITAYNRRTFETARHNLIINIMSAEDFPLPYQAEFFIKNMNVEEMLASEVLGDFLGAVKNVWQPERLNAINITSALDRGGRVPLPINDLKEGVYVMVGADVPFSSCLREVENPQNQLRCSQEMEPVITCDKKFRTQFYIDWCKISLVDKTKQVSTYQEVIRGEGILPDGGEYKPPSDSLKSRDYYTDFLITLAVPSAVALVLFLILAYIMCCRREGVIQLVHHSAIQKSTKELRDMSKNREIAWPLSTLPVFHPVTGEIIPPLHTDNYDSTNMPLMQTQQNLPHQTQIPQQQTTGDFRLTTFQRFEVNGIPEERKLTEAMNL

SEQ ID NO: 60565 - protein, 128 aa, Homo sapiens
  MOD_RES (1)..(1): Any amino acid
XALAAGLRDCVRFLRAFRLRDADVQFLASVLPPDTDPAFFEHLRALDCSEVPLLQVSGPLLVVQLLETPLLCLVSYASLVATNAARLRLIAGPEKRLLEMGLRRAQGPDGGLTASTYSYLGDVGASSW

SEQ ID NO: 60566 - protein, 568 aa, Homo sapiens
MNKLRQSLRRRKPAYVPEASRPHQWQADEDAVRKGTCSFPVRYLGHVEVEESRGMHVCEDAVKKLKAMGRKSVKSVLWVSADGLRVVDDKTKDLLVDQTIEKVSFCAPDRNLDKAFSYICRDGTTRRWICHCFLALKDSGERLSHAVGCAFAACLERKQRREKECGVTAAFDASRTSFAREGSFRLSGGGRPAEREAPDKKKAEAAAAPTVAPGPAQPGHVSPTPATTSPGEKGEAGTPVAAGTTAAAIPRRHAPLEQLVRQGSFRGFPALSQKNSPFKRQLSLRLNELPSTLQRRTDFQVKGTVPEMEPPGAGDSDSINALCTQISSSFASAGAPAPGPPPATTGTSAWGEPSVPPAAAFQPGHKRTPSEAERWLEEVSQVAKAQQQQQQQQQQQQQQQQQQQQAASVAPVPTMPPALQPFPAPVGPFDAAPAQVAVFLPPPHMQPPFVPAYPGLGYPPMPRVPVVGITPSQMVANAFCSAAQLQPQPATLLGKAGAFPPPAIPSAPGSQARPRPNGAPWPPEPAPAPAPELDPFEAQWAALEGKATVEKPSNPFSGDLQKTFEIEL

SEQ ID NO: 60567 - protein, 86 aa, Homo sapiens
MKELSVLSLICSCFYTQPHPNTVYQYGDMEVKQLDKRASGQSFEVILKSPSDLSPESPMLSSPPKKKDTSLEELQKRLEAAEERRK

SEQ ID NO: 60568 - protein, 396 aa, Homo sapiens
MFLLPEGVLIQTPRDTRNNSSCADVLAEEGEVHVALCRGQGGTPADKPQREWHNSWQVVAMAALGGLILSDVYPFSCKAVAGYKCTGYRSQDKSFHVEGALNHIFTRSLPFEGSQPRIFRIKLGNQWFSFPEPEALVGKLNRGFLEAPSCHPIKTINEKLIAELGKVFPLKRLKCSYPLLPQEGTSVLPFWNCDFLSAAFWISLHEDNSNSESLTGGTSQDVEDFLVSFSELSLLKNPGRDGKEEACEGTCGQAKICLRPSLLVHVQDVIEVPDFLSGSLHILSGPVFQKCHILPFTMPAFHETLFILGVNQNLKDGCLQSLLDHLKGILDSLLTQTLPESSKLSSLVKFVLQSNGKDYMIRVKTHNFSPDCTEDLIIGSVITSATSVIHKDQCFV

SEQ ID NO: 60569 - protein, 510 aa, Homo sapiens
MVARVGLLLRALQLLLWGHLDAQPAERGGQELRKEAEAFLEKYGYLNEQVPKAPTSTRFSDAIRAFQWVSQLPVSGVLDRATLRQMTRPRCGVTDTNSYAAWAERISDLFARHRTKMRRKKRFAKQGNKWYKQHLSYRLVNWPEHLPEPAVRGAVRAAFQLWSNVSALEFWEAPATGPADIRLTFFQGDHNDGLGNAFDGPGGALAHAFLPRRGEAHFDQDERWSLSRRRGRNLFVVLAHEIGHTLGLTHSPAPRALMAPYYKRLGRDALLSWDDVLAVQSLYGKPLGGSVAVQLPGKLFTDFETWDSYSPQGRRPETQGPKYCHSSFDAITVGSHFWEVAADGNVSEPRPLQERWVGLPPNIEAAAVSLNDGDFYFFKGGRCWRFRGPKPVWGLPQLCRAGGLPRHPDAALFFPPLRRLILFKGARYYVLARGGLQVEPYYPRSLQDWGGIPEEVSGALPRPDGSIIFFRDDRYWRLDQAKLQATTSGRWATELPWMGCWHANSGSALF

SEQ ID NO: 60570 - protein, 452 aa, Homo sapiens
MNSGILQVFQRELICPICMNYFIDPVTIDCGHSFCRPCFYLNWQDMAVLAQCSKCKKTTRQRNLKTNICLKNMASIARKASLRQFLSSEEQICGTHRETKEMFCEVDKSLLCLLCSNSQEHRNHRHCPTEWAAEERREELLRKMQSLWRKMCENHRNLNMATNRIRCWKDYVSLRIEAIRAEYHKMVAFFHEEEQRHLERLQKEGEDIFQQLNESKARMEHSRELLRGMYEDLRQMCHKAVVELFQSFGDILQRYESLLLQVSEPVNPEFSAGPIIGLMDRLKGFRVYLTLQHARASSHIFLHGDLRSMKVGCDPQHDPNITDKSECFLQWGADFFISGKFYWEFNMGHSWNWAFGVCNNYWKEKRQNDMIDGEVGLFLLGCVKEDTHCSLFTTSPLVMQYVPRPTDTVGLFLDCEGRTVSFVDVDRSSLIYTIPNCSFSPPLWPIICCSHF

SEQ ID NO: 60571 - protein, 729 aa, Homo sapiens
MFPPSGSTGLIPPSHFQARPLSTLPRMAPTWLSDIPLVQPPGHQDVSERRLDTQRPQVTMWERDVSSDRQEPGRRGRSWGLEGSQALSQQAEVIVRQLQELRWLEEEVWLLRETSLQQKMRLEAQAMELEALARAEKAGRAEAEGLRAALAGAEVVRKNLEEGRQRELEEVQRLHQEQLSSLTQAHEEALSSLTSKAEGLEKSLSSLETRRAGEAKELAEAQREAELLRKQLSKTQEDLEAQVTLVENLRKYVGEQVPSEVHSQTWELERQKLLETMQHLQEDRDSLHATAELLQVRVQSLTHILALQEEELTRKVQPSDSLEPEFTRKCQSLLNRWREKVFALMVQLKAQELEHSDSVKQLKGQVASLQEKVTSQSQEQAILQRSLQDKAAEVEVERMGAKGLQLELSRAQEARRWWQQQTASAEEQLRLVVNAVSSCPLPPPVTDVSLELQQLREERNRLDAELQLSARLIQQEVGRAREQGEAERQQLSKVAQQLEQELQQTQESLASLGLQLEVARQCQQESTEEAASLRQELTQQQELYGQALQEKVAEVETRLREQLSDTERRLNEARREHAKAVVSLRQIQRRAAQEKERSQELRRLQEEARKEEGQRLARRLQELERDKNLMLATLQQEGLLSRYKQQRLLTVLPSLLDKKKSVVSSPRPPECSASAPVAAAVPTRESIKGSLSVLLDDLQDLSEAISKEEAVCQGDNLDRCSSCNPQMSS

SEQ ID NO: 60572 - protein, 68 aa, Homo sapiens
MMRVCWLVRQDSRHQRIRLPHLEAVVIGRGPETKITDKKCSRQQGIPGPLESRLEDFYAGPQNAGLQR

SEQ ID NO: 60573 - protein, 451 aa, Homo sapiens
MEMQDLVIELKPEPDAQPQQAPRLGPFSPKEVSSAGRFGGEPHHSPGPMPAGAALLALGPRNPWTLWTPLTPNYPDRQPWTDKHPDLLTCGRCLQTFPLEAITAFMDHKKLGCQLFRGPSRGQGSEREELKALSCLRCGKQFTVAWKLLRHAQWDHGLSIYQTESEAPEAPLLGLAEVAAAVSAVVGPAAEAKSPRASGSGLTRRSPTCPVCKKTLSSFSNLKVHMRSHTGERPYACDQCPYACAQSSKLNRHKKTHRQVPPQSPLMADTSQEQASAAPPEPAVHAAAPTSTLPCSGGEGAGAAATAGVQEPGAPGSGAQAGPGGDTWGAITTEQRTDPANSQKASPKKMPKSGGKSRGPGGSCEFCGKHFTNSSNLTVHRRSHTGERPYTCEFCNYACAQSSKLNRHRRMHGMTPGSTRFECPHCHVPFGLRATLDKHLRQKHPEAAGEA

SEQ ID NO: 60574 - protein, 555 aa, Homo sapiens
MERTGYSMVQENGQRKYGGPPPGWEGPHPQRGCEVFVGKIPRDVYEDELVPVFEAVGRIYELRLMMDFDGKNRGYAFVMYCHKHEAKRAVRELNNYEIRPGRLLGVCCSVDNCRLFIGGIPKMKKREEILEEIAKVTEGVLDVIVYASAADKMKNRGFAFVEYESHRAAAMARRKLMPGRIQLWGHQIAVDWAEPEIDVDEDVMETVKILYVRNLMIETTEDTIKKSFGQFNPGCVERVKKIRDYAFVHFTSREDAVHAMNNLNGTELEGSCLEVTLAKPVDKEQYSRYQKAARGGGAAEAAQQPSYVYSCDPYTLAYYGYPYNALIGPNRDYFVKAGSIRGRGRGAAGNRAPGPRGSYLGGYSAGRGIYSRYHEGKGKQQEKGYELVPNLEIPTVNPVAIKPGTVAIPAIGAQYSMFPAAPAPKMIEDGKIHTVEHMISPIAVQPDPASAAAAAAAAAAAAAAVIPTVSTPPPFQGRPITPVYTVAPNVQRIPTAGIYGASYVPFAAPATATIATLQKNAAAAAAMYGGYAGYIPQAFPAAAIQVPIPDVYQTY

SEQ ID NO: 60575 - protein, 54 aa, Homo sapiens
AEVIDVSYGMADDLKRIRKIKNVTNQIALLKLGKLPLLYKMKVLDKADQTSPLY

SEQ ID NO: 60576 - protein, 113 aa, Homo sapiens
MSVIAGEAVASVRTLDDKQVLQQCMATLRELFKEQEVPDPTKYFVTRWSTDPWIQMAYSFVKTGGSGEAYDIIAEDIQGTVFFAGEATNRHFPQTVTGAYLSGVREASKIAAF

SEQ ID NO: 60577 - protein, 148 aa, Homo sapiens
MAPAQRCPLCRQTFFCGRGHVYSRKHQRQLKEALERLLPQVEAARKAIRAAQVERYVPEHERCCWCLCCGCEVREHLSHGNLTVLYGGLLEHLASPEHKKATNKFWWENKAEVQMKEKFLVTPQDYARLCGSSASFFKLLQISKKIFK

SEQ ID NO: 60578 - protein, 278 aa, Homo sapiens
MAVLIVTENYLEFGLETGFTNFSDSAMQFLEKQGLESQSPVSKLTFKFFLAIFCSFIGAFLTFPGLRLAQMHLDALNLATEKITQTLLHINFLAPLFMVLLWVKPITKDYIMNPPLGKESIPFHLQAYLNLAQKCVDQMKKEAGRISTVELQKMVARVFYYLCVIALQYVAPLVMLLHTTLLLKTLGNHSWGIYPESISTLPVDNSLLSNSVYSELPSAEGKMKVTVTQITVALSSLKNIFTPLLFRGLLSFLTWWIAACLFSTSLFGLFYHQYLTVA

SEQ ID NO: 60579 - protein, 366 aa, Homo sapiens
MSNPSPQVPEEEASTSVCRPKSSMASTSRRQRRERRFRRYLSAGRLVRAQALLQRHPGLDVDAGQPPPLHRACARHDAPALCLLLRLGADPAHQDRHGDTALHAAARQGPDAYTDFFLPLLSRCPSAMGIKNKDGETPGQILGWGPPWDSAEEEEEDDASKEREWRQKLQGDASHETQEPESFSAWSDRLAREHAQKCQQQQREAEGSRRPPRAEGSSQSWRQQEEEQRLFRERARAKEEELRESRARRAQEALGDREPKPTRAGPREEHPRGAGRGSLWRFGDVPWPCPGGGDPEAMAAALVARGPPLEEQGALRRYLRVQQVRWHPDRFLQRFRSQIETWELGRVMGAVTALSQALNRHAEALK

SEQ ID NO: 60580 - protein, 1178 aa, Homo sapiens
MGQDAEDTSEEPPEKEELAGVQEAETATDCPEVLEEGCEEATGVTGGEQVDLSEPPDHEKKTNQEVAAATLEDHAQDESAEESCQIVPFENDCMEDFVTSLTGSPYEFFPTESTSFCSESCSPLSESAKGLESEQAPKLGLRAEENPMVGALCGQCGSLQGGAAEGPAAPDVVVVLEEEALDDALANPYVMGVGLPGQAAPGEGGQAASDALGGYGSKEELNCEAEGGLVPADRKNTSTRVRPHSGKVAGYVPETVPEETGPEAGSSAPGIGGAAEEVGKTLLSLEGKPLEASRALPAKPRAFTLYPRSFSVEGREIPVSVYQEPEGSGLDDHRIKRKEDNLSLSCVIGSSGSFSQRNHLPSSGTSTPSSMVDIPPPFDLACITKKPITKSSPSLLIESDSPDKYKKKKSSFKRFLALTFKKKTENKLHVDVNVSSSRSSSESSYHGPSRILEVDRRSLSNSPQLKSRTGKLRASESPSSLIFYRDGKRKGVPFSRTVSRVESFEDRSRPPFLPLPLTKPRSISFPSADTSDYENIPAMNSDYENIQIPPRRPARAGAFTKLFEDQSRALSTANENDGYVDMSSFNAFESKQQSADQDAESAYTEPYKVCPISSAAPKEDLTSDEEQRSSEEEDSASRDPSVTHKVEGQSRALVIAQELLSSEKAYVEMLQHLNLDFHGAVMRALDDMDHEGRDTLAREELRQGLSELPAIHDLHQGILEELEERLSNWESQQKVADVFLAREQGFDHHATHILQFDRYLGLLSENCLHSPRLAAAVREFEQSVQGGSQTAKHRLLRVVQRLFQYQVLLTDYLNNLCPDSAEYDNTQGALSLISKVTDRANDSMEQGENLQKLVHIEHSVRGQGDLLQPGREFLKEGTLMKVTGKNRRPRHLFLMNDVLLYTYPQKDGKYRLKNTLAVANMKVSRPVMEKVPYALKIETSESCLMLSASSCAERDEWYGCLSRALPEDYKAQALAAFHHSVEIRERLGVSLGERPPTLVPVTHVMMCMNCGCDFSLTLRRHHCHACGKIVCRNCSRNKYPLKYLKDRMAKVCDGCFGELKKRGRAVPGLMRERPVSMSFPLSSPRFSGSAFSSVFQSINPSTFKKQKKVPSALTEDKVALESMPLLGFTIAPEKEEGSSEVGPIFHLYHKKTLFYSFKAEDTNSAQRWIEAMEDASVL

SEQ ID NO: 60581 - protein, 1496 aa, Homo sapiens
MVHVARLLLLLLTFFLRTDAETPPRFTRTPVDQTGVSGGVASFICQATGDPRPKIVWNKKGKKVSNQRFEVIEFDDGSGSVLRIQPLRTPRDEAIYECVASNNVGEISVSTRLTVLREDQIPRGFPTIDMGPQLKVVERTRTATMLCAASGNPDPEITWFKDFLPVDTSNNNGRIKQLRSESIGALQIEQSEESDQGKYECVATNSAGTRYSAPANLYVRELREVRRVPPRFSIPPTNHEIMPGGSVNITCVAVGSPMPYVKWMLGAEDLTPEDDMPIGRNVLELNDVRQSANYTCVAMSTLGVIEAIAQITVKALPKPPGTPVVTESTATSITLTWDSGNPEPVSYYIIQHKPKNSEELYKEIDGVATTRYSVAGLSPYSDYEFRVVAVNNIGRGPPSEPVLTQTSEQAPSSAPRDVQARMLSSTTILVQWKEPEEPNGQIQGYRVYYTMDPTQHVNNWMKHNVADSQITTIGNLVPQKTYSVKVLAFTSIGDGPLSSDIQVITQTGVPGQPLNFKAEPESETSILLSWTPPRSDTIANYELVYKDGEHGEEQRITIEPGTSYRLQGLKPNSLYYFRLAARSPQGLGASTAEISARTMQSTVFAKNFHVKAVMKTSVLLSWEIPENYNSAMPFKILYDDGKMVEEVDGRATQKLIVNLKPEKSYSFVLTNRGNSAGGLQHRVTAKTAPDVLRTKPAFIGKTNLDGMITVQLPEVPANENIKGYYIIIVPLKKSRGKFIKPWESPDEMELDELLKEISRKRRSIRYGREVELKPYIAAHFDVLPTEFTLGDDKHYGGFTNKQLQSGQEYVFFVLAVMEHAESKMYATSPYSDPVVSMDLDPQPITDEEEGLIWVVGPVLAVVFIICIVIAILLYKRKRAESDSRKSSIPNNKEIPSHHPTDPVELRRLNFQTPGMASHPPIPILELADHIERLKANDNLKFSQEYESIDPGQQFTWEHSNLEVNKPKNRYANVIAYDHSRVLLSAIEGIPGSDYVNANYIDGYRKQNAYIATQGSLPETFGDFWRMIWEQRSATVVMMTKLEERSRVKCDQYWPSRGTETHGLVQVTLLDTVELATYCVRTFALYKNGSSEKREVRQFQFTAWPDHGVPEHPTPFLAFLRRVKTCNPPDAGPMVVHCSAGVGRTGCFIVIDAMLERIKHEKTVDIYGHVTLMRAQRNYMVQTEDQYIFIHDALLEAVTCGNTEVPARNLYAYIQKLTQIETGENVTGMELEFKRLASSKAHTSRFISANLPCNKFKNRLVNIMPYESTRVCLQPIRGVEGSDYINASFIDGYRQQKAYIATQGPLAETTEDFWRMLWEHNSTIVVMLTKLREMGREKCHQYWPAERSARYQYFVVDPMAEYNMPQYILREFKVTDARDGQSRTVRQFQFTDWPEQGVPKSGEGFIDFIGQVHKTKEQFGQDGPISVHCSAGVGRTGVFITLSIVLERMRYEGVVDIFQTVKMLRTQRPAMVQTEDQYQFSYRAALEYLGSFDHYAT

SEQ ID NO: 60582 - protein, 72 aa, Homo sapiens
MAARVGAFLKNAWDKEPVLVVSFVVGGLAVILPPLSPYFKYSVMINKATPYNYPVEAGFHRVSQDCLDLLTL

SEQ ID NO: 60583 - protein, 493 aa, Homo sapiens
MARSLSIMFVPNSWLNGYHKVAMNGKARKEAVQTAAKELLKFVNRSPSPFHAVAECRNRLLQAGFSELKETEKWNIKPESKYFMTRNSSTIIAFAVGGQYVPGNGFSLIGAHTDSPCLRVKRRSRRSQVGFQQVGVETYGGGIWSTWFDRDLTLAGRVIVKCPTSGRLEQQLVHVERPILRIPHLAIHLQRNINENFGPNTEMHLVPILATAIQEELEKGTPEPGPLNAVDERHHSVLMSLLCAHLGLSPKDIVEMELCLADTQPAVLGGAYDEFIFAPRLDNLHSCFCALQALIDSCAGPGSLATEPHVRMVTLYDNEEVGSESAQGAQSLLTELVLRRISASCQHPTAFEEAIPKSFMISADMAHAVHPNYLDKHEENHRPLFHKGPVIKVNSKQRYASNAVSEALIREVANKVKVPLQDLMVRNDTPCGTTIGPILASRLGLRVLDLGSPQLAMHSIREMACTTGVLQTLTLFKGFFELFPSLSHNLLVD

SEQ ID NO: 60584 - protein, 41 aa, Homo sapiens
MKLPARVFFTLGSRLPCGLAPRREDGCFESYRRTNFFSNWK

SEQ ID NO: 60585 - protein, 252 aa, Homo sapiens
MAAFGRQVLDWHRLIPLTWACMARQTPHLGEQRRTTASLLRKLTTASNGGVIEELSCVRSNNYVQEPECRRNLVQCLLEKQGTPVVQGSLELERVMSSLLDMGFSNAHINELLSVRRGASLQQLLDIISEFILLGLNPEPVCVVLKKSPQLLKLPIMQMRKRSSYLQKLGLGEGKLKRVLYCCPEIFTMRQQDINDTVRLLKEKCLFTVQQVTKILHSCPSVLREDLGQLEYKFQVRMTDSVISVVSGENDW

SEQ ID NO: 60586 - protein, 194 aa, Homo sapiens
MSNNGADLTFGYISCFVAILLFGSNFVPLKKFDTGDGMFLQWVLCAAIWLVALVVNLILHCPKFWPFAMLGGCIWATGNIAVVPIIKTIGLGLGILIWGSFNALTGWASSRFGWFGLDAEEVSNPLLNYIGAGLSVVSAFIFLFIKSEIPNNTCSMDTTPLITEHGLQSCSDIWSTLWIYICANHLHQGPQQKK

SEQ ID NO: 60587 - protein, 301 aa, Homo sapiens
MLGLWGQRLPAAWVLLLLPFLPLLLLAAPAPHRESYKPVIVVHGLFDSSYSFRHLLEYINETHPGTVVTVLDLFDGRESLRPLWEQVQGFREAVVPIMAKAPQGVHLICYSQGGLVCRALLSVMDDHNVDSFISLSSPQMGQYGDTDYLKWLFPTSMRSNLYRICYSPWGQEFSICNYWHDPHHDDLYLNASSFLALINGERDHPNATVWRKNFLRVGHLVLIGGPDDGVITPWQSSFFGFYDANETVLEMEEQLPARPTHQSELLLLRLVCLKPPRRKKPACRVQRQSESWGPGLSCALS

SEQ ID NO: 60588 - protein, 84 aa, Homo sapiens
MPPMPSAPPVHPPPDGGWGWIVVGAAFISIGFSYAFPKAVTVFFKEIQQIFHTTYSEIAWISSIMLAVMYAGGKKEKRNASFTL

SEQ ID NO: 60589 - protein, 36 aa, Homo sapiens
MAARRALHFVFKVGNRFQTARFYRDVLGMKALTTPG

SEQ ID NO: 60590 - protein, 56 aa, Homo sapiens
MLAKLLCDQVVGAPIAVSAFYAGMSILQGKDDIFLDLKQKFWNTYMQTQSWLWRSL

SEQ ID NO: 60591 - protein, 144 aa, Homo sapiens
MKYWSCCRRKTSDFNTFLAQEGCTKGKHMWTKKDAGKKVVPCRHDWHQTGGEVTISVYAKNSLPELSRVEANSTLLNVHIVFEGEKEFDQNVKLWGVIDVKRSYVTMTATKIEITMRKAEPMQWASLELPAAKKQEKQKDATTD

SEQ ID NO: 60592 - protein, 497 aa, Homo sapiens
MGLEALVPLAVIVAIFLLLVDLMHRRQRWAARYPPGPLPLPGLGNLLHVDFQNTPYCFDQLRRRFGDVFSLQLAWTPVVVLNGLAAVREALVTHGEDTADRPPVPITQILGFGPRSQGVFLARYGPAWREQRRFSVSTLRNLGLGKKSLEQWVTEEAACLCAAFANHSGRPFRPNGLLDKAVSNVIASLTCGRRFEYDDPRFLRLLDLAQEGLKEESGFLREVLNAVPVLLHIPALAGKVLRFQKAFLTQLDELLTEHRMTWDPAQPPRDLTEAFLAEMEKAKGNPESSFNDENLCIVVADLFSAGMVTTSTTLAWGLLLMILHPDVQRRVQQEIDDVIGQVRRPEMGDQAHMPYTTAVIHEVQRFGDIVPLGVTHMTSRDIEVQGFRIPKGTTLITNLSSVLKDEAVWEKPFRFHPEHFLDAQGHFVKPEAFLPFSAGRRACLGEPLARMELFLFFTSLLQHFSFSVPTGQPRPSHHGVFAFLVTPSPYELCAVPR

SEQ ID NO: 60593 - protein, 115 aa, Homo sapiens
MASLLFFCGAFYLLGTGSMDADVTQTPRNRITKTGKRIMLECSQTKGHDRMYWYRQDPGLGLRLIYYSFDVKDINKGEISDGYSVSRQAQAKFSLSLESAIPNQTALYFCATSDL

SEQ ID NO: 60594 - protein, 76 aa, Homo sapiens
MSQDGASQFQEVIRQELELSVKKELEKILTTASSHEFEHTKKDLDGFRKLFHRFLQEKGPSVDWGKIQRPPEDSAG

SEQ ID NO: 60595 - protein, 266 aa, Homo sapiens
MASRRMETKPVITCLKTLLIIYSFVFWKEKAAGFCGRQDVAMALITGVILLAVGVWGKLTLGTYISLIAENSTNAPYVLIGTGTTIVVFGLFGCFATCRGSPWMLKLYAMFLSLVFLAELVAGISGFVFRHEIKDTFLRTYTDAMQTYNGNDERSRAVDHVQRSLSCCGVQNYTNWSTSPYFLEHGIPPSCCMNETDCNPQDLHNLTVAATKVNQKGCYDLVTSFMETNMGIIAGVAFGIAFSQLIGMLLACCLSRFITANQYEMV

SEQ ID NO: 60596 - protein, 269 aa, Homo sapiens
MSWKKALRIPGGLRAATVTLMLSMLSTPVAEGRDSPEDFVYQFKGMCYFTNGTERVRLVSRSIYNREEIVRFDSDVGEFRAVTLLGLPAAEYWNSQKDILERKRAAVDRVCRHNYQLELRTTLQRRVEPTVTISPSRTEALNHHNLLVCSVTDFYPAQIKVRWFRNGQEETAGVVSTPLIRNGDWTFQILVMLEMTPQRGDVYTCHVEHPSLQSPITVEWRAQSESAQSKMLSGIGGFVLGLIFLGLGLIIHHRSQKGPQGPPPAGLLH

SEQ ID NO: 60597 - protein, 430 aa, Homo sapiens
  MOD_RES (1)..(1): Any amino acid
XPTKAPDVFPIISGCRHPKDNSPVVLACLITGYHPTSVTVTWYMGTQSQPQRTFPEIQRRDSYYMTSSQLSTPLQQWRQGEYKCVVQHTASKSKKEIFRWPESPKAQASSVPTAQPQAEGSLAKATTAPATTRNTGRGGEEKKKEKEKEEQEERETKTPECPSHTQPLGVYLLTPAVQDLWLRDKATFTCFVVGSDLKDAHLTWEVAGKVPTGGVEEGLLERHSNGSQSQHSRLTLPRSLWNAGTSVTCTLNHPSLPPQRLMALREPAAQAPVKLSLNLLASSDPPEAASWLLCEVSGFSPPNILLMWLEDQREVNTSGFAPARPPPQPRSTTFWAWSVLRVPAPPSPQPATYTCVVSHEDSRTLLNASRSLEVSYLAMTPLIPQSKDENSDDYTTFDDVGSLWTTLSTFVALFILTLLYSGIVTFIKVK

SEQ ID NO: 60598 - protein, 400 aa, Homo sapiens
MKGLSGSRTQPPLCSGHTCGLAPPEDCEHLHHGPDARPPYLLSPADSCPGGRHRCSPRSSVHSECVMMPVVLGDHVSSSTFPRMHYSSHYDTRDDCAVAHAGAKINRIPANLLDQFEKQLPLHRDGFHTLQYQRTSAAAEQRSESPGRIRHLVHSVQKLFTKSHSLEGSSKSNANGTKADGRADDHHHAHHAKHSKRSKSKERKPEGKPRPGMSSWWSSDDNLDSDSTYRTPSVLNRHHLGPVAHCYPDALQSPFGDLSLKTSKSNNDVKCSACEGLALTPDAKYLKRSSWSTLTVSQAKEAYRKSSLNLDKPLLHQDAKPALRPCHYLQVPQDEWGGYPTGGKDEEIPCRRMRSGSYIKAMGDEESGESDSSPKTSPKSAILPEPLLKSIGQRPLGEHQ

SEQ ID NO: 60599 - protein, 46 aa, Homo sapiens
MASPGCLWLLAVALLPWTCASRALQHLDPPAPLPLVIWHGMAVAIP

SEQ ID NO: 60600 - protein, 562 aa, Homo sapiens
MFKSLTKVNKVKPIGENNENEQSSRRNEEGSHPSNQSQQTTAQEENKGEEKSLKTKSTPVTSEEPHTNIQDKLSKKNSSGDLTTNPDPQNAAEPTGTVPEQKEMDPGKEGPNSPQNKPPAAPVINEYADAQLHNLVKRMRQRTALYKKKLVEGDLSSPEASPQTAKPTAVPPVKESDDKPTEHYYRLLWFKVKKMPLTEYLKRIKLPNSIDSYTDRLYLLWLLLVTLAYNWNCCFIPLRLVFPYQTADNIHYWLIADIICDIIYLYDMLFIQPRLQFVRGGDIIVDSNELRKHYRTSTKFQLDVASIIPFDICYLFFGFNPMFRANRMLKYTSFFEFNHHLESIMDKAYIYRVIRTTGYLLFILHINACVYYWASNYEGIGTTRWVYDGEGNEYLRCYYWAVRTLITIGGLPEPQTLFEIVFQLLNFFSGVFVFSSLIGQMRDVIGAATANQNYFRACMDDTIAYMNNYSIPKLVQKRVRTWYEYTWDSQRMLDESDLLKTLPTTVQLALAIDVNFSIISKVDLFKGCDTQMIYDMLLRLKSVLYLPGDFVCKKARCSGSRL

SEQ ID NO: 60601 - protein, 245 aa, Homo sapiens
MEGNKLEEQDSSPPQSTPGLMKGNKREEQGLGPEPAAPQQPTAEEEALIEFHRSYRELFEFFCNNTTIHGAIRLVCSQHNRMKTAFWAVLWLCTFGMMYWQFGLLFGEYFSYPVSLNINLNSDKLVFPAVTICTLNPYRYPEIKEELEELDRITEQTLFDLYKYSSFTTLVAGSRSRRDLRGTLPHPLQRLRVPPPPHGARRARSVASSLRDNNPQVDWKDWKIGFQLELLSLPPPDVWKLLYFQ

SEQ ID NO: 60602 - protein, 98 aa, Homo sapiens
MKFVYKEEHPFEKRRSEGEKIRKKYPDRVPVIVEKAPKARIGDLDKKKYLVPSDLTVGQFYFLIRKRIHLRAEDALFFFVNNVIPPTSATMGQLYQVW

SEQ ID NO: 60603 - protein, 43 aa, Homo sapiens
MSGAGEALAPGPVGPQRVAEAGGGQLGSTAQGLFSRSRTAAAL

SEQ ID NO: 60604 - protein, 125 aa, Homo sapiens
MSGPTDETAGDLPVKDTGLNLFGMGGLQETSTTRTMKSRQAVSRVSREELEDRFLRLHDENILLKQHARKQEDKIKRFKEKVRQPLKNENRVFLLRIHPKEVVPVQFLLCGLQQPTGMLCAGLLL

SEQ ID NO: 60605 - protein, 205 aa, Homo sapiens
MEFPDLGKHCSEKTCKQLDFLPVKCDACKQDFCKDHFPYAAHKCPFAFQKDVHVPVCPLCNTPIPVKKGQIPDVVVGDHIDRDCDSHPGKKKEKSLCSLRFLHTVAQKRAARRKRCCRWYVPNVTATSVSSTDTLWTTAADTGVAPPSKLGEKRLRCDGSEHAVACVEAAYTLVGSGAPLSTIPHWLLILFVEGDGTIIKLNAEV

SEQ ID NO: 60606 - protein, 331 aa, Homo sapiens
MEVKPPPGRPQPDSGRRRRRRGEEGHDPKEPEQLRKLFIGGLSFETTDDSLREHFEKWGTLTDCVVMRDPQTKRSRGFGFVTYSCVEEVDAAMCARPHKVDGRVVEPKRAVSREDSVKPGAHLTVKKIFVGGIKEDTEEYNLRDYFEKYGKIETIEVMEDRQSGKKRGFAFVTFDDHDTVDKIVVQKYHTINGHNCEVKKALSKQEMQSAGSQRGRGGGSGNFMGRGGNFGGGGGNFGRGGNFGGRGGYGGGGGGSRGSYGGGDGGYNGFGGDGNYGGGGNYNDFGNYSGQQQSNYGPMKGGSFGGRSSGSPYGGGYGSGGGSGGYGSRRF

SEQ ID NO: 60607 - protein, 78 aa, Homo sapiens
MAGQFRSYVWDPLLILSQIVLMQTVYYGSLGLWLALVDGLVRSSPSLDQMFDAEILGFSTPPGRLSMMSFILNALTWS

SEQ ID NO: 60608 - protein, 475 aa, Homo sapiens
MPKLKAKPIRTASGIAVVAVMCKPHRCPHISFTGNICVYCPGGPDSDFEYSTQSYTGYEPTSMRAIRARYDPFLQTRHRIEQLKQLGHSVDKVEFIVMGGTFMALPEEYRDYFIRNLHDALSGHTSNNIYEAVKYSERSLTKCIGITIETRPDYCMKRHLSDMLTYGCTRLEIGVQSVYEDVARDTNRGHTVKAVCESFHLAKDSGFKVVAHMMPDLPNVGLERDIEQFTEFFENPAFRPDGLKLYPTLVIRGTGLYELWKSGRYKSYSPSDLVELVARILALVPPWTRVYRVQRDIPMPLVSSGVEHGNLRELALARMKDLGIQCRDVRTREVGIQEIHHKVRPYQVELVRRDYVANGGWETFLSYEDPDQDILIGLLRLRKCSEETFRFELGGGVSIVRELHVYGSVVPVSSRDPTKFQHQGFGMLLMEEAERIAREEHGSGKIAVISGVGTRNYYRKIGYRLQGPYMVKMLK

SEQ ID NO: 60609 - protein, 124 aa, Homo sapiens
MDENESNQSLMTSSQYPKEAVRKRQNSARNSGASDSSRFSRKSFKLDYRLEEDVTKSKKGKDGRFVNPWPTWKNPSIPNVLRWLIMEKDHSSVPSSKEELDKELPVLKPYFITNPEEAGVREAG

SEQ ID NO: 60610 - protein, 796 aa, Homo sapiens
MMEGLKKRTRKAFGIRKKEKDTDSTGSPDRDGIKKSNGAPNGFYAEIDWERYNSPELDEEGYSIRPEEPGSTKGKHFYSSSESEEEEESHKKFNIKIKPLQSKDILKNAATVDELKASIGNIALSPSPVGAIKRNLSSEEVARPRRSTPTPELISKKPPDDTTALAPLFGPPLESAFDEQKTEVLLDQPEIWGSGQPINPSMESPKLTRPFPTGTPPPLPPKNVPATPPRTGSPLTIGPGNDQSATEVKIEKLPSINDLDSIFGPVLSPKSVAVNAEEKWVHFSDTSPEHVTPELTPREKVVSPPATPDNPADSPAPGPLGPPGPTGPPGPPGPPRNVLSPLNLEEVQKKVAEQTFIKDDYLETISSPKDFGLGQRATPPPPPPPTYRTVVSSPGPGSGPGPGTTSGASSPARPATPLVPCRSTTPPPPPPRPPSRPKLPPGKPGVGDVSRPFSPPIHSSSPPPIAPLARAESTSSISSTNSLSAATTPTVENEQPSLVWFDRGKFYLTFEGSSRGPSPLTMGAQDTLPVAAAFTETVNAYFKGADPSKCIVKITGEMVLSFPAGITRHFANNPSPAALTFRVINFSRLEHVLPNPQLLCCDNTQNDANTKEFWVNMPNLMTHLKKVSEQKPQATYYNVDMLKYQVSAQGIQSTPLNLAVNWRCEPSSTDLRIDYKYNTDAMTTAVALNNVQFLVPIDGGVTKLQAVLPPAVWNAEQQRILWKIPDISQKSENGGVGSLLARFQLSEGPSKPSPLVVQFTSEGSTLSGCDIELVGAGYRFSLIKKRFAAGKYLADN

SEQ ID NO: 60611 - protein, 161 aa, Homo sapiens
MCFTMKTSCVRRRYREFVWLRQRLQSNALLVQLPELPSKNLFFNMNNRQHVDQRRQGLEDFLRKVLQNALLLSDSSLHLFLQSHLNSEDIEACVSGQTKYSVEEAIHKFALMNRRFPEEDEEGKKENDIDYDSESSSSGLGHSSDDSSSHGCKVNTAPQES

SEQ ID NO: 60612 - protein, 429 aa, Homo sapiens
MAAQGYGYYRTVIFSAMFGGYSLYYFNRKTFSFVMPSLVEEIPLDKDDLGFITSSQSAAYAISKFVSGVLSDQMSARWLFSSGLLLVGLVNIFFAWSSTVPVFAALWFLNGLAQGLGWPPCGKVLRKWFEPSQFGTWWAILSTSMNLAGGLGPILATILAQSYSWRSTLALSGALWVVVSFLCLLLIHNEPADVGLRNLDPMPSEGKKGSLKEESTLQELLLSPYLWVLSTGYLVVFGVKTCCTDWGQFFLIQEKGQSALVGSSYMSALEVGGLVGSIAAGYLSDRAMAKAGLSNYGNPRHGLLLFMMAGMTVSMYLFRVTVTSDSPKLWILVLGAVFGFSSYGPIALFGVIANESAPPNLCGTSHAIVGLMANVGGFLAGLPFSTIAKHYSWSTAFWVAEVICAASTAAFFLLRNIRTKMGRVSKKAE

SEQ ID NO: 60613 - protein, 18 aa, Homo sapiens
MANDIDELIGIPFPNHSS

SEQ ID NO: 60614 - protein, 133 aa, Homo sapiens
MRLLSFVVLALFAVTQAEEGARLLASKSLLNRYAVEGRDLTLQYNIYNVGSSAALDVELSDDSFPPEDFGIVSGMLNVKWDRIAPASNVSHTVVLRPLKAGYFNFTSATITYLAQEDGPVVNQPQDSLVLPGS

SEQ ID NO: 60615 - protein, 691 aa, Homo sapiens
MSGFDDPGIFYSDSFGGDAQADEGQARKSQLQRRFKEFLRQYRVGTDRTGFTFKYRDELKRHYNLGEYWIEVEMEDLASFDEDLADYLYKQPAEHLQLSDMMSHLVKIPGIIIAASAVRAKATRISIQCRSCRNTLTNIAMRPGLEGYALPRKCNTDQAGRPKCPLDPYFIMPDKCKCVDFQTLKLQELPDAVPHGEMPRHMQLYCDRYLCDKVVPGNRVTIMGIYSIKKFGLTTSRGRDRVGVGIRSSYIRVLGIQVDTDGSGRSFAGAVSPQEEEEFRRLAALPNVYEVISKSIAPSIFGGTDMKKAIACLLFGGSRKRLPDGLTRRGDINLLMLGDPGTAKSQLLKFVEKCSPIGVYTSGKGSSAAGLTASVMRDPSSRNFIMEGGAMVLADGGVVCIDEFDKMREDDRVAIHEAMEQQTISIAKAGITTTLNSRCSVLAAANSVFGRWDETKGEDNIDFMPTILSRFDMIFIVKDEHNEERDVMLAKHVITLHVSALTQTQAVEGEIDLAKLKKFIAYCRVKCGPRLSAEAAEKLKNRYIIMRSGARQHERDSDRRSSIPITVRQLEAIVRIAEALSKMKLQPFATEADVEEALRLFQVSTLDAALSGTLSGVEGFTSQEDQEMLSRIEKQLKRRFAIGSQVSEHSIIKDFTKQKYPEHAIHKVLQLMLRRGEIQHRMQRKVLYRLK

SEQ ID NO: 60616 - protein, 358 aa, Homo sapiens
MATADTPAPASSGLSPKEEGELEDGEISDDDNNSQIRSRSSSSSSGGGLLPYPRRRPPHSARGGGSGGGGGSSSSSSSSQQQLRNFSRSRHASERGHLRGPSSYRPKEPFRSHPPSVRMPSSSLSESSPRPSFWERSHLALDRFRFRGRPYRGGSRWSRGRGVGERGGKPGCRPPLGGGAGSGFSSSQSWREPSPPRKSSKSFGRSPSRKQNYSSKNENCVEETFEDLLLKYKQIQLELECINKDEKLALSSKEENVQEDPKTLNFEDQTSTDNVSITKDSSKEVAPEEKTQVKTFQAFELKPLRQKLTLPGDKNRLKKVKDGAKPLSLKSDTTDSSQGIPYRVKEGFTPIPGLKFSA

SEQ ID NO: 60617 - protein, 44 aa, Homo sapiens
MLSRNDDICIYGGLGLGGLLLLAVVLLSACLCWLHRREAASAQQ

SEQ ID NO: 60618 - protein, 81 aa, Homo sapiens
MAASMCDVFSFCVGVAGRARVSVEVRFVSSAKGKGLFATQLIRKGETIFVERPLVAAQFLWNALYRYREWCLAHSSCSVGL

SEQ ID NO: 60619 - protein, 243 aa, Homo sapiens
MNTLQGPVSFKDVAVDFTQEEWQQLDPDEKITYRDVMLENYSHLVSVGYDTTKPNVIIKLEQGEEPWIMGGEFPCQHSPEAWRVDDLIERIQENEDKHSSRPARRPCGPRCCCCCCCSRPPRSPPPKPLPTRMLTPRKAFRTCSKESGLAETESCGQTHTWPRALAVLMGLWWPRDQKAGEEDLRFRERRPGLQATATGSGEHGAFPVHSQGVWASTHWQGTAVCPLQTPPPDAFIRNNKVLS

SEQ ID NO: 60620 - protein, 129 aa, Homo sapiens
MGTEGPPPPAASRGRQGCLLVPARTKTTIALLYDEESENAYDIRLKLTKEVLTIQKQDVVCVGGSHQGRNRRTVTLRRQPVGGLGLSIKGGSEHNVPVVISKIFEDQADGVLLCRPGWSAVLTRQGCCS

SEQ ID NO: 60621 - protein, 556 aa, Homo sapiens
MSALPRDLELSNPREKLTKPVQATLSSLKMLDVGKWPIFSLCSEEELQLIRQACVFGSAGNEVLYTTVNDEIFVLGTNCCGCLGLGDVQSTIEPRRLDSLNGKKIACLSYGSGPHIVLATTEGEVFTWGHNAYSQLGNGTTNHGLVPCHISTNLSNKQVIEVACGSYHSLVLTSDGEVFAWGYNNSGQVGSGSTVNQPIPRRVTGCLQNKVVVTIACGQMCCMAVVDTGEVYVWGYNGNGQLGLGNSGNQPTPCRVAALQGIRVQRVACGYAHTLVLTDEGQVYAWGANSYGQLGTGNKSNQSYPTPVTVEKDRIIEIAACHSTHTSAAKTQGGHVYMWGQCRGQSVILPHLTHFSCTDDVFACFATPAVTWRLLSVEPDDHLTVAESLKREFDNPDTADLKFLVDGKYIYAHKVLLKIRCEHFRSSLEDNEDDIVEMSEFSYPVYRAFLEYLYTDSISLSPEEAVGLLDLATFYRENRLKKLCQQTIKQGICEENAIALLSAAVKYDAQDLEEFCFRFCINHLTVVTQTSGFAEMDHDLLKNFISKASRVGAFKN

SEQ ID NO: 60622 - protein, 1037 aa, Homo sapiens
MMEGNGTENSCSRTRGWLQQDNDAKPWLWKFSNCFSRPEQTLPHSPQTKEYMENKKVAVELKDVPSPLHAGSKLFPAVPLPDIRSLQQPKIQLSSVPKVSCCAHCPNEPSTSPMRFGGGGGGSGGTSSLIHPGALLDSQSTRTITCQVGSGFAFQSASSLQNASARNNLAGIASDFPSMCLESNLSSCKHLPCCGKLHFQSCHGNVHKLHQFPSLQGCTSAGYFPCSDFTSGAPGHLEEHISQSELTPHLCTNSLHLNVVPPVCLKGSLYCEDCLNKPARNSIIDAAKVWPNIPPPNTQPAPLAVPLCNGCGTKGTGKETTLLLATSLGKAASKFGSPEVAVAGQVLENLPPIGVFWDIENCSVPSGRSATAVVQRIREKFFKGHREAEFICVCDISKENKEVIQELNNCQVTVAHINATAKNAADDKLRQSLRRFANTHTAPATVVLVSTDVNFALELSDLRHRHGFHIILVHKNQASEALLHHANELIRFEEFISDLPPRLPLKMPQCHTLLYVYNLPANKDGKSVSNRLRRLSDNCGGKVLSITGCSAILRFINQDSAERAQKRMENEDVFGNRIIVSFTPKNRELCETKSSNAIADKVKSPKKLKNPKLCLIKDASEQSSSAKATPGKGSQANSGSATKNTNVKSLQELCRMESKTGHRNSEHQQGHLRLVVPTHGNSSAAVSTPKNSGVAEPVYKTSQKKENLSARSVTSSPVEKKDKEETVFQVSYPSAFSKLVASRQVSPLLASQSWSSRSMSPNLLNRASPLAFNIANSSSEADCPDPFANGADVQVSNIDYRLSRKELQQLLQEAFARHGKVKSVELSPHTDYQLKAVVQMENLQDAIGAVNSLHRYKIGSKKILVSLATGAASKSLSLLSAETMSVLQDAPACCLPLFKFTDIYEKKFGHKLNVSDLYKLTDTVAIREQGNGRLVCLLPSSQARQSPLGSSQSHDGSSTNCSPIIFEELEYHEPVCRQHCSNKDFSEHEFDPDSYKIPFVILSLKTFAPQVHSLLQTHEGTVPLLRPLASAFEESCR

SEQ ID NO: 60623 - protein, 203 aa, Homo sapiens
MTELASSGGGSPAGDGEEGLGDERGLVIHHPAEEQPYRCPLCGQTFSQQPSLVRHQKAHAGAGRAAAFVCPECGKAFSVKHNLEVHQRTHTGERPFPCPECGRCFSLKQNLLTHQRIHSGEKPHQCAQCGRCFREPRFLLNHQRTHARMPAPHPRRPGVFGERRPYFCPRCGKSFAREGSLKTHQRSHGHGPEGQAAHLGRVL

SEQ ID NO: 60624 - protein, 444 aa, Homo sapiens
MLLMVVSMACVGFFLVQRAGPHVGGQDKPFLSAWPSAVVPRGGHVTLRCHYRHRFNNFMLYKEDRIHVPIFHGRLFQESFNMSPVTTAHAGNYTCRGSHPHSPTGWSAPSNPVVIMVTGNHRKPSLLAHPGPLVKSGERVILQCWSDIMFEHFFLHKEGISKDPSSLVGQIHDGVSKANFSIGPMMLALAGTYRCYGSVTHTPYQLSAPSDPLDIVVTGPYEKPSLSAQPGPKVQAGESVTLSCSSRSSYDMYHLSREGGAHERRLPAVRKVNRTFQADFPLGPATHGGTYRCFGSFRHSPYEWSDPSDPLLVSVTGNPSSSWPSPTEPSSKSGNPRHLHILIGTSVVIILFILLLFFLLHLWCSNKKNAAVMDQEPAGNRTANSEDSDEQDPQEVTYAQLDHCVFTQRKITRPSQRPKTPPTDTILYTELPNAKPRSKVVSCP

SEQ ID NO: 60625 - protein, 346 aa, Homo sapiens
MESEEVYQRQVLSISCIIFGIVIVGMFCAAFYFKSKKQAKQIQEQLKVPQNGKSYSLKASSTMAKSENLVKSHVQLQNYSKVERHPVTALEKMMESSFVGPQSFPEVPSPDRGSQSVKHHRSLSSCCSPGQRSGMLHRNAFRRTPPSPRSRLGGIVGPAYQQLEESRIPDQDTIPCQGYSSSGLKTQRNTSINMQLPSRETNPYFNSLEQKDLVGYSSTRASSVPIIPSVGLEETCLQMPGISEVKSIKWCKNSYSADVVNVSIPVSDCLIAEQQEVKILLETVQEQIRILTDARRSEDYELASVETEDSASENTAFLPLSPTAKSEREAQFVLRNEIQRDSALTK

SEQ ID NO: 60626 - protein, 267 aa, Homo sapiens
MALVLILQLLTLWPLCHTDITPSVAIIVPPASYHPKPWLGAQPATVVTPGVNVTLRCRAPQPAWRFGLFKPGEIAPLLFRDVSSELAEFFLEEVTPAQGGSYRCCYRRPDWGPGVWSQPSDVLELLVTEELPRPSLVALPGPVVGPGANVSLRCAGRLRNMSFVLYREGVAAPLQYRHSAQPWADFTLLGARAPGTYSCYYHTPSAPYVLSQRSEVLVISWEDSGSSDYTRGNLVRLGLAGLVLISLGALVTFDWRSQNRAPAGIRP

SEQ ID NO: 60627 - protein, 78 aa, Homo sapiens
MKGLCAECGQDLTQLQSKNGKQQVPLSTATVSMVHSVPELMVSSEQAEQLGREDQQRLHRNRKLVLMVDLDQTLIHTT

SEQ ID NO: 60628 - protein, 130 aa, Homo sapiens
MASLLKVDQEVKLKVDSFRERITSEAEDLVANFFPKKLLELDSFLKEPILNIHDLTQIHSDMNLPVPDPILLTNSHDGLDGPTYKKRRLDECEEAFQGQNVGTAPDSQDRRWKQLWGVHSGGNSCRAKNC

SEQ ID NO: 60629 - protein, 454 aa, Homo sapiens
MTPILTVLICLGHLPKPTLWAEPGSVIIQGSPVTLRCQGSLQAEEYHLYRENKSASWVRRIQEPGKNGQFPIPSITWEHAGRYHCQYYSHNHSSEYSDPLELVVTGAYSKPTLSALPSPVVTLGGNVTLQCVSQVAFDGFILCKEGEDEHPQRLNSHSHARGWSWAIFSVGPVSPSRRWSYRCYAYDSNSPYVWSLPSDLLELLVPGVSKKPSLSVQPGPMVAPGESLTLQCVSDVGYDRFVLYKEGERDFLQRPGWQPQAGLSQANFTLGPVSPSHGGQYRCYSAHNLSSEWSAPSDPLDILITGQFYDRPSLSVQPVPTVAPGKNVTLLCQSRGQFHTFLLTKEGAGHPPLHLRSEHQAQQNQAEFRMGPVTSAHVGTYRCYSSLSSNPYLLSLPSDPLELVVSASLGQHPQDYTVENLIRMGVAGLVLVVLGILLFEAQHSQRSLQDAAGR

SEQ ID NO: 60630 - protein, 285 aa, Homo sapiens
ESCGVTSDNCRDLCGIVASKASLRELALGSNKLGDVGMAELCPGLLHPSSRLRTLWIWECGITAKGCGDLCRVLRAKESLKELSLAGNELGDEGARLLCETLLEPGCQLESLWVKSCSFTAACCSHFSSVLAQNRFLLELQISNNRLEDAGVRELCQGLGQPGSVLRVLWLADCDVSDSSCSSLAATLLANHSLRELDLSNNCLGDAGILQLVESVRQPGCLLEQLVYVHALGGWCGQGCPGRKAGVGEDTGPCLPSGLCAACTTFTGLRRWRTGCRPWRRTSHP

SEQ ID NO: 60631 - protein, 1058 aa, Homo sapiens
MASGSGDSVTRRSVASQFFTQEEGPGIDGMTTSERVVDLLNQAALITNDSKITVLKQVQELIINKDPTLLDNFLDEIIAFQADKSIEVRKFVIGFIEEACKRDIELLLKLIANLNMLLRDENVNVVKKAILTMTQLYKVALQWMVKSRVISELQEACWDMVSAMAGDIILLLDSDNDGIRTHAIKFVEGLIVTLSPRMADSEIPRRQEHDISLDRIPRDHPYIQYNVLWEEGKAALEQLLKFMVHPAISSINLTTALGSLANIARQRPMFMSEVIQAYETLHANLPPTLAKSQVSSVRKNLKLHLLSVLKHPASLEFQAQITTLLVDLGTPQAEIARNMPSSKDTRKRPRDDSDSTLKKMKLEPNLGEDDEDKDLEPGPSGTSKASAQISGQSDTDITAEFLQPLLTPDNVANLVLISMVYLPEAMPASFQAIYTPVESAGTEAQIKHLARLMATQMTAAGLGPGVEQTKQCKEEPKEEKVVKTESVLIKRRLSAQGQAISVVGSLSSMSPLEEEAPQAKRRPEPIIPVTQPRLAGAGGRKKIFRLSDVLKPLTDAQVEAMKLGAVKRILRAEKAVACSGAAQVRIKILASLVTQFNSGLKAEVLSFILEDVRARLDLAFAWLYQEYNAYLAAGASGSLDKYEDCLIRLLSGLQEKPDQKDGIFTKVVLEAPLITESALEVVRKYCEDESRTYLGMSTLRDLIFKRPSRQFQYLHVLLDLSSHEKDKVRSQALLFIKRMYEKEQLREYVEKFALNYLQLLVHPNPPSVLFGADKDTEVAAPWTEETVKQCLYLYLALLPQNHKLIHELAAVYTEAIADIKRTVLRVIEQPIRGMGMNSPELLLLVENCPKGAETLVTRCLHSLTDKVPPSPELVKRVRDLYHKRLPDVRFLIPVLNGLEKKEVIQALPKLIKLNPIVVKEVFNRLLGTQHGEGNSALSPLNPGELLIALHNIDSVKCDMKSIIKGEALPPHSSGLAPATPGQDLSHPHAPTGICQVKDCHSQPHLRALESHLPPSLLFLPPLPSLPPSLLLPSSQVLPFTTHLFLPLMYLLCPGTEWA

SEQ ID NO: 60632 - protein, 340 aa, Homo sapiens
MGCGRMGTVPTSICCQPATPPSTLRSCSGSGSCGCWKIWASRTSRCSRGALWSQAPQSPGSPRNPDGGSQMQCLSPHRWAGSAPGAPSSTSPRGLAVRCAAGRAPRPTRSPPHTSPTRRSERAWRARRRRCVSTSRECLQGTIRNSQEAEVSCPFIDNTYSCSGKLLEREIKALLTPEDYQRFLDLGISIAENRSAFSYHCKTPDCKGWCFFEDDVNEFTCPVCFHVNCLLCKAIHEQMNCKEYQEDLALRAQNDVAARQTTEMLKVMLQQGEAMRCPQCQIVVQKKDGCDWIRCTVCHTEICWVTKGPRWGPGGPGDTSGGCRCRVNGIPCHPSCQNCH

SEQ ID NO: 60633 - protein, 105 aa, Homo sapiens
MKITRQKHAKKHLGFFRNNFGVREPYQILLDGTFCQAALRGRIQLREQLPRYLMGETQLCTTREQWQKPLMKHFPLRQQRQYLKTMKHLLSPFVPSSFFLILIAP

SEQ ID NO: 60634 - protein, 348 aa, Homo sapiens
MSLLFVSMACVGFFLLQGAWPHEGVHRKPSLLAHPGPLVKSEETVILQCWSDVMFEHFLLHREGMFNDTLRLIGEHHDGVSKANFSISRMTQDLAGTYRCYGSVTHSPYQVSAPSDPLDIVIIGLYEKPSLSAQPGPTVLAGENVTLSCSSRSSYDMYHLSREGEAHERRLPAGPKVNGTFQADFPLGPATHGGTYRCFGSFHDSPYEWSKSSDPLLVSVTGNPSNSWPSPTEPSSKTGNPRHLHILIGTSVVIILFILLFFLLHRWCSNKKNAAVMDQESAGNRTANSEDSDEQDPQEVTYTQLNHCVFTQRKITRPSQRPKTPPTDIIVYTELPNAESRSKVVSCP

SEQ ID NO: 60635 - protein, 47 aa, Homo sapiens
MLTLASKLKRDDGLKGSRTAATASDSTRRVSVRDKLLVKGQSLRRIL

SEQ ID NO: 60636 - protein, 254 aa, Homo sapiens
MTRLCLPRPEAREDPIPVPPRGLGAGEGSGSPVRPPVSTWGPSWAQLLDSVLWLGALGLTIQAVFSTTGPALLLLLVSFLTFDLLHRCTRHDAAAASGDRYHRGWRGATAGSALVSLGHEAWLGALVGEPHAPELDPVVEHLELAATAAAPAVGSGGDTLPAAGTDVVPCTLHHWLPPAELLVACRGRGVAPPATGSPAAGAQCSACPPLHGLLPAALLHTAEPCGPPHLHDSPRRHSGFGSIEGQPHPTACVC

SEQ ID NO: 60637 - protein, 335 aa, Homo sapiens
MPDRENTFVVKVEGPSEYIMETVDAQHVKAWVSDIQECLSPGPCPATSPRPMTLPLAPGTSFLTRENTDSLELSCLNHSESLPSQDLLLGPSESNDRLSQGAYGGLSDRPSASISPSSASIAASHFDSMELLPPELPPRIPIEEGPPTGTVHPLSAPYPPLDTPETATGSFLFQGEPEGGEGDQPLSGYPWFHGMLSRLKAAQLVLTGGTGSHGVFLVRQSETRRGEYVLTFNFQGKAKHLRLSLNEEGQCRVQHLWFQSIFDMLEHFRVHPIPLESGGSSDVVLVSYVPSSQRQQGREQAGSHAGVCEGDGCHPDASCTLMPFGASDCVTDHLP

SEQ ID NO: 60638 - protein, 96 aa, Homo sapiens
MLSDELESKPELLVQFVQNTSIPLGQGLVESEAKDITCLSLLPVTEASECSRLMLPGGPFLSCFEKPSGECGSRRRGDESSDCTEIPGVFVHFRVF

SEQ ID NO: 60639 - protein, 427 aa, Homo sapiens
MLLMVVSMACVGFFLVQRAGPHVGGQDKPFLSAWPSAVVPRGGHVTLRCHYRHRFNNFMLYKEDRIHVPIFHGRLFQESFNMSPVTTAHAGNYTCRGSHPHSPTGWSAPSNPVVIMVTGNHRKPSLLAHPGPLVKSGERVILQCWSDIMFEHFFLHKEGISKDPSRLVGQIHDGVSKANFSIGPMMLALAGTYRCYGSVTHTPYQLSAPSDPLDIVVTGPYEKPSLSAQPGPKVQAGESVTLSCSSRSSYDMYHLSREGGAHERRLPAVRKVNRTFKADFPLGPATHGGTYRCFGSFRHSPYEWSDPSDPLLVSVTGNPRHLHILIGTSVVIILFILLLFFLLHLWCSNKKNAAVMDQEPAGNRTANSEDSDEQDPEEVTYAQLDHCVFTQRKITRPSQRPKTPPTDTILYTELPNAKPRSKVVSCP

SEQ ID NO: 60640 - protein, 697 aa, Homo sapiens
  MOD_RES (1)..(1): Any amino acid
XAWQEGSVTRLWKAIHTAPVATMAFDPTSTLLATGGCDGAVRVWDIVRHYGTHHFRGSPGVVHLVAFHPDPTRLLLFSSATDAAIRVWSLQDRSCLAVLTAHYSAVTSLAFSADGHTMLSSGRDKICIIWDLQSCQATRTVPVFESVEAAVLLPEEPVSQLGVKSPGLYFLTAGDQGTLRVWEAASGQCVYTQAQPPGPGQELTHCTLAHTAGVVLTATADHNLLLYEARSLRLQKQFAGYSEEVLDVRFLGPEDSHVVVASNSPCLKVFELQTSACQILHGHTDIVLALDVFRKGWLFASCAKDQSVRIWRMNKAGQVMLKESFLVTGSQDCTVKLWPLPKALLSKNTAPDNGPILLQAQTTQRCHDKDINSVAIAPNDKLLATGSQDRTAKLWALPQCQLLGVFSGHRRGLWCVQFSPMDQVLATASADGTIKLWALQDFSCLKTFEGHDASVLKVAFVSRGTQLLSSGSDGLVKLWTIKNNECVRTLDAHEDKVWGLHCSRLDDHALTGASDSRVILWKDVTEAEQAEEQARQEEQVVRQQELDNLLHEKRYLRALGLAISLDRPHTVLTVIQAIRRDPEACEKLEATMLRLRRDQKEALLRFCVTWNTNSRHCHEAQAVLGVLLRREAPEELLAYEGVRAALEALLPYTERHFQRLSRTLQAAAFLDFLWHNMKLPVPAAAPTPWETHKGALP

SEQ ID NO: 60641 - protein, 1106 aa, Homo sapiens
MEIKDQGAQMEPLLPTRNDEEAVVDRGGTRSILKTHFEKEDLEGHRTLFIGVHVPLGGRKSHRRHRHRGHKHRKRDRERDSGLEDGRESPSFDTPSQRVQFILGTEDDDEEHIPHDLFTELDEICWREGEDAEWRETARWLKFEEDVEDGGERWSKPYVATLSLHSLFELRSCILNGTVLLDMHANTLEEIADMVLDQQVSSGQLNEDVRHRVHEALMKQHHHQNQKKLTNRIPIVRSFADIGKKQSEPNSMDKNAGQVVSPQSAPACVENKNDVSRENSTVDFSKVDLHFMKKIPPGAEASNILVGELEFLDRTVVAFVRLSPAVLLQGLAEVPIPTRFLFILLGPLGKGQQYHEIGRSIATLMTDEVFHDVAYKAKDRNDLVSGIDEFLDQVTVLPPGEWDPSIRIEPPKNVPSQEKRKIPAVPNGTAAHGEAEPHGGHSGPELQRTGRIFGGLILDIKRKAPYFWSDFRDAFSLQCLASFLFLYCACMSPVITFGGLLGEATEGRISAIESLFGASMTGIAYSLFGGQPLTILGSTGPVLVFEKILFKFCKEYGLSYLSLRASIGLWTATLCIILVATDASSLVCYITRFTEEAFASLICIIFIYEALEKLFELSEAYPINMHNDLELLTQYSCNCVEPHNPSNGTLKEWRESNISASDIIWENLTVSECKSLHGEYVGRACGHDHPYVPDVLFWSVILFFSTVTLSATLKQFKTSRYFPTKVRSIVSDFAVFLTILCMVLIDYAIGIPSPKLQVPSVFKPTRDDRGWFVTPLGPNPWWTVIAAIIPALLCTILIFMDQQITAVIINRKEHKLKKGCGYHLDLLMVAVMLGVCSIMGLPWFVAATVLSITHVNSLKLESECSAPGEQPKFLGIREQRVTGLMIFILMGSSVFMTSILKFIPMPVLYGVFLYMGASSLKGIQFFDRIKLFWMPAKHQPDFIYLRHVPLRKVHLFTIIQMSCLGLLWIIKVSRAAIVFPMMVLALVFVRKLMDLLFTKRELSWLDDLMPESKKKKLEDAEKEEEQSMLAMEDEGTVQLPLEGHYRDDPSVINISDEMSKTALWRNLLITADNSKDKESSFPSKSIESRKEKKADSGKGVDRETCL

SEQ ID NO: 60642 - protein, 20 aa, Homo sapiens
MTTSSIRRQMKNIVNNYSEA

SEQ ID NO: 60643 - protein, 160 aa, Homo sapiens
  MOD_RES (1)..(1): Any amino acid
XLTLIDLPGHESLRLQFLERFKSSARAIVFVVDSAAFQREVKDVAEFLYQVLIDSMGLKNTPSFLIACNKQDIAMAKSAKLIQQQLEKELNTLRVTRSAAPSTLDSSSTAPAQLGKKGKEFEFSQLPLKVEFLECSAKGGRGDVGSADIQDLEKWLAKIA

SEQ ID NO: 60644 - protein, 181 aa, Homo sapiens
MSLDIQSLDIQCEELSDARWAELLPLLQQCQVVRLDDCGLTEARCKDISSALRVNPALAELNLRSNELGDVGVHCVLQGLQTPSCKIQKLSLQNCCLTGAGCGVLSSTLRTLPTLQELHLSDNLLGDAGLQLLCEGLLDPQCRLEKLHCPLQGTAAPGPDGGNRCLAVSQVPLTASVCVGD

SEQ ID NO: 60645 - protein, 73 aa, Homo sapiens
MTEGALDRESKAEYNITITVTDLGTPRLKTEHSITLQVSDVNDNAPAFTQTSYTLFVRENNSPALHIGSVSAT

SEQ ID NO: 60646 - protein, 705 aa, Homo sapiens
MSKLGISFSEDQQKEKDQLGKAPKKEEAAALRKDISGSDKRSLEKNQINFWRNQMTKRWEPSLNWKTTVNYKGKGSAKEIQEDKHTGKLEKPRPSVSHGRAQLLRKSAEKIEETVSDSSSESEEDEEPPDHRQEASADLPSEYWQIQKLVKYLKGGNQTATVIALCSMRDFSLAQETCQLAIRDVGGLEVLINLLETDEVKCKIGSLKILKEISHNPQIRQNIVDLGGLPIMVNILDSPHKSLKCLAAETIANVAKFKRARRVVRQHGGITKLVALLDCAHDSTKPAQSSLYEARDVEVARCGALALWSCSKSHTNKEAIRKAGGIPLLARLLKTSHENMLIPVVGTLQECASEENYRAAIKAERIIENLVKNLNSENEQLQEHCAMAIYQCAEDKETRDLVRLHGGLKPLASLLNNTDNKERLAAVTGAIWKCSISKENVTKFREYKAIETLVGLLTDQPEEVLVNVVGALGECCQERENRVIVRKCGGIQPLVNLLVGINQALLVNVTKAVGACAVEPESMMIIDRLDGVRLLWSLLKNPHPDVKASAAWALCPCIKNAKDAGEMVRSFVGGLELIVNLLKSDNKEVLASVCAAITNIAKDQENLAVITDHGVVPLLSKLANTNNNKLRHHLAEAISRCCMWGRNRVAFGEHKAVAPLVRYLKSNDTNVHRATAQALYQLSEDADNCITMHENGAVKKNIFIS

SEQ ID NO: 60647 - protein, 134 aa, Homo sapiens
  MOD_RES (1)..(1): Any amino acid
XPAPAPPAAAAPRVPFHCSECGKSFRYRSDLRRHFARHTALKPHACPRCGKGFKHSFNLANHLRSHTGERPYRCSACPKGFRDSTGLLHHQEAKQALEELEEGQCDWSMEKQKVWLRRSLESAGPWKYSCRPHW

SEQ ID NO: 60648 - protein, 178 aa, Homo sapiens
MNHIVQTFSPVNSGQPPNYEMLKEEQEVAMLGVPHNPAPPMSTVIHIRSETSVPDHVVWSLFNTLFMNTCCLGFIAFAYSVKVRMALAEIQGVPGQEDGWRRDRGPGLCLHRQVPEHLGPDFGHLHDHSAHHHPSVGRPGPAIDQEASLRPGALPVTCIPRTLSSIPRPAPRGQELCP

SEQ ID NO: 60649 - protein, 204 aa, Homo sapiens
  MOD_RES (1)..(1): Any amino acid
XDDVKWLLGLAAKLGDRHGDAAAAESRSCPQPPACPGLPPTGAALPAGIHAVHPPPLDSPDSCGLRRLCECDPECPQRLLPDAHGHDAVQRHPTEPQAQQTDQGAVAAGLTRDGHLLPLSLSPLGSYTGTQACGYGGPSHRGSETWLDRSSSLSSLVAQTDSCSWAIAWGQDVSHPRSLGLGETALSGRGRWVASGIYLAFINI

SEQ ID NO: 60650 - protein, 113 aa, Homo sapiens
MMLKGITRLISRIHKLDPGRFLHMGTQARQSIAAHLDNQVPVESPRAISRTNENDPAKHGDQHEGQHYNISPQDLETVFPHGLPPRFVMQVLKTGNGIGGSPEYKLLLAKGWG

SEQ ID NO: 60651 - protein, 401 aa, Homo sapiens
MWPVLLFVFLSQTVYSALGLRDACRSLPQSIQLFRDIAQEFSDDLHHIASLIGKVVDFEGSLAENRFTVLPNIDPEIDEKKRRLMGLPSFLTEVARKELENLDSRIPSCSVIYIPLIGFLLSIPRLPSMVEASDFEINGLDFMFLSEEKLHYRSARTKELDALLGDLHCEIRDQETLLMYQLQCQVLARAAVLTRVLDLASRLDVLLALASAARDYGYSRPRYSPQVLGVRIQNGRHPLMELCARTFVPNSTECGGDKGRVKVITGPNSSGKSIYLKQVGLITFMALVGSFVPAEEAEIGAVDAIFTRIHSCESISLGLSTFMIDLNQVAKAVNNATAQSLVLIDEFGKGTNTVDGLALLAAVLRHWLARGPTCPHIFVATNFLSLVQLQLLPQGPLVQYL

SEQ ID NO: 60652 - protein, 575 aa, Homo sapiens
MDCLCIVTTKKYRYQDEDTPPQEHISPQITNEVIGPELVHVSEKNLSEIENVHGFVSHSHISPIKANPPPVLVNTDSLETPTYVNGTDADYEYEEITLERGNSGLGFSIAGGTDNPHIGDDSSIFITKIITGGAAAQDGRLRVNDCILRVNEVDVRDVTHSKAVEALKEAGSIVRLYVKRRKPVSEKIMEIKLIKGPKGLGFSIAGGVGNQHIPGDNSIYVTKIIEGGAAHKDGKLQIGDKLLAVNNVCLEEVTHEEAVTALKNTSDFVYLKVAKPTSMYMNDGYAPPDITNSSSQPVDNHVSPSSFLGQTPASPARYSPVSKAVLGDDEITREPRKVVLHRGSTGLGFNIVGGEDGEGIFISFILAGGPADLSGELRKGDRIISVNSVDLRAASHEQAAAALKNAGQAVTIVAQYRPEEYSRFEAKIHDLREQMMNSSISSGSGSLRTSQKRSLYVRALFDYDKTKDSGLPSQGLNFKFGDILHVINASDDEWWQARQVTPDGESDEVGVIPSKRRVEKKERARLKTVKFNSKTRDKGQSFNDKRKKNLFSRKFPFYKNKDQSEQETSDADRDP

SEQ ID NO: 60653 - protein, 490 aa, Homo sapiens
MAKTPSDHLLSTLEELVPYDFEKFKFKLQNTSVQKEHSRIPRSQIQRARPVKMATLLVTYYGEEYAVQLTLQVLRAINQRLLAEELHRAAIQEYSTQENGTDDSAASSSLGENKPRSLKTPDHPEGNEGNGPRPYGGGAASLRCSQPEAGRGLSRKPLSKRREKASEGLDAQGKPRTRSPALPGGRSPGPCRALEGGQAEVRLRRNASSAGRLQGLAGGAPGQKECRPFEVYLPSGKMRPRSLEVTISTGEKAPANPEILLTLEEKTAANLDSATEPRARPTPDGGASADLKEGPGNPEHSVTGRPPDTAASPRCHAQEGDPVDGTCVRDSCSFPEAVSGHPQASGSRSPGCPRCQDSHERKSPGSLSPQPLPQCKRHLKQVQLLFCEDHDEPICLICSLSQEHQGHRVRPIEEVALEHKKKIQKQLEHLKKLRKSGEEQRSYGEEKAVSFLVVVQWCDLGSLQPLPPGFKRFSCLSLLSSWDYRNKLKR

SEQ ID NO: 60654 - protein, 79 aa, Homo sapiens
MTLLTFRDVAIEFSLEEWKCLDLAQQNLYRDVMLENYRNLFSVGLTVCKPGLITCLEQRKEPWNVKRQEAADGHPGGWE

SEQ ID NO: 60655 - protein, 158 aa, Homo sapiens
MAFLTTWKEAASGKSDRRTPESSLHEALDQCMTALDLFLTNQFSEALSYLKPRTKESMYHSLTYATILEMQAMMTFDPQDILLAGNMMKEAQMLCQRHRRKSSVTDSFSSLVNRPTLGQFTEEEIHAEVCYAECLLQRAALTFLQGSSHGGAVRPRAL

SEQ ID NO: 60656 - protein, 127 aa, Homo sapiens
MGTENTPGGKASPDPQDVRPSVFHNIKLFVLCHSLLQLAQLMISGYLKSSISTVEKRFGLSSQTSGLLASFNEVGNTALIVFVSYFGSRVHRPRMIGYGAILVALAGLLMTLPHFISEPYRYDNTSP

SEQ ID NO: 60657 - protein, 97 aa, Homo sapiens
MEAADASRSNGSSPEARDARSPSGPSGSLENGTKADGKDAKTTNGHGGEAAEGKSLGSALKPGEGRSALFAGNEWRRPIIQFVESGDDKNSNYFSMD

SEQ ID NO: 60658 - protein, 663 aa, Homo sapiens
MCPFMQFIEGGRRYQCGFCNCVNDVPPFYFQHLDHIGRRLDHYEKPELSLGSYEYVATLDYCRKSKPPNPPAFIFMIDVSYSNIKNGLVKLICEELKTMLEKIPKEEQEETSAIRVGFITYNKVLHFFNVKSNLAQPQMMVVTDVGEVFVPLLDGFLVNYQESQSVIHNLLDQIPDMFADSNENETVFAPVIQAGMEALKAADCPGKLFIFHSSLPTAEAPGKLKNRDDKKLVNTDKEKILFQPQTNVYDSLAKDCVAHGCSVTLFLFPSQYVDVASLGLVPQLTGGTLYKYNNFQMHLDRQQFLNDLRNDIEKKIGFDAIMRVRTSTGFRATDFFGGILMNNTTDVEMAAIDCDKAVTVEFKHDDKLSEDSGALIQCAVLYTTISGQRRLRIHNLGLNCSSQLADLYKSCETDALINFFAKSAFKAVLHQPLKVIREILVNQTAHMLACYRKNCASPSAASQLILPDSMKVLPVYMNCLLKNCVLLSRPEISTDERAYQRQLVMTMGVADSQLFFYPQLLPIHTLDVKSTMLPAAVRCSESRLSEEGIFLLANGLHMFLWLGVSSPPELIQGIFNVPSFAHINTDMTLLPEVGNPYSQQLRMIMGIIQQKRPYSMKLTIVKQREQPEMVFRQFLVEDKGLYGGSSYVDFLCCVHKEICQLLN

SEQ ID NO: 60659 - protein, 237 aa, Homo sapiens
MSAKSRTIGIIGAPFSKGQPRGGVEEGPTVLRKAGLLEKLKEQECDVKDYGDLPFADIPNDSPFQIVKNPRSVGKASEQLAGKVAEVKKNGRISLVLGGDHSYILKTLGIKYFSMTEVDRLGIGKVMEETLSYLLGRKKRPIHLSFDVDGLDPSFTPATGTPVVGGLTYREGLYITEEIYKTGLLSGLDIMEVNPSLGKTPEEVTRTVNTAVAITLACFGLAREGNHKPIDYLNPPK

SEQ ID NO: 60660 - protein, 154 aa, Homo sapiens
MIAAPEIPTDFNLLQESETHFSSDTDFEDIEGKNQKQGKGKTCKKGKKGPAEKGKGGNGGGKPPSGPNRMNGHHQQNGVENMMLFEVVKMGKSAMQSVVDDWIESYKHDRDIALLDLINFFIQCSGCKGVVTAEMFRHMQNSEIIRKMTEEFDE

SEQ ID NO: 60661 - protein, 1037 aa, Homo sapiens [sequence omitted]

SEQ ID NO: 60662 - protein, 185 aa, Homo sapiens
MTFKILCISCKRRSETNAETFTEWTFRQKGTEEFVKILRYENEVLQLEEDERFEGRVVWNGSRGTKDLQDLSIFITNVTYNHSGDYECHVYRLLFFENYEHNTSVVKKIHIEVVDKANRDMASIVSEIMMYVLIVVLTIWLVAEMIYCYKKIAAATETAAQENASEYLAITSESKENCTGVQVAE

SEQ ID NO: 60663 - protein, 62 aa, Homo sapiens
MKMWLLVSHLVIISITTCLAEFTWYRRYGHGVSEEDKGFGPIFEEQPINTIYPEESLEGKVS

SEQ ID NO: 60664 - protein, 23 aa, Homo sapiens
MTLCLGGTVYSLYSLGWASFPRN

SEQ ID NO: 60665 - protein, 49 aa, Homo sapiens
VTIACDAVLSSKSPYRKQDPDTWENELPVSKYANNLTQLDNGVRIPPRC

SEQ ID NO: 60666 - protein, 214 aa, Homo sapiens
PSLEPVLLCRWRRHCQSPLPRELQKLQEGRQFASDFLSPEAASPAPNPDWLSAAALHFAIQQVREENIRKQLKKLDCEREELLVFLFFFSLMGLLSSHLTSNSTTDLPKAFHVCAAILECLEKRKISWLALFQLTESDAAIREEAFLHVAVDMYLKLVQLFVAGDTSTVSPPAGRSLELKGQPRGTDNKSSSFSAAVNTSVPEKELLTRGRAAG

SEQ ID NO: 60667 - protein, 690 aa, Homo sapiens
MVLAGLIRKLGHQLAEIRERALKSILCKIEHNLICYADLIQERQLFLHLLEWFNFPSVPMKEEVLNLLSRLVKYPPAVQHLVDVGAVEFLSKLRSNVEPNLQAEIDGILDGLFLLPSEVPALSSASYQTNQTELSKNPEILTGYFPQDKSNFQQMEVPPRPVVNQTVKCLKFSTFPWLPLTTTDRHVLSSNESSLRSSNHTLIWNTCELLKDVIMQDFPAEIFLQRPKIVQSLLSLLKLAFGDGKHRLALQSVSCLQQLCMYLRNRLNFHRDPGFFSNKHDTVSQNSSLSYCHEARGTHHSQNPSPGSSSPRPSVVGRTGQRPRGDGQDWDAASSSGSSSHAHVNSRISVHSPLDMGHIDLPELETEDTLELQFQQLSLPQFCVSILESAVPLLRTGSRQVIIRVLELLTEDMTLIGEAISTDIWDDSSLFGIDMKEKLLLVLGALGETMCYHKSSISLEQPEVMLVHHRMAFISISLFAVRLLQTLLPVEKASEFLSEPMSTALFLLSLDMPISLEYPNIHEAVVAYLEQLNSENYSIYKRTAEAVYSIECTCNFLSDIGKEGEKNLLELVELADQALRSFSYHQHFPLIKEIISICSKIWKSAQASPLLQGESQKVLLHMLSHPLPRVKAETYHCCLEITKECLGVHNVTKPVSSLCNGIHFLLHPKVLYEISVFGIQEPESEVCQVT

SEQ ID NO: 60668 - protein, 36 aa, Homo sapiens
MAAGTAARKAAPVLEAPPQQEQLSHTKLSAEDTWNW

SEQ ID NO: 60669 - protein, 69 aa, Homo sapiens
MRRGGWRKRAENDGWETWGGYMAAKVQKLEEQFRSDAAMQKDGTSSTIFSGVAIYVNGYTDWFSCFTSH

SEQ ID NO: 60670 - protein, 552 aa, Homo sapiens
MAEDKSKRDSIEMSMKGCQTNNGFVHNEDILEQTPDPGSSTDNLKHSTRGILGSQEPDFKGVQPYAGMPKEVLFQFSGQARYRIPREILFWLTVASVLVLIAATIAIIALSPKCLDWWQEGPMYQIYPRSFKDSNKDGNGDLKGIQDKLDYITALNIKTVWITSFYKSSLKDFRYGVEDFREVDPIFGTMEDFENLVAAIHDKGLKLIIDFIPNHTSDKHIWFQLSRTRTGKYTDYYIWHDCTHENGKTIPPNNWLSVYGNSSWHFDEVRNQCYFHQFMKEQPDLNFRNPDVQEEIKEILRFWLTKGVDGFSLDAVKFLLEAKHLRDEIQVNKTQIPDTVTQYSELYHDFTTTQVGMHDIVRSFRQTMDQYSTEPGRYRFMGTEAYAESIDRTVMYYGLPFIQEADFPFNNYLSMLDTVSGNSVYEVITSWMENMPEGKWPNWMIGGPDSSRLTSRLGNQYVNVMNMLLFTLPGTPITYYGEEIGMGNIVAANLNESYDINTLRSKSPMQWDNSSNAGFSEASNTWLPTNSDYHTVNVDVILLRHPCSSAVA

SEQ ID NO: 60671 - protein, 106 aa, Homo sapiens
  MOD_RES (1)..(1): Any amino acid
XVNLHAVSLTQDVFEDERKVLESKLTAHEAVTVVREVLQELLMGVLTPERTPSPVDAYLTEEDLFRHRNPPVRPSASPCPLMCALRQGSPTRRPHSGRSVGCWTPW

SEQ ID NO: 60672 - protein, 667 aa, Homo sapiens
MFRAGEASKRPLPGPSPPRVRSVEVARGRAGYGFTLSGQAPCVLSCVMRGSPADFVGLRAGDQILAVNEINVKKASHEDVVKLIGKCSGVLHMVIAEGVGRFESCSSDEEGGLYEGKGWLKPKLDSKALGINRAERVVEEMQSGGIFNMIFENPSLCASNSEPLKLKQRSLSESAATRFDVGHESINNPNPNMLSKEEISKVIHDDSVFSIGLESHDDFALDASILNVAMIVGYLGSIELPSTSSNLESDSLQAIRGCMRRLRAEQKIHSLVTMKIMHDCVQLSTDKAGVVAEYPAEKLAFSAVCPDDRRFFGLVTMQTNDDGSLAQEEEGALRTSCHVFMVDPDLFNHKIHQGIARRFGFECTADPDTNGCLEFPASSLPVLQFISVLYRDMGELIEGMRARAFLDGDADAHQNNSTSSNSDSGIGNFHQEEKSNRVLVVDLGGSSSRHGPGGSAWDGVGGRGAQPWGAPWTGPFCPDPEGSPPFEAAHQTDRFWDLNKHLGPASPVEVPPASLRSSVPPSKRGTVGAGCGFNQRWLPVHVLREWQCGHTSDQDSYTDSTDGWSSINCGTLPPPMSKIPADRYRVEGSFAQPPLNAPKREWSRKAFGMQSIFGPHRNVRKTKEDKKGSKFGRGTGLTQPSQRTSARRSFGRSKRFSITRSLDDLES

SEQ ID NO: 60673 - protein, 188 aa, Homo sapiens
  MOD_RES (1)..(1): Any amino acid
XVGDVLRKPSKEEPLFAARVIYDLLFFFMVIIIVLNLIFGVIIDTFADLRSEKQKKEEILKTTCFICGLERDKFDNKTVTFEEHIKEEHNMWHYLCFIVLVKVKDSTEYTGPESYVAEMIKERNLDWFPRMRAMSLVSSDSEGEQNELRNLQEKLESTMKLVTNLSGQLSELKDQVKKENPSAYPPIT

SEQ ID NO: 60674 - protein, 67 aa, Homo sapiens
MPVKKKRKSPGVAAAVAEDGGLKKCKISRYHLPPPFKLPSSLLCWTTGGKGVGPGLPGWGWRQVRPL

SEQ ID NO: 60675 - protein, 944 aa, Homo sapiens
MSQPPIGGAAPATAAASPAAAATEARLHPEGSSRKQQRAQSPARPRDSSLRQTIAATRSPVGAGTKLNSVRQQQLQQQQQQGNKTGSRTGPPASIRGGGGGAEKATPLAPKGAAPGAVQPVAGAEAAPAATLAALGGRRPGPPEEPPRELESVPSKLGEPPPLGEGGGGGGEGGGAGGGSGEREGGAPQPPPPRGWRGKGVRAQQRGGSGGEGASPSPSSSSAGKTPGTGSRNSGSGVAGGGSGGGGSYWKEGCLQSELIQFHLKKERAAAAAAAAQMHAKNGGGSSSRSSPVSGPPAVCETLAVASASPMAAAAEGPQQSAEGSASGGGMQAAAPPSSQPHPQQLQEQEEMQEEMEKLREENETLKNEIDELRTEMDEMRDTFFEEDACQLQEMRHELERANKNCRILQYRLRKAERKRLRYAQTGEIDGELLRSLEQDLKVAKDVSVRLHHELENVEEKRTTTEDENEKLRQQLIEVEIAKQALQNELEKMKELSLKRRGSKDLPKSEKKAQQTPTEEDNEDLKCQLQFVKEEAALMRKKMAKIDKEKDRFEHELQKYRSFYGDLDSPLPKGEAGGPPSTREAELKLRLRLVEEEANILGRKIVELEVENRGLKAELDDLRGDDFNGSANPLMREQSESLSELRQHLQLVEDETELLRRNVADLEEQNKRITAELNKYKYKSGGHDSARHHDNAKTEALQEELKAARLQINELSGKVMQLQYENRVLMSNMQRYDLASHLGIRGSPRDSDAESDAGKKESDDDSRPPHRKREGPIGGESDSEEVRNIRCLTPTRSFYPAPGPWPKSFSDRQQMKDIRSEAERLGKTIDRLIADTSTIITEARIYVANGDLFGLMDEEDDGSRIREHELLYRINAQMKAFRKELQTFIDRLEVPKSADDRGAEEPISMFQPIILLILILVLFSSLSYTTIFKLVFLFTLFFVL

SEQ ID NO: 60676 - protein, 289 aa, Homo sapiens
MAMNYNAKDEVDGGPPCAPGGTAKTRRPDNTAFKQQRLPAWQPILTAGTVLPIFFIIGLIFIPIGIGIFVTSNNIREIENPSKECEPYRRNEDKPIAPCGAIANSMFNDTLELFLIGNDSYPIPIALKKKGIAWWTDKNVKFRNPPGGDNLEERFKGTTKPVNWLKPVYMLDSDPDNNGFINEDFIVWMRTAALPTFRKLYRLIERKSDLHPTLPAGRYSLNVTYNYPVHYFDGRKRMILSTISWMGGKNPFLGIAYIAVGSISFLLGVVLLVINHKYRNSSNTADITI

SEQ ID NO: 60677 - protein, 471 aa, Homo sapiens
MDPSADTWDLSSPLISLWINRFYIYLGFAVSISLWICVQIVIEMQGFATVLAEAVTSLDLPVAIINLKEYDPDDHLIEEEEEPFESSSEEEFGGEDHQSLNSIVDVEDLGKIMDHVKKEKREKEQQEEKSGLFRNMGRNEDGERRAMITPALREALTKQVDAPRERSLLQTHILWNESHRCMETTPSLACANKCVFCWWHHNNPVGTEWLWKMDQPEMILKEAIENHQNMIKQFKGVPGVKAERFEEGMTVKHCALSLVGEPIMYPEINRFLKLLHQCKISSFLVTNAQFPAEIRNLEPVTQLYVSVDASTKDSLKKIDRPLFKDFWQQFLDSLKALAVKQQRTVYRLMLVKAWNVDELQAYAQLVSLGNPDFIEVKGVTYCRESSASSLTMAHVPWHEEVVQFVRELVDLIPEYEIACEHEHSNCLLIAHRKTVLGGTPGHGVTEIQWEEWIKKRLISQARWLISVIPAH

SEQ ID NO: 60678 - protein, 243 aa, Homo sapiens
MFANLKYVSLGILVFQTTSLVLTMRYSRTLKEEGPRYLSSTAVVVAELLKIMACILLVYKDSKCSLRALNRVLHDEILNKPMETLKLAIPSGIYTLQNNLLYVALSNLDAATYQVTYQLKILTTALFSVSMLSKKLGVYQWLSLVILMTGVAFVQWPSDSQLDSKELSAGSQFVGLMAVLTACFSSGFAGVYFEKILKETKQSVWIRNIQLDGYMHPVHPHVVRRLAYQHNQTVCRNSPTVEM

SEQ ID NO: 60679 - protein, 99 aa, Homo sapiens
MGMKTPQLVGNLGLEGADFFLTTMPTDSLSVSTLPLPEVQCFVFNVEYMNCTWNSSSEPQPTNLTLHYWYKNSDNDKVQKCSHYLFSEEITSGCQLQKK

SEQ ID NO: 60680 - protein, 173 aa, Homo sapiens
MAELQEVQITEEKPLLPGQTPEAAKPLFQFEDMQEIIQNFVRVHVDAPGMEEGAPVFPLGYQYPSLDQLADMIPCVLQYLNFSTIIGVGVGAGAYILARYALNHPDTVEGLVLINIDPNAKGWMDWAAHKLTGLTSSIPEMILGHLFSQEELSGNSELIQKYRNIITHAPNLD

SEQ ID NO: 60681 - protein, 215 aa, Homo sapiens
MSYGPLDMYRNPGPSGPQLRDFSSIIQTCSGNIQRISQATAQIKNLMSQLGTKQDSSKLQENLQQLQHSTNQLAKETNELLKELGSLPLPLSTSEQRQQRLQKERLMNDFSAALNNFQAVQRRVSEKEKESIARARAGSRLSAEERQREEQLVSFDSSLLLDMKNVALQDFIDSRGLEPCHEEWNQMQSQEDEVAITEQDLELIKERETAIRQLE

SEQ ID NO: 60682 - protein, 436 aa, Homo sapiens
MSTSWSDRLQNAADMPANMDKHALKKYRREAYHRVFVNRSLAMEKIKCFGFDMDYTLAVYKSPEYESLGFELTVERLVSIGYPQELLSFAYDSTFPTRGLVFDTLYGNLLKVDAYGNLLVCAHGFNFIRGPETREQYPNKFIQRDDTERFYILNTLFNLPETYLLACLVDFFTNCPRYTSCETGFKDGDLFMSYRSMFQDVRDAVDWVHYKGSLKEKTVENLEKYVVKDGKLPLLLSRMKEVGKVFLATNSDYKYTDKIMTYLFDFPHGPKPGSSHRPWQSYFDLILVDARKPLFFGEGTVLRQVDTKTGKLKIGTYTGPLQHGIVYSGGSSDTICDLLGAKGKDILYIGDHIFGDILKSKKRQGWRTFLVIPELAQELHVWTDKSSLFEELQSLDIFLAELYKHLDSSSNERPDISSIQRRIKLPLQGCPCLDAS

SEQ ID NO: 60683 - protein, 148 aa, Homo sapiens
MAGILFEDIFDVKDIDPEGKKFDRVSRLHCESESFKMDLILDVNIQIYPVDLGDKFRLVIASTLYEDGTLDDGEYNPTDDRPSRADQFEYVMYGKVYRIEGDETSTEAATRLSAYVSYGGLLMRLQGDANNLHGFEVDSRVYLLMKKL

SEQ ID NO: 60684 - protein, 584 aa, Homo sapiens
MSDNQSWNSSGSEEDPETESGPPVERCGVLSKWTNYIHGWQDRWVVLKNNALSYYKSEDETEYGCRGSICLSKAVITPHDFDECRFDISVNDSVWYLRAQDPDHRQQWIDAIEQHKTESGYGSESSLRRHGSMVSLVSGASGYSATSTSSFKKGHSLREKLAEMETFRDILCRQVDTLQKYFDACADAVSKDELQRDKVVEDDEDDFPTTRSDGDFLHSTNGNKEKLFPHVTPKGINGIDFKGEAITFKATTAGILATLSHCIELMVKREDSWQKRLDKETEKKRRTEEAYKNAMTELKKKSHFGGPDYEEGPNSLINEEEFFDAVEAALDRQDKIEEQSQSEKVRLHWPTSLPSGDAFSSVGTHRFVQKVEEMVQNHMTYSLQDVGGDANWQLVVEEGEMKVYRREVEENGIVLDPLKATHAVKGVTGHEVCNYFWNVDVRNDWETTIENFHVVETLADNAIIIYQTHKRVWPASQRDVLYLSVIRKIPALTENDPETWIVCNFSVDHDSAPLNNRCVRAKINVAMICQTLVSPPEGNQEISRDNILCKITYVANGLLGCKPHISRKYPKLKTDRRTDGQTDG

SEQ ID NO: 60685 - protein, 103 aa, Homo sapiens
MESVALYSFQATESDELAFNKGDTLKILNMEDDQNWYKAELRGVEGFIPKNYIRVKPHPWYSGRISRQLAEEILMKRNHLGAFLIRESESSPGEFSVSVKWAN

SEQ ID NO: 60686 - protein, 1374 aa, Homo sapiens
METQLQSIFEEVVKTEVIEEAFPGMFMDTPEDEKTKLISCLGAFRQFWGGLSQESHEQCIQWIVKFIHGQHSPKRISFLYDCLAMAVETGLLPPRLVCESLINSDTLEWERTQLWALTFKLVRKIIGGVDYKGVRDLLKVILEKILTIPNTVSSAVVQQLLAAREVIAYILERNACLLPAYFAVTEIRKLYPEGKLPHWLLGNLVSDFVDTFRPTARINSICGRCSLLPVVNNSGAICNSWKLDPATLRFPLKGLLPYDKDLFEPQTALLRYVLEQPYSRDMVCNMLGLNKQTLNIAQHKQRCPVLEDQLVDLVVYAMERSETEEKFDDGGTSQLLWQHLSSQLIFFVLFQFASFPHMVLSLHQKLAGRGLIKGRDHLMWVLLQFISGSIQKNALADFLPVMKLFDLLYPEKEYIPVPDINKPQSTHAFAMTCIWIHLNRKAQNDNSKLQIPIPHSLRLHHEFLQQSLRNKSLQMNDYKIALLCNAYSTNSECFTLPMGALVETIYGNGIMRIPLPGTNCMASGSITPLPMNLLDSLTVHAKMSLIHSIATRVIKLAHAKSSVALAPALVETYSRLLVYMEIESLGIKGFISQLLPTVFKSHAWGILHTLLEMFSYRMHHIQPHYRVQLLSHLHTLAAVAQTNQNQLHLCVESTALRLITALGSSEVQPQFTRFLSDPKTVLSAESEELNRALILTLARATHVTDFFTGSDSIQGTWCKDILQTIMSFTPHNWASHTLSCFPGPLQAFFKQNNVPQESRFNLKKNVEEEYRKWKSMSNENDIITHFSMQGSPPLFLCLLWKMLLETDHINQIGYRVLERIGARALVAHVRTFADFLVYEFSTSAGGQQLNKCIEILNDMVWKYNIVTLDRLILCLAMRSHEGNEAQVCYFIIQLLLLKPNDFRNRVSDFVKENSPEHWLQNDWHTKHMNYHKKYPEKLYFEGLAEQVDPPVQIQSPYLPIYFGNVCLRFLPVFDIVIHRFLELLPVSKSLETLLDHLGGLYKFHDRPVTYLYNTLHYYEMHLRDRAFLKRKLVHAIIGSLKDNRPQGWCLSDTYLKCAMNAREENPWVPDDTYYCRLIGRLVDTMAGKSPGPFPNCDWRFNEFPNPAAHALHVTCVELMALAVSGKEVGNALLNVVLKSQPLVPRENITAWMNAIGLIITALPEPYWIVLHDRIVSVISSPSLTSETEWVGYPFRLFDFTACHQSYSEMSCSYTLALAHAVWHHSSIGQLSLIPKFLTEVLLPIVKTEFQLLYVYHLVGPFLQRFQQERTRCMIEIGVAFYDMLLNVDQCSTHLNYMDPICDFLYHMKYMFTGDSVKEQVKKIICNLKPALKLRLRFITHISKMEPAAVPPQAMNSGSPAPQSNQVPVSLPVTQ

SEQ ID NO: 60687 - protein, 55 aa, Homo sapiens
MTPLSEQEMNAHLAEESRKYQNEFNTNVAMAEIYKYAKRYRPQLLYIKKRIMHQL

SEQ ID NO: 60688 - protein, 110 aa, Homo sapiens
  MOD_RES (1)..(1): Any amino acid
XEDHKEDILCGPVWLASGLDLSGHAGMLTLTSPKLVKGMAGGKYRSFLIHVKAVNERGTEEICNGGMRPVVRLPSLKHQSNKGYSLASLLAKVAAGKSATMCHVTVFRIS

SEQ ID NO: 60689 - protein, 149 aa, Homo sapiens
MEGGGGIPLETLKEESQSRHVLPASFEVNSLQKSNWGFLLTGLVGGTLVAVYAVATPFVTPALRKVCLPFVPATTKQIENVVKMLRCRRGSLVDIGSGDGRIVIFIAYYYLFTKPSSQTLSFHCCCASPLMERCSGFSAMFCSTSPGVG

SEQ ID NO: 60690 - protein, 99 aa, Homo sapiens
MPIRALCTICSDFFDHSRDVAAIHCGHTFHLQCLIQWFETAPSRTCPQCRIQVGKRTIINKLFFDLAQEEENVLDAEFLKNELDNVRAQLSQKVADSLL

SEQ ID NO: 60691 - protein, 105 aa, Homo sapiens
MSAESGPGTRLRNLPVMGDGLETSQMSTTQAQAQPQPANAASTNPPPPETSNPNKPKRQTNQLQYLLRVVLKTLWKHQFAWPFQQPVDAVKLNLPDYYKIIKTPM

SEQ ID NO: 60692 - protein, 84 aa, Homo sapiens
MFEIDYSRDSFLKDGQPFRYISGSIHYSRVPRFYWKDRLLKMKMAGLNAIQTLPGSCGQVVGSPSAQDEASPLSEWRASYNSAG

SEQ ID NO: 60693 - protein, 64 aa, Homo sapiens
MFRAAAPGQLRRAASLLRFQSTLVIAEHANDSLAPITLNTITAATRLGGEVSCLVAGTKCDKRN

SEQ ID NO: 60694 - protein, 22 aa, Homo sapiens
MEHRIVGPGPYRATRLGLILLS

SEQ ID NO: 60695 - protein, 116 aa, Homo sapiens
MSRLGALGGARAGLGLLLGLYADFRSRTPRDAPAGCPRWGWRCLSAAQPSTGRTGEGAGPPGLCADQPCGAAAGGGGAEKQPARACGGDCWGGPMPHGREPESGSAAKVSVCPGEE

SEQ ID NO: 60696 - protein, 460 aa, Homo sapiens
IYFQLHRALKMIVDPVEPHGEMKFQWDLNAWTKSAEAFGKIVAERPGTNSTGPAPMAPPRAPGPLSKQGSGSSQPMEVQEGYGFGSEPHVSGVKRSRSGEGEVSGLMRKVPRVSLERLDLDLTADSQPPVFKVFPGSTTEDYNLIVIERGAAAAATGQPGTAPAGTPGAPPLAGMAIVKEEETEAAIGAPPTATEGPETKPVLMALAEGPGAEGPRLASPSGSTSSGLEVVAPEGTSAPGGGPGTLDDSATICRVCQKPGDLVMCNQCEFCFHLDCHLPALQDVPGEEWSCSLCHVLPDLKEEDGSLSLDGADSTGVVAKLSPANQRKCERVLLALFCHEPCRPLHQLATDSTFSLDQPGGTLDLTLIRARLQEKLSPPYSSPQEFAQDVGRMFKQFNKLTEDKADVQSIIGLQRFFETRMNEAFGDTKFSAVLVEPPPMSLPGAGLSSQELSGGPGDGP

SEQ ID NO: 60697 - protein, 69 aa, Homo sapiens
MACASPWLGQRMPGGNNPTPTPSHPRTLRAVEALSSNPAGPGLVCAGSGRQQPESQTWRVPSSARRGGS

SEQ ID NO: 60698 - protein, 223 aa, Homo sapiens
MAGAAAGGRGGGAWGPGRGGAGGLRRGCSPPAPAGSPRAGLQPLRATIPFQLQQPHQRRDGGGRAASVPCSVAPEKSVCRPQPLQVRRTFSLDTILSSYLLGQWPRDADGAFTCCTNDKATQISKLKQQLQRTKLSRSGKEKERGSPLLGDHAVRGALRASPPSFPSGSPVLRLSPCLHRSLEGLNQELEEVFVKEQGEEELLRILDIPDGHRAPAPPQSGSC

SEQ ID NO: 60699 - protein, 1046 aa, Homo sapiens
MENLPAVTTEEPTPMGRGPVGPSGGGSTRDQVRTVVMRPSVSWEKAGPEEAKAPVRGDEAPPARVAGPAAGTPPCQMGVYPTDLTLQLLAVRRKSRLRDPGLQQTLRGQLRLLENDSREMARVLGELSARLLSIHSDQDRIVVTFKTFEEIWKFSTYHALGFTHHCLANLLMDQAFWLLLPSEEEETAIQVHVDENALRLTHESLLIQEGPFFVLCPDHHVRVMTGPRDAGNGPQALRQASGAPQGEAAPETDSSPPSPSVSSEEVAVAAAPEPLIPFHQWALRIPQDPIDDAMGGPVMPGNPLMAVGLASALADFQGSGPEEMTFRGGDLIEILGAQVPSLPWCVGRHAASGRVGFVRSSLISMQGPVSELESAIFLNEEEKSFFSEGCFSEEDARQLLRRMSGTDVCSVYSLDSVEEAETEQPQEKEIPPPCLSLEPQETLQKVKNVLEQCKTCPGCPQEPASWGLCAASSDVSLQDPEEPSFCLEAEDDWEDPEALSSLLLFLNAPGYKASFRGLYDVALPWLSSVFRSFSDEEELTGRLAQARGAAKKAGLLMALARLCFLLGRLCSRRLKLSQARVYFEEALGALEGSFGDLFLVVAVYANLASIYRKQKNREKCAQVVPKAMALLLGTPDHICSTEAEGELLQLALRRAVGGQSLQAEARACFLLARHHVHLKQPEEALPFLERLLLLHRDSGAPEAAWLSDCYLLLADIYSRKCLPHLVLSCVKVASLRTRGSLAGSLRSVNLVLQNAPQPHSLPAQTSHYLRQALASLTPGTGQALRGPLYTSLAQLYSHHGCHGPAITFMTQAVEASAIAGVRAIVDHLVALAWLHVLHGQSPVALDILQSVRDAVVASEDQEGVIANMVAVALKRTGRTRQAAESYYRALRVARDLGQQRNQAVGLANFGALCLHAGASRLAQHYLLEAVRLFSRLPLGECGRDFTHVLLQLGHLCTRQGPAQQGKGYYEWALLVAVEMGHVESQLRAVQRLCHFYSAVMPSEAQCVIYHELQLSLACKVADKVLEGQLLETISQLYLSLGTERAQ

SEQ ID NO: 60700 - protein, 3240 aa, Homo sapiens
MLDLTVEENIGDGSKIMQLTAMDADEGANALVTYTIISGADDSFRIDPESGDLIATRRLDRERRSKYSLLVRADDGLQSSDMRINITVSDVNDHTPKFSRPVYSFDIPEDTIPGSLVAAILATDDDSGVNGEITYIVNEDDEDGIFFLNPITGVFNLTRLLDYEVQQYYILTVRAEDGGGQFTTIRVYFNILDVNDNPPIFSLNSYSTSLMENLPVGSTVLVFNVTDADDGINSQLTYSIASGDSLGQFTVDKNGVLKVLKALDRESQSFYNLVVQVHDLPQIPASRFTSTAQVSIILLDVNDNPPTFLSPKLTYIPENTPIDTVVFKAQATDPDSGPNSYIEYTLLNPLGNKFSIGTIDGEVRLTGELDREEVSNYTLTVVATDKGQPSLSSSTEVVVMVLDINDNNPIFAQALYKVEINENTLTGTDIIQVFAADGDEGTNGQVRYGIVNGNTNQEFRIDSVTGAITVAKPLDREKTPTYHLTVQATDRGSTPRTDTSTVSIVLLDINDFVPVFELSPYSVNVPENLGTLPRTILQVVARDDDRGSNSKLSYVLFGGNEDNAFTLSASGELGVTQSLDRETKERFVLMITATDSGSPALTGTGTINVIVDDVNDNVPTFASKAYFTTIPEDAPTGTDVLLVNASDADASKNAVISYRIIGGNSQFTINPSTGQIITSALLDRETKDNYTLVVVCSDAGSPEPLSSSTSVLVTVTDVNDNPPRFQHHPYVTHIPSPTLPGSFVFAVTVTDADIGPNSELHYSLSGRNSEKFHIDPLRGAIMAAGPLNGASEVTFSVHVKDGGSFPKTDSTTVTVRFVNKADFPKVRAKEQTFMFPENQPVSSLVTTITGSSLRGEPMSYYIASGNLGNTFQIDQLTGQVSISQPLDFEKIQKYVVWIEARDGGFPPFSSYEKLDITVLDVNDNAPIFKEDPFISEILENLSPRKILTVSAMDKDSGPNGQLDYEIVNGNMENSFSINHATGEIRSVRPLDREKVSHYVLTIKSSDKGSPSQSTSVKVMINILDENDNAPRFSQIFSAHVPENSPLGYTVTRVTTSDEDIGINAISRYSIMDASLPFTINPSTGDIVISRPLNREDTDRYRIRVSAHDSGWTVSTDVTIFVTDINDNAPRFSRTSYYLDCPELTEIGSKVTQVFATDPDEGSNGQVFYFIKSQSEYFRINATTGEIFNKQILKYQNVTGFSNVNINRHSFIVTSSDRGKPSLISETTVTINIVDSNDNAPQFLKSKYFTPVTKNVKVGTKLIRVTAIDDKDFGLNSEVEYFISNDNHLGKFKLDNDTGWISVASSLISDLNQNFFITVTAKDKGNPPLSSQATVHITVTEENYHTPEFSQSHMSATIPESHSIGSIVRTVSARDRDAAMNGLIKYSISSGNEEGIFAINSSTGILTLAKALDYELCQKHEMTISAIDGGWVARTGYCSVTVNVIDVNDNSPVFLSDDYFPTVLENAPSGTTVIHLNATDADSGTNAVIAYTVQSSDSDLFVIDPNTGVITTQGFLDFETKQSYHLTVKAFNVPDEERCSFATVNIQLKGTNEYVPRFVSKLYYFEISEAAPKGTIVGEVFASDRDLGTDGEVHYLIFGNSRKKGFQINKKTGQIYVSGILDREKEERVSLKVLAKNFGSIRGADIDEVTVNVTVLDANDPPIFTLNIYSVQISEGVPIGTHVTFVSAFDSDSIPSWSRFSYFIGSGNENGAFSINPQTGQITVTAELDRETLPIYNLSVLAVDSGTPSATGSASLLVTLEDINDNGPMLTVSEGEVMENKRPGTLVMTLQSTDPDLPPNQGPFTYYLLSTGPATSYFSLSTAGVLSTTREIDREQIADFYLSVVTKDSGVPQMSSTGTVHITVIDQNDNPSQSRTVEIFVNYYGNLFPGGILGSVKPQDPDVLDSFHCSLTSGVTSLFSIPGGTCDLNSQPRSTDGTFDLTVLSNDGVHSTVTSNIRVFFAGFSNATVDNSILLRLGVPTVKDFLTNHYLHFLRIASSQLTGLGTAVQLYSAYEENNRTFLLAAVKRNHNQYVNPSGVATFFESIKEILLRQSGVKVESVDHDSCVHGPCQNGGSCLRRLAVSSVLKSRESLPVIIVANEPLQPFLCKCLPGYAGSWCEIDIDECLPSPCHSGGTCHNLVGGFSCSCPDGFTGRACERDINECLQSPCKNGAICQNFPGSFNCVCKTGYTGKMCESSVNYCECNPCFNGGSCQSGVDSYYCHCPFGVFGKHCELNSYGFEELSYMEFPSLDPNNNYIYVKFATIKSHALLLYNYDNQTGDRAEFLALEIAEERLRFSYNLGSGTYKLTTMKKVSDGHFHTVIARRAGMAASLTVDSCSENQEPGYCTVSNVAVSDDWTLDVQPNRVTVGGIRSLEPILQRRGHVESHDFVGCIMEFAVNGRPLEPSQALAAQGILDQCPRLEGACTRSPCQHGGTCMDYWSWQQCHCKEGLTGKYCEKSVTPDTALSLEGKGRLDYHMSQNEKREYLLRQSLRGAMLEPFGVNSLEVKFRTRSENGVLIHIQESSNYTTVKIKNGKVYFTSDAGIAGKVERNIPEVYVADGHWHTFLIGKNGTATVLSVDRIYNRDIIHPTQDFGGLDVLTISLGGIPPNQAHRDAQTAGFDGCIASMWYGGESLPFSGKHSLASISKTDPSVKIGCRGPNICASNPCWGDLLCINQWYAYRCVPPGDCASHPCQNGGSCEPGLHSGFTCSCPDSHTGRTCEMVVACLGVLCPQGKVCKAGSPAGHVCVLSQGPEEISLPLWAVPAIVGSCATVLALLVLSLILCNQCRGKKAKNPKEEKKPKEKKKKGSENVAFDDPDNIPPYGDDMTVRKQPEGNPKPDIIERENPYLIYDETDIPHNSETIPSAPLASPEQEIEHYDIDNASSIAPSDADIIQHYKQFRSHTPKFSIQRHSPLGFARQSPMPLGASSLTYQPSYGQGLRTSSLSHSACPTPNPLSRHSPAPFSKSSTFYRNSPARELHLPIRDGNTLEMHGDTCQPGIFNYATRLGRRSKSPQAMASHGSRPGSRLKQPIGQIPLESSPPVGLSIEEVERLNTPRPRNPSICSADHGRSSSEEDCRRPLSRTRNPADGIPAPESSSDSDSHESFTCSEMEYDREKPMVYTSRMPKLSQVNESDADDEDNYGARLKPRRYHGRRAEGGPVGTQAAAPGTADNTLPMKLGQQAGTFNWDNLLNWGPGFGHYVDVFKDLASLPEKAAANEEGKAGTTKPVPKDGEAEQYV

SEQ ID NO: 60701 - protein, 608 aa, Homo sapiens
MALSDEPAAGGPEEEAEDETLAFGAALEAFGESAETRALLGRLREVHGGGAEREVALERFRVIMDKYQEQPHLLDPHLEWMMNLLLDIVQDQTSPASLVHLAFKFLYIITKVRGYKTFLRLFPHEVADVEPVLDLVTIQNPKDHEAWETRYMLLLWLSVTCLIPFDFSRLDGNLLTQPGQARMSIMDRILQIAESYLIVSDKARDAAAVLVSRFITRPDVKQSKMAEFLDWSLCNLARSSFQTMQGVITMDGTLQALAQIFKHGKREDCLPYAATVLRCLDGCRLPESNQTLLRKLGVKLVQRLGLTFLKPKVAAWRYQRGCRSLAANLQLLTQGQSEQKPLILTEDDDEDDDVPEGVERVIEQLLVGLKDKDTVVRWSAAKGIGRMAGRLPRALADDVVGSVLDCFSFQETDKAWHGGCLALAELGRRGLLLPSRLVDVVAVILKALTYDEKRGACSVGTNVRDAACYVCWAFARAYEPQELKPFVTAISSALVIAAVFDRDINCRRAASAAFQENVGRQGTFPHGIDILTTADYFAVGNRSNCFLVISVFIAGFPEYTQPMIDHLVTMKISHWDGVIRELAARALHNLAQQAPEFSATQGVWEDSS

SEQ ID NO: 60702 - protein, 787 aa, Homo sapiens
MFSPTSAPALFLTKVPFSADCALATSPLAIFLNPRAHSSPGTPCSSRPLPWSCRTSNRKSLIVTSSTSPTLPRPHSPLHGHTGNSPLDSPRNFSPNAPAHFSFVPARRTDGRRWSLASLPSSGYGTNTPSSTVSSSCSSQEKLHQLPFQPTADELHFLTKHFSTESVPDEEGRQSPAMRPRSRSLSPGRSPVSFDSEIIMMNHVYKERFPKATAQMEERLAEFISSNTPDSVLPLADGALSFIHHQVIEMARDCLDKSRSGLITSQYFYELQDNLEKLLQDAHERSESSEVAFVMQLVKKLMIIIARPARLLECLEFDPEEFYHLLEAAEGHAKEGQGIKCDIPRYIVSQLGLTRDPLEEMAQLSSCDSPDTPETDDSIEGHGASLPSKKTPSEEDFETIKLISNGAYGAVFLVRHKSTRQRFAMKKINKQNLILRNQIQQAFVERDILTFAENPFVVSMFCSFDTKRHLCMVMEYVEGGDCATLLKNIGALPVDMVRLYFAETVLALEYLHNYGIVHRDLKPDNLLITSMGHIKLTDFGLSKIGLMSLTTNLYEGHIEKDAREFLDKQVCGTPEYIAPEVILRQGYGKPVDWWAMGIILYEFLVGCVPFFGDTPEELFGQVISDEIVWPEGDEALPPDAQDLTSKLLHQNPLERLGTGSAYEVKQHPFFTGLDWTGLLRQKAEFIPQLESEDDTSYFDTRSERYHHMDSEDEEEVSEDGCLEIRQFSSCSPRFNKVYSSMERLSLLEERRTPPPTKRSLSEEKEDHSDGLAGLKGRDRSWVIGSPE

SEQ ID NO: 60703 - protein, 614 aa, Homo sapiens
MAWEARREPGPRRAAVRETVMLLLCLGVPTGRPYNVDTESALLYQGPHNTLFGYSVVLHSHGANRWLLVGAPTANWLANASVINPGAIYRCRIGKNPGQTCEQLQLGSPNGEPCGKTCLEERDNQWLGVTLSRQPGENGSIVTCGHRWKNIFYIKNENKLPTGGCYGVPPDLRTELSKRIAPCYQDYVKKFGENFASCQAGISSFYTKDLIVMGAPGSSYWTGSLFVYNITTNKYKAFLDKQNQVKFGSYLGYSVGAGHFRSQHTTEVVGGAPQHEQIGKAYIFSIDEKELNILHEMKGKKLGSYFGASVCAVDLNADGFSDLLVGAPMQSTIREEGRVFVYINSGSGAVMNAMETNLVGSDKYAARFGESIVNLGDIDNDGFEDVAIGAPQEDDLQGAIYIYNGRADGISSTFSQRIEGLQISKSLSMFGQSISGQIDADNNGYVDVAVGAFRSDSAVLLRTRPVVIVDASLSHPESVNRTKFDCVENGWPSVCIDLTLCFSYKGKEVPGYIVLFYNMSLDVNRKAESPPRFYFSSNGTSDVITGSIQVSSREANCRTHQAFMRKDVRDILTPIQIEAAYHLGPHVISKRSTEEFPPLQPILQQKKEKDIMKK

SEQ ID NO: 60704 - protein, 38 aa, Homo sapiens
MTTSSIRRQMKNIVNNYSEAEIKVREATSNDPWGPSSS

SEQ ID NO: 60705 - protein, 208 aa, Homo sapiens
MWPQPHLPPHPMMSEKTRQNKLAEAKKKFTDYRQWNIAGVGTRATDTKKKKINNGTNPETTTSEGCHSPEDEKKASHQHQEALRREIEAQDHTIRILTCQKTELETALYYSQDAARKFEDGNLGTPSSFNLALSQAFRGSPLGCVSTSLIPGESKDLAGRLHHSWHFAGELQRALSAVSTWHKKADRYIEELTKERDALSLELYRNTI

SEQ ID NO: 60706 - protein, 156 aa, Homo sapiens
MDLSGVKKKSLLGVKENNKKSSTRAPSPTKRKDRSDEKSKDRSKDKGATKESSEKDRGRDKTRKRRSASSGSSSTRSRSSSTSSSGSSTSTGSSSGSSSSSASSRSGSSSTSRSSSSSSSSGSPNPNHLKEMKRRGKGGAHLLSPPKCTLGDSPGM

SEQ ID NO: 60707 - protein, 229 aa, Homo sapiens
MVFCLSSEEPRRPLRSDMVHFQASEVQQLLHNKFVVILGDSIQRAVYKDLVLLLQKDSLLTAAQLKAKYLEDVLEELTYGPAPDLVIINSCLWDLSRYGRCSMESYRENLERVFVRMDQVLPDSCLLVWNMAMPLGERITGGFLLPELQPLAGSLRRDVVEGNFYSATLAGDHCFDVLDLHFHFRHAVQHRHRDGVHWDQHAHRHLSHLLLTHVADAWGVELPKRGYPP

SEQ ID NO: 60708 - protein, 227 aa, Homo sapiens
MAAAAVQGGRSGGSGGCSGAGGASNCGTGSGRSGLLDKWKIDDKPVKIDKWDGSAVKNSLDDSAKKVLLEKYKYVENFGLIDGRLTICTISCFFAIVALIWDYMHPFPESKPVLALCVISSYFVMMGILTIYTSYKEKSIFLVAHRKDPTGMDPDDIWQLSSSLKRFDDKYTLKLTFISGRTKQQREAEFTKSIAKFFDHSGTLVMDAYEPEISRLHDSLAIERKIK

SEQ ID NO: 60709 - protein, 74 aa, Homo sapiens
MMAAGAALALALWLLMPPVEVGGAGPPPIQDGEFTFLLPAGRKQCFYQSAPANASLETEYQGGANGGRGLQAVL

SEQ ID NO: 60710 - protein, 504 aa, Homo sapiens
MNDFGIKNMDQVAPVANSYRGTLKRQPAFDTFDGSLFAVFPSLNEEQTLQEVPTGLDSISHDSANCELPLLTPCSKAVMSQALKATFSGFKKEQRRLGIPKNPWLWSEQQVCQWLLWATNEFSLVNVNLQRFGMNGQMLCNLGKERFLELAPDFVGDILWEHLEQMIKENQEKTEDQYEENSHLTSVPHWINSNTLGFGTEQAPYGMQTQNYPKGGLLDSMCPASTPSVLSSEQEFQMFPKSRLSSVSVTYCSVSQDFPGSNLNLLTNNSGTPKDHDSPENGADSFESSDSLLQSWNSQSSLLDVQRVPSFESFEDDCSQSLCLNKPTMSFKDYIQERSDPVEQGKPVIPAAVLAGFTGVCGTPRAWPPSLLGPVPCFLSSHSTTFTEGVSKLGSGPIQLWQFLLELLSDKSCQSFISWTGDGWEFKLADPDEVARRWGKRKNKPKMNYEKLSRGLRYYYDKNIIHKTSGKRYVYRFVCDLQNLLGFTPEELHAILGVQPDTED

SEQ ID NO: 60711 - protein, 111 aa, Homo sapiens
  MOD_RES (1)..(1): Any amino acid
XLRSGLRLGSRGLCTRLATPPRRAPDQAAEIGSRGSTKAQGPQQQPGSEGPSYAKKVALWLAGLLGAGGTVSVVYIFGNNPVDENGAKIPDEFDNETEFHHVGQDGLDLTS

SEQ ID NO: 60712 - protein, 78 aa, Homo sapiens
MAGPELLLDSNIRLWVVLPIVIITFFVGMIRHYVSILLQSDKKLTQEQVSDSQVLIRSRVLRENGKYIPKQSFLTRKY

SEQ ID NO: 60713 - protein, 161 aa, Homo sapiens
  MOD_RES (1)..(1): Any amino acid
XAPSAVPGLSKTSGRRVVSHEVVLGGRLAAKTSFSLSRPSSPRVEDLKGAALYSRLREYLLTQDQLKENGYPFPHPERPGGAIIFTAEEKRPKDSSCRTCCRCGTEYLVSSSGRCIRDEECYYHWGRLRRNRVAGGWETQYMCCSAAAGSVGCQVAKGPNQ

SEQ ID NO: 60714 - protein, 737 aa, Homo sapiens
MAQWNQLQQLDTRYLEQLHQLYSDSFPMELRQFLAPWIESQDWAYAASKESHATLVFHNLLGEIDQQYSRFLQESNVLYQHNLRRIKQFLQSRYLEKPMEIARIVARCLWEESRLLQTAATAAQDLEQKMKVVENLQDDFDFNYKTLKSQGDMQDLNGNNQSVTRQKMQQLEQMLTALDQMRRSIVSELAGLLSAMEYVQKTLTDEELADWKRRQQIACIGGPPNICLDRLENWITSLAESQLQTRQQIKKLEELQQKVSYKGDPIVQHRPMLEERIVELFRNLMKSAFVVERQPCMPMHPDRPLVIKTGVQFTTKVRLLVKFPELNYQLKIKVCIDKDSGDVAALRGSRKFNILGTNTKVMNMEESNNGSLSAEFKHLTLREQRCGNGGRANCDASLIVTEELHLITFETEVYHQGLKIDLETHSLPVVVISNICQMPNAWASILWYNMLTNNPKNVNFFTKPPIGTWDQVAEVLSWQFSSTTKRGLSIEQLTTLAEKLLGPGVNYSGCQITWAKFCKENMAGKGFSFWVWLDNIIDLVKKYILALWNEGYIMGFISKERERAILSTKPPGTFLLRFSESSKEGGVTFTWVEKDISGKTQIQSVEPYTKQQLNNMSFAEIIMGYKIMDATNILVSPLVYLYPDIPKEEAFGKYCRPESQEHPEADPGAAPYLKTKFICVTPTTCSNTIDLPMSPRTLDSLMQFGNNGEGAEPSAGGQFESLTFDMELTSECATSPM

SEQ ID NO: 60715 - protein, 101 aa, Homo sapiens
MEVGGDTAAPAPGGAEDLEDTQFPSEEAREGGGVHAVPPDPEDEGLEETGSKDKDQPPSPSPPPQSEALSSTSRLWSPAAPENSPTCSPESSSGGQGGDPS

SEQ ID NO: 60716 - protein, 138 aa, Homo sapiens
MTEGSMGVTLEASAEADLKAGNSCPELVPSRRSKLRKPKPVPLRKKAIGGEFSDTNAAVEGTPLPKASYHFSPEELDENTSPLLGDARFQKSPPDLKETPGTLSSDTNDSGVELGEESRSSPLKLEFDFTEDTGNIEA

SEQ ID NO: 60717 - protein, 247 aa, Homo sapiens
  MOD_RES (1)..(1): Any amino acid
XRYQGPRRRACSETLAESRTAVLQQRRAAQLPGGPAAAGEQRASPSKARLKEFLQQCDREDLVELALPQLAQVVTVYEFLLMKVEKDHLAKPFFPAIYKEFEELHKMVKKMCQDYLSSSGLCSQETLEINNDKVAESLGITEFLRKKEIHPDNLGPKHLSRDMDGEQLEGASSEKREREAAEEGLASVKRPRREALSNDTTESLAANSRGREKPRPLHALAAGTIVSQEEDIVTVTDAEGRACGWAR

SEQ ID NO: 60718 - protein, 1288 aa, Homo sapiens
MANGGGGGGGSSGGGGGGGGSSLRMSSNIHANHLSLDASSSSSSSSSSSSSSSSSSSSSSVHEPKMDALIIPVTMEVPCDSRGQRMWWAFLASSMVTFFGGLFIILLWRTLKYLWTVCCHCGGKTKEAQKINNGSSQADGTLKPVDEKEEAVAAEVGWMTSVKDWAGVMISAQTLTGRVLVVLVFALSIGALVIYFIDSSNPIESCQNFYKDFTLQIDMAFNVFFLLYFGLRFIAANDKLWFWLEVNSVVDFFTVPPVFVSVYLNRSWLGLRFLRALRLIQFSEILQFLNILKTSNSIKLVNLLSIFISTWLTAAGFIHLVENSGDPWENFQNNQALTYWECVYLLMVTMSTVGYGDVYAKTTLGRLFMVFFILGGLAMFASYVPEIIELIGNRKKYGGSYSAVSGRKHIVVCGHITLESVSNFLKDFLHKDRDDVNVEIVFLHNISPNLELEALFKRHFTQVEFYQGSVLNPHDLARVKIESADACLILANKYCADPDAEDASNIMRVISIKNYHPKIRIITQMLQYHNKAHLLNIPSWNWKEGDDAICLAELKLGFIAQSCLAQGLSTMLANLFSMRSFIKIEEDTWQKYYLEGVSNEMYTEYLSSAFVGLSFPTVCELCFVKLKLLMIAIEYKSANRESRILINPGNHLKIQEGTLGFFIASDAKEVKRAFFYCKACHDDITDPKRIKKCGCKRPKMSIYKRMRRACCFDCGRSERDCSCMSGRVRGNVDTLERAFPLSSVSVNDCSTSFRAFEDEQPSTLSPKKKQRNGGMRNSPNTSPKLMRHDPLLIPGNDQIDNMDSNVKKYDSTGMFHWCAPKEIEKVILTRSEAAMTVLSGHVVVCIFGDVSSALIGLRNLVMPLRASNFHYHELKHIVFVGSIEYLKREWETLHNFPKVSILPGTPLSRADLRAVNINLCDMCVILSANQNNIDDTSLQDKECILASLNIKSMQFDDSIGVLQANSQGFTPPGMDRSSPDNSPVHGMLRQPSITTGVNIPIITELVNDTNVQFLDQDDDDDPDTELYLTQPFACGTAFAVSVLDSLMSATYFNDNILTLIRTLVTGGATPELEALIAEENALRGGYSTPQTLANRDRCRVAQLALLDGPFADLGDGGCYGDLFCKALKTYNMLCFGIYRLRDAHLSTPSQCTKRYVITNPPYEFELVPTDLIFCLMQFDHNAGQSRASLSHSSHSSQSSSKKSSSVHSIPSTANRQNRPKSRESRDKQNATRMNRMGQEKKWFTDEPDNAYPRNIQIKPMSTHMANQINQYKSTSSLIPPIREVEDEC

SEQ ID NO: 60719 - protein, 1036 aa, Homo sapiens
MGLGTLSPRMLVWLVASGIVFYGELWVCAGLDYDYTFDGNEEDKTETIDYKDPCKAAVFWGDIALDDEDLNIFQIDRTIDLTQNPFGNLGHTTGGLGDHAMSKKRGALYQLIDRIRRIGFGLEQNNTVKGKVPLQFSGQNEKNRVPRAATSRTERIWPGGVIPYVIGGNFTGSQRAMFKQAMRHWEKHTCVTFIERSDEESYIVFTYRPCGCCSYVGRRGNGPQAISIGKNCDKFGIVVHELGHVIGFWHEHTRPDRDNHVTIIRENIQPGQEYNFLKMEPGEVNSLGERYDFDSIMHYARNTFSRGMFLDTILPSRDDNGIRPAIGQRTRLSKGDIAQARKLYRCPACGETLQESNGNLSSPGFPNGYPSYTHCIWRVSVTPGEKIVLNFTTMDLYKSSLCWYDYIEVRDGYWRKSPLLGRFCGDKLPEVLTSTDSRMWIEFRSSSNWVGKGFAAVYEAICGGEIRKNEGQIQSPNYPDDYRPMKECVWKITVSESYHVGLTFQSFEQEHQENPGIASKARESLILIWKPIERHDNCAYDYLEVRDGTSENSPLIGRFCGYDKPEDIRSTSNTLWMKFVSDGTVNKAGFAANFFKEEDECAKPDRGGCEQRCLNTLGSYQCACEPGYELGPDRRSCEAACGGLLTKLNGTITTPGWPKEYPPNKNCVWQVVAPTQYRISVKFEFFELEGNEVCKYDYVEIWSGLSSESKLHGKFCGAEVPEVITSQFNNMRIEFKSDNTVSKKGFKAHFFSDKDECSKDNGGCQHECVNTMGSYMCQCRNGFVLHDNKHDCKEAECEQKIHSPSGLITSPNWPDKYPSRKECTWEISATPGHRIKLAFSEFEIEQHQECAYDHLEVFDGETEKSPILGRLCGNKIPDPLVATGNKMFVRFVSDASVQRKGFQATHSTECGGRLKAESKPRDLYSHAQFGDNNYPGQVDCEWLLVSERGSRLELSFQTFEVEEEADCGYDYVELFDGLDSTAVGLGRFCGSGPPEEIYSIGDSVLIHFHTDDTINKKGFHIRYKSIRYPDTTHTKK

SEQ ID NO: 60720 - protein, 30 aa, Homo sapiens
MNPTSYDNVLIKWFPEVTHFCRGIPMVLIG

SEQ ID NO: 60721 - protein, 179 aa, Homo sapiens
MFLLLPFDSLIVNLLGISLTVLFTLLLVFIIVPAIFGVSFGIRKLYMKSLLKIFAWATLRMERGAKEKNHQLYKPYTNGIIAKDPTSLEEEIKEIRRSGSSKALDNTPEFELSDIFYFCRKGMETIMDDEVTKRFSAEELESWNLLSRTNYNFQYISLRLTVLWGLGVLIRYCFLLPLR

SEQ ID NO: 60722 - protein, 482 aa, Homo sapiens
MSGHKCSYPWDLQDRYAQDKSVVNKMQQKYWETKQAFIKATGKKEDEHVVASDADLDAKLELFHSIQRTCLDLSKAIVLYQKRICFLSQEENELGKFLRSQGFQDKTRAGKMMQATGKALCFSSQQRLALRNPLCRFHQEVETFRHRAISDTWLTVNRMEQCRTEYRGALLWMKDVSQELDPDLYKQMEKFRKVQTQVRLAKKNFDKLKMDVCQKVDLLGASRCNLLSHMLATYQTTLLHFWEKTSHTMAAIHESFKGYQPYEFTTLKSLQDPMKKLVEKEEKKKINQQESTDAAVQEPSQLISLEEENQRKESSSFKTEDGKSILSALDKGSTHTACSGPIDELLDMKSEEACLGPVAGTPEPEGADKDDLLLLSEIFNASSLEEGEFSKEWAAVFGDGQVKEPVPTMALGEPDPKAQTGSGFLPSQLLDQNMKDLQASLQEPAKAASDLTAWFSLFADLDPLSNPDAVGKTDKEHELLNA

SEQ ID NO: 60723 - protein, 235 aa, Homo sapiens
MLKCHVFRCEAPAKNIATSLHEICSKIMAERRNARCLVNGLSLDHSKLVDVPFQVEFPAPKNELVQKFQVYYLGNVPVAKPVGVDVINGALESVLSSSSREQWTPSHVSVAPATLTILHQQTEAVLGECRVRFLSFLAVGRDVHTFAFIMAAGPASFCCHMFWCEPNAASLSEAVQAACMLRYQKCLDARSQASTSCLPAPPAESVARRVGWTVRRGVQSLWGSLKPKRLGAHTP

SEQ ID NO: 60724 - protein, 396 aa, Homo sapiens
  MOD_RES (1)..(1): Any amino acid
XLARARTGSGKTAAYAIPMLQLLLHRKATGPVVEQAVRGLVLVPTKELARQAQSMIQQLATYCARDVRVANVSAAEDSVSQRAVLMEKPDVVVGTPSRILSHLQQDSLKLRDSLELLVVDEADLLFSFGFEEELKSLLCHLPRIYQAFLMSATFNEDVQALKELILHNPVTLKLQESQLPGPDQLQQFQVVCETEEDKFLLLYALLKLSLIRGKSLLFVNTLERSYRLRLFLEQFSIPTCVLNGELPLRSRCHIISQFNQGFYDCVIATDAEVLGAPVKGKRRGRGPKGDKASDPEAGVARGIDFHHVSAVLNFDLPPTPEAYIHRAGRTARANNPGIVLTFVLPTEQFHLGKIEELLSGENRGPILLPYQFRMEEIEGFRYRCRCPPPGCHALSD

SEQ ID NO: 60725 - protein, 273 aa, Homo sapiens
MFSHLPFDCVLLLLLLLLTRSSEVEYRAEVGQNAYLPCFYTPAAPGNLVPVCWGKGACPVFECGNVVLRTDERDVNYWTSRYWLNGDFRKGDVSLTIENVTLADSGIYCCRIQIPGIMNDEKFNLKLVIKPAETQTLGSLPDINLTQISTLANELRDSRLANDLRDSGATIRIGIYIGAGICAGLALALIFGALIFKWYSHSKEKIQNLSLISLANLPPSGLANAVAEGIRSEENIYTIEENVYEVEEPNEYYCYVSSRQQPSQPLGCRFAMP

SEQ ID NO: 60726 - protein, 203 aa, Homo sapiens
MCLDLAASWMKCPLDRAYLIKLSGLNKETYQSCLKSFECLLGLNSNIGIRDLAVQFSCIEAVNMASKILKSYESSLPQTQQVDLDLSRPLFTSAALLSACKILKLKVDKNKMVATSGVKKAIFDRLCKQLEKIGQQVDREPGDVATPPRKRKKIVVEAPAKEMEKVEEMPHKPQKDEDLTQDYEEWKRKILENAASAQKATAE

SEQ ID NO: 60727 - protein, 218 aa, Homo sapiens
AQVTVSTGPGAPWEEDEIRRDRVEPQSVSLSWREPIPAGAPGANDTEYEIRYYEKGQSEQTYSMVKTGAPTVTVTNLKPATRYVFQIRAASPGPSWEAQSFNPSIEVQTLGEAASGSRDQSPAIVVTVVTISALLVLGSVMSVLAIWRRPCSYGKGGGDAHDEEELYFHFKVPTRRTFLDPQSCGDLLQAVHLFAKELDAKSVTLERSLGGGLETSPH

SEQ ID NO: 60728 - protein, 136 aa, Homo sapiens
MKTLPLFVCICALSACFSFSEGRERDHELRHRRHHHQSPKSHFELPHYPGLLAHQKPFIRKSYKCLHKRCRPKLPPSPNNPPKFPNPHQPPKHPDKNSSVVNPTLVATTQIPSVTFPSASTKITTLPNVTFLPQNA

SEQ ID NO: 60729 - protein, 39 aa, Homo sapiens
MVLPIIQFREKDLTEVSTLKDLFGLASNAGCLRKRRMRR

SEQ ID NO: 60730 - protein, 81 aa, Homo sapiens
MVQAIKWVDEVVPAAPYVTTLETLDKYNCDFCVHGNDITLTVDGRDTYEEVKQAGRYRECKRTQGVSTTDLVGRMLLVTKA

SEQ ID NO: 60731 - protein, 138 aa, Homo sapiens
MGNAQERPSETIDRERKRLVETLQADSGLLLDALLARGVLTGPEYEALDALPDAERRVRRLLLLVQGKGEAACQELLRCAQRTAGAPDPAWDWQHVGPGYRDRSYDPPCPGHWTPEAPGSGTTCPGLPRASDPDEAGG

SEQ ID NO: 60732 - protein, 162 aa, Homo sapiens
MAWKTLPIYLLLLLSVFVIQQVSSQELSCKGRCFESFERGRECDCDAQCKKYDKCCPDYESFCAEEHSVSENQESSSSSSSSSSSSTIRKIKSSKNSAANRELQKKLKVKDNKKNRTKKKPTPKPPVVDEAGSGLDNGDFKVTTPDTSTTQHNKVSTSPKIT

SEQ ID NO: 60733 - protein, 195 aa, Homo sapiens
MDSFKVVLEGPAPWGFRLQGGKDFNVPLSISRLTPGGKAAQAGVAVGDWVLSIDGENAGSLTHIEAQNKIRACGERLSLGLSRAQPVQSKPQKAPTLPCPPALPGCVSAQASAPAADPPRYTFAPSVSLNKTARPFGAPPPADSAPQQNGQPLRPLVPDASKQRLMENTEDWRPRPGTGQSRSFRILAHLTGTEF

SEQ ID NO: 60734 - protein, 199 aa, Homo sapiens
  MOD_RES (1)..(1): Any amino acid
XSLIIMLLLNVPPTHAEVHQSLGRCLNALITTLGPELQGNSTSISTLRTSCLLGCAVMQDNPDCLVQAQAISCLQQLHMFAPRHVNLSSLVSCLCEILLDNSVLVNLCSPYLLLRRAVLACLRQLVQREAAEVSEHAVMLAKDSREELTPDANIREVGLEGALLILLDKETDERLCHDIKETLNYMLTSMAVEKLSLWL

SEQ ID NO: 60735 - protein, 810 aa, Homo sapiens
MPNQGEDCYFFFYSTCTKGDSCPFRHCEAALGNETVCTLWQEGRCFRRVCRFRHMEIDKKRSEIPCYWENQPTGCQKLNCVFHHNRGRYVDGLFLPPSKSVLPTVPESPEEEVKASQLSVQQNKLSVQSNTSPQLRSVMKVESSENVPSPKHPPVVINAADDDEDDDDQFSEEGDETKTPTLQPTPEVHNGLRVTSVRKPAVNIKQGECLHFGIKTLEEIKSKKMKEKSEEQGEGSSGVSSLLLHPEPVPGPEKENVRTVVRTVTLSTKQGEEPLVRLGLTETLGKRKFSTGGDSDPPLKRSLAQRLGKKVEAPETNTDETPKKAQVSKSLKERLGMSADPNNEDATDKVNKVGEIHVKTLEEMLLERASQKHGESQTKLKTEGPSKTDDSTSGARSSSTIRIKTFSEVLAEEEHRQQEAERQKSKKDTTCIKLKTDSEIKKTVVLPPIVASKGQSEEPAGKTKSMQEVHMKTVEEIKLEKALRVQQSSESSTSSPSQHEATPGARLLLRITKRTWRKEEKKLQEGNEVDFLSRVRMEATEASVETTGVDITKIQVKRCEIMRETRMQKQQEREKSVLTPLQGDVASCNTQVAEKPVLTAVPGITWHLTKQLPTKSSQKVEVETSGIADSLLNVKWSAQTLEKRGEAKPTVNVKQSVVKVVSSPKLAPKRKAVEMHPAVTAAVKPLSSSSVLQEPPAKKAAVDAVVLLDSEDKSVTVPEAENPRDSLVLPPTQSSSDSSPPEVSGPSSSQMSMKTRRLSSASTGKPPLSVEDDFEKLTWEISGGKLEAEIDLDPGKDEDDLPLELEMIDS

SEQ ID NO: 60736 - protein, 147 aa, Homo sapiens
MTEVQAMVEFSVELNKFYNVDLFQRGFYQIRASMKIPSRIPHRVEASLLHATGMTLAFPASVHDSLICSKTFQILYKNEEVVLNDVMIFKVKMLLDERKIEETLEEMNFLLSLDLHFTDGDYSSCIIGCTTPATNKLSSPCEDNLVK

SEQ ID NO: 60737 - protein, 207 aa, Homo sapiens
VIQQSGFSVFVVGVADVDYNELANIASKPSERHVFIVDDFESFEKIEDNLITFVCETATSSCPLIYLDGYTSPGFKMLEAYNLTEKNFASVQGVSLESGSFPSYSAYRIQKNAFVNQPTADLHPNGLPPSYTIILLFRLLPETPSDPFAIWQITDRDYKPQVGVIADPSSKTLSFFNKDTRGEVQTVTFDTEEVKTLFYGSFHKVKT

SEQ ID NO: 60738 - protein, 169 aa, Homo sapiens
MWPDDLQNHTFLHTVYCQDGSPSVGLSEAYDEDQLFFFDFSQNTRVPRLPEFADWAQEQGDAPAILFDKEFCEWMIQQIGPKLDGKIPVSRGFPIAEVFTLKPLEFGKPNTLVCFVSNLFPPMLTVNWQHHSVPVEGFGPTFVSAVDGLSFQAFSYLNFTPEPSDIFSC

SEQ ID NO: 60739 - protein, 16 aa, Homo sapiens
  MOD_RES (1)..(1): Any amino acid
XGDHLKRSGFQRSESC

SEQ ID NO: 60740 - protein, 309 aa, Homo sapiens
  MOD_RES (1)..(1): Any amino acid
XACDPGLSRTCDQNTYLSGLCYLFRQNLQGPMLQGRPGFQECIKGNVDLVFLFDGSMSLQPDEFQKILDFMKDVMKKLSNTSYQFAAVQFSTSYKTEFDFSDYVKRKDPDALLKHVKHMLLLTNTFGAINYVATEVFREELGARPDATKVLIIITDGEATDSGNIDAAKDIIRYIIGIGKHFQTKESQETLHKFASKPASEFVKILDTFEKLKDLFTELQKKIYVIEGTSKQDLTSFNMELSSSGISADLSRGHAVVGAVGAKDWAGGFLDLKADLQDDTFIGNEPLTPEVRAGYLGEYFSFLLGSSGC

SEQ ID NO: 60741 - protein, 162 aa, Homo sapiens
MRRVVRQSKFRHVFGQAVKNDQCYDDIRVSRVTWDSSFCAVNPRFVAIIIEASGGGAFLVLPLHKTGRIDKSYPTVCGHTGPVLDIDWCPHNDQVIASGSEDCTVMVWQIPENGLTLSLTEPVVILEGHSKRVGIVAWHPTARNVLLSAGCDNAIIIWNVGT

SEQ ID NO: 60742 - protein, 192 aa, Homo sapiens
MASAAVESFVTKQLDLLELERDAEVEERRSWQENISLKELQSRGVCLLKLQVSSQRTGLYGRLLVTFEPRRYGSAAALPSNSFTSGDIVGLYDAANEGSQLATGILTRVTQKSVTVAFDESHDFQLSLDRENSYRLLKLANDVTYRRLKKPADILQHLPGHLPERSGFICAVSERTCHHPWTSWHWENHDCG

SEQ ID NO: 60743 - protein, 1758 aa, Homo sapiens
RQVTVHRDPIYGFGFVAGSERPVVVRSVRPGGPSENKLLAGDQIVAINEEDVSEAPRERLIELIRSAKEFIVLTVLHTHQSPKSAFISAAKKAKLRSNPVKVRFSEQVAVGETDAKMMKKEALLLIPNVLKVFLENGQIKSFTFDGRTTVKDVMLTLQDRLSLRFIEHFALVLEYAGPEQNHKFLLLQDKQPLAYVVQRTHYHGMKCLFRISFFPKDPVELLRRDPAAFEYLYIQSRNDVIRERFGMDPKPEMLLGLAALHIYITVSATRPSQKISLKNVEKEWGLEPFLPPSLLQVIKEKNLRKSLSQQLKAHQTHPSCGTKGSAIQAKLQYLRILNELPTFTGVLFNTVGLDEKQSATTLLVGPRHGISHVIDLKTNLTTVLSEFSKISKIQLFRENQGVARVETSIMDAKPLVLLMEWPEATNFACLIAGYCRLLLDSRKMVFSRPASQPLPPPMIKADYMHSAHRPVTGGHLGKKESSYVGSVGTSPRKSSRCTPPPADSELVSFCYLHMREQRKEQESRTDVNENLIFFEETRPRTKSDPTSKSSGQGYEVVPDDFDAASLDHEPCASRARSYTLDNSLGAEALNFYCDSCKAKLQEQLGPRKGGKPGSSRDNIVDLMSLPPPGSEEEEEEEDETTSLLPAIAAPPPGFRDNSSDEDDPKRRAVQSQEQGRHLRGLLYDEIPVTLIDSVQTRTVRDHAQELDDALVSTLQALEALAASEDGPHPPPPQTAGLIVLATITPESSLDSGHETNSSELTDMSEMMSAMKQHQNTTYFLAQHLNKDSLLARKDLPFRIQSCAAQAVLTAPYSLGRPDPNPSLQPIATGQSPGPPGARRKLPQSEGQVQGERTYSLAVHPALSPQLSEQKNLSLLSPVPEDKGPGHTRAGLEMSLRAATSSLSEEQVSELRDNLPKEVRLSPKLILDPKSSVTPAIISAALQQVVHNKSLVTAGGALGNPPSRGERRLEASMGRPEVSMMSSSASKNLKFKISPSAPETSWNSQHQLGAEVSSSPRAPTGSRADSLHLSQQEDSLPVQNFPPKSYLLRTSRESVGKQATGEVAGKGGPVGGKPTLQKQGTISSQGEKAQLESTPKRSKLEETSLVPRATYPMALQSPSCQSRSHSPSCQPHGHSPSSQSRGQSPSCQPRGQSPLRSQAASRQVSTMPSRKLETTLNGAHSTSEGPAKPKSSRGPFRLRNLFSATFPTRQKKETDERQAQLQKVKQYELEFLEELLKPPSQGELPGTEYLQPPAPGRCSCQLRSSPVQQGPGMSREQRRSCDCKRICRGGRPQATQTPVPSLRGRERDRVLPSQRQPEAGPGVSLSSPINVQRIRSTSLESRECRSDPESGVSCLTTCASGGECLGAPNYRKLMRRYSISELDQGDRASLTSDVYPHPPLGMLPREAKEVEASLPIALGPKSRSLESPTLGDPSYVQVAPETKGPRQMAVFSLPEEVYRKPAELDEDSESSKCCSIRYCFYYRKCDMADDASDGKDELSYSIPMKILPGMKLDEQVVPVVSRTLQVLDAATCSSSSPEASRTQEIDLRVSTFEGSLAKINALRAHAYGLPDGFLAARLDTNELLTVLRQCVASPEARAPKPYVSQISEYKLELALKFKELRASCRRVANVDKSPTHMLAAITGSFQVLSSLIETFVRLVFIVRSEAQRQELLAKVEEVVRNYTFLLRAAEESTARNLNQQQQQQQQQQQQQQQQQQQQQQQQQQQVAAAAGAATEHPPGSPTSATVMSTFTHSLKTLIK

SEQ ID NO: 60744 - protein, 88 aa, Homo sapiens
ARAYALLLQHLPVLVWLPRYPVRDWLLGDLLSGLSVAIMQLPQGLAYALLAGLPPVFGLYSSFYPVFIYFLFGTSRHISVGLERLHDQ

SEQ ID NO: 60745 - protein, 1009 aa, Homo sapiens
MNGEYRGRGFGRGRFQSWKRGRGGGNFSGKWREREHRPDLSKTTGKRTSEQTPQFLLSTKTPQSMQSTLDRFIPYKGWKLYFSEVYSDSSPLIEKIQAFEKFFTRHIDLYDKDEIERKGSILVDFKELTEGGEVTNLIPDIATELRDAPEKTLACMGLAIHQVLTKDLERHAAELQAQEGLSNDGETMVNVPHIHARVYNYEPLTQLKNVRANYYGKYIALRGTVVRVSNIKPLCTKMAFLCAACGEIQSFPLPDGKYSLPTKCPVPVCRGRSFTALRSSPLTVTMDWQSIKIQELMSDDQREAGRIPRTIECELVHDLVDSCVPGDTVTITGIVKVSNAEEGSRNKNDKCMFLLYIEANSISNSKGQKTKSSEDGCKHGMLMEFSLKDLYAIQEIQAEENLFKLIVNSLCPVIFGHELVKAGLALALFGGSQKYADDKNRIPIRGDPHILVVGDPGLGKSQMLQAACNVAPRGVYVCGNTTTTSGLTVTLSKDSSSGDFALEAGALVLGDQGICGIDEFDKMGNQHQALLEAMEQQSISLAKAGVVCSLPARTSIIAAANPVGGHYNKAKTVSENLKMGSALLSRFDLVFILLDTPNEHHDHLLSEHVIAIRAGKQRTISSATVARMNSQDSNTSVLEVVSEKPLSERLKVVPGETIDPIPHQLLRKYIGYARQYVYPRLSTEAARVLQDFYLELRKQSQRLNSSPITTRQLESLIRLTEARARLELREEATKEDAEDIVEIMKYSMLGTYSDEFGNLDFERSQHGSGMSNRSTAKRFISALNNVAERTYNNIFQFHQLRQIAKELNIQYENPWTIPNMLSMTRIGLAPVLGYLIIEEDFNIALGVFALAGLTDLLDGFIARNWANQRSALGSALDPLADKILISILYVSLTYADLIPVPLTYMIISRDVMLIAAVFYVRYRTLPTPRTLAKYFNPCYATARLKPTFISKVNTAVQLILVAASLAAPVFNYADSIYLQILWCFTAFTTAASAYSYYHYGRKTVQVIKD

SEQ ID NO: 60746 - protein, 363 aa, Homo sapiens
MSFGRDMELEHFDERDKAQRYSRGSRVNGLPSPTHSAHCSFYRTRTLQTLSSEKKAKKVRFYRNGDRYFKGIVYAISPDRFRSFEALLADLTRTLSDNVNLPQGVRTIYTIDGLKKISSLDQLVEGESYVCGSIEPFKKLEYTKNVNPNWSVNVKTTSASRAVSSLATAKGSPSEVRENKDFIRPKLVTIIRSGVKPRKAVRILLNKKTAHSFEQVLTDITDAIKLDSGVVKRLYTLDGKQVMCLQDFFGDDDIFIACGPEKFRYQDDFLLDESECRVVKSTSYTKIASSSRRSTTKSPGPSRRSKSPASTSSVNGTPGSQLSTPRSGKSPSPSPTSPGSLRKQRDLYRPLSSDDLDSVGDSV

SEQ ID NO: 60747 - protein, 131 aa, Homo sapiens
GNGHEEVVACAWDGQTYIIDHNRTVVRFQVDENIRAFCAGLYACKEGRNSPCLVYVTFNQKIYVYWEVQLERMESTNLVKLLETKPEYHSLLQELGVDPDDLPVTRALLHQTLYHPDQPPQCAPSSLQDPT

SEQ ID NO: 60748 - protein, 28 aa, Homo sapiens
MNQGTSRHFNYPSTPPSERNGTSSTCQD

SEQ ID NO: 60749 - protein, 99 aa, Homo sapiens
  MOD_RES (1)..(1): Any amino acid
XPFSAPWWFWLSLTGVSLAGALGVKFVGLFIILQVGLNTIADLWYLFGDLSLSLVAEWLCSGSQVTVGKHLTARVLCLIVLPLALYTATFAVHFMVLSK

SEQ ID NO: 60750 - protein, 148 aa, Homo sapiens
MGLEEIAPCTSKRKTQCRCQPGMFCAAWALECTHCELLSDCPPGTEAELKDEVGKGNNHCVPCKAGHFQNTSSPSARCQPHTRCENQGLVEAAPGTAQSDTTCKNPLEPLPPEMSEPALSKGVENLQALLYQAATGSSEASFPTLSPL

SEQ ID NO: 60751 - protein, 112 aa, Homo sapiens
  MOD_RES (1)..(1): Any amino acid
XVVTETYYPTVWCWEGRGQTLLRPFITSKPPVQYRNELIKTADGGQISLDWFDNDNSTCYMDASTRPTILLLPGLTGTSKESYILHMIHLSEELGYRCVVFNNRGVAGENLL

SEQ ID NO: 60752 - protein, 752 aa, Homo sapiens
MEFHRVAQAGVELLSSGDPPASASQSVGIIGVSHCTWHRNFQGNYISYIDGNVWKAYSWTEKLILRENNLTELHKDSFEGLLSLQYLILNHNPLTTVEDPYLFKLPALKYLDMGTTLVPLTTLKNILMMTVELEKLIVPSHMACCLCQFKNSIEAVCKTVKLHCNSACLTNTTHCPEEASVGNPEGAFMKVLQARKNYTSTELIIEPEEPSDSSGINLSGFGSEQLDTNDESDVTSTLSYILPYFSAVNLDVKSLLLPFIKLPTTGNSLAKIQTVGKNRQRLNRVLMGPRSIQKRHFKEVGRQSIRREQGAQASVENTAEEKRLGSPAPRELKQPHTQQGPEKLAGNAVYTKPSFTQEHKAAVSVLKPFSKGAPSTSSPAKALPQVRDRWKDLTHAISILESAKARVTNMKTSKPIVHSRKKYRFHKTRSRMTHRTPKVKKSPKVRKKSYLSRLMLSNRLPFSAAKSLINSPSQGAFSSLRDLSPQENPFLEVSAPSEHFIENNNTKDTTARNAFEENVFMENTNMPEGTISENTNYNHPPEADSAGTAFNLGPTVKQTETKWEYNNVGTDLSPEPKSFNYPLLSSPGDQFEIQLTQQLQSVIPNNNVRRLIAHVIRTLKMDCSGAHVQVTCAKLVSRTGHLMKLLSGQQEVKASKIEWDTDQWKTENYINESTEAQSEQKEKSLEFTKELPGYGYTKKLILALIVTGILTILIILLCLIEICCHRRSLQEDEEGFSRDSEAPTEEESEALP

SEQ ID NO: 60753 - protein, 126 aa, Homo sapiens
GCVAVGAKGSCVPKYRGPVCSRRDSKDTEDYITEGIRFRDDIIKLNRKEGKKQNFPRLNRRLLQQSGAQQFRMRVRWGIQQNSDTKTLESSIVKHMKRFVLVIPALWEVRARGLLKPRTSGPAWAT

SEQ ID NO: 60754 - protein, 248 aa, Homo sapiens
  MOD_RES (1)..(1): Any amino acid
XNQILIWCQQCQENSPISSVDEVTIVNILTNRSNAQRQDIAFAYQRRTKKELASALKSALSGHLETVILGLLKTPAQYDASELKASMKGLGTDEDSLIEIICSRTNQELQEINRVYKEMYKTDLEKDIISDTSGDFRKLMVALAKGRRAEDGSVIDYELIDQDARDLYDAGVKRKGTDVPKWISIMTERSVPHLQKVFDRYKSYSPYDMLESIRKEVKGDLENAFLNLVQCIQNKPLYFADRLYDSMK

SEQ ID NO: 60755 - protein, 365 aa, Homo sapiens
MHVRSLRAAAPHSFVALWAPLFLLRSALADFSLDNEVHSSFIHRRLRSQERREMQREILSILGLPHRPRPHLQGKHNSAPMFMLDLYNAMAVEEGGGPGGQGFSYPYKAVFSTQGPPLASLQDSHFLTDADMVMSFVNLVEHDKEFFHPRYHHREFRFDLSKIPEGEAVTAAEFRIYKDYIRERFDNETFRISVYQVLQEHLGRESDLFLLDSRTLWASEEGWLVFDITATSNHWVVNPRHNLGLQLSVETLDENSSSDQRQACKKHELYVSFRDLGWQDWIIAPEGYAAYYCEGECAFPLNSYMNATNHAIVQTLVHFINPETVPKPCCAPTQLNAISVLYFDDSSNVILKKYRNMVVRACGCH

SEQ ID NO: 60756 - protein, 217 aa, Homo sapiens
AEEDGRAQAAGSSVLRELHTADSVVNGSAQADVPKELEREESGAAESPALVTPDSEKSAKHGSGAFYSPELLEALTLRFEAPDSRNRWDRPLFTLVGLEEPLPLAGIRSALFENRAPPPHQSTQSQPLASGSFLHQLDQVTSQVLAGLMEAQKSAVPGDLLTLPGTTEHLRFTRPLTMAELSRLRRQFISYTKMHPNNENLPQLANMFLQYLSQSLH

SEQ ID NO: 60757 - protein, 283 aa, Homo sapiens
  MOD_RES (1)..(1): Any amino acid
XVITCVRPGGPADREGTIKPGDRLLSVDGIRLLGTTHAEAMSILKQCGQEAALLIEYDVSVMDSVATASGPLLVEVAKTPGASLGVALTTSMCCNKQVIVIDKIKSASIADRCGALHVGDHILSIDGTSMEYCTLAEATQFLANTTDQVKLEILPHHQTRLALKGPDHALVSSSFSPTSMSAYSLSSLNMGTLPRSLYSTSPRGTMMRRRLKKKDFKSSLSLASSTVGLAGQVVHTETTEVVLTADPVTGFGIQLQGSVFATETLSSPPLISYIEADSPAERC

SEQ ID NO: 60758 - protein, 73 aa, Homo sapiens
CSVKDNGLRAIENLMQKKGKFDDILLETTGLADPGAVASMFWVDAELGSDIYLDGIITIVDSKYGLKAKNWTT

SEQ ID NO: 60759 - protein, 100 aa, Homo sapiens
MEVSATELMNILNKVVTRHPDLKTDGFGIDTCRSMVAVMDSDTTGKLGFEEFKYLWNNIKRWQAIYKQFDTDRSGTICSSELPGAFEAAGFHLNEHLYNM

SEQ ID NO: 60760 - protein, 433 aa, Homo sapiens
MSKSFQQSSLSRDSQGHGRDLSAAGIGLLAAATQSLSMPASLGRMNQGTARLASLMNLGMSSSLNQQGAHSALSSASTSSHNLQSIFNIGSRGPLPLSSQHRGDADQASNILASFGLSARDLDELSRYPEDKITPENLPQILLQLKRRRTEEGPTLSYGRDGRSATREPPYRVPRDDWEEKRHFRRDSFDDRGPSLNPVLDYDHGSRSQESGYYDRMDYEDDRLRDGERCRDDSFFGETSHNYHKFDSEYERMGRGPGPLQERSLFEKKRGAPPSSNIEDFHGLLPKGYPHLCSICDLPVHSNKEWSQHINGASHSRRCQLLLEIYPEWNPDNDTGHTMGDPFMLQQSTNPAPGILGPPPPSFHLGGPAVGPRGNLGAGNGNLQGPRHMQKGRVETSRVVHIMDFQRGKNLRYQLLQLVEPFGVISNHLILNK

SEQ ID NO: 60761 - protein, 332 aa, Homo sapiens
ASSEELKAAYRRLCMLYHPDKHRDPELKSQAERLFNLVHQAYEVLSDPQTRAIYDIYGKRGLEMEGWEVVERRRTPAEIREEFERLQREREERRLQQRTNPKGTISVGVDATDLFDRYDEEYEDVSGSSFPQIEINKMHISQSIEAPLTATDTAILSGSLSTQNGNGGGSINFALRRVTSAKGWGELEFGAGDLQGPLFGLKLFRNLTPRCFVTTNCALQFSSRGIRPGLTTVLARNLDKNTVGYLQWHCSSPLLQVQRPHRNTRACAPEPSFRPFLHVPTWDAECSGARTPSTAWTSAAVKLREACLSGPGSGSHQLLLLTPRSKRRTGGG

SEQ ID NO: 60762 - protein, 1392 aa, Homo sapiens
MERNVLTTFSQEMSQLILNEMPKAEYSSLFNDFVESEFFLIDGDSLLITCICEISFKPGQNLHFFYLVERYLVDLISKGGQFTIVFFKDAEYAYFNFPELLSLRTALILHLQKNTTIDVRTTFSRCLSKEWGSFLEESYPYFLIVADEGLNDLQTQLFNFLIIHSWARKVNVVLSSGQESDVLCLYAYLLPSMYRHQIFSWKNKQNIKDAYTTLLNQLERFKLSALAPLFGSLKWNNITEEAHKTVSLLTQVWPEGSDIRRVFCVTSCSLSLRMYHRFLGNREPSSGQETEIQQVNSNCLTLQEMEDLCKLHCLTVVFLLHLPLSQRACARVITSHWAEDMKPLLQMKKWCEYFILRNIHTFEFWNLNLIHLSDLNDELLLKNIAFYYENENVKGLHLNLGDTIMKDYEYLWNTVSKLVRDFEVGQPFPLRTTKVCFLEKKPSPIKDSSNEMVPNLGFIPTSSFVVDKFAGDILKDLPFLKSDDPIVTSLVKQKEFDELVHWHSHKPLSDDYDRSRCQFDEKSRDPRVLRSVQKYHVFQRFYGNSLETVSSKIIVTQTIKSKKDFSGPKSKKAHETKAEIIARENKKRLFAREEQKEEQKWNALSFSIEEQLKENLHSGIKSLEDFLKSCKSSCVKLQVEMVGLTACLKAWKEHCRSEEGKTTKDLSIAVQVMKRIHSLMEKYSELLQEDDRQLIARCLKYLGFDELASSLHPAQDAENDVKVKKRNKYSVGIGPARFQLQYMGHYLIRDERKDPDPRVQDFIPDTWQRELLDVVDKNESAVIVAPTSSGKTYASYYCMEKVLKESDDGVVVYVAPTKALVNQVAATVQNRFTKNLPSGEVLCGVFTREYRHDALNCQVLITVPACFEILLLAPHRQNWVKKIRYVIFDEVHCLGGEIGAEIWEHLLVMIRCPFLALSATISNPEHLTEWLQSVKWYWKQEDKIIENNTASKRHVGRQAGFPKDYLQVKQSYKVRLVLYGERYNDLEKHVCSIKHGDIHFDHFHPCAALTTDHIERYGFPPDLTLSPRESIQLYDAMFQIWKSWPRAQELCPENFIHFNNKLVIKKMDARKYEESLKAELTSWIKNGNVEQARMVLQNLSPEADLSPENMITMFPLLVEKLRKMEKLPALFFLFKLGAVENAAESVSTFLKKKQETKRPPKADKEAHVMANKLRKVKKSIEKQKIIDEKSQKKTRNVDQSLIHEAEHDNLVKCLEKNLEIPQDCTYADQKAVDTETLQKVFGRVKFERKGEELKALAERGIGYHHSAMSFKEKQLVEILFRKGYLRVVTATGTLALGVNMPCKSVVFAQNSVYLDALNYRQMSGRAGRRGQDLMGDVYFFDIPFPKIGKLIKSNVPELRGHFPLSITLVLRLMLLASKGDDPEDAKAKSLAL

SEQ ID NO: 60763 - protein, 590 aa, Homo sapiens
MPKPINVRVTTMDAELEFAIQPNTTGKQLFDQVVKTVGLREVWFFGLQYVDSKGYSTWLKLNKKVTQQDVKKENPLQFKFRAKFFPEDVSEELIQEITQRLFFLQVKEAILNDEIYCPPETAVLLASYAVQAKYGDYNKEIHKPGYLANDRLLPQRVLEQHKLTKEQWEERIQNWHEEHRGMLREDSMMEYLKIAQDLEMYGVNYFEIKNKKGTELWLGVDALGLNIYEHDDKLTPKIGFPWSEIRNISFNDKKFVIKPIDKKAPDFVFYAPRLRINKRILALCMGNHELYMRRRKPDTIEVQQMKAQAREEKHQKQLERAQLENEKKKREIAEKEKERIEREKEELMERLKQIEEQTIKAQKELEEQTRKALELDQERKRAKEEAERLEKERRAAEEAKSAIAKQAADQMKNQEQLAAELAEFTAKIALLEEAKKKKEEEATEWQHKAFAAQEDLEKTKEELKTVMSAPPPPPPPPVIPPTENEHDEHDENNAEASAELSNEGVMNHRSEEERVTETQKNERVKKQLQALSSELAQARDETKKTQNDVLHAENVKAGRDKYKTLRQIRQGNTKQRIDEFEAMDISENGR

SEQ ID NO: 60764 - protein, 396 aa, Homo sapiens
MEGERRASQAPSSGLPAGGANGESPGGGAPFPGSSGSSALLQAEVLDLDEDEDDLEVFSKDASLMDMNSFSPMMPTSPLSMINQIKFEDEPDLKDLFITVDEPESHVTTIETFITYRIITKTSRGEFDSSEFEVRRRYQDFLWLKGKLEEAHPTLIIPELSSHKKQGPGLLSRMGQTVRAVASSMRGVKNRPEEFMEMNNFIELFSQKINLIDKISQRIYKEEREYFDEMKEYGPIHILWSASEEDLVDTLKDVASCIDRCCKATEKRMSGLSEALLPVVHEYVLYSEMLMGVMKRRDQIQAELDSKVEVLTYKKADTDLLPEEIGKLEDKVECANNALKADWERWKQNMQNDIKLAFTDMAEENIHYYEQCLATWESFLTSQTNLHLEEASEDKP

SEQ ID NO: 60765 - protein, 109 aa, Homo sapiens
MNRLPDDYDPYAVEEPSDEEPALSRWAPAPPWPPRIWVEAWLWSPPFVAPAEPTQTLAAREPVVPVTCAKPKGFPDGVAQSRGEAVPMSPVGRGIFRNHGGPRVNLQKQ

SEQ ID NO: 60766 - protein, 157 aa, Homo sapiens
MGAARGSPARPRRLPLLSVLLLPLLGGTQTAIVFIKQPSSQDALQGRRALLRCEVEAPGPVHVYWLLDGAPVQDTERRFAQGSSLSFAAVDRLQDSGTFQCVARDDVTGEEARSANASFNIKWIEAGPVVLKHPASEAEIQPQTQVTLRCHIDGHPR

SEQ ID NO: 60767 - protein, 65 aa, Homo sapiens
  MOD_RES (1)..(1): Any amino acid
XSGTCFPRKRISSKSLKVGMIPAPKRVCLIQEPKEARTHQYSRAEACSQNGSLVPLQSPARFSNH

SEQ ID NO: 60768 - protein, 275 aa, Homo sapiens
MKMEEAVGKVEELIESEAPPKASEQETAKEEDGSVELESQVQKDGVADSTVISSMPCLLMELRRDSSESQLASTESDKPTTGRVYESDSSNHCMLSPSSSGHLADSDTLSSAEENEPSQAETAVEGDPSGVSGATVGRKSRRSRSESETSTMAAKKNRQSSDKQNGRVAKVKGHRSQKHKERIRLLRQKREAAARKKYNLLQDSSTSDSDLTCDSSTSSSDDDEEVSGSSKTITAEIPGTGFCYVVQAGLRRLGLSDLHTLASQSAEILWDSHLA

SEQ ID NO: 60769 - protein, 64 aa, Homo sapiens
  MOD_RES (1)..(1): Any amino acid
XTMPEIRVTPLGACPVLSWNLVLPPGRGSRAPSSTDTRTGFHVLPHGVSASSEGAPRPGVDTVL

SEQ ID NO: 60770 - protein, 410 aa, Homo sapiens
MGAVSCRQGQHTQQGEHTRVAVPHKQGGNIRGPWARGWKSLWTGLGTIRSDLEELWELRGHHYLHQESLKPAPVLVEKPLPEWPVPQFINLFLPEFPIRPIRGQQQLKILGLVAKGSFGTVLKVLDCTQKAVFAVKVVPKVKVLQRDTVRQCKEEVSIQRQINHPFVHSLGDSWQGKRHLFIMCSYCSTDLYSLWSAVGCFPEASIRLFAAELVLVLCYLHDLGIMHRDVKMENILLDERGHLKLTDFGLSRHVPQGAQAYTICGTLQYMAPEVLSGGPYNHAADWWSLGVLLFSLATGKFPVAAERDHVAMLASVTHSDSEIPASLNQGLSLLLHELLCQNPLHRLRYLHHFQVHPFFRGVAFDPELLQKQPVNFVTETQATQPSSAETMPFDDFDCDLESFLLYPIPA

SEQ ID NO: 60771 - protein, 54 aa, Homo sapiens
MYAKGGKGSAVPSDSQAREKLALYVYEYLLHIGAQKSAQTFLSERLLGPVLRGA

SEQ ID NO: 60772 - protein, 443 aa, Homo sapiens
MAFYSYNSVLAIARTRFPSHFVHPTCSSYSPSCAFLHLPDSHLNKTCMKNYESKKYSDPSQPGNTVLHPGTRLIQKLHTSTCWLQEVPGKPQLEQATKHPQVTSPQATKETGMEIKEGKQSYRQKIMDELKYYYNGFYLLWIDAKVAARMVWRLLHGQVLTRRERRREEKQKKKMAVKLELAKFLQETMTEMARRNRAKMGDASTQLSSYVKQVQTGHKPSTKEIVRFSKLFEDQLALEHLDRPQLVALCKLLELQTFGTNNLLRFQLLMKLKSIKADDEIIAKEGVTALSVSELQAACRARGMRSLGLTEEQLRQQLTEWQDLHLKENVPPSLLLLSRTFYLIDVKPKPIEIPLSGEAPKTDILVELPTFTESKENMVDLAPQLKGTKDEDFIQPPPVTSSPITPSTPISLPKGPITSSEEPTLQAKSQMTAQNSKASSKGA

SEQ ID NO: 60773 - protein, 712 aa, Homo sapiens
MGNHSGRPEDPEPGAFTTTKRTGIPAPREFSVTVSRERSVPRGPSNPRKSVSSPTSSNTPTPTKHLRTPSTKPKQENEGGEKAALESQVRELLAEAKAKDSEINRLRSELKKYKEKRTLNAEGTDALGPNVDGTSVSPGDTEPMIRALEEKNKNFQKELSDLEEENRVLKEKLIYLEHSPNSEGAASHTGDSSCPTSITQESSFGSPTGNQMSSDIDEYKKNIHGNALRTSGSSSSDVTKASLSPDASDFEHITAETPSRPLSSTSNPFKSSKCSTAGSSPNSVSELSLASLTEKIQKMEENHHSTAEELQATLQELSDQQQMVQELTAENEKLVDEKTILETSFHQHRERAEQLSQENEKLMNLLQERVKNEEPTTQEGKIIELEQKCTGILEQGRFEREKLLNIQQQLTCSLRKVEEENQGALEMIKRLKEENEKLNEFLELERHNNNMMAKTLEECRVTLEGLKMENGSLKSHLQGEKQKATEASAVEQTAESCEVQEMLKVARAEKDLLELSCNELRQELLKANGEIKHVSSLLAKVEKDYSYLKEICDHQAEQLSRTSLKLQEKASESDAEIKDMKETIFELEDQVEQHRAVKLHNNQLISELESSVIKLEEQKSDLERQLKTLTKQMKEETEEWRRFQADLQTAVVVANDIKCEAQQELRTVKRKLLEEEEKNARLQKELGDVQGHGRVVTSRAAPPWSWTEYFCP

SEQ ID NO: 60774 - protein, 33 aa, Homo sapiens
MIRTEITGAEIAEEMEKERRLFQLQMCEYLIKV

SEQ ID NO: 60775 - protein, 209 aa, Homo sapiens
MRKPRAAVGSGHRKQAASQEGRQKHAKNNSQAKPSACDGMIAECPGAPAGLARQPEEVVLQASVSSYHLFRDVAEVTAFRGSLLSWYDQEKRDLPWRRRAEDEMDLDRRAYAEVAYTAGPGQCFPGGGESTLGWPGLLFSWPAAAGGSSEGGRGARGPHATYSRDPAAAPAWRGALHSWGHCLYRLWPGNRCGGWQRSTGAVPCPSHWC

SEQ ID NO: 60776 - protein, 162 aa, Homo sapiens
MAGLGLGSAVPVWLAEDDLGCIICQGLLDWPATLPCGHSFCRHCLEALWGARDARRWACPTCRQGAAQQPHLRKNTLLQDLADKYRRAAREIQAGSDPAHCPCPGSSSLSSAAARPRRRPELQRENSWKPRLPPHAHCLTRATLHSGELLGLLSGPSIQPLT

SEQ ID NO: 60777 - protein, 121 aa, Homo sapiens
MQAQLLELRTNNYQLSDELRKNGVELTSLRQKVAYLDKEFSKAQKALSKSKKAQEVEVLLSENEMLQAKLHSQEEDFRLQNSTLMAEFSKERYGKEAGKFSAVSEGQGDPPGGLAPTVLAP

SEQ ID NO: 60778 - protein, 106 aa, Homo sapiens
MATTGALGNYYVDSFLLGADAADELSVGRYAPGTLGQPPRQAATLAEHPDFSPCSFQSKATVFGASWNPVHAAGANAVPAAVYHHHHHHPYVHPQAPVAAAAPDGS

SEQ ID NO: 60779 - protein, 738 aa, Homo sapiens
MSTRTPLPTVNERDTENHTSHGDGRQEVTSRTSRSGARCRNSIASCADEQPHIGNYRLLKTIGKGNFAKVKLARHILTGREVAIKIIDKTQLNPTSLQKLFREVRIMKILNHPNIVKLFEVIETEKTLYLIMEYASGGEVFDYLVAHGRMKEKEARSKFRQIVSAVQYCHQKRIVHRDLKAENLLLDADMNIKIADFGFSNEFTVGGKLDTFCGSPPYAAPELFQGKKYDGPEVDVWSLGVILYTLVSGSLPFDGQNLKELRERVLRGKYRIPFYMSTDCENLLKRFLVLNPIKRGTLEQIMKDRWINAGHEEDELKPFVEPELDISDQKRIDIMVGMGYSQEEIQESLSKMKYDEITATYLLLGRKSSELDASDSSSSSNLSLAKVRPSSDLNNSTGQSPHHKVQRSVSSSQKQRRYSDHAGPAIPSVVAYPKRSQTSTADSDLKEDGISSRKSSGSAVGGKGIAPASPMLGNASNPNKADIPERKKSSTVPSSNTASGGMTRRNTYVCSERTTADRHSVIQNGKENSTIPDQRTPVASTHSISSAATPDRIRFPRGTASRSTFHGQPRERRTATYNGPPASPSLSHEATPLSQTRSRGSTNLFSKLTSKLTRRNMSFRFIKSRNVSAEQKDENKEAKPRSLRFTWSMKTTSSMDPGDMMREIRKVLDANNCDYEQRERFLLFCVHGDGHAENLVQWEMEVCKLPRLSLNGVRFKRISGTSIAFKNIASKIANELKL

SEQ ID NO: 60780 - protein, 185 aa, Homo sapiens
MIPPSAQPPRTQTPPLGQTPQLGLKTNPPLIQEKPAKTSKKPPPSKEELLKLTETVVTEYLNSGNANEAVNGVREMRAPKHFLPEMLSKVIILSLDRSDEDKEKASSLISLLKQEGIATSDNFMQAFLNVLDQCPKLEVDIPLVKSYLAQFAARAIISELLAKLQDREWLTELFQQSKVNMQKML

SEQ ID NO: 60781 - protein, 133 aa, Homo sapiens
MAEVARQAQTSQEPYHDKAREHPDDGKHPDGGLYNKGPSYSSYSGYIMMPNMNNDPYMSNGSLSPPIPRTACPDILQLLISLLFIPCLRVVLDRSPHLLAGKVSLYIPSRVDSGNPTHPHCQSTLPCPGFPII

SEQ ID NO: 60782 - protein, 99 aa, Homo sapiens
MSARGEGAGQPSTSAQGQPAAPAPQKRGRGRPRKQQQEPTGEPSPKRPRGRPKGSKNKSPSKAAQKKAEATGEKRPRGRPRKWPQQVVQKKPAQVRHSH

SEQ ID NO: 60783 - protein, 2730 aa, Homo sapiens
MVSNSRTSSTEAVAGSAPLSQGSSGIMELYGSDIEPQPSSVNFIENPPDLNDSNQAQVDANVDLVSPDSGLATIRSSRSSKESSVFLSDDSPVGEGAGPHHTLLPGLDSYSPIPEGAVAEEHAWSGEHGEHFDLFNFDPAPMASGQSQQSSHSADYSPADDFFPNSDLSEGQLPAGPEGLDGMGTNMSNYSSSSLLSGAGKDSLVEHDEEFVQRQDSPRDNSERNLSLTDFVGDESPSPERLKNTGKRIPPTPMNSLVESSPSTEEPASLYTEDMTQKATDTGHMGPPQTHARCSSWWGGLEIDSKNIADAWSSSEQESVFQSPESWKEHKPSSIDRRASDSVFQPKSLEFTKSGPWESEFGQPELGSNDIQDKNEESLPFQNLPMEKSPLPNTSPQGTNHLIEDFASLWHSGRSPTAMPEPWGNPTDDGEPAAVAPFPAWSAFGKEDHDEALKNTWNLHPTSSKTPSVRDPNEWAMAKSGFAFSSSELLDNSPSEINNEAAPEIWGKKNNDSRDHIFAPGNPSSDLDHTWTNSKPPKEDQNGLVDPKTRGKVYEKVDSWNLFEENMKKGGSDVLVPWEDSFLSYKCSDYSASNLGEDSVPSPLDTNYSTSDSYTSPTFAGDEKETEHKPFAKEEGFESKDGNSTAEETDIPPQSLQQSSRNRISSGPGNLDMWASPHTDNSSEINTTHNLDENELKTEHTDGKNISMEDDVGESSQSSYDDPSMMQLYNETNRQLTLLHSSTNSRQTAPDSLDLWNRVILEDTQSTATISDMDNDLDWDDCSGGAAIPSDGQTEGYMAEGSEPETRFTVRQLEPWGLEYQEANQVDWELPASDEHTKDSAPSEHHTLNEKSGQLIANSIWDSVMRDKDMSSFMLPGSSHITDSEQRELPPEIPSHSANVKDTHSPDAPAASGTSESEALISHLDKQDTERETLQSDAASLATRLENPGYFPHPDPWKGHGDGQSESEKEAQGATDRGHLDEEEVIASGVENASGISEKGQSDQELSSLVASEHQEICIKSGKISSLAVTFSPQTEEPEEVLEYEEGSYNLDSRDVQTGMSADNLQPKDTHEKHLMSQRNSGETTETSDGMNFTKYVSVPEKDLEKTEECNFLEPENVGGGPPHRVPRSLDFGDVPIDSDVHVSSTCSEITKNLDVKGSENSLPGAGSSGNFDRDTISSEYTHSSASSPELNDSSVALSSWGQQPSSGYQEENQGNWSEQNHQESELITTDGQVEIVTKVKDLEKNRINEFEKSFDRKTPTFLEIWNDSVDGDSFSSLSSPETGKYSEHSGTHQESNLIASYQEKNEHDISATVQPEDARVISTSSGSDDDSVGGEESIEEEIQVANCHVAEDESRAWDSLNESNKFLVTADPKSENIYDYLDSSEPAENENKSNPFCDNQQSSPDPWTFSPLTETEMQITAVEKEKRSSPETGTTGDVAWQISPKASFPKNEDNSQLEMLGFSADSTEWWKASPQEGRLIESPFERELSDSSGVLEINSSVHQNASPWGVPVQGDIEPVETHYTNPFSDNHQSPFLEGNGKNSHEQLWNIQPRQPDPDADKFSQLVKLDQIKEKDSREQTFVSAAGDELTPETPTQEQCQDTMLPVCDHPDTAFTHAEENSCVTSNVSTNEGQETNQWEQEKSYLGEMTNSSIATENFPAVSSPTQLIMKPGSEWDGSTPSEDSRGTFVPDILHGNFQEGGQLASAAPDLWIDAKKPFSLKADGENPDILTHCEHDSNSQASDSPDICHDSEAKQETEKHLSACMGPEVESSELCLTEPEIDEEPIYEPGREFVPSNAELDSENATVLPPIGYQADIKGSSQPASHKGSPEPSEINGDNSTGLQVSEKGASPDMAPILEPVDRRIPRIENVATSIFVTHQEPTPEGDGSWISDSFSPESQPGARALFDGDPHLSTENPALVPDALLASDTCLDISEAAFDHSFSDASGLNTSTGTIDDMSKLTLSEGHPETPVDGDLGKQDICSSEASWGDFEYDVMGQNIDEDLLREPEHFLYGGDPPLEEDSLKQSLAPYTPPFDLSYLTEPAQSAETIEEAGSPEDESLGCRAAEIVLSALPDRRSEGNQAETKNRLPGSQLAVLHIREDPESVYLPVGAGSNILSPSNVDWEVETDNSDLPAGGDIGPPNGASKEISELEEEKTIPTKEPEQIKSEYKEERCTEKNEDRHALHMDYILVNREENSHSKPETCEERESIAELELYVGSKETGLQGTQLASFPDTCQPASLNERKGLSAEKMSSKSDTRSSFESPAQDQSWMFLGHSEVGDPSLDARDSGPGWSGKTVEPFSELGLGEGPQLQILEEMKPLESLALEEASGPVSQSQKSKSRGRAGPDAVTLQAVTHDNEWEMLSPQPVQKNMIPDTEMEEETEFLELGTRISRPNGLLSEDVGMDIPFEEGVLSPSAADMRPEPPNSLDLNDTHPRRIKLTAPNINLSLDQSEGSILSDDNLDSPDEIDINVDELDTPDEADSFEYTGHEDPTANKDSGQESESIPEYTAEEEREDNRLWRTVVIGEQEQRIDMKVIEPYRRVISHGGYYGDGLNAIIVFAACFLPDSSRADYHYVMENLFLYVISTLELMVAEDYMIVYLNGATPRRRMPGLGWMKKCYQMIDRRLRKNLKSFIIVHPSWFIRTILAVTRPFISSKFSSKIKYVNSLSELSGLIPMDCIHIPESIIKLDEELREASEAAKTSCLYNDPEMSSMEKDIDLKLKEKP

SEQ ID NO: 60784 - protein, 144 aa, Homo sapiens
MAGIKALISLSFGGAIGLMFLMLGCALPIYNKYWPLFVLFFYILSPIPYCIARRLVDDTDAMSNACKELAIFLTTGIVVSAFGLPIVFARAHLGPDVCIGDISLLSRALTKLRPKARCVEEGVVQDPVGVVDGAPTLLQQDGNS

SEQ ID NO: 60785 - protein, 98 aa, Homo sapiens
  MOD_RES (1)..(1): Any amino acid
XKLFWYQVHFDMHVRTHTREHLYYCSQCHYSSITKNCLKRHVIQKHSNILLKCPTDGCDYSTPDKYKLQAHLKVHTALVFGGGSCNTMNECLFLQILI

SEQ ID NO: 60786 - protein, 242 aa, Homo sapiens
  MOD_RES (1)..(1): Any amino acid
XRIILWDIGVPNQDYEFQASQLLTLDTTSIPLRLCPVASCPDARLLAGCEGGCCCWDVRLDQPQKRRVCEVEFVFSEGSEASGRRVDGLAFVNEDIVASKGSGLGTICLWSWRQTWGGRGSQSTVAVVVLARLQWSSTELAYFSLSACPDKGIVLCGDEEGNVWLYDVSNILKQPPLLPAALQAPTQPSPPLSPHQILKWPQPWALGQVVTKTMVNTVVANASFTYLTALTDSNIVAIWGRM

SEQ ID NO: 60787 - protein, 83 aa, Homo sapiens
MVSHTFHMRTEESDASQEGDDLPKSSANTSHPKQDDSPKSSEETIQPKEGDIPKAPEETIQSKKEDLPKSSEKAIQPKESNIP

SEQ ID NO: 60788 - protein, 135 aa, Homo sapiens
  MOD_RES (1)..(1): Any amino acid
XAPEFQVGDGIGMDLKLSNHVFNALKQHAYSEERRSARLHEKKEHSTAEKAVDPKTRLLMYKMVNSGMLETITGCISTGKESVVFHAYGGSMEDEKEDSKVIPTECAIKNAESWNSLSNSCTTEETHFSYVFYWP

SEQ ID NO: 60789 - protein, 3056 aa, Homo sapiens
MRKKELSATKKDRVNHCLTICENIVAQSVRNSPEFQKLLGIAMELFLLCSDDAESDVRMVADECLNKVIKALMDSNLPRLQLELYKEIKKNGAPRSLRAALWRFAELAHLVRPQKCRPYLVNLLPCLTRTSKRPEESVQETLAAAVPKIMASFGNFANDNEIKVLLKAFIANLKSSSPTIRRTAAGSAVSICQHSRRTQYFYSWLLNVLLGLLVPVEDEHSTLLILGVLLTLRYLVPLLQQQVKDTSLKGSFGVTRKEMEVSPSAEQLVQVYELTLHHTQHQDHNVVTGALELLQQLFRTPPPELLQTLTAVGGIGQLTAAKEESGGRSRSGSIVELIAGGGSSCSPVLSRKQKGKVLLGEEEALEDDSESRSDVSSSALTASVKDEISGELAASSGVSTPGSAGHDIITEQPRSQHTLQADSVDLASCDLTSSATDGDEEDILSHSSSQVSAVPSDPAMDLNDGTQASSPISDSSQTTTEGPDSAVTPSDSSEIVLDGTDNQYLGLQIGQPQDEDEEATGILPDEASEAFRNSSMALQQAHLLKNMSHCRQPSDSSVDKFVLRDEATEPGDQENKPCRIKGDIGQSTDDDSAPLVHCVRLLSASFLLTGGKNVLVPDRDVRVSVKALALSCVGAAVALHPESFFSKLYKVPLDTTEYPEEQYVSDILNYIDHGDPQVRGATAILCGTLICSILSRSRFHVGDWMGTIRTLTGNTFSLADCIPLLRKTLKDESSVTCKLACTAVRNCVMSLCSSSYSELGLQLIIDVLTLRNSSYWLVRTELLETLAEIDFRLVSFLEAKAENLHRGAHHYTGLLKLQERVLNNVVIHLLGDEDPRVRHVAAASLIRLVPKLFYKCDQGQADPVVAVARDQSSVYLKLLMHETQPPSHFSVSTITRIYRGYNLLPSITDVTMENNLSRVIAAVSHELITSTTRALTFGCCEALCLLSTAFPVCIWSLGWHCGVPPLSASDESRKSCTVGMATMILTLLSSAWFPLDLSAHQDALILAGNLLAASAPKSLRSSWASEEEANPAATKQEEVWPALGDRALVPMVEQLFSHLLKVINICAHVLDDVAPGPAIKAALPSLTNPPSLSPIRRKGKEKEPGEQASVPLSPKKGSEASAASRQSDTSGPVTTSKSSSLGSFYHLPSYLKLHDVLKATHANYKVTLDLQNSTEKFGGFLRSALDVLSQILELATLQDIGKCVEEILGYLKSCFSREPMMATVCVQQLLKTLFGTNLASQFDGLSSNPSKSQGRAQRLGSSSVRPGLYHYCFMAPYTHFTQALADASLRNMVQAEQENDTSGWFDVLQKVSTQLKTNLTSVTKNRADKNAIHNHIRLFEPLVIKALKQYTTTTCVQLQKQVLDLLAQLVQLRVNYCLLDSDQVFIGFVLKQFEYIEVGQFRESEAIIPNIFFFLVLLSYERYHSKQIIGIPKIIQLCDGIMASGRKAVTHAIPALQPIVHDLFVLRGTNKADAGKELETQKEVVVSMLLRLIQYHQVLEMFILVLQQCHKENEDKWKRLSRQIADIILPMLAKQQMHIDSHEALGVLNTLFEILAPSSLRPVDMLLRSMFVTPNTMASVSTVQLWISGILAILRVLISQSTEDIVLSRIQELSFSPYLISCTVINRLRDGDSTSTLEEHSEGKQIKNLPEETFSRFLLQLVGILLEDIVTKQLKVEMSEQQHTFYCQELGTLLMCLIHIFKSGMFRRITAAATRLFRSDGCGGSFYTLDSLNLRARSMITTHPALVLLWCQILLLVNHTDYRWWAEVQQTPKRHSLSSTKLLSPQMSGEEEDSDLAAKLGMCNREIVRRGALILFCDYVCQNLHDSEHLTWLIVNHIQDLISLSHEPPVQDFISAVHRNSAASGLFIQAIQSRCENLSTPTMLKKTLQCLEGIHLSQSGAVLTLYVDRLLCTPFRVLARMVDILACRRVEMLLAANLQSSMAQLPMEELNRIQEYLQSSGLAQRHQRLYSLLDRFRLSTMQDSLSPSPPVSSHPLDGDGHVSLETVSPDKDWYVHLVKSQCWTRSDSALLEGAELVNRIPAEDMNAFMMNSEFNLSLLAPCLSLGMSEISGGQKSALFEAAREVTLARVSGTVQQLPAVHHVFQPELPAEPAAYWSKLNDLFGDAALYQSLPTLARALAQYLVVVSKLPSHLHLPPEKEKDIVKFVVATLEALSWHLIHEQIPLSLDLQAGLDCCCLALQLPGLWSVVSSTEFVTHACSLIYCVHFILEAVAVQPGEQLLSPERRTNTPKAISEEEEEVDPNTQNPKYITAACEMVAEMVESLQSVLALGHKRNSGVPAFLTPLLRNIIISLARLPLVNSYTRVPPLVWKLGWSPKPGGDFGTAFPEIPVEFLQEKEVFKEFIYRINTLGWTSRTQFEETWATLLGVLVTQPLVMEQEESPPEEDTERTQINVLAVQAITSLVLSAMTVPVAGNPAVSCLEQQPRNKPLKALDTRFGRKLSIIRGIVEQEIQAMVSKRENIATHHLYQAWDPVPSLSPATTGALISHEKLLLQINPERELGSMSYKLGQVSIHSVWLGNSITPLREEEWDEEEEEEADAPAPSSPPTSPVNSRKHRAGVDIHSCSQFLLELYSRWILPSSSARRTPAILISEVVRSLLVVSDLFTERNQFELMYVTLTELRRVHPSEDEILAQYLVPATCKAAAVLGMDKAVAEPVSRLLESTLRSSHLPSRVGALHGVLYVLECDLLDDTAKQLIPVISDYLLSNLKGIAHCVNIHSQQHVLVMCATAFYLIENYPLDVGPEFSASIIQMCGVMLSGSEESTPSIIYHCALRGLERLLLSEQLSRLDAESLVKLSVDRVNVHSPHRAMAALGLMLTCMYTGKEKVSPGRTSDPNPAAPDSESVIVAMERVSVLFDRIRKGFPCEARVVARILPQFLDDFFPPQDIMNKVIGEFLSNQQPYPQFMATVVYKVFQTLHSTGQSSMVRDWVMLSLSNFTQRAPVAMATWSLSCFFVSASTSPWVAAILPHVISRMGKLEQVDVNLFCLVATDFYRHQIEEELDRRAFQSVLEVVAAPGSPYHRLLTCLRNVHKVTTC

SEQ ID NO: 60790 - protein, 270 aa, Homo sapiens
  MOD_RES (1)..(1): Any amino acid
XFIGFATTIHQIVRQWKYKDDDDDQLFYTRLYLDPGLREKLSLNLDHKSRIFQNLNGALDEVVLKFDRNRVRIRNVAYDTLPIVVHGNGPTKLQLNYLGNYVPNGWTPEGGCGFCNQDRRTLPGGQEVFHEPHIADSWPQLQDHFSAVKLVGPEEALSPGEARDMAMDLCRQDPECEFYFSLDADAVLTNLQTLRILIEENRKVIAPMLSRHGKLWSNFWGALSPDEYYARSEDYVELVQRKRVGVWNVPYISQAYVIRGDTLRMELPQR

SEQ ID NO: 60791 - protein, 58 aa, Homo sapiens
MVNPTLGVHEADLLKTSGTLISFIYPAQNPELLNKLSQRKTTVLAMDQVPRVTIAQGY

SEQ ID NO: 60792 - protein, 111 aa, Homo sapiens
TLTTFFEGEIISKKHPFLTRKWDADEDVDRKHWGKFLAFYQYAKSFNSDDFDYEELKNGDYVFMRWKEQFLVPDHTIKDISGASFAGFYYICFQKSAASIEGYYYHRSSEW

SEQ ID NO: 60793 - protein, 68 aa, Homo sapiens
MRYKTSLVMRKRLRLYRNTLKESSSSSGHHGPQLTAASSPSVFPGLHEEPPQASPSRPLNGLLRLGLP

SEQ ID NO: 60794 - protein, 1548 aa, Homo sapiens
MLRARPEALMLLGALLTGSLGPSGSQDALSLPWEVQRYDGWFNNLRHHERGAVGCRLQRRVPANYADGVYQALEEPQLPNPRRLSNAATRGIAGLPSLHNRTVLGVFFGYHVLSDVVSVETPGCPAEFLNIRIPPGDPVFDPDQRGDVVLPFQRSRWDPETGRSPSNPRDLANQVTGWLDGSAIYGSSHSWSDALRSFSGGQLASGPDPAFPRDSQNPLLMWAAPDPATGQNGPRGLYAFGAERGNREPFLQALGLLWFRYHNLWAQRLARQHPDWEDEELFQHARKRVIATYQNIAVYEWLPSFLQKTLPEYTGYRPFLDPSISPEFVVASEQFFSTMVPPGVYMRNASCHFRKVLNKGFQSSQALRVCNNYWIRENPNLNSTQEVNELLLGMASQISELEDNIVVEDLRDYWPGPGKFSRTDYVASSIQRGRDMGLPSYSQALLAFGLDIPRNWSDLNPNVDPQVLEATAALYNQDLSQLELLLGGLLESHGDPGPLFSAIVLDQFVRLRDGDRYWFENTRNGLFSKKEIEDIRNTTLRDVLVAVINIDPSALQPNVFVWHKGAPCPQPKQLTTDGLPQCAPLTVLDFFEGSSPGFAITIIALCCLPLVSLLLSGVVAYFRGREHKKLQKKLKESVKKEAAKDGVPAMEWPGPKERSSPIIIQLLSDRCLQVLNRHLTVLRVVQLQPLQQVNLILSNNRGCRTLLLKIPKEYDLVLLFSSEEERGAFVQQLWDFCVRWALGLHVAEMSEKELFRKAVTKQQRERILEIFFRHLFAQVLDINQADAGTLPLDSSQKVREALTCELSRAEFAESLGLKPQDMFVESMFSLADKDGNGYLSFREFLDILVVFMKGSPEDKSRLMFTMYDLDENGFLSKDEFFTMMRSFIEISNNCLSKAQLAEVVESMFRESGFQDKEELTWEDFHFMLRDHDSELRFTQLCVKGGGGGGNGIRDIFKQNISCRVSFITRTPGERSHPQGLGPPAPEAPELGGPGLKKRFGKKAAVPTPRLYTEALQEKMQRGFLAQKLQQYKRFVENYRRHIVCVAIFSAICVGVFADRAYYYGFASPPSDIAQTTLVGIILSRGTAASVSFMFSYILLTMCRNLITFLRETFLNRYVPFDAAVDFHRWIAMAAVVLAILHSAGHAVNVYIFSVSPLSLLACIFPNVFVNDGSKLPQKFYWWFFQTVPGMTGVLLLLVLAIMYVFASHHFRRRSFRGFWLTHHLYILLYALLIIHGSYALIQLPTFHIYFLVPAIIYGGDKLVSLSRKKVEISVVKAELLPSGVTYLQFQRPQGFEYKSGQWVRIACLALGTTEYHPFTLTSAPHEDTLSLHIRAVGPWTTRLREIYSSPKGNGCAGYPKLYLDGPFGEGHQEWHKFEVSVLVGGGIGVTPFASILKDLVFKSSLGSQMLCKKIYFIWVTRTQRQFEWLADIIQEVEENDHQDLVSVHIYVTQLAEKFDLRTTMLYICERHFQKVLNRSLFTGLRSITHFGRPPFEPFFNSLQEVHPQVRKIGVFSCGPPGMTKNVEKACQLVNRQDRAHFMHHYENF

SEQ ID NO: 60795 - protein, 110 aa, Homo sapiens
MVALCSLQHLGSSDPRALPTLPTATSGQRPAKRRRKSPAMAALTRDPQFQKLQQWYREHRSELNLRRLFDANKDRFNHFSLTLNTNHGHILVDYSKNLVTEDVMRMLVDL

SEQ ID NO: 60796 - protein, 152 aa, Homo sapiens
  MOD_RES (1)..(1): Any amino acid
XLLLSAALSAGKVTIDSSYDIAKISQHLDFISIMTYDFHGAWRGTTGHHSPLFRGQEDASPDRFSNTICDFLRGATVHRILGQQVPYATKGNQWVGYDDQESVKSKVQYLKDRQLAGAMVWALDLDDFQGSFCGQDLRFPLTNAIKDALAAT

SEQ ID NO: 60797 - protein, 81 aa, Homo sapiens
  MOD_RES (1)..(1): Any amino acid
XLLLSHRRIHSDSRPFPCVECGKGFKRKTALEAHRWIHRSCSERRAWQQAVVGRSEPIPVLGGKDPPVHFRHFPDIFQECG

SEQ ID NO: 60798 - protein, 139 aa, Homo sapiens
REMTPGKDEDQLPFSKAADVYAFGTVWYELQARDWPLKNQAAEASIWQIGSGEGMKRVLTSVSLGKEVSEILSACWAFDLQERPSFSLLMDMLEKLPKLNRRLSHPGHFWKSADINSSKVVPRFERFGLGVLESSNPKM

SEQ ID NO: 60799 - protein, 198 aa, Homo sapiens
MEEEIAALVIDNGSGMCKAGFAGDDAPRAVFPSIVGRPRHQGVMVGMGQKDSYVGDEAQSKRGILTLKYPIEHGIVTNWDDMEKIWHHTFYNELRVAPEEHPVLLTEAPLNPKANREKMTQALFLSRHFLPEASRLCLRPSTPRPCTWPSRPCCPSTPLGAPLALSWTLETGSPTRCPSTRATPSPTPSCVWTWLAGT

SEQ ID NO: 60800 - protein, 111 aa, Homo sapiens
MESSPFNRRQWTSLSLRVTAKELSLVNKNKSSAIVEIFSKYQKAAEETNMEKKRSNTENLSQHFRKGTLTVLKKKWENPGLGAESHTDSLRNSSTEIRHRADHPPAEVTSH

SEQ ID NO: 60801 - protein, 155 aa, Homo sapiens
MVPAAGRRPPRVMRLLGWWQVLLWVLGLPVRGVEEESGRLWSEEQPAHPLQVGAVYLGEEELLHDPMGQDRAAEEANAVLGLDTQGDHMVMLSVIPGEAEDKVSSEPSGVTCGAGGAEDSRCNVRESLFSLDGAGAHFPDREEEYYTEPEVAESD

SEQ ID NO: 60802 - protein, 386 aa, Homo sapiens
MAHCVTLVQLSISCDHLIDKDIGSKSDPLCVLLQDVGGGSWAELGRTERVRNCSSPEFSKTLQLEYRFETVQKLRFGIYDIDNKTPELRDDDFLGGAECSLGQIVSSQVLTLPLMLKPGKPAGRGTITDFLGKSDPFLEFFRQGDGKWHLVYRSEVIKNNLNPTWKRFSVPVQHFCGGNPSTPIQVQCSDYDSDGSHDLIGTFHTSLAQLQAVPAEFECIHPEKQQKKKSYKNSGTIRVKICRVETEYSFLDYVMGGCQINFTVGVDFTGSNGDPSSPDSLHYLSPTGVNEYLMALWSVGSVVQDYDSDKLFPAFGFGAQVPPDWQVSHEFALNFNPSNPYCAGIQGIVDAYRQALPQVRLYGPTNFAPIINHVARFAAQAAHQGT

SEQ ID NO: 60803 - protein, 1816 aa, Homo sapiens
MSAGGRDEERRKLADIIHHWNANRLDLFEISQPTEDLEFHGVMRFYFQDKAAGNFATKCIRVSSTATTQDVIETLAEKFRPDMRMLSSPKYSLYEVHVSGERRLDIDEKPLVVQLNWNKDDREGRFVLKNENDAIPPKKAQSNGPEKQEKEGVIQNFKRTLSKKEKKEKKKREKEALRQASDKDDRPFQGEDVENSRLAAEVYKDMPETSFTRTISNPEVVMKRRRQQKLEKRMQEFRSSDGRPDSGGTLRIYADSLKPNIPYKTILLSTTDPADFAVAEALEKYGLEKENPKDYCIARVMLPPGAQHSDEKGAKEIILDDDECPLQIFREWPSDKGILVFQLKRRPPDHIPKKTKKHLEGKTPKGKERADGSGYGSTLPPEKLPYLVELSPDGSDSRDKPKLYRLQLSVTEVGTEKLDDNSIQLFGPGIQPHHCDLTNMDGVVTVTPRSMDAETYVEGQRISETTMLQSGMKVQFGASHVFKFVDPSQDHALAKRSVDGGLMVKGPRHKPGIVQETTFDLGGDIHSGTALPTSKSTTRLDSDRVSSASSTAERGMVKPMIRVEQQPDYRRQESRTQDASGPELILPASIEFRESSEDSFLSAIINYTNSSTVHFKLSPTYVLYMACRYVLSNQYRPDISPTERTHKVIAVVNKMVSMMEGVIQEVDQVDQKQKNIAGALAFWMANASELLNFIKQDRDLSRITLDAQDVLAHLVQMAFKYLVHCLQSELNNYMPAFLDDPEENSLQRPKIDDVLHTLTGAMSLLRRCRVNAALTIQLFSQLFHFINMWLFNRLVTDPDSGLCSHYWGAIIRQQLGHIEAWAEKQGLELAADCHLSRIVQATTLLTMDKYAPDDIPNINSTCFKLNSLQLQALLQNYHCAPDEPFIPTDLIENVVTVAENTADELARSDGREVQLEEDPDLQLPFLLPEDGYSCDVVRNIPNGLQEFLDPLCQRGFCRLIPHTRSPGTWTIYFEGADYESHLLRENTELAQPLRKEPEIITVTLKKQNGMGLSIVAAKGAGQDKLGIYVKSVVKGGAADVDGRLAAGDQLLSVDGRSLVGLSQERAAELMTRTSSVVTLEVAKQGAIYHGLATLLNQPSPMMQRISDRRGSGKPRPKSEGFELYNNSTQNGSPESPQLPWAEYSEPKKLPGDDRLMKNRADHRSSPNVANQPPSPGGKSAYASGTTAKITSVSTGNLCTEEQTPPPRPEAYPIPTQTYTREYFTFPASKSQDRMAPPQNQWPNYEEKPHMHTDSNHSSIAIQRVTRSQEELREDKAYQLERHRIEAAMDRKSDSDMWINQSSSLDSSTSSQEHLNHSSKSVTPASTLTKSGPGRWKTPAAIPATPVAVSQPIRTDLPPPPPPPPVHYAGDFDGMSMDLPLPPPPSANQIGLPSAQVAAAERRKREEHQRWYEKEKARLEEERERKRREQERKLGQMRTQSLNPAPFSPLTAQQMKPEKPSTLQRPQETVIRELQPQQQPRTIERRDLQYITVSKEELSSGDSLSPDPWKRDAKEKLEKQQQMHIVDMLSKEIQELQSKPDRSAEESDRLRKLMLEWQFQKRLQESKQKDEDDEEEEDDDVDTMLIMQRLEAERRARLQDEERRRQQQLEEMRKREAEDRARQEEERRRQEEERTKRDAEEKRRQEEGYYSRLEAERRRQHDEAARRLLEPEAPGLCRPPLPRDYEPPSPSPAPGAPPPPPQRNASYLKTQVLSPDSLFTAKFVAYNEEEEEEDCSLAGPNSYPGSTGAAVGAHDACRDAKEKRSKSQDADSPGSSGAPENLTFKERQRLFSQGQDVSNKVKASRKLTELENELNTK

SEQ ID NO: 60804 - protein, 56 aa, Homo sapiens
MESFSKYSSVQKAVCQGEGDDTFENLVFDQSFLAPLVTEYDKHLGELNGQLKYYQA

SEQ ID NO: 60805 - protein, 19 aa, Homo sapiens
MNAYVAYKVTTQTSLPLFR

SEQ ID NO: 60806 - protein, 173 aa, Homo sapiens
MAPKKPEPKKEAAKPAPAPAPAPAPAPAPAPEAPKEPAFDPKSVKIDFTADQIEGEYGQPHLSVSIALSWRRRRRRKKRRSSCPHEFKEAFSLFDRTPTGEMKITYGQCGDVLRALGQNPTNAEVLRVLGKPKPEEMNVKMLDFETFLPILQHISRNKEQGTYEDFVEGLRVF

SEQ ID NO: 60807 - protein, 41 aa, Homo sapiens
MALSRVCWARSAVWGSAVTPGHFVTRRLQLGRSGLAWGAPR

SEQ ID NO: 60808 - protein, 40 aa, Homo sapiens
MALPPGPAALRHTLLLLPALLSSGGPGTPRLAWYLDGQLQ

SEQ ID NO: 60809 - protein, 1059 aa, Homo sapiens [sequence omitted]

SEQ ID NO: 60810 - protein, 293 aa, Homo sapiens
MALTPTNLNNKMSLQMKMDCQEQQLTKKNNGFFQKLNVTEGAMQDLLKEIIKVDHILDRSDDEDDISSENPQTDFLHKGMLELEAEHDQDLSKQDKQETDVDEDPQASTSLQFSKKNLLELLLKDMLTLKGQIEKLEDRGLDLDQGTSTEVNTCNEVYELKKKVIERLEDLCKNVELLSAKLRMYQMEAEDTDSHSSEEIDTEEMEALLPQAPASFLVQKSPPRNTAWKRALRIFIMFDVLTVTGLLCYILFFGATFLFERVLLRMLGCRTTWDLREMREPFLNLEVEALLPS

SEQ ID NO: 60811 - protein, 431 aa, Homo sapiens
MGQAGCKGLCLSLFDYKTEKYVIAKNKKVGLLYRLLQASILAYLVVWVFLIKKGYQDVDTSLQSAVITKVKGVAFTNTSDLGQRIWDVADYVIPAQGENVFFVVTNLIVTPNQRQNVCAENEGIPDGACSKDSDCHAGEAVTAGNGVKTGRCLRRENLARGTCEIFAWCPLETSSRPEEPFLKEAEDFTIFIKNHIRFPKFNFSNNVMDVKDRSFLKSCHFGPKNHYCPIFRLGSVIRWAGSDFQDIALEGGVIGINIEWNCDLDKAASECHPHYSFSRLDNKLSKSVSSGYNFRFARYYRDAAGVEFRTLMKAYGIRFDVMVNGKGAFFCDLVLIYLIKKREFYRDKKYEEVRGLEDSSQEAEDEASGLGLSEQLTSGPGLLGMPEQQELQEPPEAKRGSSSQKGNGSVCPQLLEPHRLRTPSASPLHQE

SEQ ID NO: 60812 - protein, 59 aa, Homo sapiens
MGSGGVVHCRCAKCFCYPTKRRIRRRPRNLTILSLPEDVLFHILKWLSVEDILAVRAGC

SEQ ID NO: 60813 - protein, 107 aa, Homo sapiens
MDPLGAAKPQWPWRRCLAALLFQLLVAVCFFSYLRVSRDDATGSPRAPSGSSRQDTTPTRPTLLILLRTWPFHIPVALSRCSEMVPGTADCHITADRKVYPQADMVI

SEQ ID NO: 60814 - protein, 1018 aa, Homo sapiens
MNLQAQPKAQNKRKRCLFGGQEPAPKEQPPPLQPPQQSIRVKEEQYLGHEGPGGAVSTSQPVELPPPSSLALLNSVVYGPERTSAAMLSQQVASVKWPNSVMAPGRGPERGGGGGVSDSSWQQQPGQPPPHSTWNCHSLSLYSATKGSPHPGVGVPTYYNHPEALKREKAGGPQLDRYVRPMMPQKVQLEVGRPQAPLNSFHAAKKPPNQSLPLQPFQLAFGHQVNRQVFRQGPPPPNPVAAFPPQKQQQQQQPQQQQQQQQAALPQMPLFENFYSMPQQPSQQPQDFGLQPAGPLGQSHLAHHSMAPYPFPPNPDMNPELRKALLQDSAPQPALPQVQIPFPRRSRRLSKEGILPPSALDGAGTQPGQEATGNLFLHHWPLQQPPPGSLGQPHPEALGFPLELRESQLLPDGERLAPNGREREAPAMGSEEGMRAVSTGDCGQVLRGGVIQSTRRRRRASQEANLLTLAQKAVELASLQNAKDGSGSEEKRKSVLASTTKCGVEFSEPSLATKRAREDSGMVPLIIPVSVPVRTVDPTEAAQAGGLDEDGKGPEQNPAEHKPSVIVTRRRSTRIPGTDAQAQAEDMNVKLEGEPSVRKPKQRPRPEPLIIPTKAGTFIAPPVYSNITPYQSHLRSPVRLADHPSERSFELPPYTPPPILSPVREGSGLYFNAIISTSTIPAPPPITPKSAHRTLLRTNSAEVTPPVLSVMGEATPVSIEPRINVGSRFQAEIPLMRDRALAAADPHKADLVWQPWEDLESSREKQRQVEDLLTAACSSIFPGAGTNQELALHCLHESRGDILETLNKLLLKKPLRPHNHPLATYHYTGSDQWKMAERKLFNKGIAIYKKDFFLVQKLIQTKTVAQCVEFYYTYKKQVKIGRNGTLTFGDVDTSDEKSAQEEVEVDIKTSQKFPRVPLPRRESPSEERLEPKREVKEPRKEGEEEVPEIQEKEEQEEGRERSRRAAAVKATQTLQANESASDILILRSHESNAPGSAGGQASEKPREGTGKSRRALPF

SEQ ID NO: 60815 - protein, 300 aa, Homo sapiens
MRGEQGAAGARVLQFTNCRILRGGKLLREDLWVRGGRILDPEKLFFEERRVADERRDCGGRILAPGFIDVQINGGFGVDFSQATEDVGSGVALVARRILSHGVTSFCPTLVTSPPEVYHKVVPQIPVKSGGPHGAGVLGHSVADLRAAEDAVWSGATFITHLFNAMLPFHHRDPGIVGLLTSDRLPAGRCIFYGMIADGTHTNPAALRIAHRAHPQGLVLVTDAIPALGLGNGRHTLGQQEVEVDGLTAYVAGCSMESALEAASLHPAQLLGLEKSKGTLDFGADADFVVLDDSLHVQAT

SEQ ID NO: 60816 - protein, 103 aa, Homo sapiens
MLMNREIIKRNVRKSSGRGELLISLCYQSTTNTLTVVVLKARHLPKSDVSGLSDPYVKVNLYHAKKRISKKKTHVKKCTPNAVFNELFVFDIPCEGLEDISVE

SEQ ID NO: 60817 - protein, 1048 aa, Homo sapiens
MSVKEGAQRKWAALKEKLGPQDSDPTEANLESADPELCIRLLQMPSVVNYSGLRKRLEGSDGGWMVQFLEQSGLDLLLEALARLSGRGVARISDALLQLTCVSCVRAVMNSRQGIEYILSNQGYVRQLSQALDTSNVMVKKQVFELLAALCIYSPEGHVLTLDALDHYKTVCSQQYRFSIVMNELSGSDNVPYVVTLLSVINAVILGPEDLRARTQLRNEFIGLQLLDVLARLRDLEDADLLIQLEAFEEAKAEDEEELLRVSGGVDMSSHQEVFASLFHKVSCSPVSAQLLSVLQGLLHLEPTLRSSQLLWEALESLVNRAVLLASDAQECTLEEVVERLLSVKGRPRPSPLVKAHKSVQANLDQSQRGSSPQNTTTPKPSVEGQQPAAAAACEPVDHAQSESILKVSQPRALEQQASTPPPPPPPPLLPGSSAEPPPPPPPPPLPSVGAKALPTAPPPPPLPGLGAMAPPAPPLPPPLPGSCEFLPPPPPPLPGLGCPPPPPPLLPGMGWGPPPPPPPLLPCTCSPPVAGGMEEVIVAQVDHGLGSAWVPSHRRVNPPTLRMKKLNWQKLPSNVAREHNSMWASLSSPDAEAVEPDFSSIERLFSFPAAKPKEPTMVAPRARKEPKEITFLDAKKSLNLNIFLKQFKCSNEEVAAMIRAGDTTKFDVEVLKQLLKLLPEKHEIENLRAFTEERAKLASADHFYLLLLAIPCYQLRIECMLLCEGAAAVLDMVRPKAQLVLAACESLLTSRQLPIFCQLILRIGNFLNYGSHTGDADGFKISTLLKLTETKSQQNRVTLLHHVLEEAEKSHPDLLQLPRDLEQPSQAAGINLEIIRSEASSNLKKLLETERKVSASVAEVQEQYTERLQASISAFRALDELFEAIEQKQRELADYLCEDAQQLSLEDTFSTMKAFRDLFLRALKENKDRKEQAAKAERRKQQLAEEEARRPRGEDGKPGRGPGSRRRCVSSMPCWLTSGRASSCGRQPGAAGTPTGAARQPPWIPQEPQSLWPPVTLQEIPWAARAVPPLSPALMLQQPASPGAGTL

SEQ ID NO: 60818 - protein, 1223 aa, Homo sapiens
  MOD_RES (1)..(1): Any amino acid
XEEENGREYKFDVSSELLEWIWHDNMQFLQDKNIFEHTYFGFMWQLCSCIPSTLPDPKAVSLMTAKLSTSFVLETFIHSKEKPTMLQWIELLTKQFNNSQAACEWFLDRMADDDWWPMQILIKCPNQIVRQMFQRLCIHVIQRLRPVHAHLYLQPGMEDGSDDMDTSVEDIGGRSCVTRFVRTLLLIMEHGVKPHSKHLTEYFAFLYEFAKMGEEESQFLLSLQAISTMVHFYMGTKGPENPQVEVLSEEEGEEEEEEEDILSLAEEKYRPAALEKMIALVALLVEQSRSERHLTLSQTDMAALTGGKGFPFLFQHIRDGINIRQTCNLIFSLCRYNNRLAEHIVSMLFTSIAKLTPEAANPFFKLLTMLMEFAGGPPGMPPFASYILQRIWEVIEYNPSQCLDWLAVQTPRNKLAHSWVLQNMENWVERFLLAHNYPRVRTSAAYLLVSLIPSNSFRQMFRSTRSLHIPTRDLPLSPDTTVVLHQVYNVLLGLLSRAKLYVDAAVHGTTKLVPYFSFMTYCLISKTEKLMFSTYFMDLWNLFQPKLSEPAIATNHNKQALLSFWYNVCADCPENIRLIVQNPVVTKNIAFNYILADHDDQDVVLFNRGMLPAYYGILRLCCEQSPAFTRQLASHQNIQWAFKNLTPHASQYPGAVEELFNLMQLFIAQRPDMREEELEDIKQFKKTTISCYLRCLDGRSCWTTLISAFRILLESDEDRLLVVFNRGLILMTESFNTLHMMYHEATACHVTGDLVELLSIFLSVLKSTRPYLQRKDVKQALIQWQERIEFAHKLLTLLNSYSPPELRNACIDVLKELVLLSPHDFLHTLVPFLQHNHCTYHHSNIPSVLVAYEGLPLHLALFPKLWTELCQTQSAMSKNCIKLLCEDPVFAEYIKCILMDERTFLNNNIVYTFMTHFLLKVQSQVFSEANCANLISTLITNLISQYQNLQSDFSNRVEISKASASLNGDLRALALLLSVHTPKQLNPALIPTLQELLSKCRTCLQQRNSLQEQEAKERKTKDDEGATPIKRRRVSSDEEHTVDSCISDMKTETREVLTPTSTSDNETRDSSIIDPGTEQDLPSPENSSVKEYRMEVPSSFSEDMSNIRSQHAEEQSNNGRYDDCKEFKDLHCSKDSTLAEEESEFPSTSISAVLSDLADLRSCDGQALPSQDPEVALSLSCGHSRGLFSHMQQHDILDTLCRTIESTIHVVTRISGKGNQAAS

SEQ ID NO: 60819 - protein, 179 aa, Homo sapiens
MNPSMKQKQEEIKENIKNSSVPRRTLKMIQPSASGSLVGRENELSAGLSKRKHRNDHLTSTTSSPGVIVPESSENKNLGGVTQESFDLMIKENPSSQYWKEVAEKRRKALYEALKENEKLHKEIEQKDNEIARLKKENKELAEVAEHVQYMAELIERLNGEPLDNFESLDNQEFDSEEE

SEQ ID NO: 60820 - protein, 32 aa, Homo sapiens
MAELGEADEAELQRLVAAEQQKAQFTAQATCP

SEQ ID NO: 60821 - protein, 182 aa, Homo sapiens
MFLHSVNLWNLAFYVFMVFLATLGLWDVFFGFEENKCSMSYMFEYPEYQSSAVPKTWVSTDHLSIVWCKQLQLTTVRAFFDLIDADTKQITQNSKKKLSVLYHHFIRHPSKHFEENPAIISDLTGTSMWVLVKVSKWTYVAYNESEKIYFTFPLENHRKIYTHVYCQSTMLDTNSWIFACIN

SEQ ID NO: 60822 - protein, 146 aa, Homo sapiens
MEQPKGVDWTVIILTCQYKDSVQVFQRELEVRQKREQIPAGTLLLAVEDPEKRVGSGGATLNALLVAAEHLSARAGFTVVTSDVLHSAWILILHMGRDFPFDDCGRAFTCLPVENPEAPVEALVCNLDCLLDIMTYRLGPGSPPGV

SEQ ID NO: 60823 - protein, 150 aa, Homo sapiens
AAAAAGRTQALLRGRGGERLLGGGGGRRGPAEAARAWGTAALGRAGRVPGAGQRPAAFHSVTAGAGGARRARARAGTAAPAAQRLWHRGVQGAYAEPHRGAAGLSSWLPPAGELSAPSPAASRGDGKLVVIWPPRRKVSENGLEQEERKP

SEQ ID NO: 60824 - protein, 196 aa, Homo sapiens
MTSYSYRQSSATSSFGGLGGGSVRFGPGVAFRAPSIHGGSGGRGVSVSSARFVSSSSSGAYGGGYGGVLTASDGLLAGNEKLTMQNLNDRLASYLDKVRALEAANGELEILGATIENSRIVLQIDNARLAADDFRTKFETEQALRMSVEADINGLRRVLDELTLARTDLEMQIEGLKEELAYLKKNHEEEISTLRG

SEQ ID NO: 60825 - protein, 77 aa, Homo sapiens
MEDRLHMDNGLVPQKIVSVHLQDSTLKEVKDQVSNKQAQILEPKPEPSLEIKPEQDGMEHVGRDDPKALGEEPKQRR

SEQ ID NO: 60826 - protein, 191 aa, Homo sapiens
MPGGRRGPSRQQLSRSALPSLQTLVGGGCGNGTGLRNRNGSAIGLPVPPITALITPGPVRHCQIPDLPVDGSLLFEFLFFIYLLVALFIQYINIYKTVWWYPYNHPASCTSLNFHLIDYHLAAFITVMLARRLVWALISEATKAGAASMIHYMVLISARLVLLTLCGWVLCWTLVNLFRSHSVLNLLFLGY

SEQ ID NO: 60827 - protein, 64 aa, Homo sapiens
HYCAFAFHTKSSKWVFFDDANVKEIGTRWKDVVSKCIRCHFQPLLLFYANPDGTAVSTEDALRM

SEQ ID NO: 60828 - protein, 87 aa, Homo sapiens
MTEVVPSSALSEVSLRLLCHDDIDTVKHLCGDWFPIEYPDSWYRDITSNKKFFSLAATYRGAIVGMIVAEIKNRTKIHKEVPSYLKV

SEQ ID NO: 60829 - protein, 98 aa, Homo sapiens
MDKPCGCPPGVCDHGTGDRRDPWYSTVGLLPPVRAMSQRNLNAKTEQGPTGVTMTSNPITWGQIKKTTQEAEKLLERQGQAKTPDSMFLAMLAVVSCA

SEQ ID NO: 60830 - protein, 74 aa, Homo sapiens
VLCCAPSNIAVDNLVERLALCKQRILRLGHPARLLESIQQHSLDAVLARSDSAQIVADIRKDIDQVFDLKCLFL

SEQ ID NO: 60831 - protein, 33 aa, Homo sapiens
MGKDYYKILGIPSGANEDEIKKAYRKMALKYHP

SEQ ID NO: 60832 - protein, 78 aa, Homo sapiens
MGRTVVVLGGGISGLAASYHLSRAPCPPKVVLVESSERLGGWIRSVRGPNGAIFELGPRGIRPAGALGARTLLLFLLF

SEQ ID NO: 60833 - protein, 58 aa, Homo sapiens
MAAVALRDSAQGMTFEDVAIYFSQEEWELLDESQRFLYCDVMLENFAHVTSLDQATNI

SEQ ID NO: 60834 - protein, 388 aa, Homo sapiens
MESSPFNRRQWTSLSLRVTAKELSLVNKNKSSAIVEIFSKYQKAAEETNMEKKRSNTENLSQHFRKGTLTVLKKKWENPGLGAESHTDSLRNSSTEIRHRADHPPAEVTSHAASGAKADQEEQIHPRSRLRSPPEALVQGRYPHIKDGEDLKDHSTESKKMENCLGESRHEVEKSEISENTDASGKIEKYNVPLNRLKMMFEKGEPTQTKILRAQSRSASGRKISENSYSLDDLEIGPGQLSSSTFDSEKNESRRNLELPRLSETSIKDRMAKYQAAVSKQSSSTNYTNELKASGGEIKIHKMEQKENVPPGPEVCITHQEGEKISANENSLAVRSTPAEDDSRDSQVKSEVQQPVHPKPLSPDSRASSLSESSPPKAMKLLPPAPGT

SEQ ID NO: 60835 - protein, 168 aa, Homo sapiens
MEADLSGFNIDAPRWDQRTFLGRVKHFLNITDPRTVFVSERELDWAKVMVEKSRMGVVPPGTQVEQLLYAKKLYDSAFHPDTGEKMNVIGRMSFQLPGGMIITGFMLQFYRTMPAVIFWQWVNQSFNALVNYTNRNAASPTSVRQMALSYFTATTTAVATAVGMNMLT

SEQ ID NO: 60836 - protein, 206 aa, Homo sapiens
MDEADMPGGLCLGNRQGHSWPDTHDEGVVESGIHGAGPNQPVGGQDFWAQQPGEDRPGFFSQNSCGFTSAEESVCLLSDLHYKLIMNQTSQKKDSLSMSSFQSVKSISNSGKARPQPGSFNKQDSKADVSQKADLEEEPLLHNSKLDKVPGVQGQASPPHLGSAKCSSASCGIPTSCRPKSCGTSSPSWKGARGPRQPRRKLAFPG

SEQ ID NO: 60837 - protein, 99 aa, Homo sapiens
MTSVRENILFGMGNPLLDISAVVDKDFLDKYSLKPNDQILAEDKHKELFDELVKKFKVEYHAGGSTQNSIKVAQRWGSHHVAQAGLSLLASSSPSALAF

SEQ ID NO: 60838 - protein, 685 aa, Homo sapiens
MVTSLNEDNESVTVEWIENGDTKGKEIDLESIFSLNPDLVPDEEIEPSPETPPPPASSAKVNKIVKNRRTVASIKNDPPSRDNRVVGSARARPSQFPEQSSSAQQNGSVSDISPVQAAKKEFGPPSHLFFSARRKSNCVKEVEKLQEKREKRRLQQQELREKRAQDVDATNPNYEIMCMIRDFRGSLDYRPLTTADPIDEHRICVCVRKRPLNKKETQMKDLDVITIPSKDVVMVHEPKQKVDLTRYLENQTFRFDYAFDDSAPNEMVYRFTARPLVETIFERGMATCFAYGQTGSGKTHTMGGDFSGKNQDCSKGIYALAARDVFLMLKKPNYKKLELQVYATFFEIYSGKVFDLLNRKTKLRVLEDGKQQVQVVGLQEREVKCVEDVLKLIDIGNSCRTSGQTSANAHSSRSHAVFQIILRRKGKLHGKFSLIDLAGNERGADTSSADRQTRLEGAEINKSLLALKECIRALGRNKPHTPFRASKLTQVLRDSFIGENSRTCMIATISPGMASCENTLNTLRYANRVKELTVDPTAAGDVRPIMHHPPNQIDDLETQWGVGSSPQRDDLKLLCEQNEEEVSPQLFTFHEAVSQMVEMEEQVVEDHRAVFQESIRWLEDEKALLEMTEEVDYDVDSYATQLEAILEQKIDILTELRDKVKSFRAALQEEEQASKQINPKRPRAL

SEQ ID NO: 60839 - protein, 312 aa, Homo sapiens
MNPTNTVFDAKRLIGRRFDDAVVQSDMKHWPFMVVNDAGRPKVQVEYKGETKSFYPEEVSSMVLTKMKEIAEAYLGKTVTNAVVTVPAYFNDSQRQATKDAGTIAGLNVLRIINEPTAAAIAYGLDKKVGAERNVLIFDLGGGTFDVSILTIEDGIFEVKSTAGDTHLGGEDFDNRMVNHFIAEFKRKHKKDISENKRAVRRLRTACERAKRTLSSSTQASIEIDSLYEGIDFYTSITRARFEELNADLFRGTLDPVEKALRDAKLDKSQIHDIVLVGGSTRIPKIQKLLQDFFNGKELNKSINPDEAVAYG

SEQ ID NO: 60840 - protein, 54 aa, Homo sapiens
STLSESANQVFLGFTYVAPSVLESVKEKFSFEPKIRSPRRFIGSPRTPVRFLVQ

SEQ ID NO: 60841 - protein, 95 aa, Homo sapiens
  MOD_RES (1)..(1): Any amino acid
XKEFLVAGGEDFKLYKYDYNSGEELESYKGHFGPIHCVRFSPDGELYASGSEDGTLRLWQTVVGKTYGLWKCVLPEEIASENSDCIFPSAPDVKA

SEQ ID NO: 60842 - protein, 174 aa, Homo sapiens
MASAGTQHYSIGLRQKNSFKQSGPSGTVPATPPEKPSEGRVWPQAHQQVKPIWKLEKKQVETLSAGLGPGLLGVPPQPAYFFCPSTLCSSGTTAVIAGHSSSCYLHSLPDLFNSTLLYRRSSYRQKPYQQLESFCLRSSPSEKSPFSLPQKSLPVSLTANKATSSMVFSMAQPM

SEQ ID NO: 60843 - protein, 663 aa, Homo sapiens
MCDLRRPAAGGMMDLAYVCEWEKWSKSTHCPSVPLACAWSCRNLIAFTMDLRSDDQDLTRMIHILDTEHPWDLHSIPSEHHEAITCLEWDQSGSRLLSADADGQIKCWSMADHLANSWESSVGSLVEGDPIVALSWLHNGVKLALHVEKSGASSFGEKFSRVKFSPSLTLFGGKPMEGWIAVTVSGLVTVSLLKPSGQVLTSTESLCRLRGRVALADIAFTGGGNIVVATADGSSASPVQFYKVCVSVVSEKCRIDTEILPSLFMRCTTDLNRKDKFPAITHLKFLARDMSEQVLLCASSQTSSIVECWSLRKEGLPVNNIFQQISPVVGDKQPTILKWRILSATNDLDRVSAVALPKLPISLTNTDLKVASDTQFYPGLGLALAFHDGSVHIVHRLSLQTMAVFYSSAAPRPVDEPAMKRPRTAGPAVHLKAMQLSWTSLALVGIDSHGKLSVLRLSPSMGHPLEVGLALRHLLFLLEYCMVTGYDWWDILLHVQPSMVQSLVEKLHEEYTRQTAALQQVLSTRILAMKASLCKLSPCTVTRVCDYHTKLFLIAISSTLKSLLRPHFLNTPDKSPGDRLTEICTKITDVDIDKVMINLKTEEFVLDMNTLQALQQLLQWVGDFVLYLLASLPNQPSPTSEPSPTSEPCPTSEPSPTSEPSSP

SEQ ID NO: 60844 - protein, 166 aa, Homo sapiens
MLGSGFKAERLRVNLRLVINRLKLLEKKKTELAQKARKEIADYLAAGKDERARIRVEHIIREDYLVEAMEILELYCDLLLARFGLIQSMKELDSGLAESVSTLIWAAPRLQSEVAELKIVADQLCAKYSKEYGKLCRTNQIGTVNDRLMHKLSVEAPPKILVERYL

SEQ ID NO: 60845 - protein, 206 aa, Homo sapiens
MTKLITETPDQPIPFLIDHLQSKQGNRGQLQRTLSGSAALWAESEKSESKGTRRDFRSYDKPWQLNAKKPKKSKSDLAVSNISPPSPDSKSLPRSVEHPKWNWRTKPQSRDFDELNHILQESKKLGKALENLSRSIAISDELDKETVTFNSSLLRPRVIGEWIGREENDADPLAAEMLQPPIPRSKNDQWESEDSGSSPAGSLEDT

SEQ ID NO: 60846 - protein, 423 aa, Homo sapiens
MPRKGTQPSTARRREEGPPPPSPDGASSDAEPEPPSGRTESPATAAETASEELDNRSLEEILNSIPPPPPPAMTNEAGAPRLMITHIVNQNFKSYAGEKILGPFHKRFSCIIGPNGSGKSNVIDSMLFVFGYRAQKIRSKKLSVLIHNSDEHKDIQSCTVEVHFQKIIDKEGDDYEVIPNSNFYVSRTACRDNTSVYHISGKKKTFKDVGNLLRSHGIDLDHNRFLILQGEVEQIAMMKPKGQTEHDEGMLEYLEDIIGCGRLNEPIKVLCRRVEILNEHRGEKLNRVKMVEKEKDALEGEKNIAIEFLTLENEIFRKKNHVCQYYIYELQKRIAEMETQKEKIHEDTKEINEKSNILSNEMKAKNKDVKDTEKKLNKITKFIEENKEKFTQLDLEDVQVREKLKHATSKAKKLEKQLQKDKE

SEQ ID NO: 60847 - protein, 91 aa, Homo sapiens
MASDDFDIVIEAMLEAPYKKEEDEQQRKEVKKDYPSNTTSSTSNSGNETSGSSTIGETSNRSRDRDRYRRRNSRSRSPGRQCRHRSRSWDR

SEQ ID NO: 60848 - protein, 326 aa, Homo sapiens
MCVQNCGPSFQSLIVKKEFVKENLVKLLNPRYNLPLDIQNRILNFIKTWSQGFPGGVDVSEVKEVYLDLVKKGVQFPPSEAEAETARQETAQISSNPPTSVPTAPALSSVIAPKNSTVTLVPEQIGKLHSELDMVKMNVRVMSAILMENTPGSENHEDIELLQKLYKTGREMQERIMDLLVVVENEDVTVELIQVNEDLNNAILGYERFTRNQQRILEQNKNQKEATNTTSEPSAPSQDLLDLSPSPRMPRATLGELNTMNNQLSGLNFSLPSSDVTNNLKPSLHPQMNLLALENTEIPPRDLVLPCWPGCGLKLLTYGDLPTSAS

SEQ ID NO: 60849 - protein, 320 aa, Homo sapiens
MPTSSSFKHRIKEQEDYIRDWTAHREEIARISQDLALIAREINDVAGEIDSVTSSGTAPSTTVSTAATTPGSAIDTREEVGDLHGEMHKLVDRVFDESLNFRKIPPLVHSKTPEGNNGRSGDPRPQAAEPPDHLTITRRRTWSRDEVMGDNLLLSSVFQFSKKIRQSIDKTAGKIRILFKDKDRNWDDIESKLRAESEVPIVKTSSMEISSILQELKRVEKQLQAINAMIDPDGTLEALNNMGFPSAMLPSPPKQKSSPVNNHHSPGQTPTLGQPEARALHPAAVSAAAEFENAESEADFSIHFNRFNPDGEEEDVTVQE

SEQ ID NO: 60850 - protein, 218 aa, Homo sapiens
ALLLASYFLLLTSPEAQDPGGEEEAESAARQPLIRTEAPESKPGSSSSLSLRERWTVFKGLLWYIVPLVVVYFAEYFINQGLFELLFFWNTSLSHAQQYRWYQMLYQAGVFASRSSLRCCRIRFTWALALLQCLNLVFLLADVWFGFLPSIYLVFLIILYEGLLGGAAYVNTFHNIALETSDEHREFAMAATCISDTLGISLSGLLALPLHDFLCQLS

SEQ ID NO: 60851 - protein, 73 aa, Homo sapiens
  MOD_RES (1)..(1): Any amino acid
XNQLLHFAFREDKQWKLQQIQDARNHVSHVHKVECVIPWLNDALVYFTVSLQLCQQLKDKISVFSSYWSYRPF

SEQ ID NO: 60852 - protein, 34 aa, Homo sapiens
MRWRTILLQYCFLLITCLLTALEAVPIDIDKTKV

SEQ ID NO: 60853 - protein, 149 aa, Homo sapiens
MDHKEVSTCVAPYEGGVWKVRVDLPDKYPFKSPSIGFMNKIFHPNIDEASGTVCLDVINQTWTALYDLTNIFESFLPQLLAYPNPIDPLNGDAAAMYLHRPEEYKQKIKEYIQKYATEEALKEQEEGTGDSSSESSMSDFSEDEAQDME

SEQ ID NO: 60854 - protein, 147 aa, Homo sapiens
IYRFVRTLFSAAQLTAECAIVTLVYLERLLTYAEIDICPTNWKRIVLGAILLASKVWDDQAVWNVDYCQILKDITVEDMNEMERHFLELLQFNINVPASVYAKYYFDLRSLADDNNLNFLFAPLSKERAQNLELVTLPFAPFSNGEK

SEQ ID NO: 60855 - protein, 58 aa, Homo sapiens
MALLRDVSLQDPRDRFELLQRVGAGTYGDVYKARDTVTSELAAVKIVKLDPAGNHHPA

SEQ ID NO: 60856 - protein, 54 aa, Homo sapiens
  MOD_RES (1)..(1): Any amino acid
XQDSHKAGPIGILFELVHIFLYVVQPRDFPEDENTKAQIGEACSFKTLQPNESW

SEQ ID NO: 60857 - protein, 195 aa, Homo sapiens
  MOD_RES (1)..(1): Any amino acid
XLQEETLTKMSILGKGSMRDKAKEEELRKSGEAKYFHLNDDLHVLIEVFAPPAEAYARMGHALEEIKKFLIPDYNDEIRQAQLQELTYLNGGSENADVPVVRGKPTLRTRGVPAPAITRGRGGVTARPVGVVVPRGTPTPRGVLSTRGPVSRGRGLLTPRARGVPPTGYRPPPPPPTQETYGEYGKKSGLTQDTR

SEQ ID NO: 60858 - protein, 1188 aa, Homo sapiens
MGLLQLLAFSFLALCRARVRAQEPEFSYGCAEGSCYPATGDLLIGRAQKLSVTSTCGLHKPEPYCIVSHLQEDKKCFICNSQDPYHETLNPDSHLIENVVTTFAPNRLKIWWQSENGVENVTIQLDLEAEFHFTHLIMTFKTFRPAAMLIERSSDFGKTWGVYRYFAYDCEASFPGISTGPMKKVDDIICDSRYSDIEPSTEGEVIFRALDPAFKIEDPYSPRIQNLLKITNLRIKFVKLHTLGDNLLDSRMEIREKYYYAVYDMVVRGNCFCYGHASECAPVDGFNEEVEGMVHGHCMCRHNTKGLNCELCMDFYHDLPWRPAEGRNSNACKKCNCNEHSISCHFDMAVYLATGNVSGGVCDDCQHNTMGRNCEQCKPFYYQHPERDIRDPNFCERCTCDPAGSQNEGICDSYTDFSTGLIAGQCRCKLNVEGEHCDVCKEGFYDLSSEDPFGCKSCACNPLGTIPGGNPCDSETGHCYCKRLVTGQHCDQCLPEHWGLSNDLDGCRPCDCDLGGALNNSCFAESGQCSCRPHMIGRQCNEVEPGYYFATLDHYLYEAEEANLGPGVSIVERQYIQDRIPSWTGAGFVRVPEGAYLEFFIDNIPYSMEYDILIRYEPQLPDHWEKAVITVQRPGRIPTSSRCGNTIPDDDNQVVSLSPGSRYVVLPRPVCFEKGTNYTVRLELPQYTSSDSDVESPYTLIDSLVLMPYCKSLDIFTVGGSGDGVVTNSAWETFQRYRCLENSRSVVKTPMTDVCRNIIFSISALLHQTGLACECDPQGSLSSVCDPNGGQCQCRPNVVGRTCNRCAPGTFGFGPSGCKPCECHLQGSVNAFCNPVTGQCHCFQGVYARQCDRCLPGHWGFPSCQPCQCNGHADDCDPVTGECLNCQDYTMGHNCERCLAGYYGDPIIGSGDHCRPCPCPDGPDSGRQFARSCYQDPVTLQLACVCDPGYIGSRCDDCASGYFGNPSEVGGSCQPCQCHNNIDTTDPEACDKETGRCLKCLYHTEGEHCQFCRFGYYGDALQQDCRKCVCNYLGTVQEHCNGSDCQCDKATGQCLCLPNVIGQNCDRCAPNTWQLASGTGCDPCNCNAAHSFGPSCNEFTGQCQCMPGFGGRTCSECQELFWGDPDVECRDVEDVTQFPDYPGSHNMCGEGRIYHLSPQFMLLTIMLYSSNLPLESLECRGRTKTIKR

SEQ ID NO: 60859 - protein, 8 aa, Homo sapiens
MSLVACEC

SEQ ID NO: 60860 - protein, 117 aa, Homo sapiens
MTRNSSTIIAFAVGGQYVPGNGFSLIGAHTDSPCLRVKRRSRRSQVGFQQVGVETYGGGIWSTWFDRDLTLAGRVIVKCPTSGRLEQQLVHVERPILRIPHLAIHLQRNINENFGPN

SEQ ID NO: 60861 - protein, 274 aa, Homo sapiens
MSHEKSFLVSGDNYPPPNPGYPGGPQPPMPPYAQPPYPGAPYPQPPFQPSPYGQPGYPHGPSPYPQGGYPQGPYPQGGYPQGPYPQEGYPQGPYPQGGYPQGPYPQSPFPPNPYGQPQVFPGQDPDSPQHGNYQEEGPPSYYDNQDFPATNWDDKSIRQAFIRKVFLVLTLQLSVTLSTVSVFTFVAEVKGFVRENVWTYYVSYAVFFISLIVLSCCGDFRRKHPWNLVALSVLTASLSYMVGMIASFYNTEAVIMAVGITTAVCFTVVIFSMQ

SEQ ID NO: 60862 - protein, 446 aa, Homo sapiens
MALSDEPAAGGPEEEAEDETLAFGAALEAFGESAETRALLGRLREVHGGGAEREVALERFRVIMDKYQEQPHLLDPHLEWMMNLLLDIVQDQTSPASLVHLAFKFLYIITKVRGYKTFLRLFPHEVADVEPVLDLVTIQNPKDHEAWETRYMLLLWLSVTCLIPFDFSRLDGNLLTQPGQARMSIMDRILQIAESYLIVSDKARDAAAVLVSRFITRPDVKQSKMAEFLDWSLCNLARSSFQTMQGVITMDGTLQALAQIFKHGKREDCLPYAATVLRCLDGCRLPESNQTLLRKLGVKLVQRLGLTFLKPKVAAWRYQRGCRSLAANLQLLTQGQSEQKPLILTEDDDEDDDVPEGVERVIEQLLVGLKDKDTVVRWSAAKGIGRMAGRLPRALADDVVGSVLDCFSCRRDPEGADLRREAGCLQRGHQRQGRRLLRVLGLRACL

SEQ ID NO: 60863 - protein, 377 aa, Homo sapiens
MLKFRADRRVSHNERRNTFLHPVTGQVPEENKKFDLKISTLDMSNKTGGKRPATTNSDIPNHNMVSEVPPERPSVRATRTARKAVAFGKRSHSMKRNPNAPVTKAGWLFKQASSGVKQWNKRWFVLVDRCLFYYKDEKEESILGSIPLLSFRVAAVQPSDNISRKHTFKAEHAGVRTYFFSAESPEEQEAWIQAMGEAARVQIPPAQKSVPQAVRHSHEKPDSENVPPSKHHQQPPHNSLPKPEPEAKTRGEGDGRGCEKAERRPERPEVKKEPPVKANGLPAGPEPASEPGSPYPEGPRVPGGGEQPAQPNGWQYHSPSRPGSTAFPSQDGETGGHRRSFPPRTNPDKIAQRKSSMNQLQQWVNLRRGVPPPEDLR

SEQ ID NO: 60864 - protein, 130 aa, Homo sapiens
MPDYLGADQRKTKEDEKDDKPIRALDEGDIALLKTYGQSTYSRQIKQVEDDIQQLLKKINELTGIKESDTGLAPPALWDLAADKQTLQSEQPLQVARCTKIINADSEDPKYIINVKQFAKFVVDLSDQVA

SEQ ID NO: 60865 - protein, 122 aa, Homo sapiens
MYKETVYSAFNLLMHYPPPSGAGQHPQPQPPLHKANQPPHGVPQLSLYEHFNSPHPTPAPADISQKQVHRPLQTPDLSGFYSLTSGSMGQLPHTVSWFTHPSLMLGSGVPGHPAAIPHPAIV

SEQ ID NO: 60866 - protein, 467 aa, Homo sapiens
MCVSEIEPACCRSRAPSPCELPSDPLLSMKQPIMADGPRCKRRKQANPRRKNVVNYDNVVDTGSETDEEDKLHIAEDDGIANPLDQETSPASVPNHESSPHVSQALLPREEEEDEIREGGVEHPWHNNEILQASVDGPEEMKEDYDTMGPEATIQTAINNGTVKNANCTSDFEEYFAKRKLEERDGHAVSIEEYLQRSDTAIIYPEAPEELSRLGTPEANGQEENDLPPGTPDAFAQLLTCPYCDRGYKRLTSLKEHIKYRHEKNEENFSCPLCSYTFAYRTQLERHMVTHKPGTDQHQMLTQGAGNRKFKCTECGKAFKYKHHLKEHLRIHSGEKPYECPNCKKRFSHSGSYSSHISSKKCIGLISVNGRMRNNIKTGSSPNSVSSSPTNSAITQLRNKLENGKPLSMSEQTGLLKIKTEPLDFNDYKVLMATHGFSGTSPFMNGGLGATSPLGVHPSAQSPMQHL

SEQ ID NO: 60867 - protein, 87 aa, Homo sapiens
MTELQQDVEDTKPAKVLGKRESKLGSAHSEAENGVEEKKKACRSPTAQSPTPSVEADSPDQKKIISLCTRPICTFTSCFLVSQRRNH

SEQ ID NO: 60868 - protein, 312 aa, Homo sapiens
MDRAPTEQNVKLSAEVEPFIPQKKSPDTFMIPMALPNDNGSVSGVEPTPIPSYLITCYPFVQENQSNRQFPLYNNDIRWQQPNPNPTGPYFAYPIISAQPPVSTEYTYYQLMPAPCAQVMGFYHPFPTPYSNTFQAANTVNAITTECTERPSQLGQVFPLSSHRSRNSNRGSVVPKQQLLQQHIKSKRPLVKNVATQKETNAAGALRNPDSGTMNHVESSMCAGGVNWSNVTCQATQKKPWMEKNQTFSRGGRQTEQRNNSQDEDGFQELNENGNAKDENIQQKLSSKVLDDLPENSPINIVQTPIPITTSV

SEQ ID NO: 60869 - protein, 341 aa, Homo sapiens
MSQHNCSKDGPTSQPRLRTLPPAGDSQERSDSPEICHYEKSFHKHSATPNYTHCGLFGDPHLRTFTDRFQTCKVQGAWPLIDNNYLNVQVTNTPVLPGSAATATSKLTIIFKNFQECVDQKVYQAEMDELPAAFVDGSKNGGDKHGANSLKITEKVSGQHVEIQAKYIGTTIVVRQVGRYLTFAVRMPEEVVNAVEDWDSQGLYLCLRGCPLNQQIDFQAFHTNAEGTGARRLAAASPAPTAPETFPYETAVAKCKEKLPVEDLYYQACVFDLLTTGDVNFTLAAYYALEDVKMLHSNKDKLHLYERTRDLPGRAAAGLPLAPRPLLGALVPLLALLPVFC

SEQ ID NO: 60870 - protein, 100 aa, Homo sapiens
MAHALVTFRDVAIDFSQKEWECLDTTQRKLYRDVMLENYNNLVSLAGYSGSKPDVITLLEQGKEPCVVARDVTGRQCPGLLSRHKTKKLSSEKDIHEISL

SEQ ID NO: 60871 - protein, 274 aa, Homo sapiens
IFVEFDGCNWKQHSWVKVHAEEVIVLLLEGSLVWAPREDPVLLQGIRVSIAQWPALTFTPLVDKLGLGSVVPVEYLLDRELRFLSDANGLHLFQMGTDSQNQILLEHAALRETVNALISDQKLQEIFSRGPYSVQGHRVKIYQPEGEEGWLYGVVSHQDSITRLMEVSVTESGEIKSVDPRLIHVMLMDNSAPQSEGGTLKAVKSSKGKKKRESIEGKDGRRRKSASDSGCDPASKKLKGDRGEVDSNGSDGDKPQHSLCHLHQRKRQDSGGAG

SEQ ID NO: 60872 - protein, 181 aa, Homo sapiens
MKTILSNQTVDIPENVDITLKGRTVIVKGPRGTLRRDFNHINVELSLLGKKKKRLRVDKWWGNRKELATVRTICSHVQNMIKGVTLGFRYKMRSVYAHFPINVVIQENGSLVEIRNFLGEKYIRRVRMRPVSQAQKDELILEGNDIELVSNSAALIQQATTVKNKDIRKFLDGIYVSEKGT

SEQ ID NO: 60873 - protein, 372 aa, Homo sapiens
MACIHYLRENREKFEAFIEGSFEEYLKRLENPQEWVGQVEISALSLMYRKDFIIYREPNVSPSQVTENNFPEKVLLCFSNGNHYDIVYPIKYKESSAMCQSLLYELLYEKVFKTDVSKIVMELDTLEVADEDNSEISDSEDDSCKSKTAAAAADVNGFKPLSGNELKNNGNSTSLPLSRKVLKSLNPAVYRNVEYEIWLKSKQAQQKRDYSIAAGLQYEVGDKCQVRLDHNGKFLNADVQGIHSENGPVLVEELGKKHTSKNLKAPPPESWNTVSGKKMKKPSTSGQNFHSDVDYRGPKNPSKPIKAPSALPPRLQHPSGVRQHAFSSHSSGSQSQKFSSEHKNLSRTPSQIIRKPDRERVEDFDHTSRESN

SEQ ID NO: 60874 - protein, 97 aa, Homo sapiens
MDEESLESALQTYRAQLQQVELALGAGLDSSEQADLRQLQGDLKELIELTEASLVSVRKSSLLAALDEERPGRQEDAEYQAFREAITEAVEAPAAAR

SEQ ID NO: 60875 - protein, 90 aa, Homo sapiens
MKLSRRDLPAHLQHDCPKRRLKCEFCGCDFSGEAYESHEGMCPQESVYCENKCGARMMRRLLAQHATSECPKRTQPCTYCTKEFVFDTIQ

SEQ ID NO: 60876 - protein, 746 aa, Homo sapiens
MGAKGNGLTSMKNMEKELLCPVCQEMYKQPLVLPCTHNVCQACAREVLGQQGYIGHGGDPSSEPTSPASTPSTRSPRLSRRTLPKPDRLDRLLKSGFGTYPGRKRGALHPQVIMFPCPACQGDVELGERGLAGLFRNLTLERVVERYRQSVSVGGAILCQLCKPPPLEATKGCTECRATFCNECFKLFHPWGTQKAQHEPTLPTLSFRPKGLMCPDHKEEVTHYCKTCQRLVCQLCRVRRTHSGHKITPVLSAYQALKDKLTKSLTYILGNQDTVQTQICELEEAVRHTEVSGQQAKEEVSQLVRGLGAVLEEKRASLLQAIEECQQERLARLSAQIQEHRSLLDGSGLVGYAQEVLKETDQPCFVQAAKQLHNRIARATEALQTFRPAASSSFRHCQLDVGREMKLLTELNFLRVPEAPVIDTQRTFAYDQIFLCWRLPPHSPPAWHYTVEFRRTDVPAQPGPTRWQRREEVRGTSALLENPDTGSVYVLRVRGCNKAGYGEYSEDVHLHTPPAPVLHFFLDSRWGASRERLAISKDQRAVRSVPGLPLLLAADRLLTGCHLSVDVVLGDVAVTQGRSYWACAVDPASYLVKVGVGLESKLQESFQGAPDVISPRYDPDSGHDSGAEDATVEASPPFAFLTIGMGKILLGSGASSNAGLTGRDGPTAGCTVPLPPRLGICLDYERGRVSFLDAVSFRGLLECPLDCSGPVCPAFCFIGGGAVQLQEPVGTKPERKVTIGGFAKLD

SEQ ID NO: 60877 - protein, 37 aa, Homo sapiens
MAATSLMSALAARLLQPAHSCSLRLRPFHLAAVRNQQ

SEQ ID NO: 60878 - protein, 88 aa, Homo sapiens
MNAPDEDETINVNYNIMCLSREEGIKWIKKERLPAFLESDCYFEYRLAKLVSQVRWSKSGMNFTVGSNFSPWIVKKPPSLPPPATEED

SEQ ID NO: 60879 - protein, 227 aa, Homo sapiens
TLAVALCSTVPSLALTSLLCLGFALCASVPILPLQYLTFILQVISRSFLYGSNAAFLTLAFPSEHFGKLFGLVMALSAVVSLLQFPIFTLIKGSLQNDPFYDKAKMKLPLLLALLFGAVSALHLRSETSTFETPLGAKTLPEDEETPEQEMEETPCRELEEEEEWGSGSEDASKKDGAVESISVPDMVDKNLTCPEEEDTVKVVGIPGCQTCRYLLVRSLQTFSQAW

SEQ ID NO: 60880 - protein, 167 aa, Homo sapiens
MGIPGSHNLRYFWNFPGQGPIISDVGGADLGGAPSAPSSIPSGTMGCGCSSHPEDDWMENIDVCENCHYPIVPLDGKGTLLIRNGSEVRDPLVTYEGSNPPASPLQGDPRQQGLKDKACGSLAVGFHLSPTYFLPGLAFLVPHPVTPGFLPIPARFSLMPLVFTDNL

SEQ ID NO: 60881 - protein, 101 aa, Homo sapiens
MAEFMDYTSSQCGKYYSSVPEEGGATHVYRYHRGESKLHMCLDIGNGQRKDRKKTSLGPGGSYQISEHAPEASQPAENISKDLYIEVYPGTYSVTVGSNDL

SEQ ID NO: 60882 - protein, 171 aa, Homo sapiens
MDMGTSALSKKPWWTLPQNFHAPMVFHMEEDQEELIFGHGDTYLRCIEVHSHTLIQLESWFTATGQTRVTVVGPHRARQWLLHMFCCVGSQDSYHHARGGSTAWPWERVLSARSRGGPCPKTFILQWCSTWKRTRRSSSSDLMTRTFAALSCTATPLFSWRGVSQLQARHV

SEQ ID NO: 60883 - protein, 131 aa, Homo sapiens
MKFLIFAFFGGVHLLSLCSGKAICKNGISKRTFEEIKEEIASCGDVAKAIINLAVYGKAQNRSYERLALLVDTVGPRLSGSKNLEKAIQIMYQNLQQDGLEKVHLEPVRIPHWERGEESAVMLEPRIHKIA

SEQ ID NO: 60884 - protein, 2042 aa, Homo sapiens
  MOD_RES (1)..(1): Any amino acid
XPMELRHLLRPRPGLDSEPGGAEAGKARHAGAVIRTLSGMARHQGPARALRYFDLTPSMAGIMVPPVQRWPGPGFTFHAWLCLHPMDTAPTPAPTRPLQRKQLYSFFTSSGSGFEAFFTAAGTLVVAVCTRKEYLTMSLPEVSFADSAWHCVAIVHVPGRRPFSQNLVHVYKDGHLVKTAPLRCPSLSEPFSSCCIGSAGYRTTTTTTGLPTPPVPATLAYTHPALTRSQSVPASTGLGWGSGLVAPLQEGSIDSTLAGTQDTRWGSPTSLEGELGAVAIFHEALQATALRTLCTLGPNETAPFKPEGELHELSTRLLLHYSPQACKNNICLDLSPSHGLDGRLTGHRVETWDVKDVVNCVGGMGALLPLLERVAAQPKEAEAGPAETHDLVGPELTSGHNTQGLVLPLGKSSEERMERNAVAAFLLMLRNFLQGHMVNQESLVQCQGPAIIGALLRKVPSWAMDMNVLMSAQLLMEQVAAEGSGPLLYLLYQHLLFNFHLWTLSDFAVRLGHIQYMSSIVREHRQKLRKKYGVQFILDALRTHYSPQRERPLAADDLRTVQTSLLGLAREFLVRSLSADDVQVTQTMLSFLAATGDDGQILRRLQQNERLPERSRQRLRLRECGLQGLVACLPEGTVSPQLCQGLYKLFLGAGSGNTAGGGGSSGTLTPASQPGTPSPLDGPRPFPAAPGRHSSSLSNVLEDGSLPEPTISGDDTSNTSNPQQTSEEELCNLLTNVLFSVTWRGVEGSDEAAWRERGQVFSVLTQLGASATLVRPPDCIKRSLLEMMLESALTDIKEAPVGVLASLTQQALWLLRLLQDFLCAEGHGNQELWSEKLFEGVCSLLDRLGAWPHLANGTADLREMAQIGLRLVLGYILLEDPQLHAQAYVRLHMLLQTAVPARREEACYVLSKLEAALGRVLNTSSLESATDEAGSPLAAAAAAAAAERCSWLVPLVRTLLDRAYEPLGLQWGLPSLPPTNGSPTFFEDFQAFCATPEWRHFIDKQVQPTMSQFEMDTYAKSHDLMSGFWNACYDMLMSSGQRRQWERAQSRRAFQELVLEPAQRRARLEGLRYTAVLKQQATQHSMALLHWGALWRQLASPCGAWALRDTPIPRWKLSSAETYSRMRLKLVPNHHFDPHLEASALRDNLGEVPLTPTEEASLPLAVTKEAKVSTPPELLQEDQLGEDELAELETPMEAAELDEQREKLVLSAECQLVTVVAVVPGLLEVTTQNVYFYDGSTERVETEEGIGYDFRRPLAQLREVHLRRFNLRRSALELFFIDQANYFLNFPCKVGTTPVSSPSQTPRPQPGPIPPHTQVRNQVYSWLLRLRPPSQGYLSSRSPQEMLRASGLTQKWVQREISNFEYLMQLNTIAGRTYNDLSQYPVFPWVLQDYVSPTLDLSNPAVFRDLSKPIGVVNPKHAQLVREKYESFEDPAGTIDKFHYGTHYSNAAGVMHYLIRVEPFTSLHVQLQSGRFDCSDRQFHSVAAAWQARLESPADVKELIPEFFYFPDFLENQNGFDLGCLQLTNEKVGDVVLPPWASSPEDFIQQHRQALESEYVSAHLHEWIDLIFGYKQRGPAAEEALNVFYYCTYEGAVDLDHVTDERERKALEGIISNFGQTPCQLLKEPHPTRLSAEEAAHRLARLDTNSPSIFQHLDELKAFFAEVVSDGVPLVLALVPHRQPHSFITQGSPDLLVTVSASGLLGTHSWLPYDRNISNYFSFSKDPTMGSHKTQRLLSGPWVPGSGVSGQALAVAPDGKLLFSGGHWDGSLRVTALPRGKLLSQLSCHLDVVTCLALDTCGIYLISGSRDTTCMVWRLLHQGGLSVGLAPKPVQVLYGHGAAVSCVAISTELDMAVSGSEDGTVIIHTVRRGQFVAALRPLGATFPGPIFHLALGSEGQIVVQSSAWERPGAQVTYSLHLYSVNGKLRASLPLAEQPTALTVTEDFVLLGTAQCALHILQLNTLLPAAPPLPMKVAIRSVAVTKERSHVLVGLEDGKLIVVVAGQPSEVRSSQFARKLWRSSRRISQVSSGETEYNPTEAR

SEQ ID NO: 60885 - protein, 153 aa, Homo sapiens
MEDSGKTFSSEEEEANYWKDLAMTYKQRAENTQEELREFQEGSREYEAELETQLQQIETRNRDLLSENNRLRMELETIKEKFEVQHSEGYRQISALEDDLAQTKAIKDQLQKYIRELEQANDDLERAKRFAAGTGRAAEAGETQDPHAQLSGS

SEQ ID NO: 60886 - protein, 101 aa, Homo sapiens
MTTMAAATLLRATPHFSGLAAGRTFLLQGLLRLLKAPALPLLCRGLAVEAKKTYVRDKPHVNVGTIGHVDHGKTTLTAAITKKYDHRHCTPRRLHPGGSSQ

SEQ ID NO: 60887 - protein, 100 aa, Homo sapiens
MADNLPTEFDVVIIGTGLPESILAAACSRSGQRVLHIDSRSYYGGNWASFSFSGLLSWLKEYQQNNDIGEESTVVWQDLIHETEEAITLRKKDETIQHTE

SEQ ID NO: 60888 - protein, 190 aa, Homo sapiens
MRVISIKNYHPKIRIITQMLQYHNKAHLLNIPSWNWKEGDDAICLAELKLGFIAQSCLAQGLSTMLANLFSMRSFIKIEEDTWQKYYLEGVSNEMYTEYLSSAFVGLSFPTVCELCFVKLKLLMIAIEYKSANRESRILINPGNHLKIQEGTLGFFIASDAKEVKRPPQLCLPLAAQKRCFQSDKLDIFI

SEQ ID NO: 60889 - protein, 42 aa, Homo sapiens
MGFSSELCSPQGHGVLQQMQEAELRLLEGMRKWMAQRVKSDR

SEQ ID NO: 60890 - protein, 58 aa, Homo sapiens
MSTTGQVIRCKAAILWKPGAPFSIEEVEVAPPKAKEVRIKVTKLSHSFCHSVENVPLA

SEQ ID NO: 60891 - protein, 173 aa, Homo sapiens
MSILIIEAFYGGSHKQLVDLLQEELGDCVVYTLPAKKWHWRARTSALYFSQTIPISEHYRTLFASSVLNLTELAALRPDLGKLKKILYFHENQLIYPVKKCQERDFQYGYNQILSCLVADVVVFNSVFNMESFLTSMGKFMKLIPDHRPKDLESIIRPKCQVIYFPIRFPDVS

SEQ ID NO: 60892 - protein, 475 aa, Homo sapiens
MAELQMLLEEEIPSGKRALIESYQNLTRVADYCENNYIQATDKRKALEETKAYTTQSLASVAYQINALANNVLQLLDIQASQLRRMESSINHISQTVDIHKEKVARREIGILTTNKNTSRTHKIIAPANMERPVRYIRKPIDYTVLDDVGHGVKHGNNQPARTGTLSRTNPPTQKPPSPPMSGRGTLGRNTPYKTLEPVKPPTVPNDYMTSPARLGSQHSPGRTASLNQRPRTHSGSSGGSGSRENSGSSSIGIPIAVPTPSPPTIGPAPGSAPGSQYGTMTRQISRHNSTTSSTSSGGYRRTPSVTAQFSAQPHVNGGPLYSQNSISIAPPPPPMPQLTPQIPLTGFVARVQENIADSPTPPPPPPPDDIPMFDDSPPPPPPPPVDYEDEEAAVVQYNDPYADGDPAWAPKNYIEKVVAIYDYTKDKDDELSFMEGAIIYVIKKNDDGWYEGVCNRVTGLFPGNYVESIMHYTD

SEQ ID NO: 60893 - protein, 194 aa, Homo sapiens
  MOD_RES (1)..(1): Any amino acid
XRKMIQQTFQQYASLREEECVMKFFNTLAGFANIDQETYRCELIQGWNITVDLVIGPKGIRQLTSQDAKPTCLAEFKQIRSIRCLPLEEGQAVLQLGIEGAPQALSIKTSSLAEAENMADLIDGYCRLQDGEKRNSLPQIPMLNLEARRSHLSESCSIESDIYAEIPDETLRRPGGPQYGIAREDVVLNRILGE

SEQ ID NO: 60894 - protein, 122 aa, Homo sapiens
LQLVDLASTKPGTSSAPFTINAHQSDIACVSLNQPGTVVASASQKGTLIRLFDTQSKEKLVELRRGTDPATLYCINFSHDSSFLCASSDKGTVHIFALKDTRLNRRSAHLRRWDLPQICLHS

SEQ ID NO: 60895 - protein, 252 aa, Homo sapiens
MEKLAASTEPQGPRPVLGRESVQVPDDQDFRSFRSECEAEVGWNLTYSRAGVSVWVQAVEMDRTLHKIKCRMECCDVPAETLYDVLHDIEYRKKWDSNVIETFDIARLTVNADVGYYSWRCPKPLKNRDVITLRSWLPMGADYIIMNYSVKHPKYPPRKDLVRAVSIQTGYLIQSTGPKSCVITYLAQVDPKGSLPKWVVNKSSQFLAPKAMKKMYKACLKYPEWKQKHLPHFKPWLHPEQSPLPSLALSEL

SEQ ID NO: 60896 - protein, 87 aa, Homo sapiens
MSWVQAASLIQGPGDKGDVFDEEADESLLAQREWQSNMQRRVKEGYRDGIDAGKAVTLQQGFNQGYKKGAEVILNYGRLRGTLSWPV

SEQ ID NO: 60897 - protein, 330 aa, Homo sapiens
  MOD_RES (1)..(1): Any amino acid
XAAKGAHGSYLKVESELERCRAEGHWDRMPELVRQLQTLSMPGGGGNRRGSPSAAFTFPDTDDFGKLLLAEALLEQCLKENHAKIKDSMPLLEKNEPKMSEAKNYLSSILNHGRLSPQYMCEAMLILGKLHYVEGSYRDAISMYARAGIDDMSMENKPLYQMRLLSEAFVIKGLSLERLPNSIASRFRLTEREEEVITCFERASWIAQVFLQELEKTTNNSTSRHLKGCHPLDYELTYFLEAALQSAYVKNLKKGNIVKGMRELREVLRTVETKATQNFKVPLLPQGQHRGSPPAPPHQRIHGNSRCGAEPGAGAGGGPDSELAECRSHL

SEQ ID NO: 60898 - protein, 627 aa, Homo sapiens
MPYLYRAPGPQAHPVPKDARITHSSGQSFEQMRQECLQRGTLFEDADFPASNSSLFYSERPQIPFVWKRPGFWQHSEWLDVVIDDRLPTFRDRLVFLHSADHNEFWSALLEKAYAKLNGSYEALKGGSAIEAMEDFTGGVAETFQTKEAPENFYEILEKALKRGSLLGCFIDTRSAAESEARTPFGLIKGHAYSVTGIDQVSFRGQRIELIRIRNPWGQVEWNGSWSDSSPEWRSVGPAEQKRLCHTALDDGEFWMAFKDFKAHFDKVEICNLTPDALEEDAIHKWEVTVHQGSWVRGSTAGGCRNFLDTFWTNPQIKLSLTEKDEGQEECSFLVALMQKDRRKLKRFGANVLTIGYAIYECPDKDEHLNKDFFRYHASRARSKTFINLREVSDRFKLPPGEYILIPSTFEPHQEADFCLRIFSEKKAITRDMDGNVDIDLPEPPKPTPPDQETEEEQRFRALFEQVAGEDMEVTAEELEYVLNAVLQKKKDIKFKKLSLISCKNIISLMDTSGNGKLEFDEFKVFWDKLKQWINLFLRFDADKSGTMSTYELRTALKAAGFQLSSHLLQLIVLRYADEELQLDFDDFLNCLVRLENASRVFQALSTKNKEFIHLNINEFIHLTMNI

SEQ ID NO: 60899 - protein, 287 aa, Homo sapiens
MILTKAQYDEIAQCLVSVPPTRQSLRKLKQRFPSQSQATLLSIFSQEYQKHIKRTHAKHHTSEAIESYYQRYLNGVVKNGAAPVLLDLANEVDYAPSLMARLILERFLQEHEETPPSKSIINSMLRDPSQIPDGVLANQVYQCIVNDCCYGPLVDCIKHAIGHEHEVLLRDLLLEKNLSFLDEDQLRAKGYDKTPDFILQVPVVMLCPLAVEGHIIHWIESKASFGDECSHHAYLHDQFWSYWNRFGPGLVIYWYGFIQELDCNRERGILLKACFPTNIVTLCHSIA

SEQ ID NO: 60900 - protein, 159 aa, Homo sapiens
MVQHCEALNRSVQVVNLDPAAEHFNYSVMADIRELIEVDDVMEDDSLRFGPNGGLVFCMEYFANNFDWLENCLGHVEDDYILFDCPGQIELYTHLPVMKQLVQQLEQWEFRVCGVFLVDSQFMVESFKFISGILAALSAMISLEIPQVNIMTKMDLLSK

SEQ ID NO: 60901 - protein, 77 aa, Homo sapiens
MALASVLERPLPVNQRGFFGLGGRADLLDLGPGSLSDGLSLAAPGWGVPEEPGIEMLHGTTTLAFKVWSQPPCQAEY

SEQ ID NO: 60902 - protein, 104 aa, Homo sapiens
MENWSKDITHSYLEQETTGINKSTQPDEQLTMNSEKSMHRKSTELVNEITCENTEWPGQRSTNFQIISSYPDDESVYCTTEKYNVMEHRHNDMHYECMTPCQVT

SEQ ID NO: 60903 - protein, 64 aa, Homo sapiens
MSQATKRKHVVKEVLGEHIVPSDQQQIVRVLRTPGNNLHEVETAQGQRFLGTFSLLTPLKREKR

SEQ ID NO: 60904 - protein, 258 aa, Homo sapiens
  MOD_RES (1)..(1): Any amino acid
XSRSGLYRSPSMPENLNRPRLKQVEKFKDNTIPDKVKKKYFSGQGKLRKGLCLKKTVSLCDITITQMLEEDSNQGHLIGDFSKVCALPTVSGKHQDLKYVNPETVSRFLEMVAALLSGKFQGLIEKFYVIDCRYPYEYLGGHIQGALNLYSQEELFNFFLKKPIVPLDTQKRIIIVFHCEFSSERGPRMCRCLREEDRSLNQYPALYYPELYILKGGYRDFFPEYMELCEPQSYCPMHHQDHKTELLRCRSQSKVQEG

SEQ ID NO: 60905 - protein, 348 aa, Homo sapiens
MVKLANPLYTEWILEAIKKVKKQKQRPSEERICNAVSSSHGLDRKTVLEQLELSVKDGTILKVSNKGLNSYKDPDNPGRIALPKPRNHGKLDNKQNVDWNKLIKRAVEGLAESGGSTLKSIERFLKGQKDVSALFGGSAASGFHQQLRLAIKRAIGHGRLLKDGPLYRLNTKATNVDGKESCESLSCLPPVSLLPHEKDKPVAEPIPICSFCLGTKEQNREKKPEELISCADCGNSGHPSCLKFSPELTVRVKALRWQCIECKTCSSCRDQGKNADNMLFCDSCDRGFHMECCDPPLTRMPKGMWICQICRPRKKGRKLLQKKAAQIKRRYTNPIGRPKNRLKKQNTV

SEQ ID NO: 60906 - protein, 33 aa, Homo sapiens
MSISSDEVNFLVYRYLQESGFSHSAFTFGIESH

SEQ ID NO: 60907 - protein, 155 aa, Homo sapiens
MELPAVNLKVILLGHWLLTTCFWVACWPPSSWTSCTSASSTRGSASRTRAALAWAWPSSACCSSRSPAASSTTCTGSAGVSSWSTLVSLGLLRTVVPTRRLTQQRRPQIPLQSQRAGVKMPEGTEASHAAPGPAPGLPRAWEVVLGMLLTSVSWT

SEQ ID NO: 60908 - protein, 10 aa, Homo sapiens
MKIVRKSEME

SEQ ID NO: 60909 - protein, 146 aa, Homo sapiens
MDFPSSLRPALFLTGPLGLSDVPDLSFMCSWRDALTLPEAQPQNSENGALHVTKDLLWEPATPGPLPMLPPLIDPWDPGLTARDLLFRGGCRYRKRPRVVLDVTEQISRFLLDHGDVAFAPLGKLMLENFKLEGAGSRTKKKTVVS

SEQ ID NO: 60910 - protein, 45 aa, Homo sapiens
  MOD_RES (1)..(1): Any amino acid
XNRYISDTFWKARGLAKDWVFTTLKCLTQDRSCTSLLSEFLAVNL

SEQ ID NO: 60911 - protein, 42 aa, Homo sapiens
MGNPGTFKRGLLLSALSYLGFETYQVISQAAVVHATAKVRQY

SEQ ID NO: 60912 - protein, 378 aa, Homo sapiens
  MOD_RES (1)..(1): Any amino acid
XSNWFIIGSKTDAERVVNQYQELVQNEAKCPVKMSHSSSGSASLSQVSPGKETDQTETVSVQSSVLGKGVKHRPPPIKLPSSSGNSSSGNYFTPQQTSSFLKSPTPPPSSKPSSIPRKSSVDLNQVSMLSPAALSPASSSQRTTATQVMANSAGLNFINVVGSVCGAQALMSGSNPMLGCNTGAITPAGINLSGLLPSGGLLPNALPSAMQAASQAGVPFGLKNTSSLRPLNLLQQQQQQLSQFTPQQPQQPTTCSPQQPGEQGSEQGSTSQEQALSAQQAAVINLTGVGSFMQSQAAVLSQLGSAENRPEQSLPQQRFQLSSAFQQQQQQIQQLRFLQHQMAMAAAAAQTAQLHHHRHTGSQSKSKMKRGTPTTPKF

SEQ ID NO: 60913 - protein, 227 aa, Homo sapiens
MQAEGPFLLSPGRLEEGLKPGAPSQLAMSRSGDRTSTFDPSHSDNLLHGLNLLWRKQLFCDVTLTAQGQQFHCHKAVLASCSQYFRSLFSSHPPLGGGVGGQDGLGAPKDQQQPPQQQPSQQQQPPPQEEPGTPSSSPDDKLLTSPRAINNLVLQGCSSIGLRLVLEYLYTANVTLSLDTVEEVLSVSKILHIPQVTKLCVQFLNDQISVQNYKQVCKIAALHGLEE

SEQ ID NO: 60914 - protein, 166 aa, Homo sapiens
MVEKGSDHSSDKSPSTPEQGVQRSCSSQSGRSGGKNSKKSQSWYNVLSPTYKQRNEDFRKLFKQLPDTERLIVDYSCALQRDILLQGRLYLSENWICFYSNIFRWETLLTVRLKDICSMTKEKTARLIPNAIQVCTDSEKHFFTSFGARDRTYMMMFRLWQNALLE

SEQ ID NO: 60915 - protein, 143 aa, Homo sapiens
MQAACWYVLFLLQPTVYLVTCANLTNGGKSELLKSGSSKSTLKHIWTESSKDLSISRLLSQTFRGKENDTDLDLRYDTPEPYSEQDLWDWLRNSTDLQEPRPRAKRRPIVKTGKFKKMFGWGDFHSNIKTVKLNLLITGKIVD

SEQ ID NO: 60916 - protein, 583 aa, Homo sapiens
MATARTFGPEREAEPAKEARVVGSELVDTYTVYIIQVTDGSHEWTVKHRYSDFHDLHEKLVAERKIDKNLLPPKKIIGKNSRSLVEKREKDLEVYLQKLLAAFPGVTPRVLAHFLHFHFYEINGITAALAEELFEKGEQLLGAGEVFAIGPLQLYAVTEQLQQGKPTCASGDAKTDLGHILDFTCRLKYLKVSGTEGPFGTSNIQEQLLPFDLSIFKSLHQVEISHCDAKHIRGLVASKPTLATLSVRFSATSMKEVLVPEASEFDEWEPEGTTLEGPVTAVIPTWQALTTLDLSHNSVSEIDESVKLIPKIEFLDLSHNGLLVVDNLQHLYNLVHLDLSYNKLSSLEGLHTKLGNIKTLNLAGNLLESLSGLHKLYSLVNLDLRDNRIEQMEEVRSIGSLPCLEHVSLLNNPLSIIPDYRTKVLAQFGERASEVCLDDTVTTEKELDTVEVLKAIQKAKEVKSKLSNPEKKGGEDSRLSAAPCIRPSSSPPTVAPASASLPQPILSNQGNRVCILLLVEPHSPAWAPWLGWGWGRGASTCFQQGQTQGGQCLLQAGPRGGTHGRGAWPDASCCLLGEDSQLL

SEQ ID NO: 60917 - protein, 40 aa, Homo sapiens
MKSVIYHALSQKEANDSDVQPSGAQRAEAFVRAFLKRSHR

SEQ ID NO: 60918 - protein, 391 aa, Homo sapiens
MKKSESEVEEAAAIIAQRPDNPREFFKQQERVASASAGSCDVPSPFNHRPGSHLDSHRRMAPTPIPTRSPSDSSTASTPVAEQIERALDEVTSSQPPPLPPPPPPAQETQEPSPILDSEETRAAAPQAWAGPMEEPPQAQAPPRGPGSPAEDLMFMESAEQAVLAAPVEPATADATEIHDAADTIETDTATADTTVANNVPPAATSLIDLWPGNGEGASTLQGEPRAPTPPSGTEVTLAEVPLLDEVAPEPLLPAGEGCATLLNFDELPEPPATFCDPEEVEGESLAAPQTPTLPSALEELEQEQEPEPHLLTNGETTQKEGTQVRQGLPGGRDGREWGLSRVLALHSSCLHQYPLLCDPHYLRGSPSHPPSLGRLCFCSQGRHPCFPGNH

SEQ ID NO: 60919 - protein, 122 aa, Homo sapiens
  MOD_RES (1)..(1): Any amino acid
XCKIRCLYLSISATSLALSLMLGPACRSEQYTLCLCTPRGHGAQPGTGTQVPTAQDPKTLSLPEQHLTACVRMKADLHRHLLAVLLVLIHPLFSYVASPLAVPGGVAECGVLVGWVPRPSAS

SEQ ID NO: 60920 - protein, 21 aa, Homo sapiens
  MOD_RES (1)..(1): Any amino acid
XNSNSGYALNFGKGTSLLVTP

SEQ ID NO: 60921 - protein, 150 aa, Homo sapiens
MLRWTRAWRLPREGLGPHGPSFARVPVAPSSSSGGRGGAEPRPLPLSYRLLDGEAALPAVVFLHGLFGSKTNFNSIAKILAQQTGRRVLTVDARNHGDSPHSPDMSYEIMSQDLQDLLPQLGLVPCVVVGHSMGGKTAMLLALQRSQPPP

SEQ ID NO: 60922 - protein, 40 aa, Homo sapiens
MSHCSGYSDPSSFAEDGPEVLDEEGTQEDLEYKLKGLIDL

SEQ ID NO: 60923 - protein, 68 aa, Homo sapiens
  MOD_RES (1)..(1): Any amino acid
XTTGEPATPKRRKAEPEALQSLRRSTRHSANCDRLSESSASPQPKRRQQDTSASMPKLFLHLEKNTCA

SEQ ID NO: 60924 - protein, 144 aa, Homo sapiens
MHSTTPISSLFSFTSPAVKRLLGWKQGDEEEKWAEKAVDSLVKKLKKKKGAMDELERALSCPGQPSKCVTIPRSLDGRLQVSHRKGLPHVIYCRVWRWPDLQSHHELKPLECCEFPFGSKQKEVCINPYHYRRVETPGDFAVIL

SEQ ID NO: 60925 - protein, 46 aa, Homo sapiens
  MOD_RES (1)..(1): Any amino acid
XFLRGMAFVPFLLVTWSSAAFIISYVVAVLSGHVNPFLPYISYFLR

SEQ ID NO: 60926 - protein, 72 aa, Homo sapiens
MSKPELKEDKMLEVHFVGDDDVLNHILDREGGAKLKKERAQLLVNPKKIIKKPEYDLEEDDQEVLKDQNYVE

SEQ ID NO: 60927 - protein, 382 aa, Homo sapiens
MPVPRATDKDHSTQPGTMGRKKIQISRILDQRNRQVTFTKRKFGLMKKAYELSVLCDCEIALIIFNSANRLFQYASTDMDRVLLKYTEYSEPHESRTNTDILETLKRRGIGLDGPELEPDEGPEEPGEKFRRLAGEGGDPALPRPRLYPAAPAMPSPDVVYGALPPPGCDPSGLGEALPAQSRPSPFRPAAPKAGPPGLVHPLFSPSHLTSKTPPPLYLPTEGRRSDLPGGLAGPRGGLNTSRSLYSGLQNPCSTATPGPPLGSFPFLPGGPPVGAEAWARRVPQPAAPPRRPPQSASSLSASLRPPGAPATFLRPSPIPCSSPGPWQSLCGLGPPCAGCPWPTAGPGRRSPGGTSPERSPGTARARGDPTSLQASSEKTQQ

SEQ ID NO: 60928 - protein, 213 aa, Homo sapiens
IAYKFGKTVVSCEGYESSEDQYVLRGSCGLEYNLDYTELGLQKLKESGKQHGFASFSDYYYKWSSADSCNMSGLITIVVLLGIAFVVYKLFLSDGQYSPPPYSEYPPFSHRYQRFTNSAGPPPPGFKSEFTGPQNTGHGATSGFGSAFTGQQGYENSGPGFWTGLGTGGILGYLFGSNRAYSPLHGGSGSYSVCSNSDTKTRTASGYGGTRRR

SEQ ID NO: 60929 - protein, 281 aa, Homo sapiens
MESERSKRMGNACIPLKRIAYFLCLLSALLLTEGKKPAKPKCPAVCTCTKDNALCENARSIPRTVPPDVISLSFVRSGFTEISEGSFLFTPSLQLLLFTSNSFDVISDDAFIGLPHLEYLFIENNNIKSISRHTFRGLKSLIHLSLANNNLQTLPKDIFKGLDSLTNVDLRGNSFNCDCKLKWLVEWLGHTNATVEDIYCEGPPEYKKRKINSLSSKDFDCIITEFAKSQDLPYQSLSIDTFSYLNDEYVVIAQPFTGKCIFLEWDHVEKTFRNYDNITGS

SEQ ID NO: 60930 - protein, 28 aa, Homo sapiens
MEGGLADGEPDRTSSESKLYNGSEKDSS

SEQ ID NO: 60931 - protein, 127 aa, Homo sapiens
  MOD_RES (1)..(1): Any amino acid
XTGVEIKRIMAKAFKSPLSSPQQTQLLGELEKDPKLVYHIGLTPAKLPDLVENNPLVAIEMLLKLMQSSQITEYFSVLVNMDMSLHSMEVVNRLTTAVDLPPEFIHLYISNCISTCEQIKDKYMQVI

SEQ ID NO: 60932 - protein, 74 aa, Homo sapiens
MHLPGCAPAMADGSFSLAGHLLRSPGGSTSRLHSIEAILGFTKDDGILGTFPAERGARGAKERDRRLGARPACP

SEQ ID NO: 60933 - protein, 106 aa, Homo sapiens
  MOD_RES (1)..(1): Any amino acid
XESSGDMDVLLTHPSFTSESTKQPKLLHQVVEQLQKVHFITDTLSKGETKFMELQENPCQWIVKKTSLITSSGNTGNPRTGANEACILPGRHNPIGVLIYFLTFAM

SEQ ID NO: 60934 - protein, 223 aa, Homo sapiens
MPLFLLSLPTPPSASGHERRQRPEAKTSGSEKKYLRAMQANRSQLHSPPGTGSSEDASTPQCVHTRLTGEGSCPHSGDVHIQINSIPKECAENASSRNIRSGVHSCAHGCVHSRLRGHSHSEARLTDDTAAESGDHGISLGIGLLTTFMYANKSIVNQVFLRERSSKIQCAWLLVFLAGSSVLLYYTFHSQSLYYSLIFLNPTLDHLSFWEVFWIVGITDFIL

SEQ ID NO: 60935 - protein, 589 aa, Homo sapiens
MFRCGGLAAGALKQKLVPLVRTVCVRSPRQRNRLPGNLFQRWHVPLELQMTRQMASSGASGGKIDNSVLVLIVGLSTVGAGAYAYKTMKEDEKRYNERISGLGLTPEQKQKKAALSASEGEEVPQDKAPSHVPFLLIGGGTAAFAAARSIRARDPGARVLIVSEDPELPYMRPPLSKELWFSDDPNVTKTLRFKQWNGKERSIYFQPPSFYVSAQDLPHIENGGVAVLTGKKVVQLDVRDNMVKLNDGSQITYEKCLIATGGTPRSLSAIDRAGAEVKSRTTLFRKIGDFRSLEKISREVKSITIIGGGFLGSELACALGRKARALGTEVIQLFPEKGNMGKILPEYLSNWTMEKVRREGVKVMPNAIVQSVGVSSGKLLIKLKDGRKVETDHIVAAVGLEPNVELAKTGGLEIDSDFGGFRVNAELQARSNIWVAGDAACFYDIKLGRRRVEHHDHAVVSGRLAGENMTGAAKPYWHQSMFWSDLGPDVGYEAIGLVDSSLPTVGVFAKATAQDNPKSATEQSGKKELVSDQRVRQSPRPQKLLFLPAPRQFHRLPSRGRTTAKVSSSTSGTKWSWGLCYGTSLTECQ

SEQ ID NO: 60936 - protein, 217 aa, Homo sapiens
EDRVLCLHSRWRILYAGLANGTVVTFNIKNNKRLEIFECHGPRAVSCLATAQEGARKLLVVGSYDCTISVRDARNGLLLRTLEGHSKTILCMKVVNDLVFSGSSDQSVHAHNIHTGELVRIYKGHNHAVTVVNILGKVMVTACLDKFVRVYELQSHDRLQVYGGHKDMIMCMTIHKSMIYTGCYDGSIQAVRLNLMQNYRCWERLQWFLLDPKNVKN

SEQ ID NO: 60937 - protein, 123 aa, Homo sapiens
MAALSKSIPHNCYEIGHTWHPSCRVSFLQITGGALEESLKIYAPLYLIAAILRKRKLDYYLHKLLPEILQSASFLTANGALYMAFFCILRRGLLTIYMANLATETLFRMGVARGTITTLRNGE

SEQ ID NO: 60938 - protein, 672 aa, Homo sapiens
KADHVDLATLMIDFNGEEKAWAMAVWIFAAINRRDLYEKAKRDEPKWGSDNARVSNPTVICQEDSIEEEWMGLLEYLSRISICKMKKDYRKKYRKYVRSRFQCIEDRNARLGESVSLNKRYTRLRLIKEHRSQQEREQELLAIGKTKTCESPVSPIKMELLFDPDDEHSEPVHTVVFQGAAGIGKTILARKMMLDWASGTLYQDRFDYLFYIHCREVSLVTQRSLGDLIMSCCPDPNPPIHKIVRKPSRILFLMDGFDELQGAFDEHIGPLCTDWQKAERGDILLSSLIRKKLLPEASLLITTRPVALEKLQHLLDHPRHVEILGFSEAKRKEYFFKYFSDEAQARAAFSLIQENEVLFTMCFIPLVCWIVCTGLKQQMESGKSLAQTSKTTTAVYVFFLSSLLQPRGGSQEHGLCAHLWGLCSLAADGIWNQKILFEESDLRNHGLQKADVSAFLRMNLFQKEVDCEKFYSFIHMTFQEFFAAMYYLLEEEKEGRTNVPGSRLKLPSRDVTVLLENYGKFEKGYLIFVVRFLFGLVNQERTSYLEKKLSCKISQQIRLELLKWIEVKAKAKKLQIQPSQLELFYCLYEMQEEDFVQRAMDYFPKIEINLSTRMDHMVSSFCIENCHRVESLSLGFLHNMPKEEEEEEKEGRHLDMVQCVLPSSSHAACSHG

SEQ ID NO: 60939 - protein, 43 aa, Homo sapiens
MAHYSLNLPSSGDPLASASRVAGTTATRRGGRRPYSIEKGWSA

SEQ ID NO: 60940 - protein, 626 aa, Homo sapiens
MVKLAKAGKNQGDPKKMAPPPKEVEEDSEDEEMSEDEEDDSSGEEVVIPQKKGKKAAATSAKKVVVSPTKKVAVATPAKKAAVTPGKKAAATPAKKTVTPAKAVTTPGKKGATPGKALVATPGKKGAAIPAKGAKNGKNAKKEDSDEEEDDDSEEDEEDDEDEDEDEDEIEPAAMKAAAAAPASEDEDDEDDEDDEDDDDDEEDDSEEEAMETTPAKGKKAAKVVPVKAKNVAEDEDEEEDDEDEDDDDDEDDEDDDDEDDEEEEEEEEEEPVKEAPGKRKKEMAKQKAAPEAKKQKVEGTEPTTAFNLFVGNLNFNKSAPELKTGISDVFAKNDLAVVDVRIGMTRKFGYVDFESAEDLEKALELTGLKVFGNEIKLEKPKGKDSKKERDARTLLAKNLPYKVTQDELKEVFEDAAEIRLVSKDGKSKGIAYIEFKTEADAEKTFEEKQGTEIDGRSISLYYTGEKGQNQDYRGGKNSTWSGESKTLVLSNLSYSATEETLQEVFEKATFIKVPQNQNGKSKGYAFIEFASFEDAKEALNSCNKREIEGRAIRLELQGPRGSPNARSQPSKTLFVKGLSEDTTEETLKESFDGSVRARIVTDRETGSSKGGSLWIRTRRRENSQN

SEQ ID NO: 60941 - protein, 89 aa, Homo sapiens
LSPLHSHPIFISCSHKELHRQRSPGVSFGLSVFNLMNAIMGSGILGLAYVLANTGVFGFSFLLLTVALLASYSVHLLLSMCIQTAYLGP

SEQ ID NO: 60942 - protein, 362 aa, Homo sapiens
MATITCTRFTEEYQLFEELGKGAFSVVRRCVKVLAGQEYAAKIINTKKLSARDHQKLEREARICRLLKHPNIVRLHDSISEEGHHYLIFDLVTGGELFEDIVAREYYSEADASHCIQQILEAVLHCHQMGVVHRDLKPENLLLASKLKGAAVKLADFGLAIEVEGEQQAWFGFAGTPGYLSPEVLRKDPYGKPVDLWACGVILYILLVGYPPFWDEDQHRLYQQIKAGAYDFPSPEWDTVTPEAKDLINKMLTINPSKRITAAEALKHPWISHRSTVASCMHRQETVDCLKKFNARRKLKGAILTTMLATRNFSGGKSGGNKKSDGVKKRKSSSSVQLMESSESTNTTIEDEDTKGRCATLA

SEQ ID NO: 60943 - protein, 127 aa, Homo sapiens
VIEILIENHEKIFNTVPDMPLTNAQLHLSRKKSSDSKPPSCSERPLTLFHTVQSTEKQEQRNSIINSSLESVSSNPNSILNSSSSLQPNMNSSDPDLAVVKPTRPNSLHWGFGMCLEGCTEVQSPAS

SEQ ID NO: 60944 - protein, 89 aa, Homo sapiens
MKTGLFFLCLLGTAAAIPTNARLLSDHSKPTAETVAPDNTAIPSLRAEAEENEKETAVSTEDDSHHKAEKSSVLKSKEESHEQSAEQGK

SEQ ID NO: 60945 - protein, 96 aa, Homo sapiens
MAGPFSRLLSARPGLRLLALAGAGSLAAGFLLRPEPVRAASERRRLYPPSQTWPTGQLPGNCTRSRRLCPPSMVTGYPLPSAEYPDLRKHNNCMAS

SEQ ID NO: 60946 - protein, 52 aa, Homo sapiens
MAARRALHFVFKVGNRFQTARFYRDVLGMKVESCSVARLECSGAISAHCSAA

SEQ ID NO: 60947 - protein, 312 aa, Homo sapiens
MCGRTSCHLPRDVLTRACAYQDRRGQQRLPEWRDPDKYCPSYNKSPQSNSPVLLSRLHFEKDADSSERIIAPMRWGLVPSWFKESDPSKLQFNTTNCRSDTVMEKRSFKSGSIGAADSPENWEKVWDNWRLLTMAGIFDCWEPPEGGDVLYSYTIITVDSCKGLSDIHHRMPAILDGEEAVSKWLDFGEVSTQEALKLIHPTENITFHAVSSVVNNSRNNTPECLAPVDLVVKKELRASGSSQRMLQWLATKSPKKEDSKTPQKEESDVPQWSSQFLQKSPLPTKRGTAGLLEQWLKREKEEEPVAKRPYSQ

SEQ ID NO: 60948 - protein, 71 aa, Homo sapiens
MVDSGTEARARGKAEAGLQDGISGPATARVNGKTQAEAVAEAELKTESVTQAKAGDGAMTRTHTVTYREAM

SEQ ID NO: 60949 - protein, 923 aa, Homo sapiens
MPPKTPRKTAATAAAAAAEPPAPPPPPPPEEDPEQDSGPEDLPLVRLEFEETEEPDFTALCQKLKIPDHVRERAWLTWEKVSSVDGVLGGYIQKKKELWGICIFIAAVDLDEMSFTFTELQKNIEISVHKFFNLLKEIDTSTKVDNAMSRLLKKYDVLFALFSKLERTCELIYLTQPSSSISTEINSALVLKVSWITFLLAKGEVLQMEDDLVISFQLMLCVLDYFIKLSPPMLLKEPYKTAVIPINGSPRTPRRGQNRSARIAKQLENDTRIIEVLCKEHECNIDEVKNVYFKNFIPFMNSLGLVTSNGLPEVENLSKRYEEIYLKNKDLDARLFLDHDKTLQTDSIDSFETQRTPRKSNLDEEVNVIPPHTPVRTVMNTIQQLMMILNSASDQPSENLISYFNNCTVNPKESILKRVKDIGYIFKEKFAKAVGQGCVEIGSQRYKLGVRLYYRVMESMLKSEEERLSIQNFSKLLNDNIFHMSLLACALEVVMATYSRSTSQNLDSGTDLSFPWILNVLNLKAFDFYKVIESFIKAEGNLTREMIKHLERCEHRIMESLAWLSDSPLFDLIKQSKDREGPTDHLESACPLNLPLQNNHTAADMYLSPVRSPKKKGSTTRVNSTANAETQATSAFQTQKPLKSTSLSLFYKKVYRLAYLRLNTLCERLLSEHPELEHIIWTLFQHTLQNEYELMRDRHLDQIMMCSMYGICKVKNIDLKFKIIVTAYKDLPHAVQETFKRVLIKEEEYDSIIVFYNSVFMQRLKTNILQYASTRPPTLSPIPHIPRSPYKFPSSPLRIPGGNIYISPLKSPYKISEGLPTPTKMTPRSRILVSIGESFGTSEKFQKINQMVCNSDRVLKRSAEGSNPPKPLKKLRFDIEGSDEADGSKHLPGESKFQQKLAEMILHPFSSFYSNTNAKAENE

SEQ ID NO: 60950 - protein, 684 aa, Homo sapiens
MDGPGASAVVVRVGIPDLQQTKCLRLDPAAPVWAAKQRVLCALNHSLQDALNYGLFQPPSRGRAGKFLDEERLLQEYPPNLDTPLPYLEFRYKRRVYAQNLIDDKQFAKLHTKANLKKFMDYVQLHSTDKVARLLDKGLDPNFHDPDSGECPLSLAAQLDNATDLLKVLKNGGAHLDFRTRDGLTAVHCATRQRNAAALTTLLDLGASPDYKDSRGLTPLYHSALGGGDALCCELLLHDHAQLGITDENGWQEIHQACRFGHVQHLEHLLFYGADMGAQNASGNTALHICALYNQESCARVLLFRGANRDVRNYNSQTAFQVAIIAGNFELAEVIKTHKDSDVVPFRETPSYAKRRRLAGPSGLASPRPLQRSASDINLKGEAQPAASPGPSLRSLPHQLLLQRLQEEKDRDRDADQESNISGPLAGRAGQSKISPAPPAPPAPPPRGPKRKLYSAVPGRKFIAVKAHSPQGEGEIPLHRGEAVKVLSIGEGGFWEGTVKGRTGWFPADCVEEVQMRQHDTRPETREDRTKRLFRHYTVGSYDSLTSHSDYVIDDKVAVLQKRDHEGFGFVLRGAKAETPIEEFTPTPAFPALQYLESVDVEGVAWRAGLRTGDFLIEVNGVNVVKVGHKQVVALIRQGGNRLVMKVVSVTRKPEEDGARRRAPGVAEPSFPTPPAAAWRPGLP

SEQ ID NO: 60951 - protein, 3048 aa, Homo sapiens
MNLHQVLTGAVNPGDHCFSVGSIGDQRFTAYASGCDIVILGSDFERLQIIPGAKHGNIQVGCVDCSMQQGKIAASYGNVISIFEPVNLPKQKKNLELYSQWQKSGQFFLESIAHNITWDPTGSRLLTGSSYLQLWSNTNLEKPTEDENLNKTDLNFGDWKCIWHCKTASQVHLMKFSPDGEFFATAGKDDCLLKVWYNVENWRTAVTSPDGSSEKQSQGEIDFSFVYLAHPRAVNGFSWRKTSKYMPRASVCNVLLTCCKDNVCRLWVETFLPNDCLLYGGDCSHWTESINLTNNFKRNASSKERVQNALEVNLRHFRRGRRRSLALVAHTGYLPHQQDPHHVHRNTPLHANALCHFHIAASINPATDIPLLPSITSLSLNENEEKTGPFVVHWLNNKELHFTLSMEVFLQQLRKSFEQPSSEASVEDSNQADVKSDEETDDGVDDLKINPEKKELGCDKMVPNSSFTSLSSAAIDHQIEVLLSEWSKNADMLFSIHPMDGSLLVWHVDWLDEYQPGMFRQVQVSFVSRIPVAFPTGDANSLCKSIMMYACTKNVDLAIQQGKQKPSGLTRSTSMLISSGHNKSSNSLKLSIFTPNVMMISKHADGSLNQWLVSFAEESAFSTVLSISHKSRYCGHRFHLNDLACHSVLPLLLTTSHHNALRTPDVDNPEQPFDALNIEECSLTQQNKSTVDVAFQDPSAVYSELILWRVDPVGPLSFSGGVSELARINSLHVSAFSNVAWLPTLIPSYCLGAYCNSPSACFVASDGQYLRLYEAVIDAKKLLSELSNPEISKYVGEVFNIVSQQSTARPGCIIALDPITKLHGRKTQLLHVFEEDFILNNLEKKSLGKDSILSNAGSSPNGFSEKFYLIVIECTQDNRSLLHMWNLHLKSIPVSLDEKVDTKLSEAVWQPEEHYSSSPEKILSPFSQKYQACRANLQSTSRLTLFSEMVYSQELHLPEGVEIISIKPSAGHLSSSSIYPACSAPYLLATSCSDEKVRFWRCRVTDGESATSKNGKIDLAYIWEEWPLLIEDGLQSNSSITVPGRPVEVSCAHTNRLAVAYKQPASNSRSSQDFVMHVSIFECESTGGSCWVLEQTIHLDELSTVLDSGISVDSNLVAYNKQDMYLSSKENITSNTKHLVHLDWMSREDGSHILTVGIGSKLFMYGPLAGKVQDQTGKETLAFPLWESTKVVPLSKFVLLRSVDLVSSVDGSPPFPVSLSWVRDGILVVGMDCEMHVYCQWQPSSKQEPVITDSYSGSTPSITSLIKQSNSSSGLHPPKKTLTRSMTSLAQKICGKKTAFDPSVDMEDSGLFEAAHVLSPTLPQYHPLQLLELMDLGKVRRAKAILSHLVKCIAGEVVALNEAESNHERRLRSLTISASGSTTRDPQAFNKAENTDYTEIDSVPPLPLYALLAADDDSCYSSLEKSSNESTLSKSNQLSKESYDELFQTQLLMTDTHMLETDEENTKPRVIDLSQYSPTYFGPEHAQVLSGHLLHSSLPGLSRMEQMSLMALADTIATTSTDIGESRDRSQGGETLDECGLKFLLAVRLHTFLTTSLPAYRAQLLHQGLSTSHFAWAFHSVAEEELLNMLPAMQKDDPTWSELRAMGVGWWVRNTRILRKCIEKVAKAAFYRKNDPLDAAIFYLAMKKKAVIWGLYRAEKNTRMTQFFGHNFEDERWRKAALKNAFSLLGKQRFEHSAAFFLLAGCLRDAIEVCLEKLNDIQLALVIARLYESEFDTSAAYKSILRKKVLGIDSPVSELCSLNINMHHDPFLRSMAYWILEDYSGALETLIKQPIRENDDQVLSASNPTVFNFYNYLRTHPLLLRRHFGSSDTFSTHMSLTGKSGLAGTINLSERRLFFTTASAHLKAGCPMLALEVLSKMPKVIKKTRPFYRASSFLDTSKDCSPSSPLKLDAREDKSSAVDWSQSLINGFGSSSEGSSEKQSNSTLSFDWSQPSVVFQDDSLELKWDSDNDEENEDVPISMKELKPLQRKTDKKLDDISSNYTESFSTLDENDLLNPSEDIIAVQLKFRACLKILTVELRTLSTGYEIDGGKLRYQLYHWLEKEVIALQRTCDFCSDAEELQSAFGRNEDEFGLNEDAEDLPHQTKVKQLRENFQEKRQWLLKYQSLLRMFLSYCILHGSHGGGLASVRMELILLLQESQQETSEPLFSSPLSEQTSVPLLFACTANAKTVVANPLLHLSNLTHDILHAIINFDSPPHPDIQSNKVYVMHTLAASLSACIYQCLCGSHNYSSFQTNQFTGMVYQTVLLPHRPSLKTGSLDEALTPNTSPAQWPGITCLIRLLNSSGEEAQSGLTVLLCEILTAVYLSLFIHGLATHSSNELFRIVAHPLNEKMWSAVFGGGAHVPSKEQTHSKTLPVSSLVEEGEKQNKRFRPSKMSCRESAPLTPSSAPVSQESLAVKEKFIPPELSIWDYFIAKPFLPSSQSRAEYDSEESLGSDDDDNDDDDDVLASDFHLQEHSNSNSYSWSLMRLAMVQLVLNNLKTFYPFAGHDLAELPVSSPLCHAVLKTLQCWEQVLLRRLEIHGGPPQNYIASHTAEESLSAGPAILRHKALLEPTNTPFKSKHHLALSVKRLWQYLVKQEEIQETFIKNIFTKKRCLNESLEDNSETIKNSMMEEPNINKIEADLGYPGGKARIIHKESDIITAFAVNKANRNCIAIASSHDVQELDVSGILATQVYTWVDDDIEVETKGSEDFLVIHARDDLTAVQGTTPYTHSNPGTPINMPWLGSTQTGRGASVMIKKAINNVRRMTSHPTLPYYLTGAQDGSVRMFEWGHSQQITCFRSGGNSRVTRMRFNYQGNKFGIVDADGYLSLYQTNWKCCPVTGSMPKPYLTWQCHNKTANDFVFVSSSSLIATAGLSTDNRNVCLWDTLVAPANSLVHAFTCHDSGATVLAYAPKHQLLISGGRKGFTYVFDLCQRQQRQLFQSHDSPVKAVAVDPTEEYFVTGSAEGNIKIWSLSTFGLLHTFVSEHARQSIFRNIGTGVMQIETGPANHIFSCGADGTMKMRILPDQFSPLNEVLKNDVKFML

SEQ ID NO: 60952 - protein, 74 aa, Homo sapiens
MADLANEEKPAIAPPVFVFQKDKGQKRSAGGSSPEGGEDSDREDGNYCPPVKRERTSSLTQFPPSQSEENFWKE

SEQ ID NO: 60953 - protein, 208 aa, Homo sapiens
  MOD_RES (1)..(1): Any amino acid
XVISIKNYHPKIRIITQMLQYHNKAHLLNIPSWNWKEGDDAICLAELKLGFIAQSCLAQGLSTMLANLFSMRSFIKIEEDTWQKYYLEGVSNEMYTEYLSSAFVGLSFPTVCELCFVKLKLLMIAIEYKSANRESRILINPGNHLKIQEGTLGFFIASDAKEVKRAFFYCKACHDDITDPKRIKKCGCKRRQWPVLRILILTASTTRQ

SEQ ID NO: 60954 - protein, 235 aa, Homo sapiens
MADDAGAAGGPGGPGGPGMGNRGGFRGGFGSGIRGRGRGRGRGRGRGRGARGGKAEDKEWMPVTKLGRLVKDMKIKSLEEIYLFSLPIKESEIIDFFLGASLKDEVLKIMPVQKQTRAGQRTRFKVTGRCGSVLVRLIPAPRGTGIVSAPVPKKLLMMAGIDDCYTSARGCTATLGNFAKATFDAISKTYSYLTPDLWKETVFTKSPYQEFTDHLVKTHTRVSVQRTQAPAVATT

SEQ ID NO: 60955 - protein, 103 aa, Homo sapiens
MQLSFTQLTIDYYPYHKAEKDYPLKGTCRTPSVLSQQSKAKLMSSSVVVRLADFNIYQVSTAEQCRSSPKSMICCNKKSLYLPQEMSAVYIEFTEYYYPDGKD

SEQ ID NO: 60956 - protein, 110 aa, Homo sapiens
MSSNDSSLMAGIIYYSQEKYFHHVQQAAAVGLEKFSNDPVLKFFKAYGVLKEGNVLHDAAELLRGPGGGEPDHCDFRELPASPRPEDAAVLSSAGLGADSRNGTQNPRKR

SEQ ID NO: 60957 - protein, 238 aa, Homo sapiens
MLLWVQQALLALLLPTLLAQGEARRSRNTTRPALLRLSDYLLTNYRKGVRPVRDWRKPTTVSIDVIVYAILNVDEKNQVLTTYIWYRQYWTDEFLQWNPEDFDNITKLSIPTDSIWVPDILINEFVDVGKSPNIPYVYIRHQGEVQNYKPLQVVTACSLDIYNFPFDVQNCSLTFTSWLHTSGHPPAAPLLCGQPATAQHLPHGHGHRGLLPAPQQWREGLFQDYTPPGLLGLPDHRF

SEQ ID NO: 60958 - protein, 96 aa, Homo sapiens
MTRHGKNCTAGAVYTYHEKKKDTAASGYGTQNIRLSRDAVKDFDCCCLSLQPCHDPVVTPDGYLYEREAILEYILHQKKEIARQMKAYEKQRGTRR

SEQ ID NO: 60959 - protein, 58 aa, Homo sapiens
MILLRASEVRQLLHNKFVVILGDSVHRAVYKDLVLLLQKDRLLTPGQLRARGELNFEQ

SEQ ID NO: 60960 - protein, 37 aa, Homo sapiens
MEFSIKQSPLSVQSVVKCIKMKQAPEILGSANGKTPS

SEQ ID NO: 60961 - protein, 1167 aa, Homo sapiens [sequence omitted]

SEQ ID NO: 60962 - protein, 436 aa, Homo sapiens
MLPCASCLPGSLLLWALLLLLLGSASPQDSEEPDSYTECTDGYEWDPDSQHCRDVNECLTIPEACKGEMKCINHYGGYLCLPRSAAVINDLHGEGPPPPVPPAQHPNPCPPGYEPDDQDSCVDVDECAQALHDCRPSQDCHNLPGSYQCTCPDGYRKIGPECVDIDECRYRYCQHRCVNLPGSFRCQCEPGFQLGPNNRSCVDVNECDMGAPCEQRCFNSYGTFLCRCHQGYELHRDGFSCSDIDECSYSSYLCQYRCINEPGRFSCHCPQGYQLLATRLCQDIDECESGAHQCSEAQTCVNFHGGYRCVDTNRCVEPYIQVSENRCLCPASNPLCREQPSSIVHRYMTITSERSVPADVFQIQATSVYPGAYNAFQIRAGNSQGDFYIRAQGPPLTGAGSSAPRASVTPRGEEVTRRADSRPRPRDLDLAGLQGS

SEQ ID NO: 60963 - protein, 342 aa, Homo sapiens
MAALDSLSLFTSLGLSEQKARETLKNSALSAQLREAATQAQQTLGSTIDKATGILLYGLASRLRDTRRLSFLVSYIASKKIHTEPQLSAALEYVRSHPLDPIDTVDFERECGVGVIVTPEQIEEAVEAAINRHRPQLLVERYHFNMGLLMGEARAVLKWADGKMIKNEVDMQVLHLLGPKLEADLEKKFKVAKARLEETDRRTAKDVVENGETADQTLSLMEQLRGEALKFHKPGENYKTPGYVVTPHTMNLLKQHLEITGGQANNGICFLRFDDTNPEKEEAKFFTAICDMVAWLGYTPYKVTYASDYFDQLYAWAVELIRRGLAYVCHQRGEELKGHNTL

SEQ ID NO: 60964 - protein, 258 aa, Homo sapiens
MLDFAIFAVTFLLALVGAVLYLYPASRQAAGIPGITPTEEKDGNLPDIVNSGSLHEFLVNLHERYGPVVSFWFGRRLVVSLGTVDVLKQHINPNKTSDPFETMLKSLLRYQSGGGSVSENHMRKKLYENGVTDSLKSNFALLLKLSEELLDKWLSYPETQHVPLSQHMLGFAMKSVTQMVMGSTFEDDQEVIRFQKNHGTILEDSMIFSLASCIITAKLCTWAICFLTTSEEVQKKLYEEINQVFGNGPVTPEKIEQL

SEQ ID NO: 60965 - protein, 65 aa, Homo sapiens
MFYTHVLMSKRGPLAKIWLAAHWEKKLTKAHVFECNLEITIEKILSPKVKIALRTSGHLLLGVVR

SEQ ID NO: 60966 - protein, 16 aa, Homo sapiens
MSTVEEDSDTVTVETV

SEQ ID NO: 60967 - protein, 35 aa, Homo sapiens
MLAGGVRSMPSPLLACWQPILLLVLGSVLSGSATG

SEQ ID NO: 60968 - protein, 58 aa, Homo sapiens
DESKKQKKRGRPPAEKLSPNPPNLTKKMKKIVDAVIKYKDRDGVSPCWPGWSRTPDLK

SEQ ID NO: 60969 - protein, 1113 aa, Homo sapiens
  MOD_RES (1)..(1): Any amino acid
XGLDIENQRLQKTLENSNKKIQQLESELQDLEMENQTLQKNLEELKISSKRLEQLEKENKSLEQETSQLEKDKKQLEKENKRLRQQAEIKDTTLEENNVKIGNLEKENKTLSKEIGIYKESCVRLKELEKENKELVKRATIDIKTLVTLREDLVSEKLKTQQMNNDLEKLTHELEKIGLNKERLLHDEQSTDDSRYKLLESKLESTLKKSLEIKEEKIAALEARLEESTNYNQQLRQELKTVKKNYEALKQRQDEERMVQSSPPISGEDNKWERESQETTRELLKVKDRLIEVERNNATLQAEKQALKTQLKQLETQNNNLQAQILALQRQTVSLQEQNTTLQTQNAKLQVENSTLNSQSTSLMNQNAQLLIQQSSLENENESVIKEREDLKSLYDSLIKDHEKLELLHERQASEYESLISKHGTLKSAHKNLEVEHRDLEDRYNQLLKQKGQLEDLEKMLKVEQEKMLLENKNHETVAAEYKKLCGENDRLNHTYSQLLKETEVLQTDHKNLKSLLNNSKLEQTRLEAEFSKLKEQYQQLDITSTKLNNQCELLSQLKGNLEEENRHLLDQIQTLMLQNRTLLEQNMESKDLFHVEQRQYIDKLNELRRQKEKLEEKIMDQYKFYDPSPPRRRGNWITLKMRKLIKSKKDINRERQKSLTLTPTRSDSSEGFLQLPHQDSQDSSSVGSNSLEDGQTLGTKKSSMVALKRLPFLRNRPKDKDKMKACYRRSMSMNDLVQSMVLAGQWTGSTENLEVPDDISTGKRRKELGAMAFSTTAINFSTVNSSAGFRSKQLVNNKDTTSFEDISPQGVSDDSSTGSRVHASRPASLDSGRTSTSNSNNNASLHEVKAGAVNNQSRPQSHSSGEFSLLHDHEAWSSSGSSPIQYLKRQTRSSPVLQHKISETLESRHHKIKTGSPGSEVVTLQQFLEESNKLTSVQIKSSSQENLLDEVMKSLSVSSDFLGKDKPVSCGLARSVSGKTPGDFYDRRTTKPEFLRPGPRKTEDTYFISSAGKPTPGTQGKIKLVKESSLSRQSKDSNPYATLPRASSVISTAEGTTRRTSIHDFLTKDSRLPISVDSPPAAADSNTTAASNVDKVQESRNSKSRSREQQSS

SEQ ID NO: 60970 - protein, 354 aa, Homo sapiens
MHSCSGSLQNRNYPSQEELIKVVDVEEQQLEESGPHDLTETSYLPRQDLEGTPYLESGISLFSDDPESDPSEDRAPESARVGNIPSSTSALKVPQLKVAESAQSPAAAHTTDTAGYNAMEESVSREKPELTASTERVNKRMSMVVSGLTPEEFMLVYKFARKHHITLTNLITEETTHVVMKTDAEFVCERTLKYFLGIAGGKWVVSYFWVTQSIKERKMLNEHDFEVRGDVVNGRNHQGPKRARESQDRKIFRGLEICCYGPFTNMPTDQLEWMVQLCGASVVKELSSFTLGTGVHPIVVVQPDAWTEDNGFHAIGQMCEAPVVTREWVLDSVALYQCQELDTYLIPQIPHSHY

SEQ ID NO: 60971 - protein, 187 aa, Homo sapiens
MALGTQGRLLLDRDSKDTQTRISQKGRRLQPPGTPSAPPQRRPRKQLNPCRGTERVDPGFEGVTLKFQIKPDSSLQIIPTYSLPCSSRSQESPADAVGGPAAHPGGTEAHSAGSEALEPRRCASCRTQRTPLWRDAEDGTPLCNACGIRYKKYGTRCSSCWLVPRKNVQPKRLCGRCGVSLDPIQEG

SEQ ID NO: 60972 - protein, 70 aa, Homo sapiens
  MOD_RES (1)..(1): Any amino acid
XIIPTLPSDKLSKIQTLKLAARYIDFLYQVLQSDELDSKMASCSYVAHERLSYAFSVWRMEGAWSMSASH

SEQ ID NO: 60973 - protein, 31 aa, Homo sapiens
MSLPSRQTAIIVNPPPPEYINTKKNGRLTNQ

SEQ ID NO: 60974 - protein, 52 aa, Homo sapiens
MYNPIKTLKTNTIGTLNMLGLAKRVGARLLLASTSEVYGDPEVHPQSEDYWG

SEQ ID NO: 60975 - protein, 183 aa, Homo sapiens
MEEQDEKPPEPPKVCAQDSFLPQEIIIKVEGEDTGSLTIPSQEGVNFKIVTVDFTREEQGTCNPAQRTLDRDVILENHRDLVSWDLATAVGKKDSTSKQRIFDEEPANGVKIERFTRDDPWLSSCEEVDDCKDQLEKQQEKQEILLQEVAFTQRKAVIHERVCKSDETGEKSGLNSSLFSSPV

SEQ ID NO: 60976 - protein, 549 aa, Homo sapiens
MSDTLTADVIGRRVEVNGEHATVRFAGVVPPVAGPWLGVEWDNPERGKHDGSHEGTVYFKCRHPTGGSFIRPNKVNFGTDFLTAIKNRYVLEDGPEEDRKEQIVTIGNKPVETIGFDSIMKQQSQLSKLQEVSLRNCAVSCAGEKGGVAEACPNIRKVDLSKNLLSSWDEVIHIADQLRHLEVLNVSENKLKFPSGSVLTGTLSVLKVLVLNQTGITWAEVLRCVAGCPGLEELYLESNNIFISERPTDVLQTVKLLDLSSNQLIDENQLYLIAHLPRLEQLILSDTGISSLHFPDAGIGCKTSMFPSLKYLVVNDNQISQWSFFNELEKLPSLRALSCLRNPLTKEDKEAETARLLIIASIGQLKTLNKCEILPEERRRAELDYRKAFGNEWKQAGGHKDPEKNRLSEEFLTAHPRYQFLCLSTCVYTGGLQVVDFQLEQSFFLEYGAPEDWELKTQQPLMLKNQLLTLKIKYPHQLDQKVLEKQLPGSMTIQKVKGLLSRLLKVPVSDLLLSYESPKKPGREIELENDLKSLQFYSVENGDCLLVRW

SEQ ID NO: 60977 - protein, 127 aa, Homo sapiens
MDYPTLLLALLHVYRALCEEVLWHTSVPFAENMSLECVYPSMGILTQVEWFKIGTQQDSIAIFSPTHGMVIRKPYAERVYFLNSTMASNNMTLFFRNASEDDVGYYSCSLYTYPQGTWQKVIQVVQS

SEQ ID NO: 60978 - protein, 185 aa, Homo sapiens
  MOD_RES (1)..(1): Any amino acid
XGARRGLRQRAGGVPQPANLGAGAEPAGAALVRLARAAGAPRAGPAPQLRRGMAVARISGTSNTRPTGPSGTAGMVSSVPAPTSTPMRPSATATWRHSCAASKPQLQFSEVLAKWRCFFHQMAVEQGQAGLAAMDTKLEVAVLQESVAKLGIASRAEIEDWFTAETLGVSGTMDLLDWSSLIDSR

SEQ ID NO: 60979 - protein, 92 aa, Homo sapiens
MSNSHPLRPFTAVGEIDHVHILSEHIGALLIGEEYGDVTFVVEKKRFPAHRVILAARCQYFRALLYGGMRESQPEAEIPLQDTTAEAFTMLL

SEQ ID NO: 60980 - protein, 102 aa, Homo sapiens
MKTFVDQYGQRDDGKIGIVELAHVLPTEENFLLLFRCQQLKSCEEFMKTWRKYDTDHSGFIETEELKNFLKDLLEKANKTVDDTKLAEYTDLMLKLFDSNND

SEQ ID NO: 60981 - protein, 116 aa, Homo sapiens
MVSFMNNQKQQKPTLSGQRFKTRKRDEKERFDPTQFQDCIIQGLTETGTDLEAVAKFLDASGAKLDYRRYAETLFDILVAGGMLAPGGTLADDMMRTDVCVFAAQEDLETMQAFAQ

SEQ ID NO: 60982 - protein, 136 aa, Homo sapiens
MVSWKGIYFILTLFWGSFFGSIFMLSPFLPLMFVNPSWYRWINNRLVATWLTLPVALLETMFGVKVIITGDAFVPGERSVIIMNHRTRMDWMFLWNCLMRYSYLRLEKICLKASLKGVPGFGWAMQAAAYIFIHRK

SEQ ID NO: 60983 - protein, 395 aa, Homo sapiens
MLLFFTLGLLIHFVFFASIFDIYFTSPLVHGMTPQFTPLPPPARRLVLFVADGLRADALYELDENGNSRAPFIRNIIMHEGSWGISHTRVPTESRPGHVALIAGFYEDVSAVAKGWKENPVEFDSLFNESKYTWSWGSPDILPMFAKGASGDHVYTYSYDAKREDFGAQDATKLDTWVFDNVKDFFHHARNNQSLFSKINEEKIVFFLHLLGIDTNGHAHRPSSRDYKHNIKKVDDGVKEIVSMFNHFYGNDGKTTFIFTSDHGMTDWGSHGAGHPSETLTPLVTWGAGIKYPQRVSAQQFDDAFLKEWRLENWKRLDVNQADIAPLMTSLIGVPFPLNSVGILPVDYLNNTDLFKAESMFTNAVQILEQFKVKMTQKKEVTLPFLFTPFNCAGS

SEQ ID NO: 60984 - protein, 160 aa, Homo sapiens
MCATPPSLNFKKLAYTVQTSESMTPTATSETYLKALAVCHGPLDHYDFLIKAHELKDDEHQRRVIQCLQKLHEDLKGYNIEAEGLFSKLFSRSKPPRGLYVYGDVGTGKTMVMDMFYAYVEMKRKKRVHFHGFMLDVHKRIHRLKQSLPKRKPGFMAKSY

SEQ ID NO: 60985 - protein, 1147 aa, Homo sapiens
MASGLGSPSPCSAGSEEEDMDALLNNSLPPPHPENEEDPEEDLSETETPKLKKKKKPKKPRDPKIPKSKRQKKELGDSSGEGPEFVEEEEEVALRSDSEGSDYTPGKKKKKKLGPKKEKKSKSKRKEEEEEEDDDDDSKEPKSSAQLLEDWGMEDIDHVFSEEDYRTLTNYKAFSQFVRPLIAAKNPKIAVSKMMMVLGAKWREFSTNNPFKGSSGASVAAAAAAAVAVVESMVTATEVAPPPPPVEVPIRKAKTKEGKGPNARRKPKGSPRVPDAKKPKPKKVAPLKIKLGGFGSKRKRSSSEDDDLDVESDFDDASINSYSVSDGSTSRSSRSRKKLRTTKKKKKGEEEVTAVDGYETDHQDYCEVCQQGGEIILCDTCPRAYHMVCLDPDMEKAPEGKWSCPHCEKEGIQWEAKEDNSEGEEILEEVGGDLEEEDDHHMEFCRVCKDGGELLCCDTCPSSYHIHCLNPPLPEIPNGEWLCPRCTCPALKGKVQKILIWKWGQPPSPTPVPRPPDADPNTPSPKPLEGRPERQFFVKWQGMSYWHCSWVSELQLELHCQVMFRNYQRKNDMDEPPSGDFGGDEEKSRKRKNKDPKFAEMEERFYRYGIKPEWMMIHRILNHSVDKKGHVHYLIKWRDLPYDQASWESEDVEIQDYDLFKQSYWNHRELMRGEEGRPGKKLKKVKLRKLERPPETPTVDPTVKYERQPEYLDATGGTLHPYQMEGLNWLRFSWAQGTDTILADEMGLGKTVQTAVFLYSLYKEGHSKGPFLVSAPLSTIINWEREFEMWAPDMYVVTYVGDKDSRAIIRENEFSFEDNAIRGGKKASRMKKEASVKFHVLLTSYELITIDMAILGSIDWACLIVDEAHRLKNNQSKFFRVLNGYSLQHKLLLTGTPLQNNLEELFHLLNFLTPERFHNLEGFLEEFADIAKEDQIKKLHDMLGPHMLRRLKADVFKNMPSKTELIVRVELSPMQKKYYKYILTRNFEALNARGGGNQVSLLNVVMDLKKCCNHPYLFPVAAMEAPKMPNGMYDGSALIRASGKLLLLQKMLKNLKEGGHRVLIFSQMTKMLDLLEDFLEHEGYKYERIDGGITGNMRQEAIDRFNDFFSSSGWSLTLLPRLECSGAILTHCNLCLLGSSNTPVSAS

SEQ ID NO: 60986 - protein, 180 aa, Homo sapiens
MTTRQATKDPLLRGVSPTPSKIPVRSQKRTPFPTVTSCAVDQENQDPRGVRASAYLAPRTPTHRLDPARASCFSRLEGPGPRGRTLCPQRLQALISPSGPSFHPSTRPSFQELRRETAGSSRTSVSQASGLLLETPVQPAFSLPKGEREVVTHSDEGGVASLGLAQRVPLRENREMSHTR

SEQ ID NO: 60987 - protein, 231 aa, Homo sapiens
MNDILNHKMREFCIRLRNLVHSGATKGEISATQDVMMEEIFRVVCICLGNPPETFTWEYRDKDKNYQKIGPITPLEFYREHVKPLFNMEDKICLVNDPRPQHKYNKLYTVEYLSNMVGGRKTLYNNQPIDFLKKMVAASIKDGEAVWFGCDVGKHFNSKLGLSDMNLYDHELVFGVSLKNMNKAERLTFGESLMTHAMTFTAVSEKDDQDGAFTKWRVENSWGEDHGHKGE

SEQ ID NO: 60988 - protein, 46 aa, Homo sapiens
MAAAAAEQQQFYLLLGNLLSPDNVVRKQAEETYENIPGQSKITFLL

SEQ ID NO: 60989 - protein, 132 aa, Homo sapiens
MMRRTLENRNAQTKQLQTAVSNVEKHFGELCQIFAAYVRKTARLRDKADLLVNEINAYAATETPHLKLGLMNFADEFAKLQDYRQAENLKREFQFSKNRMSIKKIELIIAIHTNLKSNHIWRYFWKNVEFLS

SEQ ID NO: 60990 - protein, 103 aa, Homo sapiens
MPPKTPRKTAATAAAAAAEPPAPPPPPPPEEDPEQDSGPEDLPLVRLEFEETEEPDFTALCQKLKIPDHVRERAWLTWEKVSSVDGVLVLRSPVFKPWLTMGN

SEQ ID NO: 60991 - protein, 286 aa, Homo sapiens
MAASSSEISEMKGVEESPKVPGEGPGHSEAETGPPQVLAGVPDQPEAPQPGPNTTAAPVDSGPKAGLAPETTETPAGASETAQATDLSLSPGGESKANCSPEDPCQETVSKPEVSKEATADQGSRLESAAPPEPAPEPAPQPDPRPDSQPTPKPALQPELPTQEDPTPEILSESVGEKQENGAVVPLQAGDGEEGPAPEPHSPPSKKSPPANGAPPRVLQQLVEEDRMRRAHSGHPGSPRVPEQPAAGGRGRGPASGPGSQALKHRGAGGGSPHHHRLLRHQLRRV

SEQ ID NO: 60992 - protein, 141 aa, Homo sapiens
SVYKTAKEQGIHSLEVLITREDDFNNRLNNRASFKGCTALHYAVLADDYRTVKELLDGGANPLQRNEMGHTPLDYAREGEVMKLLRTSEAKYQEKQRKREAEERRRFPLEQRLKEHIIGQESAIATVGAGDPHQAHPGLMP

SEQ ID NO: 60993 - protein, 96 aa, Homo sapiens
MRGAMELEPELLLQEARENVEAAQSYRRELGHRLEGLREARRQVKSPCLVVWEKRMRNCGALPKRPRTFSWTAYQKYLYWLMCLVYLLSWMTQFLT

SEQ ID NO: 60994 - protein, 540 aa, Homo sapiens
METLESELTCPICLELFEDPLLLPCAHSLCFNCAHRILVSHCATNESVESITAFQCPTCRHVITLSQRGLDGLKRNVTLQNIIDRFQKASVSGPNSPSETRRERAFDANTMTSAEKVLCQFCDQDPAQDAVKTCVTCEVSYCDECLKATHPNKKPFTGHRLIEPIPDSHIRGLMCLEHEDEKVNMYCVTDDQLICALCKLVGRHRDHQVAALSERYDKLKQNLESNLTNLIKRNTELETLLAKLIQTCQHVETVKDQKVIGREKQQYYPRNRRKWVSNSLQARLMGRRCISRRERKLTLDVEKVNASRQEAKLTEECDLLIEIIQQRRQIIGTKIKEGKVMRLRKLAQQIANCKQCIERSASLISQAEHSLKENDHARFLQTAKNITERVSMATASSQVLIPEINLNDTFDTFALDFSREKKLLECLDYLTAPNPPTIREELCTASYDTITVHWTSDDEFSVVSYELQYTIFTGQANVVSEYLMAYLFLSLVAFFRLIAFLNLNFKGRQGRKEHTIFIDLSFLNKKVIALTCTTLVKTAG

SEQ ID NO: 60995 - protein, 127 aa, Homo sapiens
  MOD_RES (1)..(1): Any amino acid
XAHGFQGFVTALASICSSAAIAWGRYHHYCTRSQLAWNSAVSLVLFVWLSSAFWAALPLLGWGHYDYEPLGTCCTLDYSKGDRNFTSFLFTMSFFNFAMPLFITITSYSLMEQKLGKSGHLQGHQGI

SEQ ID NO: 60996 - protein, 64 aa, Homo sapiens
MAANATTNPSQLLPLELVDKCIGSRIHIVMKSDKEIVGTLLGFDDFVSILLKVKSHQKEEGLLN

SEQ ID NO: 60997 - protein, 140 aa, Homo sapiens
MEKRLQEAQLYKEEGNQRYREGKYRDAVSRYHRALLQLRGLDPSLPSPLPNLGPQGPALTPEQENILHTTQTDCYNNLAACLLQMEPVNYERVREYSQKVLERQPDNAKALYRAGVAFFHLQDYDQARHYLLAAVNRQPK

SEQ ID NO: 60998 - protein, 109 aa, Homo sapiens
MATSHSWEMPSSDTNANTSASGSASADSVLSRINQRLDMVPHLETDMMQGGVYGSGGERYDSYESCDSRAVLSERDLYRSGYDYSELDPEMEMAYEGQYDAYRDQFRMR

SEQ ID NO: 60999 - protein, 109 aa, Homo sapiens
  MOD_RES (1)..(1): Any amino acid
XLLDAGTLYTFRNMSSWCCPRPSPSICPTLQAWTSPASAPAPPIVTASRPSRTNSTRTCPATMGLLPSNTSQPCSSPRALPEAEAGPALPLILALGRHQGNLPSAIPAI

SEQ ID NO: 61000 - protein, 741 aa, Homo sapiens
KDEKNTEFQQRFILKRDDASMDRDDNQDGRRSKSIEEREEEYQRVRERIFARETGQNGYLNDIRGNREGLSRTSSSRQSSTDSELKSLEPRPWSSTDSDGSVRSMRPPVTKASSFSGISILTRGDSIGSSKGGSAGRISRPGMALGAPEVCNQVTSSQSVRGLLPCTAQQQQQQQQQQLPALPPTPQQQPPLNNHMISQADDLSNPFGQMSLSRQGSTEAADPSAALFQTPLISQHPQQTSFIMASTGQPLPTSNYSTSSHAPPTQQVLPPQGYMQPPQQIQVSYYPPGQYPNSNQQYRPLSHPVAYSPQRGQQLPQPSQQPGLQPMMPNQQQAAYQGMIGVQQPQNQGLLSSQRSSMGGQMQGLVVQYTPLPSYQVPVGSDSQNVVQPPFQQPMLVPVSQSVQGGLPAAGVPVYYSMIPPAQQNGTSPSVGFLQPPGSEQYQMPQSPSPCSPPQMPQQYSGVSPSGPGVVVMQLNVPNGPQPPQNPSMVQWSHCKYYSMDQRGQKPGDLYSPDSSPQANTQMSSSPVTSPTQSPAPSPVTSLSSVCTGLSPLPVLTQFPRPGGPAQGDGRYSLLGQPLQYNLSICPPLLHGQSTYTVHQGQSGLKHGNRGKRQALKSASTDLGTADVVLGRVLEVTDLPEGITRTEADKLFTQLAMSGAKIQWLKDAQGLPGGGGGDNSGTAENGRHSDLAALYTIVAVFPSPLAAQNASLRLNNSVSRFKLRMAKKNYDLRILERASSQ

SEQ ID NO: 61001 - protein, 712 aa, Homo sapiens
MEENPTLESEAWGSSREWLAPREARGAPCSSPGPSLSSVLNELPSAATLRYRDPGVLPWGALEEEEEDGGRSRKAFTEVTQTELQDPHPSRELPWPMQARRAYRQRNASRDQVVYGSGTKTDRWARLLRRSKEKTKEGLRSLQPWAWTLKRIGGQFGAGTESYFSLLRFLLLLNVLASVLMACMTLLPTWLGGAPPGPPGPDISSPCGSYNPHSQGLVTFATQLFNLLSGEGYLEWSPLFYGFYPPRPRLAVTYLCWAFAVGLICLLLILHRSVSGLKQTLLAESEALTSYSHRVFSAWDFGLCGDVHVRLRQRIILYELKVELEETVVRRQAAVRTLGQQARVWLVRVLLNLLVVALLGAAFYGVYWATGCTVELQEMPLVQELPLLKLGVNYLPSIFIAGVNFVLPPVFKLIAPLEGYTRSRQIVFILLRTVFLRLASLVVLLFSLWNQITCGGDSEAEDCKTCGYNYKQLPCWETVLGQEMYKLLLFDLLTVLAVALLIQFPRKLLCGLCPGALGRLAGTQEFQVPDEVLGLIYAQTVVWVGSFFCPLLPLLNTVKFLLLFYLKKLTLFSTCSPAARTFRASAANFFFPLVLLLGLAISSVPLLYSIFLIPPSKLCGPFRGQSSIWAQIPESISSLPETTQNFLFFLGTQAFAVPLLLISSILMAYTVALANSYGRLISELKRQRETEAQNKVFLARRAVALTSTKPAL

SEQ ID NO: 61002 - protein, 120 aa, Homo sapiens
MIIVCIDQWKNKIWPEIKVPRPDALDNESWGFVHPRLLSVPELCHHVAEVWVSGTIFIRNVLLFKKQNPGKFCLLSCGILTFLAVLGRYVPGLLLSYLMLVTVMMWPLAVYHRLWDRAYV

SEQ ID NO: 61003 - protein, 100 aa, Homo sapiens
MASAGTQHYSIGLRQKNSFKQSGPSGTVPATPPEKPSEGRVWPQAHQQVKPIWKLEKKQVETLSAGLGPGLLGVPPQPAYFFCPSTLCSSGTTAVIAGHS

SEQ ID NO: 61004 - protein, 139 aa, Homo sapiens
MMATPNQTACNAESPVALEEAKTSGAPGSPQTPPERHDSGGSLPLTPRMESHSEDEDLAGAVGGLGWNSRSPRTQSPGGCSAEAVLARKKHRRRPSKRKRHWRPYLELSWAEKQQRDERQSQRASRVREEMFAKGQPVA

SEQ ID NO: 61005 - protein, 116 aa, Homo sapiens
MGFLQLLVVAVLASEHRVAGAAEVFGNSSEVYLVVGLIEFSVGKFRYFELNRPFPEEAILHDISSNVTFLIFQIHSQYQNTTVSFSPTLLSNSSETGTASGLVFILRPEQSTCTWY

SEQ ID NO: 61006 - protein, 560 aa, Homo sapiens
MPALLLLVLLASSAGQARARPSNATSAEPAGPLPALLAHLRRLTGALTGGGGAASPGANGTRTGPAGGAGAAARAPPPAELCHGYYDVMGQYDATFNCSTGSYRFCCGTCHYRFCCEHRHMRLAQASCSNYDTPRWATTPPPLAGGAGGAGGAGGGPGPGQAGWLEGGRTGGAGGRGGEGPGGSTAYVVCGVISFALAVGVGAKVAFSKASRAPRAHRDINVPRALVDILRHQAGPGTRPDRARSSSLTPGIGGPDSMPPRTPKNLYNTVKTPNLDNLHHSYLHLNVNSPKHHAATLDWRALPPPSPSLHYSTLSCSRSFHNLSHLPPSYEAAVKSELNRYSSLKRLAEKDLDEAYLKRRPLELPRGTLPLHALRRPGTGGGYRMEAWGGPEELGLAPAPNPRRVMSQEHLLGDGGRSRYEFTLPRARLVSQEHLLLSSPEALRQSREHLLSPPRSPALPPDPTARASLAASHSNLLLGPGGPPTPLRGLPPPSSLHAHHHHALHGSPQPAWMSDAGGGGGTLARRPPFQRQGTLEQLQFIPGHHLPQHLRTASKNEVTV

SEQ ID NO: 61007 - protein, 83 aa, Homo sapiens
MMWASTDMQEITKHFVVCHVDAPGQQVGASQFPQGYQFPSMEQLAAMLPSVVQHFGFKYVIGIGVGAGAYVLAKFALIFPDLV

SEQ ID NO: 61008 - protein, 212 aa, Homo sapiens
MVFWWRIGQATYRLWHKGPQSVCSSLTPEQAELRQTMAKFLQEHLAPKAQEIDRSNEFKNLREFWKQLGNLGVLGITAPVQYGGSGLGYLEHVLVMEEISRASGAVGLSYGAHSNLCINQLVRNGNEAQKEKYLPKLISGEYIGALAMSEPNAGSDVVSMKLKAEKKGNHYILNGNKFWITNGPDADVLIVYAKTDLAAVPASRGITAFIVE

SEQ ID NO: 61009 - protein, 455 aa, Homo sapiens
MAQRRGRGPGGPQSTPRNPRVSRGERSHCPTQTVKKLLEEQRRRQQQQPDAGGVQGQFLPPPEQPLTPSVNEAVTGHPPFPAHSETVGSGPSSLGFPDWDPNTHAAYTDSPYSCPASAAENFLPPDFYPPSDPGQPCPFPQGMEAGPWRVSAPPSGPPQFPAVVPGPSLEVARAHMLALGPQQLLAQDEEGDTLLHLFAARGLRWAAYAAAEVLQVYRRLDIREHKGKTPLLVAAAANQPLIVEDLLNLGAEPNAADHQGRSVLHVAATYGLPGVLLAVLNSGVQVDLEARDFEGLTPLHTAILALNVAMRPSDLCPRVLSTQARDRLDCVHMLLQMGANHTSQEIKSNKTVLHLAVQAANPTLVQLLLELPRGDLRTFVNMKAHGNTALHMAAALPPGPAQEAIVRHLLAAGADPTLRNLENEQPVHLLRPGPGPEGLRQLLKRSRVAPPGLSS

SEQ ID NO: 61010 - protein, 59 aa, Homo sapiens
  MOD_RES (1)..(1): Any amino acid
XFLDRALYWHFLTDTFTAYYRLLITHLGLPQWQYAFTSYGISPQAKPKGSEGRSKRGCF

SEQ ID NO: 61011 - protein, 454 aa, Homo sapiens
MTPILTVLICLGHLPKPTLWAEPGSVIIQGSPVTLRCQGSLQAEEYHLYRENKSASWVRRIQEPGKNGQFPIPSITWEHAGRYHCQYYSHNHSSEYSDPLELVVTGAYSKPTLSALPSPVVTSGGNVTLQCVSQVAFDGFILCKEGEDEHPQRLNSHSHARGWSWAIFSVGPVSPSRRWSYRCYAYDSNSPYVWSLPSDLLELLVPGVSKKPSLSVQPGPMVAPGESLTLQCVSDVGYDRFVLYKEGERDFLQRPGWQPQAGLSQANFTLGPVSPSHGGQYRCYSAHNLSSEWSAPSDPLDILITGQFYDRPSLSVQPVPTVAPGKNVTLLCQSRGQFHTFLLTKEGAGHPPLHLRSEHQAQQNQAEFRMGPVTSAHVGTYRCYSSLSSNPYLLSLPSDPLELVVSASLGQHPQDYTVENLIRMGVAGLVLVVLGILLFEAQHSQRSLQDAAGR

SEQ ID NO: 61012 - protein, 158 aa, Homo sapiens
FEKSQASEFLLSKRHAIMPKLQQLMAAALAELEGLLAKALSGPFMDPTQDQRSTEHQLVSLERQFQNTVSDLSELHHAYAIFTGTEDPCTLHYHSVIDPSTERMRLLCPCQSVGHVLLCSSSAYGTCTESSPKTSASGSAWLLPSSAQLWPRRRQRAG

SEQ ID NO: 61013 - protein, 113 aa, Homo sapiens
MSTRNCQGMDSVIKPLDTIPEDKKVRVQRTQSTFDPFEKPANQVKRVHSENNACINFKTSSTGKESPKVRRHSSPSSGKWEVGSSEGDQAAGRRRDTFHSYQGSFSFKRTKTC

SEQ ID NO: 61014 - protein, 309 aa, Homo sapiens
  MOD_RES (1)..(1): Any amino acid
XLHTYQKEQLNTRGRPFRGMSEEEVFTEVANLFRGQEDLLSEFGQFLPEAKRSLFTGNGPCEMHSVQKNEHDKTPEHSRKRSRPSLLRPVSAPAKKKMKLRGTKDLSIAAVGKYGTLQEFSFFDKVRRVLKSQEVYENFLRCIALFNQELVSGSELLQLVSPFLGKFPELFAQFKSFLGVKELSFAPPMSDRSGDGISREIDYASCKRIGSSYRALPKTYQQPKCSGRTAICKELDHWTLLQGSWTDDYCMSKFKNTCWIPGYSAGVSKLWPTGPGPLPVFVNKVLLSHRHNHSFTYCLWLLFSPQRQS

SEQ ID NO: 61015 - protein, 116 aa, Homo sapiens
  MOD_RES (1)..(1): Any amino acid
XMEVVKVGGPVYRIGVGGGAASSVQVQGDNTSDLDFGAVQRGDPEMEQKMNRVIRACVEAPKGNPICSLHDQGAGGNGNVLKELSDPAGAIIYTSRFQIVLVDDRECPVRRNGQGD

SEQ ID NO: 61016 - protein, 213 aa, Homo sapiens
MAEMDPVAEFPQPPGAARWAEVMARFAARLGAQGRRVVLVTSGGTKVPLEARPVRFLDNFSSGRRGATSAEAFLAAGYGVLFLYRARSAFPYAHRFPPQTWLSALRPSGPALSGLLSLEAEENALPGFAEALRSYQEAAAAGTFLAVEFTTLADYLHLLQAAAQALNPLGPSAMFYLAAAVSDFYVPVSEMPEHKIQSSGGPLQVMGASLPEI

SEQ ID NO: 61017 - protein, 35 aa, Homo sapiens
MAEFTSYKETASSRHLRFKLQSLSRRLDELEEATK

SEQ ID NO: 61018 - protein, 382 aa, Homo sapiens
MVAAINRNNSVVQVLLAAGADPNLGDDFSSVYKTAKEQGIHSLEVLITREDDFNNRLNNRASFKGCTALHYAVLADDYRTVKELLDGGANPLQRNEMGHTPLDYAREGEVMKLLRTSEAKYQEKQRKREAEERRRFPLEQRLKEHIIGQESAIATVGAAIRRKENGWYDEEHPLVFLFLGSSGIGKTELAKQTAKYMHKDAKKGFIRLDMSEFQERHEVAKFIGSPPGYVGHEEGGQLTKKLKQCPNAVVLFDEVDKAHPDVLTIMLQLFDEGRLTDGKGKTIDCKDAIFIMTSNVASDEIAQHALQLRQEALEMSRNRIAENLGDVQISDKITISKNFKENVIRPILKAHFRRDEFLGRINEIVYFLPFCHSELIQLVNKE

SEQ ID NO: 61019 - protein, 77 aa, Homo sapiens
  MOD_RES (1)..(1): Any amino acid
XDEVIIPTAPLYKQILNLYAEENAIEDTIFYLGEALRRGVIDLDVFLKHVRLLSRKQFQLRALMQKARKTAGLSDLY

SEQ ID NO: 61020 - protein, 243 aa, Homo sapiens
MVSNPVHGLPFLPGTSFKDSTKTAFHRSQTLSYRNGYAIVRRPTVGIGGDRLQFNQLSQAELDELASKAPVLTYGQPKQAPPADFIPAHVAFDKKVLKFDAYFQEDVPMSTEEQYRIRQVNIYYYLEDDSMSVIEPVVENSGILQGKLIKRQRLAKNDRGDHYHWKDLNRGINITIYGKTFRVVDCDQFTQVFLESQGIELNPPEKMALDPYTELRKQPLRKYVTPSDFDQLKQFLTFDKQDS

SEQ ID NO: 61021 - protein, 483 aa, Homo sapiens
MDVKGKKGPVGMPKEATCDHFMCLQQGSECDIWDGQPVCKCKDRCEKEPSFTCASDGLTYYNRCYMDAEACSKGITLAVVTCRYHFTWPNTSPPPPETTMHPTTASPETPELDMAAPALLNNPVHQSVTMGETVSFLCDVVGRPRPEITWEKQLEDRENVVMRPNHVRGNVVVTNIAQLVIYNAQLQDAGIYTCTARNVAGVLRADFPLSVVRGHQAAATSESSPNGTAFPAAECLKPPDSEDCGEEQTRWHFDAQANNCLTFTFGHCHRNLNHFETYEACMLACMSGPLAACSLPALQGPCKAYAPRWAYNSQTGQCQSFVYGGCEGNGNNFESREACEESCPFPRGNQRCRACKPRQKLVTSFCRSDFVILGRVSELTEEPDSGRALVTVDEVLKDEKMGLKFLGQEPLEVTLLHVDWACPCPNVTVSEMPLIIMGEVDGGMAMLRPDSFVGASSARRVRKLREVMHKKTCDVLKEFLGLH

SEQ ID NO: 61022 - protein, 58 aa, Homo sapiens
MAAPVKGNRKQSTEGDALDPPASPKPAGKQNGIQNPISLELTCGRSTKQWRSWGPMSW

SEQ ID NO: 61023 - protein, 96 aa, Homo sapiens
  MOD_RES (1)..(1): Any amino acid
XQSSETERKQMAVGSGLRFCYYASRGVCFRGESCMYLHGDICDMCGLQTLHPMDAAQREEHMRACIEAHEKDMELSFAVQRGMDKVYPQVEKCQTV

SEQ ID NO: 61024 - protein, 71 aa, Homo sapiens
MIKPFQKYTRETRHHGKDHKSRNEILCIYDINREQDYVKNSEGILGENELRPPSQLHSLLEKIETGSLSEK

SEQ ID NO: 61025 - protein, 148 aa, Homo sapiens
MASDEGKLFVGGLSFDTNEQSLEQVFSKYGQISEVVVVKDRETQRSRGFGFVTFENIDDAKDAMMAMNGKSVDGRQIRVDQAGKSSDNRSRGYRGGSAGGRGFFRGGRGRGRGFSRGGGDRGYGGNRFESRSGGYGGSRDYYSSRSQS

SEQ ID NO: 61026 - protein, 122 aa, Homo sapiens
LEDMNEFTTHILEVINAHMVLSKANSQPSAGRAPISNPGMSEAGNFGGNSFMPANGLTVAQNQVLNLIKACPRPEGLNFQDLKNQLKHMSVSSIKQAVDFLSNEGHIYSTVDDDHFKSTDAE

SEQ ID NO: 61027 - protein, 224 aa, Homo sapiens
MRVTAPRTLLLLLWGAVALTETWAGSHSMRYFYTAMSRPGRGEPRFITVGYVDDTLFVRFDSDATSPRKEPRAPWIEQEGPEYWDRETQISKTNTQTYRENLRTALRYYNQSEAGSHIIQRMYGCDVGPDGRLLRGYDQDAYDGKDYIALNEDLSSWTAADTAAQITQRKWEAARVAEQDRAYLEGLCVESLRRYLENGKETLQRADQEQKSLFPAQRLELSNE

SEQ ID NO: 61028 - protein, 91 aa, Homo sapiens
MPRGRCRQQGPRIPIWAAANYANAHPWQQMDKASPGVAYTPLVDPWIERPCCGDTVCVRTTMEQKSTASGTCGGKPAERGPLAGHMPSSRP

SEQ ID NO: 61029 - protein, 501 aa, Homo sapiens
MRGYAPFSPDENSLVLFEGDEVYSTIRKQEYNGKIPRFRRIRGESELYTSDTVMQNPQFIKATIVHQDQAYDDKIYYFFREDNPDKNPEAPLNVSRVAQLCRGDQGGESSLSVSKWNTFLKAMLVCSDAATNKNFNRLQDVFLLPDPSGQWRDTRVYGVFSNPWNYSAVCVYSLGDIDKVFRTSSLKGYHSSLPNPRPGKCLPDQQPIPTETFQVADRHPEVAQRVEPMGPLKTPLFHSKYHYQKVAVHRMQASHGETFHVLYLTTDRGTIHKVVEPGEQEHSFAFNIMEIQPFRRAAAIQTMSLDAERRKLYVSSQWEVSQVPLDLCEVYGGGCHGCLMSRDPYCGWDQGRCISIYSSERSVLQSINPAEPHKECPNPKPDKAPLQKVSLAPNSRYYLSCPMESRHATYSWRHKENVEQSCEPGHQSPNCILFIENLTAQQYGHYFCEAQEGSYFREAQHWQLLPEDGIMAEHLLGHACALAASLWLGVLPTLTLGLLVH

SEQ ID NO: 61030 - protein, 116 aa, Homo sapiens
MNSRRREPITLQDPEAKYPLPLIEKEKISHNTRRFRFGLPSPDHVLGLPVGNYVQLLAKIDNELVVRAYTPVSSDDDRGFVDLIIKIYFKNVHPQYPEGGKMTQYLENMKIGETIF

SEQ ID NO: 61031 - protein, 749 aa, Homo sapiens
  MOD_RES (1)..(1): Any amino acid
XLNPSAMMMNAVFVKGILDYLDNISPQQIRKLFYVLSTLAFSKQNEASSHIQDDMHLVIRKQLSSTVFKYKLIGIIGAVTMAGIMAADRSESPSLTQERANLSDEQCTQVTSLLQLVHSCSEQSPQASALYYDEFANLIQHEKLDPKALEWVGHTICNDFQDAFVVDSCVVPEGDFPFPVKALYGLEEYDTQDGIAINLLPLLFSQDFAKDGGPVTSQESGQKLVSPLCLAPYFRLLRLCVERQHNGNLEEIDGLLDCPIFLTDLEPGEKLESMSAKERSFMCSLIFLTLNWFREIVNAFCQETSPEMKGKVLTRLKHIVELQIILEKYLAVTPDYVPPLGNFDVETLDITPHTVTAISAKIRKKGKIERKQKTDGSKTSSSDTLSEEKNSECDPTPSHRGQLNKEFTGKEEKTSLLLHNSHAFFRELDIEVFSILHCGLVTKFILDTEMHTEATEVVQLGPPELLFLLEDLSQKLESMLTPPIARRVPFLKNKGSRNIGFSHLQQRSAQEIVHCVFQLLTPMCNHLENIHNYFQCLAAENHGVVDGPGVKVQEYHIMSSCYQRLLQIFHGLFAWSGFSQPENQNLLYSALHVLSSRLKQGEHSQPLEELLSQSVHYLQNFHQSIPSFQCALYLIRLLMVILEKSTASAQNKEKIASLARQFLCRVWPSGDKEKSNISNDQLHALLCIYLEHTESILKAIEEIAGVGVPELINSPKDASSSTFPTLTRFMKRNSSTGTWLFETSVSSST

SEQ ID NO: 61032 - protein, 402 aa, Homo sapiens
MTADKDKDKDKEKDRDRDRDREREKRDKARESENSRPRRSCTLEGGAKNYAESDHSEDEDNDNNSATAEESTKKNKKKPPKKKSRYERTDTGEITSYITEDDVVYRPGDCVYIESRRPNTPYFICSIQDFKLVHNSQACCRSPTPALCDPPACSLPVASQPPQHLSEAGRGPVGSKRDHLLMNVKWYYRQSEVPDSVYQHLVQDRHNENDSGRELVITDPVIKNRELFISDYVDTYHAAALRGKCNISHFSDIFAAREFKARVDSFFYILGYNPETRRLNSTQGEIRVGPSHQAKLPDLQPFPSPDGDTVTQHEELVWMPGVNDCDLLMYLRAARSMAAFAGMCDGGSTEDGCVAASRDDTTLNALNTLHESGYDAGKALQRLVKKPVPKLIEKCWTEDEVE

SEQ ID NO: 61033 - protein, 147 aa, Homo sapiens
MKQYQGSGGVAMDVERSRFPYCVVWTPIPVLTWFFPIIGHMGICTSTGVIRDFAGPYFVSEDNMAFGKPAKYWKLDPAQVYASGPNAWDTAVHDASEEYKHRMHNLCCDNCHSHVALALNLMRYNNSTNWNMVTLCFFCLLYGKYVR

SEQ ID NO: 61034 - protein, 652 aa, Homo sapiens
MMCEVMPTISEDGRRGSALGPDEAGGELERLMVTMLTERERLLETLREAQDGLATAQLRLRELGHEKDSLQRQLSIALPQEFAALTKELNLCREQLLEREEEIAELKAERNNTRLLLEHLECLVSRHERSLRMTVVKRQAQSPGGVSSEVEVLKALKSLFEHHKALDEKVRERLRMALERVAVLEEELELSNQETLNLREQLSRRRSGLEEPGKDGDGQTLANGLGPGGDSNRRTAELEEALERQRAEVCQLRERLAVLCRQMSQLEEELGTAHRELGKAEEANSKLQRDLKEALAQREDMEERITTLEKRYLSAQREATSLHDANDKLENELASKESLYRQSEEKSRQLAEWLDDAKQKLQQTLQKAETLPEIEAQLAQRVAALNKAEERHGNFEERLRQLEAQLEEKNQELQRARQREKMNDDHNKRLSETVDKLLSESNERLQLHLKERMGALEEKNSLSEEIANMKKLQDELLLNKEQLLAEMERMQMEIDQLRGRPPSSYSRSLPGSALELRYSQAPTLPSGAHLDPYVAGSGRAGKRGRWSGVKEEPSKDWERSAPAGSIPPPFPGELDGSDEEEAEGMFGAELLSPSGQADVQTLAIMLQEQLEAINKEIKIMSLRRKLELHEGRGRPSQETPHHPLPALPVLRE

SEQ ID NO: 61035 - protein, 126 aa, Homo sapiens
MELREEAWSPGPLDSEDQQMASHENPGEQPEAFPADPAASHLTLASFASGWEETPLPCFPLLGPWDHPTLASPPALGLALLAVEGGLVLWLQVSFLLDDLGDPWGPPSLPDFLCPCPSSLGSTPVC

SEQ ID NO: 61036 - protein, 174 aa, Homo sapiens
LIRSDPAAFESRLEKRSEFRKQPVGHSRQGDFIKCVEQKTDALGKQSVNRGFTKDKTLSSIFNIEMVKEKTAEEIKQIWQQYFAAKDTVYAVIPAEKFDLIWNRAQSCPTNVAEAQCIANQVQLFYATDRKETYGLVETFNLRPNEFKYMSVIAELEQSGLGAELKCAQNQNKT

SEQ ID NO: 61037 - protein, 35 aa, Homo sapiens
MARLLRSATWELFPWRGYCSQKAKVPGEKRSPLEG

SEQ ID NO: 61038 - protein, 109 aa, Homo sapiens
MATSATSPHAPGFPAEGRCGYYVEKKKRFCRMVVAAGKRFCGEHAGAAEEEDARKRILCPLDPKHTVYEDQLAKHLKKCNSREKPKPDFYIQDINAGLRDETEIPEQLA

SEQ ID NO: 61039 - protein, 203 aa, Homo sapiens
MAGPELLLDSNIRLWVVLPIVIITFFVGMIRHYVSILLQSDKKLTQEQVSDRKYLSGLVQWLTPIIPALWGAEMGGSLEPRNLRPTLAACQVLIRSRVLRENGKYIPKQSFLTRKYYFNNPEDGFFKKTKRKVVPPSPMTDPTMLTDMMKGNVTNVLPMILIGGWINMTFSGFVTTKVPFPLTLRFKPMLQQGIELLTLDASW

SEQ ID NO: 61040 - protein, 102 aa, Homo sapiens
MHDNTVDRTTDGTGRLCDLTFEQIRKLNPAANHRLRNDFPDEKIPTLREAVAECLNHNLTIFFDVKGHAHKATEALKKMYMEFPQLYNNSVVCSFLPEVIYK

SEQ ID NO: 61041 - protein, 124 aa, Homo sapiens
MTTSHMNGHVTEESDSEVKNVDLASPEEHQKHREMAVDCPGDLGTRMMPIRRSAQLERIRQQQEDMRRRREEEGKKQELDLNSSMRLKKLAQIPPKTGIDNPMFDTEEGIVLESPHYAVKILGK

SEQ ID NO: 61042 - protein, 124 aa, Homo sapiens
MPSLRTRREEAEMELSVPGPSPWTPAAQARVRDAPAVTHPGSAACGTPCCSDTELEAICPHYQQPDCDTRTEDKEFLHKEDIHEDLESQAEISENYAGDVSQVPELGDLCDDVSERDWGVPEGR

SEQ ID NO: 61043 - protein, 154 aa, Homo sapiens
AAAMSTVDLARVGACILKHAVTGEAVELRSLWREHACVVAGLRRFGCVVCRWIAQDLSSLAGLLDQHGVRLVGVGPEALGLQEFLDGDYFAGELYLDESKQLYKELGFKRYNSLSILPAALGKPVRDVAAKVVIKCSCISSRSPQATTSPRSTS

SEQ ID NO: 61044 - protein, 248 aa, Homo sapiens
MSTGLRYKSKLATPEDKQDIDKQYVGFATLPNQVHRKSVKKGFDFTLMVAGESGLGKSTLVHSLFLTDLYKDRKLLSAEERISQTVEILKHTVDIEEKGVKLKLTIVDTPGFGDAVNNTECWKPITDYVDQQFEQYFRDESGLNRKNIQDNRVHCCLYFISPFGHGLRPVDVGFMKALHEKVNIVPLIAKADCLVPSEIRKLKERIREEIDKFGIHVYQFPECDSDEDEDFKQQDRELKWRTRRIATS

SEQ ID NO: 61045 - protein, 300 aa, Homo sapiens
MKLYCLSGHPTLPCNVLKFKSTTIMLDCGLDMTSTLNFLPLPLVQSPRLSNLPGWSLKDGNAFLDKELKECSGHVFVDSVPEFCLPETELIDLSTVDVILISNYHCMMALPYITEHTGFTGTVYATEPTVQIGRLLMEELVNFIERVPKAQSASLWKNKDIQRLLPSPLKDAVEVSTWRRCYTMQEVNSALSKIQLVGYSQKIPMDQASLKNSDVLVLTGLTQIPTANPDGMVGEFCSNLALTVRNGGNVLVPCYPSGVIYDLLECLYQYIDSAGLSSVPLYFISPVANSSLEFSQIFAE

SEQ ID NO: 61046 - protein, 2063 aa, Homo sapiens
MTSLAQQLQRLALPQSDASLLSRDEVASLLFDPKEAATIDRDTAFAIGCTGLEELLGIDPSFEQFEAPLFSQLAKTLERSVQTKAVNKQLDENISLFLIHLSPYFLLKPAQKCLEWLIHRFHIHLYNQDSLIACVLPYHETRIFVRVIQLLKINNSKHRWFWLLPVKQSGVPLAKGTLITHCYKDLGFMDFICSLVTKSVKVFAEYPGSSAQLRVLLAFYASTIVSALVAAEDVSDNIIAKLFPYIQKGLKSSLPDYRAATYMIICQISVKVTMENTFVNSLASQIIKTLTKIPSLIKDGLSCLIVLLQRQKPESLGKKPFPHLCNVPDLITILHGISETYDVSPLLHYMLPHLVVSIIHHVTGEETEGMDGQIYKRHLEAILTKISLKNNLDHLLASLLFEEYISYSSQEEMDSNKVSLLNEQFLPLIRLLESKYPRTLDVVLEEHLKEIADLKKQELFHQFVSLSTSGGKYQFLADSDTSLMLSLNHPLAPVRILAMNHLKKIMKTSKEGVDESFIKEAVLARLGDDNIDVVLSAISAFEIFKEHFSSEVTISNLLNLFQRAELSKNGEWYEVLKIAADILIKEEILSENDQLSNQVVVCLLPFMVINNDDTESAEMKIAIYLSKSGICSLHPLLRGWEEALENVIKSTKPGKLIGVANQKMIELLADNINLGDPSSMLKMVEDLISVGEEESFNLKQKVTFHVILSVLVSCCSSLKETHFPFAIRVFSLLQKKIKKLESVITAVEIPSEWHIELMLDRGIPVELWAHYVEELNSTQRVAVEDSVFLVFSLKKFIYALKAPKSFPKGDIWWNPEQLKEDSRDYLHLLIGLFEMMLNGADAVHFRVLMKLFIKVHLEDVFQLFKFCSVLWTYGSSLSNPLNCSVKTVLQTQALYVGCAMLSSQKTQCKHQLASISSPVVTSLLINLGSPVKEVRRAAIQCLQALSGVASPFYLIIDHLISKAEEITSDAAYVIQDLATLFEELQREKKLKSHQKLSETLKNLLSCVYSCPSYIAKDLMKVLQGVNGEITKPFFAAISDEKVQQKLLRMLFDLLVNCKNSHCAQTVSSVFKGISVNAEQVRIELEPPDKAKPLGTVQQKRRQKMQQKKSQDLESVQEVGGSYWQRVTLILELLQHKKKLRSPQILVPTLFNLLSRCLEPLPQEQGNMEYTKQLILSCLLNICQKLSPDGGKIPKDILDEEKFNVELIVQCIRLSEMPQTHHHALLLLGTVAGIFPDKVLHNIMSIFTFMGANVMRLDDTYSFQVINKTVKMVIPALIQSDSGDSIEVSRNVEEIVVKIISVFVDALPHVPEHRRLPILVQLVDTLGAEKFLWILLILLFEQYVTKTVLAAAYGEKDAILEADTEFWFSVCCEFSVQHQIQSLMNILQYLLKLPEEKEETIPKAVSFNKSESQEEMLQVFNVETHTSKQLRHFKFLSVSFMSQLLSSNNFLKKVVESGGPEILKGLEERLLETVLGYISAVAQSMERNADKLTVKFWRALLSKAYDLLDKVNALLPTETFIPVIRGLVGNPLPSVRRKALDLLNNKLQQNISWKKTIVTRFLKLVPDLLAIVQRKKKEGEEEQAINRQTALYTLKLLCKNFGAENPDPFVPVLNTAVKLIAPERKEEKNVLGSALLCIAEVTSTLEALAIPQLPSLMPSLLTTMKNTSELVSSEVYLLSALAALQKVVETLPHFISPYLEGILSQVIHLEKITSEMGSASQANIRLTSLKKTLATTLAPRVLLPAIKKTYKQIEKNWKNHMGPFMSILQEHIGVMKKEELTSHQSQLTAFFLEALDFRAQHSENDLEEVGKTENCIIDCLVAMVVKLSEVTFRPLFFKLFDWAKTEDAPKDRLLTFYNLADCIAEKLKGLFTLFAGHLVKPFADTLNQVNISKTDEAFFDSENDPEKCCLLLQFILNCLYKIFLFDTQHFISKERAEALMMPLVDQLENRLGGEEKFQERVTKHLIPCIAQFSVAMADDSLWKPLNYQILLKTRDSSPKVRFAALITVLALAEKLKENYIVLLPESIPFLAELMEDECEEVEHQCQKTIQQLETVLGEPLQSYF

SEQ ID NO: 61047 - protein, 113 aa, Homo sapiens
MAEEKKLKLSNTVLPSESMKVVAESMGIAQIQEETCQLLTDEDALKFMHMGKRQKLTTSDIDYALKLKNVEPLYGFHAQEFIPFRFASGGGRELYFYEEKEVDLSDIINTPLP

SEQ ID NO: 61048 - protein, 166 aa, Homo sapiens
MATATPVPPRMGSRAGGPTTPLSPTRLSRLQEKEELRELNDRLAVYIDKVRSLETENSALQLQVTEREEVRGRELTGLKALYETELADARRALDDTARERAKLQIELGKCKAEHDQLLLNYAKKESDLNGAQIKLREYEAALNSKDAALATALGDKKSLEGDLEDL

SEQ ID NO: 61049 - protein, 250 aa, Homo sapiens
  MOD_RES (1)..(1): Any amino acid
XSPGFPARPGRGRPYMASRPPGDLAEAGGRALQSLQLRLLTPTFEGINGLLLKQHLVQNPVRLWQLLGGTFYFNTSRLKQKNKEKDKSKGKAPEEDEEERRRRERDDQMYRERLRTLLVIAVVMSLLNALSTSGGSISWNDFVHEMLAKGEVQRVQVVPESDVVEVYLHPGAVVFGRPRLALMYRMQVANIDKFEEKLRAAEDELNIEAKDRIPVSYKRTGFFGKVSLCRPGWSAVVQSQLTAASTSQDQ

SEQ ID NO: 61050 - protein, 147 aa, Homo sapiens
MDYYRKYAAIFLVTLSVFLHVLHSAPDVQETGFHHVAQAALKLLSSSNPPTKASQSARITDCPECTLQENPFFSQPGAPILQCMGCCFSRAYPTPLRSKKTMLVQKNVTSESTCCVAKSYNRVTVMGGFKVENHTACHCSTCYYHKS

SEQ ID NO: 61051 - protein, 150 aa, Homo sapiens
  MOD_RES (1)..(1): Any amino acid
XVLCGYVSEFEGLQNKINYGHLFKEHLDIAIKLLPEEPFLYYLKGRYCYTVSKLSWIEKKMAATLFGKIPSSTVQEALHNFLKAEELCPGYSNPNYMYLAKCYTDLEENQNALKFCNLALLLPTVTKEDKEAQKEMQKIMTSLKRLRKTK

SEQ ID NO: 61052 - protein, 106 aa, Homo sapiens
MGLPVSWAPPALWVLGCCALLLSLWALCTACRRPEDAVAPRKRARRQRARLQGSATAAEASLLRRTHLCSLSKSDTRLHELHRGPRSSRALRPASMDLLRPHWLEV

SEQ ID NO: 61053 - protein, 52 aa, Homo sapiens
MEMHFIMCLSKPRLSYNDDVLTKDAGECVICLEELLQGDTIARLPCLCIYHK

SEQ ID NO: 61054 - protein, 20 aa, Homo sapiens
MMKRQLHRMRQLAQTGSLGR

SEQ ID NO: 61055 - protein, 181 aa, Homo sapiens
MTMESREMDCYLRRLKQELAPCFLSPLQMSMKEVGDGLQDQMNCMMGALQELKLLQVQTALEQLEISGGGPVPGSPEGPRTQCEHPCWEGGRGPARPTVCSPSSQPSLGSSTKFPSHRSVCGRDLAPLPRTQPHQSCAQQGPERVEPDDWTSTLMSRGRNRQPLVLGDNVFADLVGNWLDL

SEQ ID NO: 61056 - protein, 122 aa, Homo sapiens
MRTLRRLKFMSSPSLSDLGKREPAAAADERGTQQRRACANATWNSIHNGVIAVFQRKGLPDQELFSLNEGVRQLLKTELGSFFTEYLQNQLLTKGMVILRDKIRFYEEAAGLTGRDLGLLLQ

SEQ ID NO: 61057 - protein, 53 aa, Homo sapiens
MMLSLNNLQNIIYNPVIPFVGTIPDQLDPGTLIVIRGHVPSDADRWICRMAAA

SEQ ID NO: 61058 - protein, 14 aa, Homo sapiens
MALRHLALLAGLLV

SEQ ID NO: 61059 - protein, 168 aa, Homo sapiens
MADPDPRYPRSSIEDDFNYGSSVASATVHIRMAFLRKVYSILSLQVLLTTVTSTVFLYFESVRTFVHESPALILLFALGSLGLIFALILNRHKYPLNLYLLFGFTLLEALTVAVVVTFYDVYIILQAFILTTTVFFGLTVYTLQSKKDFSKFGAGRCRSPSFLWIHHL

SEQ ID NO: 61060 - protein, 129 aa, Homo sapiens
DIENAYKKTFLPEMSEKCEVLQYSAREAQDSKKVVEDIEYLKFDKGPWLKQDNRTLYHLRLLVQDKFEVLNYTSIPIFLPEVTIGAHQTDRVLHQFREVPADQEHRWVSLLSSPLGSLFSEWSVCGEDS

SEQ ID NO: 61061 - protein, 18 aa, Homo sapiens
  MOD_RES (1)..(1): Any amino acid
XGNGTQHMFEDDPRVAIT

SEQ ID NO: 61062 - protein, 220 aa, Homo sapiens
MMVSMGAVSKETPVVTIVHDCQVVDIPEELVEEHDITVDYILTPTRVIATGCKRPKPMGITWFKISLEMMEKIPILRSLRAREQQAGKDVTLQGEHQHLPEPGCQQTVPLSVGRRPPDTPGPETNSMEAAPGSPPGEGAPLAADVYVGNLPGDARVSDLKRALRELGSVPLRLTWQGPRRRAFLHYPDSAAAQQAVSCLQGLRLGTDTLRVALARQQRDK

SEQ ID NO: 61063 - protein, 113 aa, Homo sapiens
MRTKQVNLLITLVAVALFSFSCFSIYRITQTISFALGISTVNRGNYSYLKQTLTSVVSRMTLSQEKDSVVIVLVADSNEDYLHSVVKMITKKFKRQVRSGSLEVISIPAFLYS

SEQ ID NO: 61064 - protein, 79 aa, Homo sapiens
MITKTHKVDLGLPEKKKKKKVVKEPETRYSVLNNDDYFADVSPLRATSPSKSVAHGQAPEMPLVKKKKKKKKGVSTLCE

SEQ ID NO: 61065 - protein, 453 aa, Homo sapiens
  MOD_RES (1)..(1): Any amino acid
XVFTGVFTVEMVLKVIAFKPKHYFTDAWNTFDALIVVGSVVDIAITEVNPTESENVPVPTATPGNSEESNRISITFFRLFRVMRLVKLLSRGEGIRTLLWTFIKSFQALPYVALLIAMLFFIYAVIGMQMFGKVAMRDNNQINRNNNFQTFPQAVLLLFRCATGEAWQEIMLACLPGKLCDPESDYNPGEEYTCGSNFAIVYFISFYMLCAFLIINLFVAVIMDNFDYLTRDWSILGPHHLDEFKRIWSEYDPEAKGRIKHLDVVTLLRRIQPPLGFGKLCPHRVACKRLVAMNMPLNSDGTVMFNATLFALVRTALKIKTEGNLEQANEELRAVIKKIWKKTSMKLLDQVVPPAGDDEVTVGKFYATFLIQDYFRKFKKRKEQGLVGKYPAKNTTIALQAGLRTLHDIGPEIRRAISCDLQDDEPEETKREEEDDVFKQEIRCVITIITIIP

SEQ ID NO: 61066 - protein, 146 aa, Homo sapiens
MNSRRREPITLQDPEAKYPLPLIEKEKISHNTRRFRFGLPSPDHVLGLPVGNYVQLLAKIDNELVVRAYTPVSSDDDRGFVDLIIKIYFKNVHPQYPEGGKMTQYLENMKIGETIFFRGPRGRLFYHGPGNLGIRPDQTSEPKKTL

SEQ ID NO: 61067 - protein, 93 aa, Homo sapiens
MTTYLEFIQQNEERDGVRFSWNVWPSSRLEATRMVVPVAALFTPLKERPDLPPIQYEPVLCSRTTCRAVLNPLCQVDYRAKLWACNFCYQRNQ

SEQ ID NO: 61068 - protein, 309 aa, Homo sapiens
MPHTLSLPYPQLLGLSVATMVTLTYFGAHFAVIRRASLEKNPYQAVHQWAFSAGLSLVGLLTLGAVLSAAATVREAQGLMAGGFLCFSLAFCAQVQVVFWRLHSPTQVEDAMLDTYDLVYEQAMKGTSHVRRQELAAIQDVFLCCGKKSPFSRLGSTEADLCQGEEAAREDCLQGIRSFLRTHQQVASSLTSIGLALTVSALLFSSFLWFAIRCGCSLDRKGKYTLTPRACGRQPQEPSLLRCSQGGPTHCLHSEAVAIGPRGCSGSLRWLQESDAAPLPLSCHLAAHRALQGRSRGGLSGCPERGLSD

SEQ ID NO: 61069 - protein, 403 aa, Homo sapiens
MRPPQCLLHTPSLASPLLLLLLWLLGGGVGAEGREDAELLVTVRGGRLRGIRLKTPGGPVSAFLGIPFAEPPMGPRRFLPPEPKQPWSGVVDATTFQSVCYQYVDTLYPGFEGTEMWNPNRELSEDCLYLNVWTPYPRPTSPTPVLVWIYGGGFYSGASSLDVYDGRFLVQAERTVLVSMNYRVGAFGFLALPGSREAPGNVGLLDQRLALQWVQENVAAFGGDPTSVTLFGESAGAASVGMHLLSPPSRGLFHRAVLQSGAPNGPWATVGMGEARRRATQLAHLVGCPPGGTGGNDTELVACLRTRPAQVLVNHEWHVLPQESVFRFSFVPVVDGDFLSDTPEALINAGDFHGLQVLVGVVKDEGSYFLVYGAPGFSKDNESLISRAEFLAGVRVGVPQGSQ

SEQ ID NO: 61070 - protein, 48 aa, Homo sapiens
MGDEDDDESCAVELRITEANLTGHEEKPTARCSWCGRRAGTTRGSCTP

SEQ ID NO: 61071 - protein, 291 aa, Homo sapiens
MESIFHEKVISNALKVWGLELILFNSPEYQRLRIDPINERSFICNYKEHWFTVRKLGKQWFNLNSLLTGPELISDTYLALFLAQLQQEGYSIFVVKGDLPDCEADQLLQMIRVQQMHRPKLIGEELAQLKEQRVHKTDLERVLEANDGSGMLDEDEEDLQRALALSRQEIDMEDEEADLRRAIQLSMQGSSRNISQDMTQTSGTNLTSEELRKRREAYFEKQQQKQQQQQQQQQQGDLSGQSSHPCERPATSSGALGSDLGDAMSEEDMLQAAVTMSLETVRNDLKTEGKK

SEQ ID NO: 61072 - protein, 213 aa, Homo sapiens
MAAVQVVGSWPSVQPREAPREAIPERGNGFRLLSARLCALRPDDSSSARTEIHLLFDQLISENYSEGSGVAPEDVSALLVQACRLVPLNQNHLVSKVSQLIHHLLNRLQSFTLLPRLECGAISAHSKLRLPSLHHSSASASQVAGTTGTRHHVIVDEQHLDFLLAYTISAIHQCSSWTHREILQALAALVYCNGSKCQKYLPELLGNTGLLMK

SEQ ID NO: 61073 - protein, 552 aa, Homo sapiens
MALSVPGYSPGFRKPPEVVRLRRKRARSRGAAASPPRELTEPAARRAALVAGLPLRPFPAAGGRGGGSGGGPAAARRNPFARLDNRPRVAAEPPDGPAREQPEAPVPFLDSNQENDLLWEEKFPERTTVTELPQTSHVSFSEPDIPSSKSTELPVDWSIKTRLLFTSSQPFTWADHLKAQEEAQGLVQHCRATEVTLPKSIQSLIYWLHPALSWLPLFPRIGADRKMAGKTSPWSNDATLQHVLMSDWSVSFTSLYNLLKTKLCPYFYVCTYQFTVLFRAAGLAGSDLITALISPTTRGLREAMRNEGIEFSLPLIKESGHKKETASGTSLGYGEEQAISDEDEEESFSWLEEMGVQDKIKKPDILSIKLRKEKHEVQMDHRPESVVLVKGINTFTLLNFLINSKSLVATSGPQAGLPPTLLSPVAFRGATMQMLKARSVNVKTQALSGYRDQFSLEITGPIMPHSLHSLTMLLKSSQSGSFSAVLYPHEPTAVFNICLQMDKVLDMEVVHKELTNCGLHPNTLEQLSQIPLLGKSSLRNVVLRDYIYNWRS

SEQ ID NO: 61074 - protein, 339 aa, Homo sapiens
  MOD_RES (1)..(1): Any amino acid
XRKIICPIGVPETPKETPTPQRKGLRSSALRPKRPETPKQTGPVIIETWVAEEELELWEIRAFAERVEKEKAQAVEQQAKKRLEQQKPTVIATSTTSPTSSTTSTISPAQKVMVAPISGSVTTGTKMVLTTKVGSPATVTFQQNKNFHQTFATWVKQGQSNSATSTAATSATTIASTGQTFQITGNPVTMAGKVITKLPLPANSKIVAVNVPATQGGVVQVQQKVLGIIPSSTGTSQQTFTSFQPRTATVTIRPNTSGSGGTTSNSQVITGPQIRPGMTVIRTPLQQSTLGKAIIRTPVMVQPGAPQQVMTQIIRGQPVSTAVSAPNTVSSTPGQKSLT

SEQ ID NO: 61075 - protein, 231 aa, Homo sapiens
MAQLFLPLLAALVLAQAPAALADVLEGDSSGIYRCEVQHGIDDSSDAVEVKVKGVVFLYREGSARYAFSFSGAQEACARIGAHIATPEQLYAAYLGGYEQCDAGWLSDQTVRYPIQTPREACYGDMDGFPGVRNYGVVDPDDLYDVYCYAEDLNGELFLGDPPEKLTLEEARAYCQERGAEIATTGQLYAAWDGGLDHCSPGWLADGSVRYPIVTPSQRCGGGLPGVKTLF

SEQ ID NO: 61076 - protein, 152 aa, Homo sapiens
MGTPQKDVIIKSDAPDTLLLEKHADYIASYGSKKDDYEYCMSEYLRMSGIYWGLTVMDLMGQLHRMNREEILAFIKSCQHECGGISASIGHDPHLLYTLSAVQILTLYDSINVIDVNKVVEYVKGLQKEDGSFAGDIWGNVRFSPFYPKYQY

SEQ ID NO: 61077 - protein, 274 aa, Homo sapiens
MAAERGAGQQQSQEMMEVDRRVESEESGDEEGKKHSSGIVADLSEQSLKDGEERGEEDPEEEHELPVDMETINLDRDAEDVDLNHYRIGKIEGFETLCLRQNLIKCIENLEELQSLRELDLYDNQIKKIENLEALTELEILDISFNLLRNIEGVDKLTRLKKLFLVNNKISKIENLSNLHQLQMLELGSNRIRAIENIDTLTNLESLFLGKNKITKLQNLDALTNLTVLSMQSNRLTKIEGLQNLVNLRELYLSHNGIEVIEGLENNVQDSLTY

SEQ ID NO: 61078 - protein, 231 aa, Homo sapiens
  MOD_RES (1)..(1): Any amino acid
XASKKRLIEDTEDWRPRTGTTQSRSFRILAQITGTEHLKESEADNTKKANNSQEPSPQLASSVASTRSMPESLDSPTSGRPGVTSLTAAAAFKPVGSTGVIKSPSWQRPNQGVPSTGRISNSATYSGSVAPANSALGQTQPSDQDTLVQRAEHIPAGKRTPMCAHCNQVIRGPFLVALGKSWHPEEFNCAHCKNTMAYIGFVEEKGALYCELCYEKFFAPECGRCQRKILG

SEQ ID NO: 61079 - protein, 1126 aa, Homo sapiens [sequence omitted]

SEQ ID NO: 61080 - protein, 229 aa, Homo sapiens
MIPLQKDNQEEGVCPICQESLKEAVSTNCGHLFCRVCLTQHVEKASASGVFCCPLCRKPCSEEVLGTGYICPNHQKRVCRFCEESRLLLCVECLVSPEHMSHHELTIENALSHCKERLNRRSRKLRKDIAELQRLKAQQEKKLQALQQWLGQLEHMPAEAARILDISRAVTQLRSLVIDLERTAKELDTNTLKNAGDLLNRSAPQKLEVIYPQLEKGVSELLLQPPQKL

SEQ ID NO: 61081 - protein, 96 aa, Homo sapiens
MSLPSRQTAIIVNPPPPEYINTKKNGRLTNQLQYLQKVVLKDLWKHSFSWPFQRPVDAVKLQLPDYYTIIKNPMDLNTIKKRLENKYYAKASECIE

SEQ ID NO: 61082 - protein, 682 aa, Homo sapiens
MAKIAELEKQLSQARKELETLRERFSESTAMGPSRRPPEPEKAPPAAPTRPSALELKVEELEEKGLIRILRGPGDAVSIEILPVAVATPSGGDAPTPGVPTGSPSPDLAPAAEPAPGAAPPPPPPLPGLPSPQEAPPSAPPQAPPLPGSPEPPPAPPLPGDLPPPPPPPPPPPGTDGPVPPPPPPPPPPPGGPPDALGRRDSELGPGVKAKKPIQTKFRMPLLNWVALKPSQITGTVFTELNDEKVLQELDMSDFEEQFKTKSQGPSLDLSALKSKAAQKAPSKATLIEANRAKNLAITLRKGNLGAERICQAIEAYDLQALGLDFLELLMRFLPTEYERSLITRFEREQRPMEELSEEDRFMLCFSRIPRLPERMTTLTFLGNFPDTAQLLMPQLNAIIAASMSIKSSDKLRQILEIVLAFGNYMNSSKRGAAYGFRLQSLDALLEMKSTDRKQTLLHYLVKVIAEKYPQLTGFHSDLHFLDKAGSVSLDSVLADVRSLQRGLELTQREFVRQDDCMVLKEFLRANSPTMDKLLADSKTAQEAFESVVEYFGENPKTTSPGLFFSLFSRFIKAYKKAEQEVEQWKKEAAAQEAGADTPGKGEPPAPKSPPKARRPQMDLISELKRRQQKEPLIYESDRDGAIEDIITDLRNQPYIRADTGRRSARRRPPGPPLQVTSDLSL

SEQ ID NO: 61083 - protein, 79 aa, Homo sapiens
MSQSGAVSCCPGATNGSLGRSDGVAKMSPKDLFEQRKKYSNSNVIMHETSQYHVQHLATFIMDKSEAITSVDDAIRKLV

SEQ ID NO: 61084 - protein, 19 aa, Homo sapiens
MGKKGKVGKSRRDKFYHLA

SEQ ID NO: 61085 - protein, 25 aa, Homo sapiens
MPRYAQLVMGPAGSGKSTYCATMVQ

SEQ ID NO: 61086 - protein, 292 aa, Homo sapiens
MAAGRLLLYTGLSLALCALGMLAVAICSDHWYETDARKHRDRCKAFNTRRVDPGFIYNNNNNLPLRASRSRLDRWEGKLLRARNRRQLFAMSPADECSRQYNSTNMGLWRKCHRQGFDPEIAALIRKGEIERCTYIKYHYSSATIPRNLTFNVTKTLRCMYCMYLRRMTAGFMGMAVAIILFGWIIGVLGCCWDRGLMQYVAGLLFLMGGTFCIISLCTCVAGINFELSRYPRYLYGLPDDISHGYGWSMFCAWGGLGLTLISGFFCTLAPSVQPVPRTNYPKSRPENGTVC

SEQ ID NO: 61087 - protein, 343 aa, Homo sapiens
MGDAKEAGAEGPPAGAAARGGLSLLSQGESEESSAQGSALFLGGNEVKSRAVVKYSSAPPRTAFARLEEKTDLKLPPANWLRESAKLGPAGTTILGNSKKSKPFSSFGMAYDFIDSVGNDVDVVSDSENIKKLLKIPYSKSHVSMAVHRIGRTLLLDELDIQELFMRSSQTGDWTWLKEFYQRLIDQKWQRKKKSKEHWYQKAILSKFLYYSINGDGAAQPVSSTAEQQESSSSDQTNDSEGASWPAPFEMPSSVSEDPSASSQGSEPLEPSYIVGHVASAPKEQNLITLFNDGEHSQGLKNDFVRNILWTFEDIHMLVGSNMPIFGGGRYPAVSLRLRNVYF

SEQ ID NO: 61088 - protein, 93 aa, Homo sapiens
  MOD_RES (1)..(1): Any amino acid
XKPKLPENYTDETWQKLKEAVEAIQNSTSIKYNLEELYQKDYFEMFKFKQEDKGGCRKSLFLQDFCKLVQTAETDLRRSHQSTDSSIQRGFIG

SEQ ID NO: 61089 - protein, 38 aa, Homo sapiens
MKQVPTLKIDGITIHQSLAIIEYLEEMRPTPRLLPQDP

SEQ ID NO: 61090 - protein, 176 aa, Homo sapiens
  MOD_RES (1)..(1): Any amino acid
XCFLENKSGAITCLSIRGAQEEDPPDPQLMRLDNMLLAEGVSGPEKGGGSAAAAAAAAASGGSSDNSIEHSDYRAKLTQIRQIYHTELEKYEQACNEFTTHVMNLLREQSRTRPISPKEIERMVGIIHRKFSSIQMQLKQSTCEAVMILRSRFLDARRKRRNFSKQATEILNEYFY

SEQ ID NO: 61091 - protein, 207 aa, Homo sapiens
MSSILEERILGADTSVDLEETGRVLSIGDGIARVHGLRNVQAEEMVEFSSGLKGMSLNLEPDNVGVVVFGNDKLIKEGDIVKRTGAIVDVPVGEELLGRVVDALGNAIDGKGPIGSKTRRRVGLKAPGIIPRISVREPMQTGIKAVDSLVPIGRGQRELIIGDRQTGKTSIAIDTIINQKRFNDGSDEKKKLYCIYVAIGQKRSTVA

SEQ ID NO: 61092 - protein, 102 aa, Homo sapiens
MDFKIEHTWDGFPVKHEPVFIRLNPGDRGVMMDISAPFFRDPPAPLGEPGKPFNELWDYEVVEAFFLNDITEQYLEVELCPKNFLYRSECPEERQNGKAKLI

SEQ ID NO: 61093 - protein, 139 aa, Homo sapiens
MKEEAFLRRRFSLCPPSSTPQKVDPRKLTRNLLLSGDNELYPLSPGKDMEPNGPSLPRDEGPPTPSSATKVPPAEYRLCNGSDKECVSPTARVTKKETLKAQKENYRQEKKRATRQLLSALTDPSVVIMADSLKIRGTL

SEQ ID NO: 61094 - protein, 73 aa, Homo sapiens
  MOD_RES (1)..(1): Any amino acid
XPVPSVGTNCGIEPWDSGVTSGLGSVRVPEELKLPHACCVGIASQTLLSVLNPTDRWLQVSIGVLSISVNGEK

SEQ ID NO: 61095 - protein, 1046 aa, Homo sapiens
  MOD_RES (1)..(1): Any amino acid
XKPMINKDLEGNISFLAQTGEFSVPLKCSTKKCSLSLDKELIDFGSYVVGETTSRTITLTNVGGLGTTFKFLPASEPCEMDDSQSALKLSSLLTYEDKSLYDKAATSFSEQQLEGTESSQADMQSRKELEKLDKEQEEEQPAEPERLTTVIPPSEEQTEITLGEVTEGEIGPFSSIKVPIVFTPVVPGDVQARFKVTFKNPQCPTLHFRVVGVAIDVPVWVPKPSVDLKICMYDRLYQDSVLVHTRSKAALRLKFEVCKELRAHLELLPKTGYIQAQSSYSVQLKFLPRHSLPEDAGRYFDKETRVLEAPMTIWVADQNKPVGFTVHAIVTTSDLELSPSEVDFGYCTIYEAIRTEISLHNHSLLPQEFGFVRLPKFVDVQPNDGFGTILPLETLQFCVIFQPTKAEEHRFQLTCKSEINRCFKLSCRAVGVHPPLELSHYQIKFAATALYDTSVATVYVINSHLSMSSPTHSKPRIGSEDASPMGPTSFEFLLPPDSPITISPSVGTVWPGKRCLVQVAFRPVLPEKLIRQEALPLLNKEMETKSFRKNMAPQRKDLHGLSFSVLRAQNRDKLFKVSVPHVLEMRKRELRPSSDEYQAARATLLRAFQAKFDTFVVPCVVASGDIKDRKGSEPLSFSPHNTLYLELWCPTVAPSVVVTSHKGKTIFNFGDVAVGHRSIKKISIQNVSPEDLALDFSLLNPNGPFVLLNHSSLLRAGGTQVLVLSFSPHESILAQETLDIITKRGTLTLTLMGTGVASMITCSIEGSVLNMGYVIAGESVSSGFKLQNNSLLPIKFSMHLDSLSSTRGRGQQQLPQFLSSPSQRTEVVGTQNLNGQSVFSVAPVKGVMDPGKTQDFTVTFSPDHESLYFSDKLQVVLFEKKISHQILLKGAACQHMMFVEGGDPLDVPVESLTAIPVFDPRHREEAEELRPILVTLDYIQFDTDTPAPPATRELQVGCIRTTQPSPKKTVEFSIDSVASLQHKGFSIEPSRGSVERGQTKTISISWVPPADFDPDHPLMVSALLQLRGDVKETYKVIFVAQVLTGP

SEQ ID NO: 61096 - protein, 54 aa, Homo sapiens
  MOD_RES (1)..(1): Any amino acid
XSFTGLGWEIRMHCELFFNSFQGFFVSIIYCYCNGEIGRLLCMDKIPATASLTP

SEQ ID NO: 61097 - protein, 85 aa, Homo sapiens
MDGSRRVRATSVLPRYGPPCLFKGHLSTKSNAFCTDSSSLRLSTLQLVKNHMAVHYNKILSAKAAVDCSVPVSVSTSIKCLEVLV

SEQ ID NO: 61098 - protein, 92 aa, Homo sapiens
  MOD_RES (1)..(1): Any amino acid
XFCDTCLQEFLSEGVFKCPEDQLPLDYAKVSPHCQEEAQAQSVALGGRSCWQPVGSGPVSTKSLGMVRLHKDLPRPGAGSTSIGPAYPLHPQ

SEQ ID NO: 61099 - protein, 625 aa, Homo sapiens
VADTLQKVWAVLEMNLEQYAVSLLRLMFKSKCKSLESYPCYQDEETKIAFADYTVTYQEQPPNSWFIVFRETFLVHQDMILVPKVYTTLPICILHIVNNDTMEQVPKVFQKVVPYLYTKNKKGYTFVAEAFTGDTYVAASRWKLRLIGSSAPLPCLSRDSPCNSFAIKEIRDYYIPNDKKILFRYSVKVLTPQPATIQVRTSKPDAFIKLQVLENEETMVSSTGKGQAIIPAFHFLKSEKGLSSQSYGERHEELINLGSPDSHTISEGQKSSVTSKTTRKGKEKSSEKEKTAKEKQAPRFEPQISTVHPQQEDPNKPYWILRLVTEHNESELFEVKKDTERADEIRAMKQAWETTEPGRAIKASQARLHYLSGFIKKTSDAESPPISESQTKPKEEVETAARGVKEPNSKNSAGSESKEMTQTGSGSAVWKKWQLTKGLRDVAKSTSSESGGVSSPGKEEREQSTRKENIQTGPRTRSPTILETSPRLIRKALEFMDLSQYVRKTDTDPLLQTDELNQQQAMQKAEEIHQFRQHRTRVLSIRNIDQEERLKLKDEVLDMYKEMQDSLDEARQKIFDIREEYRNKLLEAEHLKLETLAAQEAAMKLETEKMTPAPDTQKKKKGKKK

SEQ ID NO: 61100 - protein, 169 aa, Homo sapiens
MTEEYRVPDGMVGLIIGRGGEQINKIQQDSGCKVQISPDSGGLPERSVSLTGAPESVQKAKMMLDDIVSRGRGGPPGQFHDNANGGQNGTVQEIMIPAGKAGLVIGKGGETIKQLQERAGVKMILIQDGSQNTNVDKPLRIIGDPYKVQQACEMVMDILRERDQGGFGD

SEQ ID NO: 61101 - protein, 318 aa, Homo sapiens
  MOD_RES (1)..(1): Any amino acid
XRMFPVLKISVTGLDPNAMYSLLLDFVPTDSHRWKYVNGEWVPAGKPEVSSHSCVYIHPDSPNFGAHWMKAPISFSKVKLTNKLNGGGQIMLNSLHKYEPQVHIVRVGSAHRMVTNCSFPETQFIAVTAYQNEEITALKIKYNPFAKAFLDAKERNHLRDVPEAISESQHVTYSHLNLIESSSNNLQVFSGPDSWTSLSSTPHASILSVPHTNGPINPGPSPYPCLWTISNGAGGPSGPGPEVHASTPGAFLLGNPAVTSPPSVLSTQAPTSAGVEVLGEPSLTSIAVSTWTAVASHPFAGWGGPGAGGHHSPSSLDG

SEQ ID NO: 61102 - protein, 169 aa, Homo sapiens
  MOD_RES (1)..(1): Any amino acid
XDYASWGIRSTLMVAGFVFYLGVFVVCHQLSSSLNATYRSLVAREKVFWDLAATRAVFGVQSTAAGLWALLGDPVLHADKARGQQNWCWFHITTATGFFCFENVAVHLSNLIFRTFDLFLVIHHLFAFLGFLGCLVNLQAGHYLAMTTLLLEMSTPFTCVSWMLLKKMK

SEQ ID NO: 61103 - protein, 113 aa, Homo sapiens
  MOD_RES (1)..(1): Any amino acid
XSQAEKPEPTNQGQDSLKKHLHAEIKVIGFIISGSLSIATEKRLTKLLVHSSLVGSILSALSALVGFIILSVKQATLNPASLQWNSLSDADLHSAGILPSCAHCCAAVETGLL

SEQ ID NO: 61104 - protein, 82 aa, Homo sapiens
SKHNLWSYKDTPNSRCGQKKKLVINSGNGAVEDRKPSGLNGEASKSQEMVHLVNKESSETPDQFMTADETRNLQNVDMKIGV

SEQ ID NO: 61105 - protein, 223 aa, Homo sapiens
MDLYSTPAAALDRFVARRLQPRKEFVEKARRALGALAAALRERGGRLGAAAPRVLKTVKGGSSGRGTALKGGCDSELVIFLDCFKSYVDQRARRAEILSEMRASLESWWQNPVPGLRLTFPEQSVPGALQFRLTSVDLEDWMDVSLVPAFNVLGQAGSGVKPKPQVYSTLLNSGCQGGEHAACFTELRRNFVNIRPAKLKNLILLVKHWYHQVKPLGRVSPDM

SEQ ID NO: 61106 - protein, 130 aa, Homo sapiens
PDPEGDLGMPAQPHSPTGEAQHRAEWGQAQGTGPGGAPGVEDSSRHREPLHGLCPGGARPSVCLGTSWASQAITAGGVRGPVFGEPSAPPHTSGVSLGESRSSEVDVSDLGSRNYSARTDFYCLVSKDDM

SEQ ID NO: 61107 - protein, 129 aa, Homo sapiens
  MOD_RES (1)..(1): Any amino acid
XQNTNSALRYKGKGTGKPGALSGSADGQLSVLQPNTINVLAEIANYEACLKEEVEKRKKFKIDDQRRTHNYDEFICTFISMLAQEGMLANLVEQNISVRRRQGVSIGRLHKQRKPDRRKRSRPYKAKRQ

SEQ ID NO: 61108 - protein, 301 aa, Homo sapiens
MHTLVFLSTRQVLQCQPAACQALPLLPRELFPLLFKVAFMDKKTVVLRELVHTWPFPLLSFQQLLQECAHCSRALLQERPSTESMQAVILGLTARLHTSEPGASTQPLCRKHALRVLDMTGLLDDGVEQDPGTMSMWDCTAAVARTCIAQQQGGAAEPGPAPIPVEVRVDLRVNRASYAFLREALRSSVGSPLRLCCRDLRAEDLPMRNTVALLQLLDAGCLRRVDLRFNNLGLRGLSVIIPHVARFQHLASLRLHYVHGDSRQPSVDGEDNFRYFLAQMGRFTCLRELSMGSSLLSGRLD

SEQ ID NO: 61109 - protein, 94 aa, Homo sapiens
MSMEDYDFLFKIVLIGNAGVGKTCLVRRFTQLQIWDTAGQERFRSITQSYYRSANALILTYDITCEESFRCLPEWLREIEQYASNKVITVLVGK

SEQ ID NO: 61110 - protein, 103 aa, Homo sapiens
MCGNNMSTPLPAIVPAARKATAAVIFLHGLGDTGPVRPVTLNMNVAMPSWFDIIGLSPDSQEDESGIKQAAENIKALIDQEVKNGIPSNRIILGGFSQGGALS

SEQ ID NO: 61111 - protein, 131 aa, Homo sapiens
MNELKNLQAEGLTTLGQSLRTAFDLLNLNRLVTGIDNYGQGRNPFFLEPAIIITITDGSKLTTTSGVQDELHLPLNSPLPGSELTKEPFRWDQRLFALVLRLPGTMSVESEQLTGVPLDDSAITPMCEVTG

SEQ ID NO: 61112 - protein, 50 aa, Homo sapiens
MDSSTAMNQCSCRGMEENKERAVGGVSGTSAINGRNNWFFRLLRKSDLCG

SEQ ID NO: 61113 - protein, 54 aa, Homo sapiens
MGFLKLIEIENFKSYKGRQIIGPFQRFTAIIGPNGSGCCGIYCHEEPQREDSSI

SEQ ID NO: 61114 - protein, 343 aa, Homo sapiens
MLVGQGAGPLGPAVVTAAVVLLLSGVGPAHGSEDIVVGCGGFVKSDVEINYSLIEIKLYTKHGTLKYQTDCAPNNGYFMIPLYDKGDFILKIEPPLGWSFEPTTVELHVDGVSDICTKGGDINFVFTGFSVNGKVLSKGQPLGPAGVQVSLRNTGTEAKIQSTVTQPGGKFAFFKVLPGDYEILATHPTWALKEASTTVRVTNSNANAASPLIVAGYNVSGSVRSDGEPMKGVKFLLFSSLVTKEDVLGCNVSPVPGFQPQDESLVYLCYTVSREDGSFSFYSLPSGGYTVIPFYRGERITFDVAPSRLDFTVEHDSLKIETESCCFTQAGTILAHCNLCIPS

SEQ ID NO: 61115 - protein, 101 aa, Homo sapiens
MSHEKSFLVSGDNYPPPNPGYPGGPQPPMPPYAQPPYPGAPYPQPPFQPSPYGQPGYPHGPSPYPQGGYPQGPYPQGGYPQGPYPQEGYPQGPYPQGGYPQ

SEQ ID NO: 61116 - protein, 152 aa, Homo sapiens
MVNAGAMSGSGNLMDFLDEPFPDVGTYEDFHTIDWLREKSRDTDRHRKITSKSKESIWEFIKSLLDAWSGWVVMLLIGLLAGTLAGVIDLAVDWMTDLKEGVCLSAFWYSHEQCCWTSNETTFEDRDKCPLWQKWSELLVNQSEVLSAAAAA

SEQ ID NO: 61117 - protein, 37 aa, Homo sapiens
NSSLSLHGGLSSGLRLRCKAWNVHGAQSGSVFQLLPG

SEQ ID NO: 61118 - protein, 305 aa, Homo sapiens
MAGSEPRSGTNSPPPPFSDWGRLEAAILSGWKTFWQSVSKERVARTTSREEVDEAASTLTRLPIDVQLYILSFLSPHDLCQLGSTNHYWNETVRDPILWRYFLLRDLPSWSSVDWKSLPDLEILKKPISEVTDGAFFDYMAVYRMCCPYTRRASKSSRPMYGAVTSFLHSLIIQNEPRFAMFGPGLEELNTSLVLSLMSSEELCPTAGLPQRQIDGIGSGVNFQLNNQHKFNILILYSTTRKERDRAREEHTSAVNKMFSRHNEGDDQQGSRYSVIPQIQKVCEVVDGFIYVANAEAHKSPGYRG

SEQ ID NO: 61119 - protein, 817 aa, Homo sapiens
MPAATPAPQPPPPPARPAPACPARPAPGQQGLCDHSLKYLSSRITERKLQGSWLPASRGNLEKPFLGPRGPVVPLFCPRNGLHSAHPENSPLKPRVVTVVKLGGQRPRKITLLLNRRSVQTFEQLLADISEALGSPRWKNDRVRKLFNLKGREIRSVSDFFREGDAFIAMGKEPLTLKSIQVAVEELYPNKARALTLAQHSRAPSPRLRSRLFSKALKGDHRCGETETPKSCSEVAGCKAAMRHQGKIPEELSLDDRARTQKKWGRGKWEPEPSSKPPREATLEERHARGEKHLGVEIEKTSGEIIRCEKCKRERELQQSLERERLSLGTSELDMGKGPMYDVEKLVRTRSCRRSPEANPASGEEGWKGDSHRSSPRNPTQELRRPSKSMDKKEDRGPEDQESHAQGAAKAKKDLVEVLPVTEEGLREVKKDTRPMSRSKHGGWLLREHQAGFEKLRRTRGEEKEAEKEKKPCMSGGRRMTLRDDQPAKLEKEPKTRPEENKPERPSGRKPRPMGIIAANVEKHYETGRVIGDGNFAVVKECRHRETRQAYAMKIIDKSRLKGKEDMVDSEILIIQSLSHPNIVKLHEVYETDMEIYLILEYVQGGDLFDAIIESVKFPEPDAALMIMDLCKALVHMHDKSIVHRDLKPENLLVQRNEDKSTTLKLADFGLAKHVVRPIFTVCGTPTYVAPEILSEKGYGLEVDMWAAGVILYILLCGFPPFRSPERDQDELFNIIQLGHFEFLPPYWDNISDAAKDLVSRLLVVDPKKRYTAHQVLQHPWIETAGKTNTVKRQKQVSPSSEGHFRSQHKRVVEQVS

SEQ ID NO: 61120 - protein, 116 aa, Homo sapiens
  MOD_RES (1)..(1): Any amino acid
XEWDNPERGKHDGSHEGTVYFKCRHPTGGSFIRPNKVNFGTDFLTAIKNRYVLEDGPEEDRKEQIVTIGNKPVETIGFDSIMKQQRCCGVSRGAQAWRNSTLSLTTFSFPKVVVFQ

SEQ ID NO: 61121 - protein, 160 aa, Homo sapiens
MRDEIATTVFFVTRLVKKHDKLSKQQIEDFAEKLMTILFETYRSHWHSDCPSKGQAFRCIRINNNQNKDPILERACVESNVDFSHLGLPKEMTIWVDPFEVCCRYGEKNHPFTVASFKGRWEEWELYQQISYAVSRASSDVSSGTSCDEESCSKEPRVIP

SEQ ID NO: 61122 - protein, 792 aa, Homo sapiens
MDPRVAWIQPEQKGPANALWMQIWETSQGVGRGGSGFASYFCLNSPALDTAAAAGAAGRGSGGLGPALPAASPPPPGPTAPAALPPALLTALGPAAEGARRLHKSPSLSSSSSSSSSNAESGTESPGCSSSSSSSASLGRPGGGRGGAFFNFADGAPSAPGTANGHPGPRGPAPAGSPSQHQFHPGRRKRENKASTYGLNYLLSGSRAAALSGGGGPGAQAPRPGTPWKSRAYSPGIQGLHEEIIDFYNFMSPCPEEAAMRREVVKRIETVVKDLWPTADVQIFGSFSTGLYLPTSDIDLVVFGKWERPPLQLLEQALRKHNVAEPCSIKVLDKATVPIIKLTDQETEVKVDISFNMETGVRAAEFIKNYMKKYSLLPYLILVLKQFLLQRDLNEVFTGGISSYSLILMAISFLQLHPRIDARRADENLGMLLVEFFELYGRNFNYLKTGIRIKEGGAYIAKEEIMKAMTSGYRPSMLCIEDPLLPGNDVGRSSYGAMQVKQVFDYAYIVLSHAVSPLARSYPNRDAESTLGRIIKVTQEVIDYRRWIKEKWGSKAHPSPGMDSRIKIKERIATCNGEQTQNREPESPYGQRLTLSLSSPQLLSSGSSASSVSSLSGSDVDSDTPPCTTPSVYQFSLQAPAPLMAGLPTALPMPSGKPQPTTSRTLIMTTNNQTRFTIPPPTLGVAPVPCRQAGVEGTASLKAVHHMSSPAIPSASPNPLSSPHLYHKQHNGMKLSMKGSHGHTQGGGYSSVGSGGVRPPVGNRGHHQYNRTGWRRKKHTHTRDSLPVSLSR

SEQ ID NO: 61123 - protein, 147 aa, Homo sapiens
MKDEPRSTNLFMKLDSVFIWKEPFGLVLIIAPWNYPLNLTLVLLVGALAAGSCVVLKPSEISQGTEKVLAEVLPQYLDQSCFAVVLGGPQETGQLLEHKLDYIFFTGSPRVGKIVMTAATKHLTPVTLELGGKNPCYVDDNCDPQTV

SEQ ID NO: 61124 - protein, 24 aa, Homo sapiens
MTAKTFFIIHGWTMSGIFENWLHK

SEQ ID NO: 61125 - protein, 293 aa, Homo sapiens
MNVTHSRMQICDQCGKRFLLESELLLHRQTDCERNIQCVTCGKAFKKLWSLHEHNKIVHGYAEKKFSCEICEKKFYTMAHVRKHMVAHTKDMPFTCETCGKSFKRSMSLKVHSLQHSGEKPFRCENCNERFQYKYQLRSHMSIHIGHKQFMCQWCGKDFNMKQYFDEHMKTHTGEKPYICEICGKSFTSRPNMKRHRRTHTGEKPYPCDVCGQRFRFSNMLKAHKEKCFRVSHTLAGDGVPAAPGLPPTQPQAHALPLLPGLPQTLPPPPHLPPPPPLFPTTASPGGRMNANN

SEQ ID NO: 61126 - protein, 953 aa, Homo sapiens
MFSALKYHAIDYLYENVVRKKFYRDALLLRIPSCLYQDESYHVAVTDNKFRRPWTRVSAVSVPGMTDTSVLDQWKASFFVEDFLEKKTITRMVTQINCEFEEVVPSSNPDSQIEVEEVSLYTHMDYNEVFTPVSCLEKCSALQNQNQDLFIDDKGILFVSSRKHLPTLPTLLSRLKLFLVKDPLLDFKGQIFTEANFSRECFSLQETLEAFVKEDFCMDKVNFCQEKLEDTICLNEPSSFLIEYEFLIPPSLKPEIDIPSLSELKELLNPVPEIINYVDEKEKLFERDLTNKHGIEDIGDIKFSSTEILTIQSQSEPEECSKPGELEMPLTPLFLTCQHSSVNSLRTELQTFPLSPVCKINLLTAEESANEYYMMWQLERCRSPLNPFLLTVPRIQEPHSQYSVTDLKKIFSVKEESLVINLEKAEWWKQAGLNLKMMETLEHLNTYLCHDNLSSNDTKIEIFLPTKVLQLESCLEHKSHSSPIALIDEKSTNAHLSLPQKSPSLAKEVPDLCFSDDYFSDKGAAKEEKPKNDQEPVNRIIQKKENNDHFELDCTGPSIKSPSSSIIKKASFEHGKKQENDLDLLSDFIMLRNKYKTCTSKTEVTNSDEKHDKEACSLTLQEESPIVHINKTLEEINQERGTDSVIEIQASDSQCQAFCLLEAAASPILKNLVSLCTLPTANWKFATVIFDQTRFLLKEQEKVVSDAVRQGTIDEREMTFKHAALLHLLVTIRDVLLTCSLDTALGYLSKAKDIYNSILGPYLGDIWRQLEIVQFIRGKKPETNYKIQELQCQILSWMQSQQQIKVLIIIRMDSDGEKHFLIKILNKIEGLTLTVLHSNERKDFLESEGVLRGTSSCVVVHNQYIGADFPWSNFSFVVEYNYVEDSCWTKHCKELNIPYMAFKVILPDTVLERSTLLDRFGGFLLEIQIPYVFFASEGLLNTPDILQLLESKI

SEQ ID NO: 61127 - protein, 131 aa, Homo sapiens
MRPEQSSSTGTLQSSPPSSTSCAPKSWIPVRRLQLREELDRSSCGNVLFNGYLPPPVFPVKRRNRHSLVGPQQLGGRPAPVRRSNTMPPNLGNAGLLGRMLDEKTPPSPSGQPEEPGMVRLVCGHHNWIAV

SEQ ID NO: 61128 - protein, 124 aa, Homo sapiens
MSRRSQRLTRYSQGDDDGSSSSGGSSVAGSQSTLFKDSPLRTLKRKSSNMKRLSPAPQLGPSSDAHTSYYSESLVHESWFPPRSSLEELHGDANWDPTFQKLLEAQKSPWFFPAQVRTCGCGGG

SEQ ID NO: 61129 - protein, 335 aa, Homo sapiens
MQNSHSGVNQLGGVFVNGRPLPDSTRQKIVELAHSGARPCDISRILQTHADAKVQVLDNQNVSNGCVSSINRVLRNLASEKQQMGADGMYDKLRMLNGQTGSWGTRPGWYPGTSVPGQPTQDGCQQQEGGGENTNSISSNGEDSDEAQMRLQLKRKLQRNRTSFTQEQIEALEKEFERTHYPDVFARERLAAKIDLPEARIQVWFSNRRAKWRREEKLRNQRRQASNTPSHIPISSSFSTSVYQPIPQPTTPVSSFTSGSMLGRTDTALTNTYSALPPMPSFTMANNLPMQPPVPSQTSSYSCMLPTSPSVNGRSYDTYTPPHMQTHMNSQPMGT

SEQ ID NO: 61130 - protein, 97 aa, Homo sapiens
MPPMPSAPPVHPPPDGGWGWIVVGAAFISIGFSYAFPKAVTVFFKEIQQIFHTTYSEIAWISSIMLAVMYAGGRMKHMDNRRASKAERSFTEQQNNS

SEQ ID NO: 61131 - protein, 1286 aa, Homo sapiens
MTGEVGSEVHLEINDPNVISQEEADSPSDSGQGSYETIGPLSEGDSDEEIFVSKKLKNRKVLQDSDSETEDTNASPEKTTYDSAEEENKENLYAGKNTKIKRIYKTVADSDESYMEKSLYQENLEAQVKPCLELSLQSGNSTDFTTDRKSSKKHIHDKEGTAGKAKVKSKRRLEKEERKMEKIRQLKKKETKNQEDDVEQPFNDSGCLLVDKDLFETGLEDENNSPLEDEESLESIRAAVKNKVKKHKKKEPSLESGVHSFEEGSELSKGTTRKERKAARLSKEALKQLHSETQRLIRESALNLPYHMPENKTIHDFFKRKPRPTCHGNAMALLKSSKYQSSHHKEIIDTANTTEMNSDHHSKGSEQTTGAENEVETNALPVVSKETQIITGSDESCRKDLVKNEELEIQEKQKQSDIRPSPGDSSVLQQESNFLGNNHSEECQVGGLVAFEPHALEGEGPQNPEETDEKVEEPEQQNKSSAVGPPEKVRRFTLDRLKQLGVDVSIKPRLGADEDSFVILEPETNRELEALKQRFWKHANPAAKPRAGQTVNVNVIVKDMGTDGKEELKADVVPVTLAPKKLDGASHTKPGEKLQVLKAKLQEAMKLRRFEERQKRQALFKLDNEDGFEEEEEEEEEMTDESEEDGEEKVEKEEKEEELEEEEEKEEEEEEEGNQEDSSSKMGYFPTEEKSETDENSGKQPSKLDEDDSCSLLTKESSHNSSFELIGSTIPSYQPCNRQTGRGTSFFPTAGGFRSPSPGLFRASLVSSASKSSGKLSEPSLPIEDSQDLYNASPEPKTLFLGAGDFQFCLEDDTQSQLLDADGFLNVRNHRNQYQALKPRLPLASMDENAMDANMDELLDLCTGKFTSQAEKHLPRKSDKKENMEELLNLCSGKFTSQDASTPASSELNKQEKESSMGDPMEEALALCSGSFPTDKEEEDEEEEFGDFRLVSNDNEFDSDEDEHSDSGNDLALEDHEDDDEEELLKRSEKLKRQMRLRKYLEDEAEVSGSDVGSEDEYDGEEIDEYEEDVIDEVLPSDEELQSQIKKIHMKTMLDDDKRQLRLYQERYLADGDLHSDGPGRMRKFRWKNIDDASQMDLFHRDSDDDQTEEQLDESEARWRKERIEREQWLRDMAQQGKITAEEEEEIGEDSQFMILAKKVTAKALQKNASRPMVIQESKSLLRNPFEAIRPGSAQQVKTGSLLNQPKAVLQKLAALSDHNPSAPRNSRNFVFHTLSPVKAEAAKESSKSQVKKRGPSFMTSPSPKHLKTDDSTSGLTRSIFKYLES

SEQ ID NO: 61132 - protein, 251 aa, Homo sapiens
MRVNEKYSTLPAEDRSVHIINICAIEDIGYLPSEGTLLNSLSVDPDAECKYGLYFRDGRRKVDYILVYHHKRPSGNRTLVRRVQHSDTPSGARSVKQDHPLPGKGASLDAGSGEPPMDYHEDDKRFRREEYEGNLLEAGLELERDEDMYHINETRGLLKKINSVLQKITDPIQPKVAEHRPQTMKRLSYPFSREKQHLFDLSDKDSFFDSKTRSTIVYEILKRTTCTKAKYSMGITSLLANGVYAAAYPLH

SEQ ID NO: 61133 - protein, 264 aa, Homo sapiens
  MOD_RES (1)..(1): Any amino acid
XAFLQKRKLRLSKNHRPARAKVTEHVRGTRPGRATAGPAASTRAAGSLFFDRWGNRGPAGCRGSSHLPQQLKFTTSDSCDRIKDEFQLLQAQYHSLKLECDKLASEKSEMQRHYVMYYEMSYGLNIEMHKQAEIVKRLNGICAQVLPYLSQEHQQQVLGAIERAKQVTAPELNSIIRVCMGTWAGGRGTGGPQAANVPLPRPAAAAPSPPAVPAAGPGPALDPTTRGAAAAFAAGGQRRHRPPLAVRAGFPGPPLQGRQERARW

SEQ ID NO: 61134 - protein, 505 aa, Homo sapiens
MVAERSPARSPGSWLFPGLWLLVLSGPGGLLRAQEQPSCRRAFDLYFVLDKSGSVANNWIEIYNFVQQLAERFVSPEMRLSFIVFSSQATIILPLTGDRGKISKGLEDLKRVSPVGETYIHEGLKLANEQIQKAGGLKTSSIIIALTDGKLDGLVPSYAEKEAKISRSLGASVYCVGVLDFEQAQLERIADSKEQVFPVKGGFQALKGIINSILAQSCTEILELQPSSVCVGEEFQIVLSGRGFMLGSRNGSVLCTYTVNETYTTSVKPVSVQLNSMLCPAPILNKAGETLDVSVSFNGGKSVISGSLIVTATECSNGIAAIIVILVLLLLLGIGLMWWFWPLCCKVVIKDPPPPPAPAPKEEEEEPLPTKKWPTVDASYYGGRGVGGIKRMEVRWGDKGSTEEGARLEKAKNAVVKIPEETEEPIRPRPPRPKPTHQPPQTKWYTPIKGRLDALWALLRRQYDRVSLMRPQEGDEAFPAGRARKFSSFGKKMGRCINFSRVPSQ

SEQ ID NO: 61135 - protein, 40 aa, Homo sapiens
MVLESVARIVKVQLPAYLKRLPVPESITGFARLTGWSAMA

SEQ ID NO: 61136 - protein, 158 aa, Homo sapiens
MIFLTALPLFWIMISASRGGHWGAWMPSSISAFEGTCVSIPCRFDFPDELRPAVVHGVWYFNSPYPKNYPPVVFKSRTQVVHESFQGRSRLLGDLGLRNCTLLLSNVSPELGGKYYFRGDLGGYNQYTFSEHSVLDIVNTPNIVVPPEVVAGTEVEVS

SEQ ID NO: 61137 - protein, 139 aa, Homo sapiens
SAKGQVAGPKQPGRVLELPKVGSCAEAGEGSRGSRPGPGWAGSPKTEKEKGSSWRNWPGEAKARPQEQESVQPSGPARPQSLPQGKGRSRRSRNKQEKPASSLDDVFLPKDMDGVEMDETDREVEYFKSTLGGRGGWIT

SEQ ID NO: 61138 - protein, 66 aa, Homo sapiens
MASNSSSCPTPGGGHLNGYPVPPYAFFFPPMLGGLSPPGALTTLQHQLPVSGYSTPSPATIETQSS

SEQ ID NO: 61139 - protein, 1845 aa, Homo sapiens
MSDTKVKVAVRVRPMNRRELELNTKCVVEMEGNQTVLHPPPSNTKQGERKPPKVFAFDYCFWSMDESNTTKYAGQEVVFKCLGEGILEKAFQGYNACIFAYGQTGSGKSFSMMGHAEQLGLIPRLCCALFKRISLEQNESQTFKVEVSYMEIYNEKVRDLLDPKGSRQSLKVREHKVLGPYVDGLSQLAVTSFEDIESLMSEGNKSRTVAATNMNEESSRSHAVFNIIITQTLYDLQSGNSGEKVSKVSLVDLAGSERVSKTGAAGERLKEGSNINKSLTTLGLVISSLADQAAGKGKSKFVPYRDSVLTWLLKDNLGGNSQTSMIATISPAADNYEETLSTLRYADRAKRIVNHAVVNEDPNAKVIRELREEVEKLREQLSQAEAMKAPELKEKLEESEKLIKELTVTWEEKLRKTEEIAQERQRQLESMGISLEMSGIKVGDDKCYLVNLNADPALNELLVYYLKDHTRVGADTSQDIQLFGIGIQPQHCEIDIASDGDVTLTPKENARSCVNGTLVCSTTQLWHGDRILWGNNHFFRINLPKRKRRDWLKDFEKETGPPEHDLDAASEASSEPDYNYEFAQMEVIMKTLNSNGGFPIISLSAWWSSPWWSYLKILFPLMWFQTKLLHKHWDKDPVQNVVQVLEKQYLEEKRSALEEQRLMYERELEQLRQQLSPDRQPQSSGPDRLAYSSQTAQQKVTQWAEERDELFRQSLAKLREQLVKANTLVREANFLAEEMSKLTDYQVTLQIPAANLSANRKRGAIVSEPAIQVRRKGKSTQVWTIEKLENKLIDMRDLYQEWKEKVPEAKRLYGKRGDPFYEAQENHNLIGVANVFLECLFCDVKLQYAVPIISQQGEVAGRLHVEVMRVTGAVPERVVEDDSSENSSESGSLEVVDSSGEIIHRVKKLTCRVKIKEATGLPLNLSNFVFCQYTFWDQCESTVAAPVVDPEVPSPQSKDAQYTVTFSHCKDYVVNVTEEFLEFISDGALAIEVWGHRCAGNGSSIWEVDSLHAKTRTLHDRWNEVTRRIEMWISILELNELGEYAAVELHQAKDVNTGGIFQLRQGHSRRVQVTVKPVQHSGTLPLMVEAILSVSIGCVTARSTKLQRGLDSYQRDDEDGDDMDSYQEEDLNCVRERWSDALIKRREYLDEQIKKVSNKTEKTEDDVEREAQLVEQWVGLTEERNAVLVPAPGSGIPGAPADWIPPPGMETHIPVLFLDLNADDLSANEQLVGPHASGVNSILPKEHGSQFFYLPIIKHSDDEVSATASWDSSVHDSVHLNRVTPQNERIYLIVKTTVQLSHPAAMELVLRKRIAANIYNKQSFTQSLKRRISLKNIFYSCGVTYEIVSNIPKATEEIEDRETLALLAARSENEGTSDGETYIEKYTRGVLQVENILSLERLRQAVTVKEALSTKARHIRRSLSTPNVHNVSSSRPDLSGFDEDDKGWPENQLDMSDYSSSYQDVACYGTLPRDSPRRNKEGCTSETPHALTVSPFKAFSPQPPKFFKPLMPVKEEHKKRIALEARPLLSQESMPPPQAHNPGCIVPSGSNGSSMPVEHNSKREKKIDSEEEENELEAINRKLISSQPYVPVEFADFSVYNASLENREWFSSKVDLSNSRVLEKEVSRSPTTSSITSGYFSHSASNATLSDMVVPSSDSSDQLAIQTKDADSTEHSTPSLVHDFRPSSNKELTEVEKGLVKDKIIVVPLKENSALAKGSPSSQSIPEKNSKSLCRTGSCSELDACPSKISQPARGFCPREVTVEHTTNILEDHSFTEFMGVSEGKDFDGLTDSSAGELSSRRSLPNKTGGKTVSDGLHHPSQLHSKLENDQVIIPEAAFWVLCCQ

SEQ ID NO: 61140 - protein, 84 aa, Homo sapiens
  MOD_RES (1)..(1): Any amino acid
XPSCLNEDAMRAADQFDIYSSQQSKYSHTVNHKPMVCQRQDPLNETHLQTTSGRSIEIKDELKKKKNLNRSGKKQQAFRCSSDA

SEQ ID NO: 61141 - protein, 640 aa, Homo sapiens
  MOD_RES (1)..(1): Any amino acid
XGMHERYSNVQVAGPVDRTSSKFCGSFNCRFAFQYNPSLQPRALVVFGCISKRVSHGQIKQIIRILSKALESCLKGPDTYNSQVLIEATVIALTKLQPLLNKDSPLHKALFWVAVAVLQLDEVNLYSAGTALLEQNLHTLDSLRIFNDKSPEEVFMAIRNPLEWHCKQMDHFVGLNFNSNFNFALVGHLLKGYRHPSPAIVARTVRILHTLLTLVNKHRNCDKFEVNTQSVAYLAALLTVSEEVRSRCSLKHRKSLLLTDISMENVPMDTYPIHHGDPSYRTLKETQPWSSPKGSEGYLAATYPTVGQTSPRARKSMSLDMGQPSQANTKKLLGTRKSFDHLISDTKAPKRQEMESGITTPPKMRRVAETDYEMETQRISSSQQHPHLRKVSVSESNVLLDEEVLTDPKIQALLLTVLATLVKYTTDEFDQRILYEYLAEASVVFPKVFPVVHNLLDSKINTLLSLCQDPNLLNPIHGIVQSVVYHEESPPQYQTSYLQSFGFNGLWRFAGPFSKQTQIPDYAELIVKFLDALIDTYLPGIDEETSEESLLTPTSPYPPALQSQLSITANLNLSNSMTSLATSQHSPGIDKENVELSPTTGHCNSGRTRHGSASQVQKQRSAGSFKLALLNLLTAHQNSL

SEQ ID NO: 61142 - protein, 169 aa, Homo sapiens
MLSRCRSGLLHVLGLSFLLQTRRPILLCSPRLMKPLVVFVLGGPGAGKGTQCARIVEKYGYTHLSAGELLRDERKNPDSQYGELIEKYIKEGKIVPVEITISLLKREMDQTMAANAQKNKFLIDGFPRNQDNLQGWNKTMDGKADVSFVLFFDCNNENSDLPSVNKANY

SEQ ID NO: 61143 - protein, 198 aa, Homo sapiens
MLPAATELRLQGQKDMVWKWMPLLLLLVCVATMCSAQDRTDLLNVCMDAKHHKTKPGPEDKLHDQCSPWKKNACCTASTSQELHKDTSRLYNFNWDHCGKMEPACKRHFIQDTCLYECSPNLGPWIQQVNQSWRKERFLDVPLCKEDCQRWWEDCHTSHTCKSNWHRGWDWTSGVNKCPAGALCRTFESYFPTPAALC

SEQ ID NO: 61144 - protein, 200 aa, Homo sapiens
MDDAHESPSDKGGETGESDETAAVPGDPGATDTDGIPEETDGDADVDLKEAAAEEGELESQDVSDLTTVEREDSSLLNPAAKKLKIDTKEKKEKKQKVDEDEIQKMQILVSSFSEEQLNRYEMYRRSAFPKAAIKRLIQSITGTSVSQNVVIAMSGISKVFVGEVVEEAQGERSRLCIFCSGLCSFLLPKVKIQEKQSQG

SEQ ID NO: 61145 - protein, 218 aa, Homo sapiens
  MOD_RES (1)..(1): Any amino acid
XITGQHRNGVISARTRIDVLLDTFRRKQPFTHFLAFFLNEVEVQEGFLRFQEEVLAKCSMDHGVDSSIFQNPKKLHLTIGMLVLLSEEEIQQTCEMLQQCKEEFIKLQELVDRVLERFQASGLIVKEWNSVKLHATVMNTLFRKDPNAEGRYNLYTAEGKYIFKERESFDGRNILKSFALLPRLEYNDAISAHCNLCLPGSSDSPASASQVAGITGVS

SEQ ID NO: 61146 - protein, 78 aa, Homo sapiens
MVLGAGPASPVSGSPEVAELEANLPCTCKVHFPDPNKLHCFQLTVTPASQSEMPDQDLAPQHHRDRGNMSEFIERTFN

SEQ ID NO: 61147 - protein, 534 aa, Homo sapiens
MASRCWRWWGWSAWPRTRLPPAGSTPSFCHHFSTQEKTPQICVVGSGPAGFYTAQHLLKRVEALCSQPRVLNSPALSGEGEDLGASQPLSLGPTSCHPVPQQHPQAHVDIYEKQPVPFGLVRFGVAPDHPEVKNVINTFTQTAHSGRCAFWGNVEVGRDVTVPELQEAYHAVVLSYGAEDHRALEIPGEELPGVCSARAFVGWYNGLPENQELEPDLSCDTAVILGQGNVALDVARILLTPPEHLERTDITKAALGVLRQSRVKTVWLVGRRGPLQVAFTIKELREMIQLPGARPILDPVDFLGLQDKIKEVPRPRKRLTELLLRTATEKPGPAEAARQASASRAWGLRFFRSPQQVLPSPDGRRAAGVRLAVTRLEGVDEATRAVPTGDMEDLPCGLVLSSIGYKSRPVDPSVPFDSKLGVIPNVEGRVMDVPGLYCSGWVKRGPTGVIATTMTDSFLTGQMLLQDLKAGLLPSGPRPGYAAIQALLSSRGVRPVSFSDWEKLDAEEVARGQGTGKPREKLVDPQEMLRLLGH

SEQ ID NO: 61148 - protein, 49 aa, Homo sapiens
MAAAALRFPVQVIVAPSVLSGHLLVTQVLKQRGSGTCLRLCNPDPASGH

SEQ ID NO: 61149 - protein, 128 aa, Homo sapiens
MDVYGTTKAIELLDPTASRLPTPMPWDLSNKAVPEPKGFGPKDLALPTGNLKATWHLCLREHLPTLHTRRGVCHLLLSRCQHPPCALRPHILLQILCLAGLQRYGQVPCVPLADRGGSPCAGPSCSEG

SEQ ID NO: 61150 - protein, 1030 aa, Homo sapiens
LIAVFEEQEPLHKIESPSGNPADRQSPDAFETEVAAQLAAFKPIGGEIEVTPSALKLGTPLLVRRSSDPVPGPPADTQPSASHPGGQSLKLVVPDSTQNLEDREVLNGVQTELLTSPRTKDTLSDMTRTVEISGEGGPLGIHVVPFFSSLSGRILGLFIRGIEDNSRSKREGLFHENECIVKINNVDLVDKTFAQAQDVFRQAMKSPSVLLHVLPPQNREQYEKSVIGSLNIFGNNDGVLKTKVPPPVHGKSGLKTANLTGTDSPETDASASLQQNKSPRVPRLGGKPSSPSLSPLMGFGSNKNAKKIKIDLKKGPEGLGFTVVTRDSSIHGPGPIFVKNILPKGAAIKDGRLQSGDRILEVNGRDVTGRTQEELVAMLRSTKQGETASLVIARQEGHFLPRELKGEPDCCALSLETSEQLTFEIPLNDSGSAGLGVSLKGNKSRETGTDLGIFIKSIIHGGAAFKDGRLRMNDQLIAVNGESLLGKSNHEAMETLRRSMSMEGNIRGMIQLVILRRPERPMEDPAECGAFSKPCFENCQNAVTTSRRNDNSILHPLGTCSPQDKQKGLLLPNDGWAESEVPPSPTPHSALGLGLEDYSHSSGVDSAVYFPDQHINFRSVTPARQPESINLKASKSMDLVPDESKVHSLAGQKSESPSKDFGPTLGLKKSSSLESLQTAVAEVRKNDLPFHRPRPHMVRGRGCNESFRAAIDKSYDGPEEIEADGLSDKSSHSGQGALNCESAPQGNSELEDMENKARKVKKTKEKEKKKEKGKLKVKEKKRKEENEDPERKIKKKGFGAMLRFGKKKEDKGGKAEQKGTLKHGGLREEELEKMKEERESGRPTGGSTDRIQKLRKEYYQARREGFPLYEDDEGRARPSEYDLLWVPGRGPDGNAHNLRFEGMERQYASLPRGGPADPVDYLPAAPRGLYKERELPYYPGAHPMHPPKGSYPRPTELRVADLRYPQHYPPPPAPQHKGPFRQDVPPSPPQHQRMPAYQETGRPGPRGGSPDQYPYRTQDSRQKNPMTAAV

SEQ ID NO: 61151 - protein, 119 aa, Homo sapiens
MSKSKVDNQFYSVEVGDSTFTVLKRYQNLKPIGSGAQGIVCAAYDAVLDRNVAIKKLSRPFQNQTHAKRAYRELVLMKCVNHKNIISLLNVFTPQKTLEEFQDVYLVMELMDANLCQVI

SEQ ID NO: 61152 - protein, 117 aa, Homo sapiens
CRDMFSKMATYLTGELTATSEDYKLLENMNKLTSLKYLEMKDIAINISRNLKDLNQKYAGLQPYLDQINVIEEQVAALEQAAYKLDAYSKKLGNRFYFCFDVIKTASCQHILSKHNS

SEQ ID NO: 61153 - protein, 204 aa, Homo sapiens
  MOD_RES (1)..(1): Any amino acid
XIYLAHRVAQAWELAQFIQCVSLGLKWEVGWDPGAEGEQGPSHGEELVMEELPPHQPGSPSHTSKKADVVLLCGDLNMHPEDLGCCLLKEWTGLHDAYLETRDFKGSEEGNTMVPKNCYVSQQELKPFPFGVRIDYVLYKAVSGFYISCKSFETTTGFDPHRGTPLSDHEALMATLFVRHSPPQQNPSSTHGPAERSPLMCVLK

SEQ ID NO: 61154 - protein, 150 aa, Homo sapiens
MDRMKKIKRQLSMTLRGGRGIDKTNGAPEQIGLDESGGGGGSDPGEAPTRAAPGELRSARGPLSSAPEIVHEDLKMGSDGESDQASATSSDEVQSPVRVRMRNHPPRKISTEDINKRLSLPADIRLPEGYLEKLTLNSPIFDKPLSRRLR

SEQ ID NO: 61155 - protein, 55 aa, Homo sapiens
MTMLQESFSFDDLSVDFTQKEWQLLDPSQKNLYKDVMLENYSSLVSLGYEVMKPD

SEQ ID NO: 61156 - protein, 63 aa, Homo sapiens [sequence omitted]

SEQ ID NO: 61157 - protein, 175 aa, Homo sapiens
MPYSTNKELILGIMVGTAGISLLLLWYHKVRKPGIAMKLPEFLSLGNTFNSITLQDEIHDDQGTTVIFQERQLQILEKLNELLTNMEELKEEIRFLKEAIPKLEEYIQDELGGKITVHKISPQHRARKRRLPTIQSSATSNSSEEAESEGGYITANTDTEEQSFPVPKAFNTRVE

SEQ ID NO: 61158 - protein, 105 aa, Homo sapiens
MASDEGKLFVGGLSFDTNEQSLEQVFSKYGQISEVVVVKDRETQRSRGFGFVTFENIDDAKDAMMAMNGKSVDGRQIRVDQAGKSSDNRSRGYRGGSAGGRGFFR

SEQ ID NO: 61159 - protein, 250 aa, Homo sapiens
WAPDGSMAVSGNQAGELILWQEAKAVATAQAPGHIGALIWSSAHTFFVLSADEKISEWQVKLRKGSAPGNLSLHLNRILQEDLGVLTSLDWAPDGHFLILAKADLKLLCMKPGDAPSEIWSSYTENPMILSTHKEYGIFVLQPKDPGVLSFLRQKESGEFEERLNFDINLENPSRTLISITQAKPESALMGSYGTWPNAAQKENGPQVTCGRKKQTLQKPKLQGQTHLPAGNLMPAWIVMPAWIVSQHHI

SEQ ID NO: 61160 - protein, 56 aa, Homo sapiens
  MOD_RES (1)..(1): Any amino acid
XPRWPRTCWLWGMEVSRGRRRGAPHAQTSGGCACGWRRSWRRWAPSSSSERRARRC

SEQ ID NO: 61161 - protein, 46 aa, Homo sapiens
MEEFDLVKTLHKTSSSVGSDENSLHSLGLNLNTDREDQTICNSRYS

SEQ ID NO: 61162 - protein, 173 aa, Homo sapiens
MSPPLCPLLLLAVGLRLAGTLNPSDPNTCSFWESFTTTTKESHSRPFSLLPSEPCERPWEGPHTCPQPTVVYRTVYRQVVKTDHRQRLQCCHGFYESRGFCVPLCAQECVHGRCVAPNQCQCVPGWRGDDCSSECAPGMWGPQCDKPCSCGNNSSCDPKSGVCSCPSGLQPPN

SEQ ID NO: 61163 - protein, 143 aa, Homo sapiens
MKVSTLRESSAMASPLPREMEEELVPTGSEPGDTRAKPPVKPKPRALPAKPALPAKPSLLVPVGPRPPRGPLAELPSARKMNMLAGPQPYGGSKRPLPFAPRPAVEASTGGEATQETGKEEAGKEEPPPLTPPARCAAPGGVR

SEQ ID NO: 61164 - protein, 73 aa, Homo sapiens
MKQLPAATVRLLSSSQIITSVVSVVKELIENSLDAGATSVDVKLENYGFDKIEVRDNGEGIKAVDAPVMAMKY

SEQ ID NO: 61165 - protein, 205 aa, Homo sapiens
MNTFQASVSFQDVTVEFSQEEWQHMGPVERTLYRDVMLENYSHLVSVGYCFTKPELIFTLEQGEDPWLLEKEKGFLSRNSPEDSQPDEISEKSPENQGKHLLQVLFTNKLLTTEQEISGKPHNRDINIFRARMMPCKCDIAGSACQGLSLMAPHCQYSKEKAHERNVCDKWLISIKDGRTNTQEKSFAYSKIVKTLHHKEEVIQH

SEQ ID NO: 61166 - protein, 109 aa, Homo sapiens
MEAEVDKLELMFQKAESDLDYIQYRLEYEIKTNHPDSASEKNPVTLLKELSVIKSRYQTLYARFKPVAVEQKESKSRICATVKKTMNMIQKLQKQTDLEVMLSVDSCHH

SEQ ID NO: 61167 - protein, 78 aa, Homo sapiens
MAPGRAVAGLLLLAAAGLGGVAEGPGLAFSEDVLSVFGANLSLSAAQLQHLLEQMGAASRVGVPEPGQLHFNQQSYSN

SEQ ID NO: 61168 - protein, 60 aa, Homo sapiens
EDLLVEVSRYALASHFFWGLWSILQASMSTIEFGYLDYAQSRFQFYFQQKGQLTSVHSSS

SEQ ID NO: 61169 - protein, 122 aa, Homo sapiens
MAACRALKAVLVDLSGTLHIEDAAVPGAQEALKRFVTNTTKESKQDLLERLRKLEFDISEDEIFTSLTAARSLLERKQVRPMLLVDDRALPDFKGIQTSDPNAVVMGLAPEHFHYQILNQAF

SEQ ID NO: 61170 - protein, 52 aa, Homo sapiens
  MOD_RES (1)..(1): Any amino acid
XEDVLLRAFEVLDSAKRGFLTKDELIKYMTEEGGVVITPILETGKLRWGAVK

SEQ ID NO: 61171 - protein, 286 aa, Homo sapiens
MGHPPLLPLLLLLHTCVPASWGLRCMQCKTNGDCRVEECALGQDLCRTTIVRLWEEGEELELVEKSCTHSEKTNRTLSYRTGLKITSLTEVVCGLDLCNQGNSGRAVTYSRSRYLECISCGSSDMSCERGRHQSLQCRSPEEQCLDVVTHWIQEGEEGRPKDDRHLRGCGYLPGCPGSNGFHNNDTFHFLKCCNTTKCNEGPKPKNQSYMVRGCATASMCQHAHLGDAFSMNHIDVSCCTKSGCNHPDLDVQYRSGAAPQPGPAHLSLTITLLMTARLWGGTLLWT

SEQ ID NO: 61172 - protein, 89 aa, Homo sapiens
MRGSVECTWGWGHCAPSPLLLWTLLLFAAPFGLLGEKTRQVRRLGENQGEECRGESSSQLEGGTKDWGKAFGKTISSILLGRFLLEQHH

SEQ ID NO: 61173 - protein, 108 aa, Homo sapiens
MNMSVLTLQEYEFEKQFNENEAIQWMQENWKKSFLFSALYAAFIFGGRHLMNKRAKFELRKPLVLWSLTLAVFSIFGALRTGAYMVYILMTKGLKQSVCDQGFYNGPV

SEQ ID NO: 61174 - protein, 69 aa, Homo sapiens
  MOD_RES (1)..(1): Any amino acid
XPSYPDEVRGVFAVRTGKYKAHFFTQGSAHSDTTADPACHASSSLTAHEPPLLYDLSKDPDGVSLCRPG

SEQ ID NO: 61175 - protein, 285 aa, Homo sapiens
MAPAGVSLRATILCLLAWAGLAAGDRVYIHPFHLVIHNESTCEQLAKANAGKPKDPTFIPAPIQAKTSPVDEKALQDQLVLVAAKLDTEDKLRAAMVGMLANFLGFRIYGMHSELWGVVHGATVLSPTAVFGTLASLYLGALDHTADRLQAILGVPWKDKNCTSRLDAHKVLSALQAVQGLLVAQGRADSQAQLLLSTVVGVFTAPGLHLKQPFVQGLALYTPVVLPRSLDFTELDVAAEKIDRFMQAVTGWKTGCSLMGASVDSTLAFNTYVHFQGLTFEQRRD

SEQ ID NO: 61176 - protein, 107 aa, Homo sapiens
MGVPKFYRWISERYPCLSEVVKEHQIPEFDNLYLDMNGIIHQCSHPNDDDVHFRISDDKIFTDIFHYLEVLFRIIKPRKVFFMAVDGVAPRAKMNQQRGRRFRLCLD

SEQ ID NO: 61177 - protein, 1055 aa, Homo sapiens
MELAALCRWGLLLALLPPGAASTQVCTGTDMKLRLPASPETHLDMLRHLYQGCQVVQGNLELTYLPTNASLSFLQDIQEVQGYVLIAHNQVRQVPLQRLRIVRGTQLFEDNYALAVLDNGDPLNNTTPVTGASPGGLRELQLRSLTEILKGGVLIQRNPQLCYQDTILWKDIFHKNNQLALTLIDTNRSRACHPCSPMCKGSRCWGESSEDCQSLTRTVCAGGCARCKGPLPTDCCHEQCAAGCTGPKHSDCLACLHFNHSGICELHCPALVTYNTDTFESMPNPEGRYTFGASCVTACPYNYLSTDVGSCTLVCPLHNQEVTAEDGTQRCEKCSKPCARVCYGLGMEHLREVRAVTSANIQEFAGCKKIFGSLAFLPESFDGDPASNTAPLQPEQLQVFETLEEITGYLYISAWPDSLPDLSVFQNLQVIRGRILHNGAYSLTLQGLGISWLGLRSLRELGSGLALIHHNTHLCFVHTVPWDQLFRNPHQALLHTANRPEDECVGEGLACHQLCARGHCWGPGPTQCVNCSQFLRGQECVEECRVLQGLPREYVNARHCLPCHPECQPQNGSVTCFGPEADQCVACAHYKDPPFCVARCPSGVKPDLSYMPIWKFPDEEGACQPCPINCTHSCVDLDDKGCPAEQRASPLTSIISAVVGILLVVVLGVVFGILIKRRQQKIRKYTMRRLLQETELVEPLTPSGAMPNQAQMRILKETELRKVKVLGSGAFGTVYKGIWIPDGENVKIPVAIKVLRENTSPKANKEILDEAYVMAGVGSPYVSRLLGICLTSTVQLVTQLMPYGCLLDHVRENRGRLGSQDLLNWCMQIAKGMSYLEDVRLVHRDLAARNVLVKSPNHVKITDFGLARLLDIDETEYHADGGKVPIKWMALESILRRRFTHQSDVWSYGVTVWELMTFGAKPYDGIPAREIPDLLEKGERLPQPPICTIDVYMIMVKCWMIDSECRPRFRELVSEFSRMARDPQRFVVIQNEDLGPASPLDSTFYRSLLEDDDMGDLVDAEEYLVPQQGFFCPDPAPGAGGMVHHRHRSSSTRNM

SEQ ID NO: 61178 - protein, 123 aa, Homo sapiens
MRVVVIGAGVIGLSTALCIHERYHSVLQPLDIKVYADRFTPLTTTDVAAGLWQPYLSDPNNPQEADWSQQTFDYLLSHVHSPNAENLGLFLISGYNLFHEAIPLWLVPHKPNSGGKELSTVAD

SEQ ID NO: 61179 - protein, 266 aa, Homo sapiens
  MOD_RES (1)..(1): Any amino acid
XGSGTSNVGTSGDHDNSFMKTLRSKMGKWCCHCFPCCRGSGKSNVGTWGDYDDSAFMEPRYHVRREDLDKLHRAAWWGKVPRKDLIVMLRDTDMNKRDKQKRTALHLASANGNSEVVQLLLDRRCQLNVLDNKKRTALIKAVQCQEDECVLMLLEHGADGNIQDEYGNTALHYAIYNEDKLMAKALLLYGADIESKNKCGLTPLLLGVHEQKQEVVKFLIKKKANLNALDRYGRICELLSDYKEKQMLKISSENSNPENVSRTRNK

SEQ ID NO: 61180 - protein, 512 aa, Homo sapiens
  MOD_RES (1)..(1): Any amino acid
XNSNTGEKFQAVMLEGHESYDTENFYFREIRKNLQEVDFQWKDGEINYKEGPMTHKNNLTGQRVRHSQGDVENKHMENQLILRFQSGLGELQKFQTAEKIYGCNQIERTVNNCFLASPLQRIFPGVQTNISRKYGNDFLQLSLPTQDEKTHIREKPYIGNECGKAFRVSSSLINHQMIHTTEKPYRCNESGKAFHRGSLLTVHQIVHTRGKPYQCDVCGRIFRQNSDLVNHRRSHTGDKPYICNECGKSFSKSSHLAVHQRIHTGEKPYKCNRCGKCFSQSSSLATHQTVHTGDKPYKCNECGKTFKRNSSLTAHHIIHAGKKPYTCDVCGKVFYQNSQLVRHQIIHTGETPYKCNECGKVFRYRSGLARHWSIHTGEKPYKCNECGKAFRVRSILLNHQMMHTGEKPYKCNECGKAFIERSNLVYHQRNHTGEKPYKCMECGKAFGRRSCLTKHQRIHSSEKPYKCNECGKSYISRSGLTKHQIKHAGENLTTKLNVERPLDVVLTSGIPK

SEQ ID NO: 61181 - protein, 396 aa, Homo sapiens
MPSGLCRPYVQFEGPPSSFISPQLQHIFERVRQSADFMPRWQMLRVLEEELGRDWQAKVASLEEVPFAAASIGQVHQGLLRDGTEVAVKIQYPGIAQSIQSDVQNLLAVLKMSAALPAGLFAEQSLQALQQELAWECDYRREAACAQNFRQLLANDPFFRVPAVVKELCTTRVLGMELAGGVPLDQCQGLSQDLRNQICFQLLTLCLRELFEFRFMQTDPNWANFLYDASSHQVTLLDFGASREFGTEFTDHYIEVVKAAADGDRDCVLQKSRDLKFLTGFETKAFSDAHVEAVMILGEPFATQGPYDFGSGETARRIQDLIPVLLRHRLCPPPEETYALHRKLAGAFLACAHLRAHIACRDLFQDTYHRYWASRQPDAATAGSLPTKGDSWVDPS

SEQ ID NO: 61182 - protein, 38 aa, Homo sapiens
MNIFRLTGDLSHLAAIVILLLKIWKTRSCAGLACLLGT

SEQ ID NO: 61183 - protein, 36 aa, Homo sapiens
MKVGYERDFLRYLQSLLAEVERRIRRGHARLALSQN

SEQ ID NO: 61184 - protein, 279 aa, Homo sapiens
MAAAFEASGALAAVATAMPAEHVAVQVPAPEPTPGPVRILRTAQDLSSPRTRTGDVLLAEPADFESLLLSRPVLEGLRAAGFERPSPVQLKAIPLGRCGLDLIVQAKSGTGKTCVFSTIALDSLVLENLSTQILILAPTREIAVQIHSVITAIGIKMEGLECHVFIGGTPLSQDKTRLKKCHIAVGSPGRIKQLIELDYLNPGSIRLFILDEADKLLEEGSFQEQINWIYSSLPASKQMLAVSATYPEFLANALTKYMRDPTFVRLNSSDPSLIGVYSF

SEQ ID NO: 61185 - protein, 21 aa, Homo sapiens
NFKLIYRYAFDFARFYMMLES

SEQ ID NO: 61186 - protein, 194 aa, Homo sapiens
MFGCLVAGRLVQTAAQQVAEDKFVFDLPDYESINHVVVFMLGTIPFPEGMGGSVYFSYPDSNGMPVWQLLGFVTNGKPSAIFKISGLKSGEGSQHPFGAMNIVRTPSVAQIGISVELLDSMAQQTPVGNAAVSSVDSFTQFTQKMLDNFYNFASSFAVSQAQMTPSPSEMFIPANVVLKWYEAFSVSNIKAFYN

SEQ ID NO: 61187 - protein, 74 aa, Homo sapiens
  MOD_RES (1)..(1): Any amino acid
XRNLSLKLTKDVDQEARCSHISRMPNSPSADWPLQGVEENGGIDSLPFRLMLQDCTAVKTLLLKMKRVLQEFSS

SEQ ID NO: 61188 - protein, 160 aa, Homo sapiens
MKVLLLKDAKEDDCGQDPYIRELGLYGLEATLIPVLSFEFLSLPSFSEKLSHPEDYGGLIFTSPRAVEAAELCLEQNNKTEVWERSLKEKWNAKSVYVVGNATASLVSKIGLDTEGETCGNAEKLAEYICSRESSALPLLFPCGNLKREILPKALKDKEA

SEQ ID NO: 61189 - protein, 230 aa, Homo sapiens
MSSEQKSQHCKPEEGVEAQEEALGLVGAQAPTTEEQEAAVSSSSPLVPGTLEEVPAAESAGPPQSPQGASALPTTISFTCWRQPNEGSSSQEEEGPSTSPDAESLFREALSNKVDELAHFLLRKYRAKELVTKAEMLERVIKNYKRCFPVIFGKASESLKMIFGIDVKEVDPASNTYTLVTCLGLSYDGLLGNNQIFPKTGLLIIVLGTIAMEGDSASEEEIWEELGVMG

SEQ ID NO: 61190 - protein, 1292 aa, Homo sapiens
MSRRKQAKPRSVKVEEGEASDFSLAWDSSVTAAGGLEGEPECDQKTSRALEDRNSVTSQEERNEDDEDMEDESIYTCDHCQQDFESLADLTDHRAHRCPGDGDDDPQLSWVASSPSSKDVASPTQMIGDGCDLGLGEEEGGTGLPYPCQFCDKSFIRLSYLKRHEQIHSDKLPFKCTYCSRLFKHKRSRDRHIKLHTGDKKYHCHECEAAFSRSDHLKIHLKTHSSSKPFKCTVCKRGFSSTSSLQSHMQAHKKNKEHLAKSEKEAKKDDFMCDYCEDTFSQTEELEKHVLTRHPQLSEKADLQCIHCPEVFVDENTLLAHIHQAHANQKHKCPMCPEQFSSVEGVYCHLDSHRQPDSSNHSVSPDPVLGSVASMSSATPDSSASVERGSTPDSTLKPLRGQKKMRDDGQGWTKVVYSCPYCSKRDFNSLAVLEIHLKTIHADKPQQSHTCQICLDSMPTLYNLNEHVRKLHKNHAYPVMQFGNISAFHCNYCPEMFADINSLQEHIRVSHCGPNANPSDGNNAFFCNQCSMGFLTESSLTEHIQQAHCSVGSAKLESPVVQPTQSFMEVYSCPYCTNSPIFGSILKLTKHIKENHKNIPLAHSKKSKAEQSPVSSDVEVSSPKRQRLSASANSISNGEYPCNQCDLKFSNFESFQTHLKLHLELLLRKQACPQCKEDFDSQESLLQHLTVHYMTTSTHYVCESCDKQFSSVDDLQKHLLDMHTFVLYHCTLCQEVFDSKVSIQVHLAVKHSNEKKMYRCTACNWDFRKEADLQVHVKHSHLGNPAKAHKCIFCGETFSTEVELQCHITTHSKKYNCKFCSKAFHAIILLEKHLREKHCVFDAATENGTANGVPPMATKKAEPADLQGMLLKNPEAPNSHEASEDDVDASEPMYGCDICGAAYTMEVLLQNHRLRDHNIRPGEDDGSRKKAEFIKGSHKCNVCSRTFFSENGLREHLQTHRGPAKHYMCPICGERFPSLLTLTEHKVTHSKSLDTGTCRICKMPLQSEEEFIEHCQMHPDLRNSLTGFRCVVCMQTVTSTLELKIHGTFHMQKLAGSSAASSPNGQGLQKLYKCALCLKEFRSKQDLVKLDVNGLPYGLCAGCMARSANGQVGGLAPPEPADRPCAGLRCPECSVKFESAEDLESHMQVDHRDLTPETSGPRKGTQTSPVPRKKTYQCIKCQMTFENEREIQIHVANHMIEEGINHECKLCNQMFDSPAKLLCHLIEHSFEGMGGTFKCPVCFTVFVQANKLQQHIFAVHGQEDKIYDCSQCPQKFFFQTELQNHTMSQHAQ

SEQ ID NO: 61191 - protein, 266 aa, Homo sapiens
MERSPDVSPGPSRSFKEELLCAVCYDPFRDAVTLRCGHNFCRGCVSRCWEVQVSPTCPVCKDRASPADLRTNHTLNNLVEKLLREEAEGARWTSYRFSRVCRLHRGQLSLFCLEDKELLCCSCQADPRHQGHRVQPVKDTAHDFRVEAAWLEGRIRQEFDKLREFLRVEEQAILDAMAEETRQKQLLADEKMKQLTEETEVLAHEIERLQMEMKEDDVSFLMTLLHHGARASPARHAYRCLQVPGLPAVPRLEEDACICGICTLQL

SEQ ID NO: 61192 - protein, 151 aa, Homo sapiens
MLKSNDCLFSLENLFFEKPDEVEKLFKISDNIHGSAYSNDNELDSHIGSVKIVQTEMNKGKSRNYSNSKQKFQYSANVFTANNAFSASEIGEGMFKAPSFSVAFQPHDIQEVTENGLGSLKAVTEIPAKFRSIFKEFPYFNYIQSKAFDDL

SEQ ID NO: 61193 - protein, 163 aa, Homo sapiens
MIQEEEWDRDLLLDPAWEKQQRKTFTAWCNSHLRKAGTQIENIEEDFRNGLKLMLLLEVISGERLPKPDRGKMRFHKIANVNKALDYIASKGVKLVSIGAEEIVDGNVKMTLGMIWTIILRFAIQDISVEETSAKEGLLLWCQRKTAPYRNVNIQNFHTRMTP

SEQ ID NO: 61194 - protein, 191 aa, Homo sapiens
MNNEEDLLQEDSTRDEGNETEANSMNTLRRTRKKVTKPYVCSTEVGETDMSNSNDCMRDSSQILTPPQLSSRMKHIRQAMAKNRLQFVRFEATDLHGVSRSKTIPAHFFQEKVSHGVCMPRGYLEVIPNPKDNEMNNIRATCFNSDIVLMPELSTFRVLPWADRTARVICDTFTVTAPEKLMNFKVIMSSR

SEQ ID NO: 61195 - protein, 211 aa, Homo sapiens
  MOD_RES (1)..(1): Any amino acid
XSCRVAGWVAKLKSFSAKIVQLLKEWTEAFPYDFQDEKAMAELKAITHRVTQCDEENGTVKKAIAQMTQSLLLSLAARSQLQELREKLRPPAVDKGPILKTKPPAAQKDILGVCCDPLVLAQQLTHIELDRVSSIYPEDLMQIVSHMDSLDNHRCRGDLTKTYSLEAYDNWFNCLSMLVATEVCRVVKKKHRTRMLEFFIDVARECFNIGN

SEQ ID NO: 61196 - protein, 227 aa, Homo sapiens
MPGHPESRKTRRILTMLPRLVLNSFPQVILLPNPPKVLRLQGLLAFSDVVIEFSPEEWACLDPAQRNLYRDVMFENYRNLVSLAILSYSIQDLLPEQDMKDLCQKVTLTRHRSWGLDNLHLVKDWRTVNEGKGQKEYCNRLTQCSSTKSKIFQCIECGRNFSWRSILTEHKRIHTGEKPYKCEECGKVFNRCSNLTKHKRIHTGEKPYKCDECGKVFNWWSQLTNHK

SEQ ID NO: 61197 - protein, 1115 aa, Homo sapiens
MDALIIPVTMEVPCDSRGQRMWWAFLASSMVTFFGGLFIILLWRTLKYLWTVCCHCGGKTKVVLVFALSIGALVIYFIDSSNPIESCQNFYKDFTLQIDMAFNVFFLLYFGLRFIAANDKLWFWLEVNSVVDFFTVPPVFVSVYLNRSWLGLRFLRALRLIQFSEILQFLNILKTSNSIKLVNLLSIFISTWLTAAGFIHLVENSGDPWENFQNNQALTYWECVYLLMVTMSTVGYGDVYAKTTLGRLFMVFFILGGLAMFASYVPEIIELIGNRKKYGGSYSAVSGRKHIVVCGHITLESVSNFLKDFLHKDRDDVNVEIVFLHNISPNLELEALFKRHFTQVEFYQGSVLNPHDLARVKIESADACLILANKYCADPDAEDASNIMRVISIKNYHPKIRIITQMLQYHNKAHLLNIPSWNWKEGDDAICLAELKLGFIAQSCLAQGLSTMLANLFSMRSFIKIEEDTWQKYYLEGVSNEMYTEYLSSAFVGLSFPTVCELCFVKLKLLMIAIEYKSANRESRILINPGNHLKIQEGTLGFFIASDAKEVKRAFFYCKACHDDITDPKRIKKCGCKRLIYFEDEQPSTLSPKKKQRNGGMRNSPNTSPKLMRHDPLLIPGNDQIDNMDSNVKKYDSTGMFHWCAPKEIEKVILTRSEAAMTVLSGHVVVCIFGDVSSALIGLRNLVMPLRASNFHYHELKHIVFVGSIEYLKREWETLHNFPKVSILPGTPLSRADLRAVNINLCDMCVILSANQNNIDDTSLQDKECILASLNIKSMQFDDSIGVLQANSQGFTPPGMDRSSPDNSPVHGMLRQPSITTGVNIPIITELVNDTNVQFLDQDDDDDPDTELYLTQPFACGTAFAVSVLDSLMSATYFNDNILTLIRTLVTGGATPELEALIAEENALRGGYSTPQTLANRDRCRVAQLALLDGPFADLGDGGCYGDLFCKALKTYNMLCFGIYRLRDAHLSTPSQCTKRYVITNPPYEFELVPTDLIFCLMQFDHNAGQSRASLSHSSHSSQSSSKKSSSVHSIPSTANRQNRPKSRESRDKQNATRMNRMGQAEKKWFTDEPDNAYPRNIQIKPMSTHMANQINQYKSTSSLIPPIREVEDEC

SEQ ID NO: 61198 - protein, 144 aa, Homo sapiens
MASKPEKRVASSVFITLAPPRRDVAVAEEVRQAVCEARRGRPWEAPAPMKTPEAGLAGRPSPWTTPGRAAATVPAAPMQLFNGGCPPPPPVLDGEDVLPDLDLLPPPPPPPPVLLPSEEEAPAPMGASLIADLEQLHLSPPPPP

SEQ ID NO: 61199 - protein, 180 aa, Homo sapiens
MRKRQTWSIHIVALGNEGDTFHQDNRPSGLIRTYLGRSPLVSGDESSLLLNAASTVARPVFTEYQASAFGNVKLVVHDCPVWDIFDSDWYTSRNLIGGADIIVIKYNVNDKFSFHEVKDNYIPVIKRALNSVPVIIAAVGTRQNEELPCTCPLCTSDRGSCVSTTEGIQLAKELGATYLE

SEQ ID NO: 61200 - protein, 469 aa, Homo sapiens
MAFGKSHRDPYATSVGHLIEKATFAGVQTEDWGQFMHICDIINTTQDGPKDAVKALKKRISKNYNHKEIQLTLSNCGPSFQSLIVKKEFVKENLVKLLNPRYNLPLDIQNRILNFIKTWSQGFPGGVDVSEVKEVYLDLVKKGVQFPPSEAEAETARQETAQISSNPPTSVPTAPALSSVIAPKNSTVTLVPEQIGKLHSELDMVKMNVRVMSAILMENTPGSENHEDIELLQKLYKTGREMQERIMDLLVVVENEDVTVELIQVNEDLNNAILGYERFTRNQQRILEQNKNQKEATNTTSEPSAPSQDLLDLSPSPRMPRATLGELNTMNNQLSGLNFSLPSSDVTNNLKPSLHPQMNLLALENTEIPPFAQRTSQNLTSSHAYDNFLEHSNSVFLQPVSLQTIAAAPSNQSLPPLPSNHPAMTKSDLQPPNYYEVMEFDPLAPAVTTEAIYEEIDAHQHKGAQNDGD

SEQ ID NO: 61201 - protein, 204 aa, Homo sapiens
MWRCGGRQGLCVLRRLSGGHAHHRAWRWNSNRACERALQYKLGDKIHGFTVNQVTSVPELFLTAVKLTHDDTGARYLHLAREDTNNLFSVQFRTTPMDSTGVPHILEHTVLCGSQKYPCRDPFFKMLNRSLSTFMNAFTVIILCIHFPHKIPRTFRISSRCIWMPPFSHVYASWISGRKDGGWNMRIRATPRRPWSLKESSLMR

SEQ ID NO: 61202 - protein, 26 aa, Homo sapiens
MEVPNVKDFQWKRLAPLPSRRVYCSL

SEQ ID NO: 61203 - protein, 261 aa, Homo sapiens
MAQNLKDLAGRLPAGPRGMGTALKLLLGAGAVAYGVRESVFTVEGGHRAIFFNRIGGVQQDTILAEGLHFSGCCENLQQHTNCCFPEGQENLSLSVVVERSRPKNAWIPWFQYPIIYDIRARPRKISSPTGSKDLQMVNISLRVLSRPNAQELPSMYQRLGLDYEERVLPSIVNEVLKSVVAKFNASQLITQRAQVSLLIRRELTERAKDFSLILDDVAITELSFSREYTAAVEAKQVAQQEAQRAQFLVEKAKQEQRQKI

SEQ ID NO: 61204 - protein, 137 aa, Homo sapiens
  MOD_RES (1)..(1): Any amino acid
XGPIWLNEVKCKGNESSLWDCPARRWGHSECGHKEDAAVNCTDISVQKTPQKATTGRSSRQSSFIAVGILGVVLLAIFVALFFLTKKRRQRQRLAENSHESADFSAAELISVSKFLPISGMEKEAILSHTEKENGNL

SEQ ID NO: 61205 - protein, 799 aa, Homo sapiens
  MOD_RES (1)..(1): Any amino acid
XDEGHRMKNHHCKLTQVLNTHYVAPRRLLLTGTPLQNKLPELWALLNFLLPTIFKSCSTFEQWFNAPFAMTGEKVDLNEEETILIIRRLHKVLRPFLLRRLKKEVEAQLPEKVEYVIKCDMSALQRVLYRHMQAKGVLLTDGSEKDKKGKGGTKTLMNTIMQLRKICNHPYMFQHIEESFSEHLGFTGGIVQGLDLYRASGKFELLDRILPKLRATNHKVLLFCQMTSLMTIMEDYFAYRGFKYLRLDGTTKAEDRGMLLKTFNEPGSEYFIFLLSTRAGGLGLNLQSADTVIIFDSDWNPHQDLQAQDRAHRIGQQNEVRVLRLCTVNSVEEKILAAAKYKLNVDQKVIQAGMFDQKSSSHERRAFLQAILEHEEQDESRHCSTGSGSASFAHTAPPPAGVNPDLEEPPLKEEDEVPDDETVNQMIARHEEEFDLFMRMDLDRRREEARNPKRKPRLMEEDELPSWIIKDDAEVERLTCEEEEEKMFGRGSRHRKEVDYSDSLTEKQWLKKITGKDIHDTASSVARGLQFQRGLQFCTRASKAIEEGTLEEIEEEVRQKKSSRKRKRDSDAGSSTPTTSTRSRDKDDESKKQKKRGRPPAEKLSPNPPNLTKKMKKIVDAVIKYKDSSGRQLSEVFIQLPSRKELPEYYELIRKPVDFKKIKERIRNHKYRSLNDLEKDVMLLCQNAQTFNLEGSLIYEDSIVLQSVFTSVRQKIEKEDDSEGEESEEEEEGEEEGSESESRSVKVKIKLGRKEKAQDRLKGGRRRPSRGSRAKPVVSDDDSEEEQEEDRSGSGSEED

SEQ ID NO: 61206 - protein, 139 aa, Homo sapiens
MPSERCLSIQEMLTGQRLCHSESHNDSVLAALNQQRSDGILCDITLIAEEQKFHAHKAVLAACSDYFRAMFSLCMVESGADEVNLHGVTSLGLKQALEFAYTGQILLEPGVIQDVLAAGSHLQLLELLNLCSHYLIQVE

SEQ ID NO: 61207 - protein, 157 aa, Homo sapiens
MKNHLLFWGVLAVFIKAVHVKGSRDSSASASRVAGITAQEDERIVLVDNKCKCARITSRIIRSSEDPNEDIVERNIRIIVPLNNRENISDPTSPLRTRFVYHLSDLCKKCDPTEVELDNQIVTATQSNICDEDSATETCYTYDRNKCYTAVVPLVYG

SEQ ID NO: 61208 - protein, 876 aa, Homo sapiens
RFRKGNFGTRDAETDGPEKGDQKGKASPFEEDQNRDLKQGDDDDSKINGRGLPNGMDADCKDFNRTPGSRQASPTEVVERLGPNTNPSEGLGPLPNPTANKPLVEEFSNPETQNLDAMEQVGLESLQFDYPGNQVPMDSSGATVGLFDYNSQQQLFQRTNALTVQQLTAAQQQQYALAAAQQPHIAGVFSAGLAPAAFVPNPYIISAAPPGTDPYTAAGLAAAATLAGPAVVPPQYYGVPWGVYPANLFQQQAAAAANNTASQQAASQAQPGQQQVLRAGAGQRPLTPNQGQQGQQAESLAAAAAANPTLAFGQGLATGMPGYQVLAPTAYYDQTGALVVGPGARTGLGAPVRLMAPTPVLISSAAAQAAAAAAAGGTASSLTGSTNGLFRPIGTQPPQQQQQQPSTNLQSNSFYGSSSLTNSSQSSSLFSHGPGQPGSTSLGFGSGNSLGAAIGSALSGFGSSGGLTNGSGRYISAAPGAEAKYRSASSTSSLFSSSSQLFPPSRLRYNRSDIMPSGRSRLLEDFRNNRFPNLQLRDLIGHIVEFSQDQHGSRFIQQKLERATPAERQMVFNEILQAAYQLMTDVFGNYVIQKFFEFGSLDQKLALATRIRGHVLPLALQMYGCRVIQKALESISSDQQSEMVKELDGHVLKCVKDQNGNHVVQKCIECVQPQSLQFIIDAFKGQVFVLSTHPYGCRVIQRILEHCTAEQTLPILEELHQHTEQLVQDQYGNYVIQHVLEHGRPEDKSKIVSEIRGKVLALSQHKFASNVVEKCVTHASRAERALLIDEVCCQNDGPHSALYTMMKDQYANYVVQKMIDMAEPAQRKIIMHKIRPHITTLRKYTYGKHILAKLEKYYLKNSPDLGPIGGPPNGML

SEQ ID NO: 61209 - protein, 222 aa, Homo sapiens
MTGAWLGLYRGGIAWESDLQFNAHPLCMVIGLIFLQGNALLVYRVFRNEAKRTTKVLHGLLHIFALVIALVGLVAVFDYHRKKGYADLYSLHSWCGILVFVLYFVQWLVGFSFFLFPGASFSLRSRYRPQHIFFGATIFLLSVGTALLGLKEALLFNLGGKYSAFEPEGVLANVLGLLLACFGGAVLYILTRADWKRPSQAEEQALSMDFKTLTEGDSPGSQ

SEQ ID NO: 61210 - protein, 7 aa, Homo sapiens
MKIVRKS

SEQ ID NO: 61211 - protein, 449 aa, Homo sapiens
MRLLAKIICLMLWAICVAEDCNELPPRRNTEILTGSWSDQTYPEGTQAIYKCRPGYRSLGNVIMVCRKGEWVALNPLRKCQKRPCGHPGDTPFGTFTLTGGNVFEYGVKAVYTCNEGYQLLGEINYRECDTDGWTNDIPICEVVKCLPVTAPENGKIVSSAMEPDREYHFGQAVRFVCNSGYKIEGDEEMHCSDDGFWSKEKPKCVEISCKSPDVINGSPISQKIIYKENERFQYKCNMGYEYSERGDAVCTESGWRPLPSCEEKSCDNPYIPNGDYSPLRIKHRTGDEITYQCRNGFYPATRGNTAKCTSTGWIPAPRCTLKPCDYPDIKHGGLYHENMRRPYFPVAVGKYYSYYCDEHFETPSGSYWDHIHCTQDGWSPAVPCLRKCYFPYLENGYNQNHGRKFVQGKSIDVACHPGYALPKAQTTVTCMENGWSPTPRCIRVSFTL

SEQ ID NO: 61212 - protein, 263 aa, Homo sapiens
MASRLLLNNGAKMPILGLGTWKSPPGQVTEAVKVAIDVGYRHIDCAHVYQNENEVGVAIQEKLREQVVKREELFIVSKLWCTYHEKGLVKGACQKTLSDLKLDYLDLYLIHWPTGFKPGKEFFPLDESGNVVPSDTNILDTWAAMEELVDEGLVKAIGISNFNHLQVEMILNKPGLKYKPAVNQIECHPYLTQEKLIQYCQSKGIVVTAYSPLGSPDRPWAKPEDPSLLEDPRIKAIAAKHNKTTAQVQPLQVLLTVHNCLHS

SEQ ID NO: 61213 - protein, 161 aa, Homo sapiens
MREFGGMRAGHANICPSFQGSVTFRDVAIDFSQEEWKWLQPAQRDLYRCVMLENYGHLVSLGLSISKPDVVSLLEQGKEPWLGKREVKRDLFSVSESSGEIKDFSPKNVIYDDSSQYLIMERILSQGPVYSSFKGGWKCKDHTEMLQENQGCIRKVTVSHQ

SEQ ID NO: 61214 - protein, 58 aa, Homo sapiens
MLNNLTDCEDGDGGANPGDGNPKESSPFINSTDTEKGKEYDGKNMALFEPPSTDTLPP

SEQ ID NO: 61215 - protein, 623 aa, Homo sapiens
MSAPSLRARAAGLGLLLCAVLGRAGRSDSGGRGELGQPSGVAAERPCPTTCRCLGDLLDCSRKRLARLPEPLPSWVARLDLSHNRLSFIKASSMSHLQSLREVKLNNNELETIPNLGPVSANITLLSLAGNRIVEILPEHLKEFQSLETLDLSSNNISELQTAFPALQLKYLYLNSNRVTSMEPGYFDNLANTLLVLKLNRNRISAIPPKMFKLPQLQHLELNRNKIKNVDGLTFQGLGALKSLKMQRNGVTKLMDGAFWGLSNMEILQLDHNNLTEITKGWLYGLLMLQELHLSQNAINRISPDAWEFCQKLSELDLTFNHLSRLDDSSFLGLSLLNTLHIGNNRVSYIADCAFRGLSSLKTLDLKNNEISWTIEDMNGAFSGLDKLRRLILQGNRIRSITKKAFTGLDALEHLDLSDNAIMSLQGNAFSQMKKLQQLHLNTSSLLCDCQLKWLPQWVAENNFQSFVNASCAHPQLLKGRSIFAVSPDGFVCDDFPKPQITVQPETQSAIKGSNLSFICSAASSSDSPMTFAWKKDNELLHDAEMENYAHLRAQGGEVMEYTTILRLREVEFASEGKYQCVISNHFGSSYSVKAKLTVNIPHLTLPFPTFHSTKLRFLVICI

SEQ ID NO: 61216 - protein, 137 aa, Homo sapiens
MKALIVLGLVLLSVTVQGKVFERCELARTLKRLGMDGYRGISLANWMCLAKWESGYNTRATNYNAGDRSTDYGIFQINSRYWCNDGKTPGAVNACHLSCSGWHGEIVVKTEMSVSMFKVVECNSRIFLLQLILSLSH

SEQ ID NO: 61217 - protein, 9 aa, Homo sapiens
MNMVKRIMG

SEQ ID NO: 61218 - protein, 113 aa, Homo sapiens
MIWEYNVVIIVMACREFEMGRKKCERYWPLYGEDPITFAPFKISCEDEQARTDYFIRTLLLEFQNESRRLYQFHYVNWPDHDVPSSFDSILDMISLMRKYQEHEDVPICIHCS

SEQ ID NO: 61219 - protein, 37 aa, Homo sapiens
  MOD_RES (1)..(1): Any amino acid
XVSHSVLDAFRAHCPRLRTYTLKLTREPHPWRPTLVA

SEQ ID NO: 61220 - protein, 70 aa, Homo sapiens
  MOD_RES (1)..(1): Any amino acid
XLPQTHENREHLVMMEKILGPIPSHMIHRTRKQKYFYKGGLVWDENSSDGRYVKENCKPLKNISSTEEWI

SEQ ID NO: 61221 - protein, 304 aa, Homo sapiens
MSLRRHIGNPEYLMKRIPQNPRYQHIKSRLDTGNSMTKYTEKLEEIKKNYRYKKDELFKRLKVTTFAQLIIQVASLSDQTLEVTAEEIQRLEDNDSAASDPDAETTARTNGKGNPGEQSPSPEQFINNAGAGDSSRSTLQSVISGVGELDLDKGPVKKAEPHTKDKPYPDCPFLLLDVRDRDSYQQCHIVGAYSYPIATLSRTMNPYSNDILEYKNAHGKIIILYDDDERLASQAATTMCERGFENLFMLSGGEQGRLNQANSSGRESKVPGARSAQNLPGGGPASHSNPRSLSSGHLQGKPWK

SEQ ID NO: 61222 - protein, 1873 aa, Homo sapiens
MLIMCTILTNCVFMTMSNPPDWTKNVEYTFTGIYTFESLIKILARGFCLEDFTFLRDPWNWLDFTVITFAYVTEFVDLGNVSALRTFRVLRALKTISVIPGLKTIVGALIQSVKKLSDVMILTVFCLSVFALIGLQLFMGNLRNKCLQWPPDNSSFEINITSFFNNSLDGNGTTFNRTVSIFNWDEYIEDKSHFYFLEGQNDALLCGNSSDAGQCPEGYICVKAGRNPNYGYTSFDTFSWAFLSLFRLMTQDFWENLYQLTLRAAGKTYMIFFVLVIFLGSFYLINLILAVVAMAYEEQNQATLEEAEQKEAEFQQMLEQLKKQQEEAQAAAAAASAESRDFSGAGGIGVFSESSSVASKLSSKSEKELKNRRKKKKQKEQSGEEEKNDRVRKSESEDSIRRKGFRFSLEGSRLTYEKRFSSPHQSLLSIRGSLFSPRRNSRASLFSFRGRAKDIGSENDFADDEHSTFEDNDSRRDSLFVPHRHGERRHSNVSQASRASRVLPILPMNGKMHSAVDCNGVVSLVGGPSTLTSAGQLLPEGTTTETEIRKRRSSSYHVSMDLLEDPTSRQRAMSIASILTNTMEELEESRQKCPPCWYKFANMCLIWDCCKPWLKVKHLVNLVVMDPFVDLAITICIVLNTLFMAMEHYPMTEQFSSVLSVGNLVFTGIFTAEMFLKIIAMDPYYYFQEGWNIFDGFIVSLSLMELGLANVEGLSVLRSFRLLRVFKLAKSWPTLNMLIKIIGNSVGALGNLTLVLAIIVFIFAVVGMQLFGKSYKECVCKISNDCELPRWHMHDFFHSFLIVFRVLCGEWIETMWDCMEVAGQTMCLTVFMMVMVIGNLVVLNLFLALLLSSFSSDNLAATDDDNEMNNLQIAVGRMQKGIDFVKRKIREFIQKAFVRKQKALDEIKPLEDLNNKKDSCISNHTTIEIGKDLNYLKDGNGTTSGIGSSVEKYVVDESDYMSFINNPSLTVTVPIAVGESDFENLNTEEFSSESDMEESKEKLNATSSSEGSTVDIGAPAEGEQPEVEPEESLEPEACFTEDCVRKFKCCQISIEEGKGKLWWNLRKTCYKIVEHNWFETFIVFMILLSSGALAFEDIYIEQRKTIKTMLEYADKVFTYIFILEMLLKWVAYGFQVYFTNAWCWLDFLIVDVSLVSLTANALGYSELGAIKSLRTLRALRPLRALSRFEGMRVVVNALLGAIPSIMNVLLVCLIFWLIFSIMGVNLFAGKFYHCINYTTGEMFDVSVVNNYSECKALIESNQTARWKNVKVNFDNVGLGYLSLLQVATFKGWMDIMYAAVDSRNVELQPKYEDNLYMYLYFVIFIIFGSFFTLNLFIGVIIDNFNQQKKKFGGQDIFMTEEQKKYYNAMKKLGSKKPQKPIPRPANKFQGMVFDFVTKQVFDISIMILICLNMVTMMVETDDQSQEMTNILYWINLVFIVLFTGECVLKLISLRYYYFTIGWNIFDFVVVILSIVGMFLAELIEKYFVSPTLFRVIRLARIGRILRLIKGAKGIRTLLFALMMSLPALFNIGLLLFLVMFIYAIFGMSNFAYVKREVGIDDMFNFETFGNSMICLFQITTSAGWDGLLAPILNSGPPDCDPDKDHPGSSVKGDCGNPSVGIFFFVSYIIISFLVVVNMYIAVILENFSVATEESAEPLSEDDFEMFYEVWEKFDPDATQFIEFAKLSDFADALDPPLLIAKPNKVQLIAMDLPMVSGDRIHCLDILFAFTKRVLGESGEMDALRIQMEERFMASNPSKVSYEPITTTLKRKQEEVSAIIIQRAYRRYLLKQKVKKVSSIYKKDKGKECDGTPIKEDTLIDKLNENSTPEKTDMTPSTTSPPSYDSVTKPEKEKFEKDKSEKEDKGKDIRESKK

SEQ ID NO: 61223 - protein, 277 aa, Homo sapiens
MDPEVTLLLQCPGGGLPQEQIQAELSPAHDRRPLPGGDEAITAIWETRLKAQPWLFDAPKFRLHSATLAPIGSRGPQLLLRLGLTSYRDFLGTNWSSSAAWLRQQGATDWGDTQAYLADPLGVGAALATADDFLVFLRRSRQVAEAPGLVDVPGGHPEPQLDLWLSVRERTPDSGSLTLLHCATSDPQGQQALCPGGSPQHQDLAGQLVVHELFSSVLQEICDEVNLPLLTLSQPLLLGIARNETSAGRASAEFYVQCSLTSEQVRKHYLSGGPEAH

SEQ ID NO: 61224 - protein, 164 aa, Homo sapiens
MAERGYSFSLTTFRVLVHRARKLAQQYYLVYQEPIPTAQLVQRVASVMQEYTQSGGVRPFGVSLLICGWNEGRPYLFQSDPSGAYFAWKATAMGKNYVNGKTFLEKRYNEDLELEDAIHTAILTLKESFEGQMTEDNIEVGICNEAGFRRLTPTEVKDYLAAIA

SEQ ID NO: 61225 - protein, 177 aa, Homo sapiens
MDETVAEFIKRTILKIPMNELTTILKAWDFLSENQLQTVNFRQRKESVVQHLIHLCEEKRASISDAALLDIIYMQFHQHQKVWEVFQMSKGPGEDVDLFDMKQFKNSFKKILQRALKNVTVSFRETEENAVWIRIAWGTQYTKPNQYKPTYVVYYSQTPYAFTSSSMLRRNTPLLGQ

SEQ ID NO: 61226 - protein, 153 aa, Homo sapiens
ESRFPTTMALSVLVTIEMCNALNSVSENQSLLRMPPWMNPWLLVAVAMSMALHFLILLVPPLPLIFQVTPLSGRQWVVVLQISLPVILLDEALKYLSRNHMHACLYPGLLRTVSQAWSRQPLTTSWTPDHTGARDTASSRCQSCSEREEAGKK

SEQ ID NO: 61227 - protein, 157 aa, Homo sapiens
MAGLQELRFPEEKPLLRGQDATELESSDAFLLAADTDWKVGEGNAGAVKLAGLGDPRWSPGHLLSPGHQEHDIETPYGLLHVVIRGSPKGNRPAILTYHDVGLNHKLCFNTFFNFEDMQEITKHFVVCHVDAPGQQVGASQFPQGYQFPSMEQLAAM

SEQ ID NO: 61228 - protein, 63 aa, Homo sapiens
MTSKVSCPPSVTLRCCGLWQVASPLNVSDLSDETGAYLIDRDPTYFGPILNFLRHGKLVLDKD

SEQ ID NO: 61229 - protein, 175 aa, Homo sapiens
MAGPAEEAGAHCPESLWPLPPQVSPRVTYTRVSPGQAEDVTFLYHPCAHPWLKLQLALLAYACMANPSLTPDFSLTQDRPLVLTAWGLALEMAWVEPAWAAHWLMRRRRRKQRKKKAWIYCESLSGPAPSEPTPGRGRLCRRGCVQALALAFALRSWRPPGTEVTSQGPRQPSSS

SEQ ID NO: 61230 - protein, 1061 aa, Homo sapiens
MPHLPLASFRPPFWGLRHSRGLPRFHSVSTQSEPHGSPISRRNREAKQKRLREKQATLEAEIAGESKSPAESIKAWRPKELVLYEIPTKPGEKKDVSGPLPPAYSPRYVEAAWYPWWVREGFFKPEYQARLPQATGETFSMCIPPPNVTGSLHIGHALTVAIQDALVRWHRMRGDQVLWVPGSDHAGIATQAVVEKQLWKERGVRRHELSREAFLREVWQWKEAKGGEICEQLRALGASLDWDRECFTMDVGSSVAVTEAFVRLYKAGLLYRNHQLVNWSCALRSAISDIEVENRPLPGHTQLRLPGCPTPVSFGLLFSVAFPVDGEPDAEVVVGTTRPETLPGDVAVAVHPDDSRYTHLHGRQLRHPLMGQPLPLITDYAVQPHVGTVKVTPAHSPADAEMGARHGLSPLNVIAEDGTMTSLCGDWLQGLHRFVAREKIMSVLSEWGLFRGLQNHPMVLPICSRSGDVIEYLLKNQWFVRCQEMGARAAKAVESGALELSPSFHQKNWQHWFSHIGDWCVSRQLWWGHQIPAYLVVEDHAQGEEDCWVVGRSEAEAREVAAELTGRPGAELTLERDPDVLDTWFSSALFPFSALGWPQETPDLARFYPLSLLETGSDLLLFWVGRMVMLGTQLTGQLPFSKVLLHPMVRDRQGRKMSKSLGNVLDPRDIISGVEMQVLQEKLRSGNLDPAELAIVAAAQKKDFPHGIPECGTDALRFTLCSHGVQAGDLHLSVSEVQSCRHFCNKIWNALRFILNALGEKFVPQPAEELSPSSPMDAWILSRLALAAQECERGFLTRELSLVTHALHHFWLHNLCDVYLEAVKPVLWHSPRPLGPPQVLFSCADLGLRLLAPLMPFLAEELWQRLPPRPGCPPAPSISVAPYPSACSLEHWRQPELERRFSRVQEVVQVLRALRATYQLTKARPRVLLQSSEPGDQGLFEAFLEPLGTLGYCGAVGLLPPGAAAPSGWAQAPLSDTAQVYMELQGLVDPQIQLPLLAARRYKLQKQLDSLTARTPSEGEAGTQRQQKLSSLQLELSKLDKAASHLQQLMDEPPAPGSPEL

SEQ ID NO: 61231 - protein, 254 aa, Homo sapiens
MEFLRNNRTTEVPRLDSMKPLEKHYSVVLPTVSHSGFLYKTASAGKLLQDRRAREEFSRRWCVLGDGVLSYFENERAVTPNGEIRASEIVCLAVPPPDTHGFEHTFEVYTEGERLYLFGLESAEQAHEWVKCIAKAFVPPLAEDLLARDFERLGRLPYKAGLSLQRAQEGWFSLSGSELRAVFPEGPCEEPLQLRKLQELSIQGDSENQVLVLVERRRTLYIQGERRLDFMGWLGAIQKAAASMGDTLSEQQLG

SEQ ID NO: 61232 - protein, 154 aa, Homo sapiens
EKLVRVLFELARYHAPSTIFLDELESVMSQRGTASGGEHEGSLRMKTELLVQMDGLARSEDLVFVLAASNLPCLKAIALQPGDRARLRLKKKKSVLVHFHAAGEDISKTGKKKKLTGLTVSHGWGASESWRGAKDTSYMVAARENEEDARSGNP

SEQ ID NO: 61233 - protein, 586 aa, Homo sapiens [sequence omitted]

SEQ ID NO: 61234 - protein, 89 aa, Homo sapiens
MFGKDGSELILHFVTQCNTRLTRVLEEEQKLVQLGQAEKRKTDQFLRDAVETRLRMLIPYIEHWPRALSILMLPHNIPSSLSLLTSMVD

SEQ ID NO: 61235 - protein, 480 aa, Homo sapiens
MKNATIVMSVRREQGSSSGEGSLSFEDVAVGFTREEWQFLDQSQKVLYKEVMLENYINLVSIGYRGTKPDSLFKLEQGEPPGIAEGAAHSQICPGFVIQSRRYAGKDSDAFGGYGRSCLHIKRDKTLTGVKYHRCVKPSSPKSQLNDLQKICAGGKPHECSVCGRAFSRKAQLIQHQRTERGEKPHGCGECGKTFMRKIQLTEHQRTHTGEKPHECSECGKAFSRKSQLMVHQRTHTGEKPYRCSKCGKAFSRKCRLNRHQRSHTGEKLYGCSVCGKAFSQKAYLTAHQRLHTGDKPYKCSDCGRTFYFKSDLTRHQRIHTGEKPYECSECEKAFRSKSKLIQHQRTHTGERPYSCRECGKAFAHMSVLIKHEKTHIRETAINSLTVEKPSSRSHTSLYMSELIQEQKTVNTVPIEMPSSGTPPLLNKSERLVGRNVVIVEQPFPRNQAFVVNQEFEQRISLTNEVNVAPSVINYILYLT

SEQ ID NO: 61236 - protein, 95 aa, Homo sapiens
GCGAPAPVVRCDPCSPYRTITGDCNNRRKPALGAANRALARWLPAEYEDGLSLPFGWTPGKTRNGFPLPLAREVSNKIVGYLNEEGVLDQNRSTL

SEQ ID NO: 61237 - protein, 8 aa, Homo sapiens
MASEEVLK

SEQ ID NO: 61238 - protein, 98 aa, Homo sapiens
  MOD_RES (1)..(1): Any amino acid
XTKGHSWLSCWVSRDSPCKLPGDFFYVFPLYAAKEDADGRLPTLLLQMIMQHLNPTKTTFWNPVESLILLILVIWTLRYFITEFLISEKFMNTIEKIF

SEQ ID NO: 61239 - protein, 220 aa, Homo sapiens
MDITKPVQIKDAYSKVAAMLQDRGLWAVINNAGVLGFPTDGELLLMTDYKQCMAVNFFGTVEVTKTFLPLLRKSKGRLVNVSSMGGGAPMERLASYGSSKAAVTMFSSVMRLELSKWGIKVASIQPGGFLTNIAGTSDKWEKLEKDILDHLPAEVQEDYGQDYILAQRNFLLLINSLASKDFSPVLRDIQHAILAKSPFAYYTPGKGAYLWICLAHYLPI

SEQ ID NO: 61240 - protein, 820 aa, Homo sapiens
MQFFGRLVNTFSGVTNLFSNPFRVKEVAVADYTSSDRVREEGQLILFQNTPNRTWDCVLVNPRNSQSGFRLFQLELEADALVNFHQYSSQLLPFYESSPQVLHTEVLQHLTDLIRNHPSWSVAHLAVELGIRECFHHSRIISCANCAENEEGCTPLHLACRKGDGEILVELVQYCHTQMDVTDYKGETVFHYAVQGDNSQVLQLLGRNAVAGLNQVNNQGLTPLHLACQLGKQEMVRVLLLCNARCNIMGPNGYPIHSAMKFSQKGCAEMIISMDSSQIHSKDPRYGASPLHWAKNAEMARMLLKRGCNVNSTSSAGNTALHVAVMRNRFDCAIVLLTHGANADARGEHGNTPLHLAMSKDNVEMIKALIVFGAEVDTPNDFGETPTFLASKIGRQLQDLMHISRARKPAFILGSMRDEKRTHDHLLCLDGGGVKGLIIIQLLIAIEKASGVATKDLFDWVAGTSTGGILALAILHSKSMAYMRGMYFRMKDEVFRGSRPYESGPLEEFLKREFGEHTKMTDVRKPKVMLTGTLSDRQPAELHLFRNYDAPETVREPRFNQNVNLRPPAQPSDQLVWRAARSSGAAPTYFRPNGRFLDGGLLANNPTLDAMTEIHEYNQDLIRKAAETVRLSDTSQSNSPIACGWGAWDPEWEASPKIIQQIGSRACSEANKRGSGRAQRLTPVIPALWEAEGQANKVKKLSIVVSLGTGRSPQVPVTCVDVFRPSNPWELAKTVFGAKELGKMVVDCCTDPDGRAVDRARAWCEMVGIQYFRLNPQLGTDIMLDEVSDTVLVNALWETEVYIYEHREEFQKLIQLLLSP

SEQ ID NO: 61241 - protein, 352 aa, Homo sapiens
MAALTIATGTGNWFSALALGVTLLKCLLIPTYHSTDFEVHRNWLAITHSLPISQWYYEATSEWTLDYPPFFAWFEYILSHVAKYFDQEMLNVHNLNYSSSRTLLFQRFSVIFMDVLFVYAVRECCKCIDGKKVGKELTEKPKFILSVLLLWNFGLLIVDHIHFQYNGFLFGLMLLSIARLFQKRHMEGAFLFAVLLHFKHIYLYVAPAYGVYLLRSYCFTANKPDGSIRWKSFSFVRVISLGLVVFLVSALSLGPFLALNQLPQVFSRLFPFKRGLCHAYWAPNFWALYNALDKVLSVIGLKLKFLDPNNIPKASMTSGLVQQFQHTVLPSVTPLATLICTLIAILKRKTSF

SEQ ID NO: 61242 - protein, 450 aa, Homo sapiens
AGRSRASPVSGREGGSSRPLEEGTGSSPACVRGAAPGSQDAFYPTRAKQARVSQELKKAAKRTVSISEGPDTLGDGMRERRETLALAPEPEPLEKEACEKWKRPFRSASATSLTLSHCVDVVKGLLDFKKRRGHSIGGAPEQRYQIIPVCVAARLPTRAQDVLDAHLSEVNAVRFGPNSSLLATGGADRLIHLWNVVGSRLEANQTLEGAGGSITSVDFDPSGYQVLAATYNQAAQLWKVGEAQSKETLSGHKDKVTAAKFKLTRHQAVTGSRDRTVKEWDLGRAYCSRTINVLSYCNDVVCGDHIIISGHNDQKIRFWDSRGPHCTQVIPVQGRVTSLSLSHDQLHLLSCSRDNTLKVIDLRVSNIRQVFRADGFKCGSDWTKAVFSPDRSYALAGSCDGALYIWDVDTGKLESRLQGPHCAAVNAVAWCYSGSHMVSVDQGRKVVLWQ

SEQ ID NO: 61243 - protein, 141 aa, Homo sapiens
MRKAGVAHSKSSKDMESHVFLKAKTRDEYLSLVARLIIHFRDIHNKKSQASVSDPMNALQSLTGGPAAGAAGIGMPPRGPGQSLGGMGSLGAMGQPMSLSGQPPPGTSGMAPHSMAVVSTATPQTQLQLQQVALQQQQQQQ

SEQ ID NO: 61244 - protein, 171 aa, Homo sapiens
MSQSPGAGSPPPLPPRSAPVPARSCRCEVANLLRLFQIPQISYASTSAKLSDKSRYDYFARTVPPDFYQAKAMAEILRFFNWTYVSTVASEGDYGETGIEAFEQEARLRNICIATAEKVGRSNIRKSYDSVIRELLQKPNARVVVLFMRSDDSRELIAAASRANASFTWVA

SEQ ID NO: 61245 - protein, 263 aa, Homo sapiens
MKNGLMFVKLVNPCSGEGAIYLFNMCLQQLFEVKVFKEKHHSWFINQSVQSGGLLHFATPVDPLFLLLHYLIKADKEGKFQPLDQVVVDNVFPNCILLLKLPGLEKLLHHVTEEKGNPEIDNKKYYKYSKEKTLKWLEKKVNQTVAALKTNNVNVSSRVQSTAFFSGDQASTDKEEDYIRYAHGLISDYIPKELSDDLSKYLKLPEPSASLPNPPSKKIKLSDEPVEAKEDYTKFNTKDLKTEKLGLPTGHFVMAAQRQKRGK

SEQ ID NO: 61246 - protein, 223 aa, Homo sapiens
MHPQVVILSLILHLADSVAGSVKVGGEAGPSVTLPCHYSGAVTSMCWNRGSCSLFTCQNGIVWTNGTHVTYRKDTRYKLLGDLSRRDVSLTIENTAVSDSGVYCCRVEHRGWFNDMKITVSLEIVPPKVTTTPIVTTVPTVTTVRTSTTVPTTTTVPMTTVPTTTVPTTMSIPTTTTVLTTMTVSTTTSVPTTTSIPTTTSVPVTTTVSTFVPPMPLPRQNHE

SEQ ID NO: 61247 - protein, 136 aa, Homo sapiens
MVWDRQTKMEYEWKPDEQGLQQILQLLKESQSPDTTIQRTVQQKLEQLNQYPDFNNYLIFVLTKLKSEDEPTRSLSGLILKNNVKAHFQNFPNGVTDFIKSECLNNIGDSSPLIRATVGLTLLHVSISLSSVGLKL

SEQ ID NO: 61248 - protein, 254 aa, Homo sapiens
MWLLVSVILISRISSVGGEAMFCDFPKINHGILYDEEKYKPFSQVPTGEVFYYSCEYNFVSPSKSFWTRITCAEEGWSPTPKCLRQTHLEGDTVQIICNTGYRLQNNENNISCVERGWSTPPKCRSTISAEKCGPPPPIDNGDITSFLLSVYAPGSSVEYQCQNLYQLEGNNQITCRNGQWSEPPKCLDPCVISQEIMEKYNIKLKWTNQQKLYSRTGDIVEFVCKSGYHPTKSHSFRAMCQNGKLVYPSCEEK

SEQ ID NO: 61249 - protein, 154 aa, Homo sapiens
MAAKQPPPLMKKHSQTDLVSRLKTRKILGVGGEDDDGEVHRSKISQVLGNEIKFTIREPLGLRVWQFVSAVLFSGIAIMALAFPDQLYDAVFDGAQVTSKTPIRLYGGALLNAAPTPRPLMKLSAGDVLPSCGHWWNTPSGLELAVATICKERS

SEQ ID NO: 61250 - protein, 62 aa, Homo sapiens
MEPAAFQALYSAEKPKLEDEHLVFFCQMGKRGLQATQLARSLGYTGARNYAGAYREWLEKES

SEQ ID NO: 61251 - protein, 106 aa, Homo sapiens
MRRRVHQINGHKFMATYLRQPTYCSHCREFIWGVFGKQGYQCQVCTCVVHKRCHHLIVTACTCQNNINKVDSKIAEQRFGINIPHKFSIHNYKVPTFCDHCGSLLW

SEQ ID NO: 61252 - protein, 185 aa, Homo sapiens
  MOD_RES (1)..(1): Any amino acid
XLHWDSPNPAAECQRPRSDVGLPKARARPDHVAYYQPSLTAEYDEDSPGGDFDFFSNLVTKWEAAARLPGDSTRQVVVRSGVVLGRGGGAMGHMLLPFRLGLGGPIGSGHQFFPWIHIGDLAGILTHALEANHVHGVLNGVAPSSATNAEFAQTLGAALGRRAFIPLPSAVVQAVFGRQRAIMLL

SEQ ID NO: 61253 - protein, 1127 aa, Homo sapiens
  MOD_RES (1)..(1): Any amino acid
XLRASLAQFEQKWTMLITQLPDIQEKLHQLQMEKLPSRKAITEMISWMNNVEHQTSDEDSVHSPSSASQVKHLLQKHKEFRMEMDYKQWIVDFVNQSLLQLSTCDVESKRYERTEFAEHLGEMNRQWHRVHGMLNRKIQHLEQLLESITESENKIQILNNWLEAQEERLKTLQKPESVISVQKLLLDCQDIENQLAIKSKALDELKQSYLTLESGAVPLLEDTASRIDELFQKRSSVLTQVNQLKTSMQSVLQEWKIYDQLYDEVNMMTIRFWYCMEHSKPVVLSLETLRCQVENLQSLQDEAESSEGSWEKLQEVIGKLKGLCPSVAEIIEEKCQNTHKRWTQVNQAIADQLQKAQSLLQLWKAYSNAHGEAAARLKQQEAKFQQLANISMSGNNLAEILPPALQDIKELQHDVQKTKEAFLQNSSVLDRLPQPAESSTHMLLPGPLHSLQRAAYLEKMLLVKANEFEFVLSQFKDFGVRLESLKGLIMHEEENLDRLHQQEKENPDSFLNHVLALTAQSPDIEHLNEVSLKLPLSDVAVKTLQNMNRQWIRATATALERCSELQGIGLNEKFLYCCEKWIQLLEKIEEALKVDVANSLPELLEQQKTYKMLEAEVSINQTIADSYVTQSLQLLDTTEIENRPEFITEFSKLTDRWQNAVQGVRQRKGDVDGLVRQWQDFTTSVENLFRFLTDTSHLLSAVKGQERFSLYQTRSLIHELKNKEIHFQRRRTTCALTLEAGEKLLLTTDLKTKESVGRRISQLQDSWKDMEPQLAEMIKQFQSTVETWDQCEKKIKELKSRLQVLKAQSEDPLPELHEDLHNEKELIKELEQSLASWTQNLKELQTMKADLTRHVLVEDVMVLKEQIEHLHRQWEDLCLRVAIRKQEIEDRLNTWVVFNEKNKELCAWLVQMENKVLQTADISIEEMIEKLQKDCMEEINLFSENKLQLKQMGDQLIKASNKSRAAEIDDKLNKINDRWQHLFDVIGSRVKKLKETFAFIQQLDKNMSNLRTWLARIESELSKPVVYDVCDDQEIQKRLAEQQPTHGVQQKYYLMMTKNAMFIREEVFQFFPMTMHFLFINVIFPKLGNCITIIIKGQDSRDPTSLQATTALAGLYQLGRQGSTARY

SEQ ID NO: 61254 - protein, 1680 aa, Homo sapiens
MAESQGKLRTMMAQFPTAMNGGPNMWAITSEERTKHDRQFDNLKPSGGYITGDQARNFFLQSGLPAPVLAEIWALSDLNKDGKMDQQEFSIAMKLIKLKLQGQQLPVVLPPIMKQPPMFSPLISARFGMGSMPNLSIPQPLPPAAPITSLSSATSGTNLPPLMMPTPLVPSVSTSSLPNGTASLIQPLPIPYSSSTLPHGSSYSLMMGGFGGASIQKAQSLIDLGSSSSTSSTASLSGNSPKTGTSEWAVPQPTRLKYRQKFNTLDKSMSGYLSGFQARNALLQSNLSQTQLATIWTLADVDGDGQLKAEEFILAMHLTDMAKAGQPLPLTLPPELVPPSFRGGKQIDSINGTLPSYQKMQEEEPQKKLPVTFEDKRKANYERGNMELEKRRQALMEQQQREAERKAQKEKEEWERKQRELQEQEWKKQLELEKRLEKQRELERQREEERRKDIERREAAKQELERQRRLEWERIRRQELLNQKNREQEEIVRLNSKKKNLHLELEALNGKHQQISGRLQDVRLKKQTQKTELEVLDKQCDLEIMEIKQLQQELQEYQNKLIYLVPEKQLLNERIKNMQFSNTPDSGVSLLHKKSLEKEELCQRLKEQLDALEKETASKLSEMDSFNNQLKELRETYNTQQLALEQLYKIKRDKLKEIERKRLELMQKKKLEDEAARKAKQGKENLWKENLRKEEEEKQKRLQEEKTQEKIQEEERKAEEKQRKDKDTLKAEEKKRETASVLVNYRALYPFEARNHDEMSFNSGDIIQVDEKTVGEPGWLYGSFQGNFGWFPCNYVEKMPSSENEKAVSPKKALLPPTVSLSATSTSSEPLSSNQPASVTDYQNVSFSNLTVNTSWQKKSAFTRTVSPGSVSPIHGQGQVVENLKAQALCSWTAKKDNHLNFSKHDIITVLEQQENWWFGEVHGGRGWFPKSYVKIIPGSEVKREEPEALYAAVNKKPTSAAYSVGEEYIALYPYSSVEPGDLTFTEGEEILVTQKDGEWWTGSIGDRSGIFPSNYVKPKDQESFGSASKSGASNKKPEIAQVTSAYVASGSEQLSLAPGQLILILKKNTSGWWQGELQARGKKRQKGWFPASHVKLLGPSSERATPAFHPVCQVIAMYDYAANNEDELSFSKGQLINVMNKDDPDWWQGEINGVTGLFPSNYVKMTTDSDPSQQWCADLQTLDTMQPIERKRQGYIHELIQTEERYMADLQLVVEVFQKRMAESGFLTEGEMALIFVNWKELIMSNTKLLKALRVRKKTGGEKMPVQMIGDILAAELSHMQAYIRFCSCQLNGAALLQQKTDEDTDFKEFLKKLASDPRCKGMPLSSFLLKPMQRITRYPLLIRSILENTPESHADHSSLKLALERAEELCSQVNEGVREKENSDRLEWIQAHVQCEGLAEQLIFNSLTNCLGPRKLLHSGKLYKTKSNKELHGFLFNDFLLLTYMVKQFAVSSGSEKLFSSKSNAQFKMYKTPIFLNEVLVKLPTDPSSDEPVFHISHIDRVYTLRTDNINERTAWVQKIKAASEQYIDTEKKKREKAYQARSQKTSGIGRLMVHVIEATELKACKPNGKSNPYCEISMGSQSYTTRTIQDTLNPKWNFNCQFFIKDLYQDVLCLTLFDRDQFSPDDFLGRTEIPVAKIRTEQESKGPMTRRLLLHEVPTGEVWVRFDLQLFEQKTLL

SEQ ID NO: 61255 - protein, 159 aa, Homo sapiens
MVCRRKKKRCHRDGMCCPSTRCNNGICIPVTESILTPHIPALDGTRHRDRNHGHYSNHDLGWQNLGRPHTKMSHIKGHEGDPCLRSSDCIEGFCCARHFWTKICKPVLHQGEVCTKQRKKGSHGLEIFQRCDCAKGLSCKVWKDATYSSKARLHVCQKI

SEQ ID NO: 61256 - protein, 1252 aa, Homo sapiens
  MOD_RES (1)..(1): Any amino acid
XGVGRETARPCYSLALAQLLQSFEDLPLCSILQQIQEKYDLHQVKKAMLRPALFANLFGVLALFQSGRLVKDQEALMKSVKLLQALAQYQNHLQEQPRKALVDILSEVSKATLQEILPEVLKADLNIILSSPEQLELFLLAQQKVPSKLKKLVGSVNLFSDENVPRLVNVLKMAASSVKKDRKLPAIALDLLRLALKEDKFPRFWKEVVEQGLLKMQFWPASYLCFRLLGAALPLLTKEQLHLVMQGDVIRHYGEHVCTAKLPKQFKFAPEMDDYVGTFLEGCQDDPERQLAVLVAFSSVTNQGLPVTPTFWRVVRFLSPPALQGYVAWLRAMFLQPDLDSLVDFSTNNQKKAQDSSLHMPERAVFRLRKWIIFRLVSIVDSLHLEMEEALTEQVARFCLFHSFFVTKKPTSQIPETKHPFSFPLENQAREAVSSAFFSLLQTLSTQFKQAPGQTQGGQPWTYHLVQFADLLLNHSHNVTTVTPFTAQQRQAWDRMLQTLKELEAHSAEARAAAFQHLLLLVGIHLLKSPAESCDLLGDIQTCIRKSLGEKPRRSRTKTIDPQEPPWVEVLVEILLALLAQPSHLMRQVARSVFGHICSHLTPRALQLILDVLNPETSEDENDRVVVTDDSDERRLKGAEDKSEEGEDNRSSESEEESEGEESEEEERDGDVDQGFREQLMTVLQAGKALGGEDSENEEELGDEAMMALDQSLASLFAEQKLRIQARRDEKNKLQKEKALRRDFQIRVLDLVEVLVTKQPENALVLELLEPLLSIIRRSLRSSSSKQEQDLLHKTARIFTHHLCRARRYCHDLGERAGALHAQVERLVQQAGRQPDSPTALYHFNASLYLLRVLKGNTAEGCVHETQEKQKAGTDPSHMPTGPQAASCLDLNLVTRVYSTALSSFLTKRNSPLTVPMFLSLFSRHPVLCQSLLPILVQHITGPVRPRHQACLLLQKTLSMREVRSCFEDPEWKQLMGQVLAKVTENLRVLGEAQTKAQHQQALSSLELLNVLFRTCKHEKLTLDLTVLLGVLQGQQQSLQQGAHSTGSSRLHDLYWQAMKTLGVQRPKLEKKDAKEIPSATQSPISKKRKKKGFLPETKKRKKRKSEDGTPAEDGTPAATGGSQPPSMGRKKRNRTKAKVPAQANGTPTTKSPAPGAPTRSPSTPAKSPKLQKKNQKPSQVNGAPGSPTEPAGQKQHQKALPKKGVLGKSPLSALARKKARLSLVIRSPSLLQSGAKKKAQTLRFTISSSKK

SEQ ID NO: 61257 - protein, 648 aa, Homo sapiens
MTPALTALLCLGLSLGPRTRMQAGPFPKPTLWAEPGSVISWGSPVTIWCQGSLEAQEYQLDKEGSPEPWDRNNPLEPKNKARFSIPSMTQHHAGRYRCHYYSSAGWSEPSDPLELVMTGFYNKPTLSALPSPVVASGGNMTLRCGSQKGYHHFVLMKEGEHQLPRTLDSQQLHSGGFQALFPVGPVTPSHRWRFTCYYYYTNTPWVWSHPSDPLEILPSGVSRKPSLLTLQGPVLAPGQSLTLQCGSDVGYDRFVLYKEGERDFLQRPGQQPQAGLSQANFTLGPVSRSYGGQYRCYGAHNLSSEWSAPSDPLDILITGQIYDTVSLSAQPGPTVASGENVTLLCQSRGYFDTFLLTKEGAAHPPLRLRSMYGAHKYQAEFPMSPVTSAHAGTYRCYGSRSSNPHLLSFPSEPLELMVSGHSGGSSLPPTGPPSTPGGPEDQPLNPPGSGPQNGLGRYLEVLIGVSVAFVLLLFLLLFLLLRRQRHSKHRTSDQRKTDFQRPAGAAETEPKDRGLLRRSSPAADVQEENLYAAVKDTQSEDRVELDSQSPHDEDPQAVTYAPVKHSSPRREMASPPSSLSGEFLDTKDRQVEEDRQMDTEAAASEASQDVTYAQLHSLTLRRKATEPPPSQEGEPPAEPSIYATLAIH

SEQ ID NO: 61258 - protein, 227 aa, Homo sapiens
  MOD_RES (1)..(1): Any amino acid
XFSNHKELKTDSSPNQARAQAALQAVNSVQSGNLALAASAAAVDAGMAMAGQSPVLRIIVENLFYPVTLDVLHQIFSKFGTVLKIITFTKNNQFQALLQYADPVSAQHAKLSLDGQNIYNACCTLRIDFSKLTSLNVKYNNDKSRDYTRPDLPSGDSQPSLDQTMAAAFGLSVPNVHGALAPLAIPSAAAAAAAAGRIAIPGLAGAGNSVLLVSNLNPEASTVTCSA

SEQ ID NO: 61259 - protein, 69 aa, Homo sapiens
MSQWYELQQLDSKFLEQVHQLYDDSFPMEIRQYLAQWLEKQDWEHAANDVSFATIRFHDLLSQLDDQYS

SEQ ID NO: 61260 - protein, 1054 aa, Homo sapiens
MEIKDQGAQMEPLLPTRNDEEAVVDRGGTRSILKTHFEKEDLEGHRTLFIGVHVPLGGRKSHRRHRHRGHKHRKRDRERDSGLEDGRESPSFDTPSQRVQFILGTEDDDEEHIPHDLFTELDEICWREGEDAEWRETARWLKFEEDVEDGGERWSKPYVATLSLHSLFELRSCILNGTVLLDMHANTLEEIADMVLDQQVSSGQLNEDVRHRVHEALMKQHHHQNQKKLTNRIPIVRSFADIGKKQSEPNSMDKNAGQVVSPQSAPACVENKNDVSRENSTVDFSKGLGGQQKGHTSPCGMKQRHEKGPPHQQEREVDLHFMKKIPPGAEASNILVGELEFLDRTVVAFVRLSPAVLLQGLAEVPIPTRFLFILLGPLGKGQQYHEIGRSIATLMTDEVFHDVAYKAKDRNDLVSGIDEFLDQVTVLPPGEWDPSIRIEPPKNVPSQEKRKIPAVPNGTAAHGEAEPHGGHSGPELQRTGRIFGGLILDIKRKAPYFWSDFRDAFSLQCLASFLFLYCACMSPVITFGGLLGEATEGRISAIESLFGASMTGIAYSLFGGQPLTILGSTGPVLVFEKILFKFCKEYGLSYLSLRASIGLWTATLCIILVATDASSLVCYITRFTEEAFASLICIIFIYEALEKLFELSEAYPINMHNDLELLTQYSCNCVEPHNPSNGTLKEWRESNISASDIIWENLTVSECKSLHGEYVGRACGHDHPYVPDVLFWSVILFFSTVTLSATLKQFKTSRYFPTKVRSIVSDFAVFLTILCMVLIDYAIGIPSPKLQVPSVFKPTRDDRGWFVTPLGPNPWWTVIAAIIPALLCTILIFMDQQITAVIINRKEHKLKKGCGYHLDLLMVAVMLGVCSIMGLPWFVAATVLSITHVNSLKLESECSAPGEQPKFLGIREQRVTGLMIFILMGSSVFMTSILKFIPMPVLYGVFLYMGASSLKGIQFFDRIKLFWMPAKHQPDFIYLRHVPLRKVHLFTIIQMSCLGLLWIIKVSRAAIVFPMMVLALVFVRKLMDLLFTKRELSWLDDLMPESKKKKLEDAEKEH

SEQ ID NO: 61261 - protein, 528 aa, Homo sapiens
  MOD_RES (1)..(1): Any amino acid
XRSQLQPEPAKTKALQTVIEMKDTKIASLERNIRDLEDEIQMLKANGVLNTEDREEEIKQIEVYKSHSKFMKTKIDQLKQELSKKESELLALQTKLETLSNQNSDCKQHIEVLKESLTAKEQRAAILQTEVDALRLRLEEKESFLNKKTKQLQDLTEEKGTLAGEIRDMKDMLEVKERKINVLQKKIENLQEQLRDKDKQLTNLKDRVKSLQTDSSNTDTALATLEEALSEKERIIERLKEQRERDDRERLEEIESFRKENKDLKEKVNALQAELTEKESSLIDLKEHASSLASAGLKRDSKLKSLEIAIEQKKEECSKLEAQLKKQAEQLFNQMYNPAHNIEDDSRMNPEFADQIKQLDKEASYYRDECGKAQAEVDRLLEILKEVENEKNDKDKKIAELERHMKDQNKKVANLKHNQQLEKKKNAQLLEEVRRREDSMADNSQHLQIEELMNALEKTRQELDATKARLASTQQSLAEKEAHLANLRIERRKQLEEILEMKQEALLAAISEKDANIALLELSASKKK

SEQ ID NO: 61262 - protein, 61 aa, Homo sapiens
ILQKILLDDTGLAYICQTYERFSHVAMILGKMVLQLSKEPSARLLKHVVRCYLRLSDNPRC

SEQ ID NO: 61263 - protein, 2006 aa, Homo sapiens
MVKLANPLYTEWILEAIKKVKKQKQRPSEERICNAVSSSHGLDRKTVLEQLELSVKDGTILKVSNKGLNSYKDPDNPGRIALPKPRNHGKLDNKQNVDWNKLIKRAVEGLAESGGSTLKSIERFLKGQKDVSALFGGSAASGFHQQLRLAIKRAIGHGRLLKDGPLYRLNTKATNVDGKESCESLSCLPPVSLLPHEKDKPVAEPIPICSFCLGTKEQNREKKPEELISCADCGNSGHPSCLKFSPELTVRVKALRWQCIECKTCSSCRDQGKNADNMLFCDSCDRGFHMECCDPPLTRMPKGMWICQICRPRKKGRKLLQKKAAQIKRRYTNPIGRPKNRLKKQNTVSKGPFSKVRTGPGRGRKRKITLSSQSASSSSEEGYLERIDGLDFCRDSNVSLKFNKKTKGLIDGLTKFFTPSPDGRKARGEVVDYSEQYRIRKRGNRKSSTSDWPTDNQDGWDGKQENEERLFGSQEIMTEKDMELFRDIQEQALQKVGVTGPPDPQVRCPSVIEFGKYEIHTWYSSPYPQEYSRLPKLYLCEFCLKYMKSRTILQQHMKKCGWFHPPANEIYRKNNISVFEVDGNVSTIYCQNLCLLAKLFLDHKTLYYDVEPFLFYVLTQNDVKGCHLVGYFSKEKHCQQKYNVSCIMILPQYQRKGYGRFLIDFSYLLSKREGQAGSPEKPLSDLGRLSYMAYWKSVILECLYHQNDKQISIKKLSKLTGICPQDITSTLHHLRMLDFRSDQFVIIRREKLIQDHMAKLQLNLRPVDVDPECLRWTPVIVSNSVVSEEEEEEAEEGENEEPQCQERELEISVRVGKSVSHENKEQDSYSVESEKKPEVMAPVSSTRLSKQVLPHDSLPANSQPSRRGRWGRKNRKTQERFGDKDSKLLLEETSSAPQEQYGECGEKSEATQEQYTESEEQLVASEEQPSQDGKPDLPKRRLSEGVEPWRGQLKKSPEALKCRLTEGSERLPRRYSEGDRAVLRGFSESSEEEEEPESPRSSSPPILTKPTLKRKKPFLHRRRRVRKRKHHNSSVVTETISETTEVLDEPFEDSDSERPMPRLEPTFEIDEEEEEEDENELFPREYFRRLSSQDVLRCQSSSKRKSKDEEEDEESDDADDTPILKPVSLLRKRDVKNSPLEPDTSTPLKKKKGWPKGKSRKPIHWKKRPGRKPGFKLSREIMPVSTQACVIEPIVSIPKAGRKPKIQESEETVEPKEDMPLPEERKEEEEMQAEAEEAEEGEEEDAASSEVPAASPADSSNSPETETKEPEVEEEEEKPRVSEEQRQSEEEQQELEEPEPEEEEDAAAETAQNDDHDADDEDDGHLESTKKKELEEQPTREDVKEEPGVQESFLDANMQKSREKIKDKEETELDSEEEQPSHDTSVVSEQMAGSEDDHEEDSHTKEELIELKEEEEIPHSELDLETVQAVQSLTQEESSEHEGAYQDCEETLAACQTLQSYTQADEDPQMSMVEDCHASEHNSPISSVQSHPSQSVRSVSSPNVPALESGYTQISPEQGSLSAPSMQNMETSPMMDVPSVSDHSQQVVDSGFSDLGSIESTTENYENPSSYDSTMGGSICGNSSSQSSCSYGGLSSSSSLTQSSCVVTQQMASMGSSCSMMQQSSVQPAANCSIKSPQSCVVERPPSNQQQQPPPPPPQQPQPPPPQPQPAPQPPPPQQQPQQQPQPQPQQPPPPPPPQQQPPLSQCSMNNSFTPAPMIMEIPESGSTGNISIYERIPGDFGAGSYSQPSATFSLAKLQQLTNTIMDPHAMPYSHSPAVTSYATSVSLSNTGLAQLAPSHPLAGTPQAQATMTPPPNLASTTMNLTSPLLQCNMSATNIGIPHTQRLQGQMPVKGHISIRSKSAPLPSAAAHQQQLYGRSPSAVAMQAGPRALAVQRGMNMGVNLMPTPAYNVNSMNMNTLNAMNSYRMTQPMMNSSYHSNPAYMNQTAQYPMQMQMGMMGSQAYTQQPMQPNPHGNMMYTGPSHHSYMNAAGVPKQSLNGPYMRR

SEQ ID NO: 61264 - protein, 396 aa, Homo sapiens
  MOD_RES (1)..(1): Any amino acid
XWLTGDFWMSGTFLIRKPQLLQGVYAMGFNRPSKIQENALPMMLAEPPQNLIAQSQSGTGKTAAFVLAMLSRVEPSDRYPQCLCLSPTYELALQTGKVIEQMGKFYPELKLAYAVRGNKLERGQKISEQIVIGTPGTVLDWCSKLKFIDPKKIKVFVLDEADVMIATQGHQDQSIRIQRMLPRNCQMLLFSATFEDSVWKFAQKVVPDPNVIKLKREEETLDTIKQYYVLCSSRDEKFQALCNLYGAITIAQAMIFCHTRKTASWLAAELSKEGHQVALLSGEMMVEQRAAVIERFREGKEKVLVTTNVCARGIDVEQVSVVINFDLPVDKDGNPDNETYLHRIGRTGRFGKRGLAVNMVDSKHSMNILNRIQEHFNKKIERLDTDDLDEIEKIAN

SEQ ID NO: 61265 - protein, 158 aa, Homo sapiens
  MOD_RES (1)..(1): Any amino acid
XEVISLQNEKADLDRTLRKLDQEMEQLNHHTTTRTQMEMLTKDKADKDEQIRKIKSRHSDELTSLLGYFPNKKQLEDWLHSKSKEINQTRDRLAKLKIVLVKPHSITSCYNSLKKCFRNLIPLIEEVLLLSAADLEAVILGIHQVERLLNFNFSVRIV

SEQ ID NO: 61266 - protein, 56 aa, Homo sapiens
  MOD_RES (1)..(1): Any amino acid
XVFSNHALRRLQERIHELQEENSKQQKLNKEWRERRKQLIREKREMTKTIHMTVFF

SEQ ID NO: 61267 - protein, 56 aa, Homo sapiens
RESVKEGTVTDPKMATIQMVTMVSTTIGMTSVTRGRARPSCCAAFPSPSQRAIFEK

SEQ ID NO: 61268 - protein, 4523 aa, Homo sapiens
MAAQVAAREARDFREAPTLRLTSGAGLEAVGAVELEEEEENEEEAAARRARSFAQDARVRFLGGRLAMMLGFTEEKWSQYLESEDNRQVLGEFLESTSPACLVFSFAASGRLAASQEIPRDANHKLVFISKKITESIGVNDFSQVVLFGELPALSLGHVSAFLDEILVPVLSNKNNHKSWSCFTSQDMEYHIEVMKKKMYIFRGKMSRRTLLPIPTVAGKMDLDQNCSENKPPSNERIILHAIESVVIEWSHQIQEIIERDSVQRLLNGLHLSPQAELDFWMMRRENLSCIYDQLQAPVVLKMVKILTTKQSSYFPTLKDIFLAVENALLEAQDVELYLRPLRRHIQCLQETEFPQTRILIAPLFHTICLIWSHSKFYNTPARVIVLLQEFCNLFINQATAYLSPEDLLRGEIEESLEKVQVAVNILKTFKNSFFNYRKKLASYFMGRKLRPWDFQSHLVFCRFDKFLDRLIKIEDIFATTLEFEKLERLEFGGTKGAILNGQVHEMSEELMELCKLFKQSTYDPSDCTNMEFESDYVAFKSKTLEFDRRLGTIICEAFFNCNGLEAAFKLLTIFGNFLEKPVVMEIFSLHYSTLVHMFNTELDVCKQLYNEHMKQIECGHVVLNKNMPFTSGNMKWAQQVLQRLQMFWSNFASLRYLFLGNPDHALVYQKYVEMTTLLDQFESRIYNEWKSNVDEICEFNLNQPLVKFSAINGLLCVNFDPKLVAVLREVKYLLMLKKQDIPDSALAIFKKRNTILKYIGNLDLLVQGYNKLKQTLLEVEYPLIEDELRAIDEQLTAATTWLTWQDDCWGYIERVRAATSELEHRVERTQKNVKVIQQTMRGWARCVLPPRREHRREAAFTLEDKGDLFTKKYKLIQGDGCKIHNLVEENRKLFKANPSLDTWKIYVEFIDDIVVEGFFQAIMHDLDFFLKNTEKQLKPAPFFQAQMILLPPEIVFKPSLDREAGDGFYDLVEEMLCNSFRMSAQMNRIATHLEIKNYQNDMDNMLGLAEVRQEIMNRVVNVINKVLDFRNTLETHTYLWVDDRAEFMKHFLLYGHAVSSDEMDAHANEEIPEQPPTLEQFKEQIDIYEALYVQMSKFEDFRVFDSWFKVDMKPFKVSLLTIIKKWSWMFQEHLLRFVIDSLNELQEFIKETDSGLQRELNEGDHDGLVDIMVHLLAVRSRQRATDELFEPLKETITLLESYGQKMPEQVYIQLEELPERWETTKKIAATVRHEVSPLHNAEVTLIRKKCILFDAKQAEFRERFRHYAPLGFNAENPYTALDKANEELEALEEEMLQMQESTRLFEVALPEYKQMKQCRKEIKLLKGLWDVIIYVRRSIDNWTKTQWRQIHVEQMDVELRRFAKASSITEIWSLNKEVRVWDAYTGLEGTVKDMTASLRAITELQSPALRDRHWHQLMKAIGVKFLINEATTLADLLALRLHRVEDDVRRIVDKAVKELGTEKVITEISQTWATMKFSYEVHYRTGIPLLKSDEQLFETLEHNQVQLQTLLQSKYVEYFIEQVLSWQNKLNIADLVIFTWMEVQRTWSHLESIFVCSEDIRIQLVKDARRFDGVDAEFKELMFKTAKVENVLEATCRPNLYEKLKDLQSRLSLCEKALAEYLETKRIAFPRFYFVSSADLLDILSKGAQPKQVTCHLAKLFDSIADLQFEDNQDVSAHRAVGMYSKEKEYVPFQAECECVGHVETWLLQLEQTMQETVRHSITEAIVAYEEKPRELWIFDFPAQVALTSSQIWWTTDVGIAFSRLEEGYETALKDFHKKQISQLNTLITLLLGELPPGDRQKIMTICTIDVHARDVVAKLISQKKVVVSPQAFTWLSQLRHRWEDTQKHCFVNICDAQFQYFYEYLGNSPRLVITPLTDRCYITLTQSLHLTMSGAPAGPAGTGKTETTKDLGRALGMMVYVFNCSEQMDYKSIGNIYKGLVQTGAWGCFDEFNRISVEVLSVVAVQVKMIHDAIRNRKKRFVFLGEAITLKPSVGIFITMNPGYAGRTELPENLKALFRPCAMVAPDIELICEILLVAEGFVDARALARKFITLYTLCKELLSKQDHYDWGLRAIKSVLVVAGSLKRGDKNRPEDQVLMRALRDFNMPKIVTDDIPVFLGLVGDLFPALDVPRRRKLHFEQMVRQSTLELRLQPEESFILKVVQLEELLAVRHSVFVVGNAGTGKSKILRTLNRTYVNMKQKPVWNDLNPKAVTTDELFGFIHHATREWKDGKIVYSYFIGLFSSILREQANLKHDGPKWIVLDGDIDPMWIESLNTVMDDNKVLTLASNERIALTPFMRLLFEIHHLRSATPATVSRAGILYVNPQDLGWNPYVASWIDRRRHQSEKANLTILFDKYVPACLDKLRTSFKTITSIPESSLVQTLCVLLECLLTPENVPSDSPKEVYEVYFVFACIWAFGGTLLQDQISDYQADFSRWWQKEMKAVKFPSQGTIFDYYVDHKTKKLLPWADKIAQFTMDPDVPLQTVLVHTTETARLRYFMELLLEKGKPLMLVGNAGVGKTVFVGDTLASLSEDYIVSRVPFNYYTTSTALQKILEKPLEKKAGHNYGPGGNKKLIYFIDDMNMPEVDLYGTVQPHTLIRQHIDYGHWYDRQKVMLKEIHNCQYVACMNPMVGSFTINPRLQRHFTVFAFNFPSLDALNTIYGQIFSFHFQQQAFAPSILRSGPTLIQATIAFHQTMMCNFLPTAIKFHYIFNLRDLSNVFQGILFASPECLKGPLDLIHLWLHESARVYGDKLIDKKDCDLFQRRMLETAYKYFEGIDSHMLLQQPLIYCHFADRGKDPHYMPVKDWEVLKTILTETLDNYNELNAAMHLVLFEDAMQHVCRISRILRTPQGCALLVGVGGSGKQSLSRLAAYLRGLEVFQITLTEGYGIQELRVDLANLYIRTGAKNMPTVFLLTDAQVLDESFLVLINDLLASGEIPDLFSDEDVDKIISGIHNEVHALGMVDSRENCWKFFMARVRLQLKIILCFSPVGRTLRVRARKFPAIVNCTAIDWFHAWPQEALVSVSRRFIEETKGIEPVHKDSISLFMAHVHTTVNEMSTRYYQNERRHNYTTPKSFLEQISLFKNLLKKKQNEVSEKKERLVNGIQKLKTTASQVGDLKARLASQEAELQLRNHDAEALITKIGLQTEKVSREKTIADAEERKVTAIQTEVFQKQRECEADLLKAEPALVAATAALNTLNRVNLSELKAFPNPPIAVTNVTAAVMVLLAPRGRVPKDRSWKAAKVFMGKVDDFLQALINYDKEHIPENCLKVVNEHYLKDPEFNPNLIRTKSFAAAGLCAWVINIIKFYEVYCDVEPKRQALAQANLELAAATEKLEAIRKKLVDLDRNLSRLTASFEKATAEKVRCQEEVNQTNKTIKLANRLVKELEAKKIRWGQSIKSFEAQEKTLCGDVLLTAAFVSYVGPFTRQYRQELVHCKWVPFLQQKVSIPLTEGLDLISMLTDDATIAAWNNEGLPSDRMSTENAAILTHCERWPLVIDPQQQGIKWIKNKYGMDLKVTHLGQKGFLNAIETALAFGDVILIENLEETIDPVLDPLLGRNTIKKGKYIRIGDKECEFNKNFRLILHTKLANPHYKPELQAQTTLLNFTVTEDGLEAQLLAEVVSIERPDLEKLKLVLTKHQNDFKIELKYLEDDLLLRLSAAEGSFLDDTKLVERLEATKTTVAEIEHKVIEAKENERKINEARECYRPVAARASLLYFVINDLQKINPLYQFSLKAFNVLFHRAIEQADKVEDMQGRISILMESITHAVFLYTSQALFEKDKLTFLSQMAFQILLRKKEIDPLELDFLLRFTVEHTHLSPVDFLTSQSWSAIKAIAVMEEFRGIDRDVEGSAKQWRKWVESECPEKEKLPQEWKKKSLIQKLILLRAMRPDRMTYALRNFVEEKLGAKYVERTRLDLVKAFEESSPATPIFFILSPGVDALKDLEILGKRLGFTIDSGKFHNVSLGQGQETVAEVALEKASKGGHWVILQNVHLVAKWLGTLEKLLERFSQGSHRDYRVFMSAESAPTPDEHIIPQGLLENSIKITNEPPTGMLANLHAALYNFDQDTLEICSKEQEFKSILFSLCYFHACVAGRLRFGPQGWSRSYPFNPGDLTICASVLYNYLEANSKVPWEDLRYLFGEIMYGGHITDDWDRKLCRVYLEEFMNPSLTEDELMLAPGFAAPPYLDYAGYHQYIEEMLPPESPALYGLHPNAEIEFLTVTSNTLFRTLLEMQPRNALSGDELGQSTEEKVKNVLDDILEKLPEEFNMAEIMQKNSNRSPYVLVCFQECERMNILIREIRISLEQLDLSLKGELALSPAVEAQQFALSYDTVPDTWSKLAYPSTYGLAQWFNDLLLRCRELDTWTQDLTLPAVVWLSGFFNPQSFLTAIMQTMARKNEWPLDKTRLTADVTKKTKEDYGHPPREGAYLHGLFMEGARWDTQAGTIVEARLKELACPMPVIFAKATPVDRQETKQTYECPVYRTKLRGPSYIWTFRLKSEEKTAKWVLAGVALLLEA

SEQ ID NO: 61269 - protein, 153 aa, Homo sapiens
MAEAEGESLESWLNKATNPSNRQEDWEYIIGFCDQINKELEGPQIAVRLLAHKIQSPQEWEALQALTVLEACMKNCGRRFHNEVGKFRFLNELIKVVSPKYLGDRVSEKVKTKVIELLYSWTMALPEEAKIKDAYHMLKRQAFSQAAEKQKPR

SEQ ID NO: 61270 - protein, 823 aa, Homo sapiens
MVNAWFAERVHTIPVCKEGIRGHTESCSCPLQQSPRADNSAPGTPTRKISASEFDRPLRPIVVKDSEGTVSFLSDSEKKEQMPLTPPRFDHDEGDQCSRLLELVKDISSHLDVTALCHKIFLHIHGLISADRYSLFLVCEDSSNDKFLISRLFDVAEGSTLEEVSNNCIRLEWNKGIVGHVAALGEPLNIKDAYEDPRFNAEVDQITGYKTQSILCMPIKNHREEVVGVAQAINKKSGNGGTFTEKDEKDFAAYLAFCGIVLHNAQLYETSLLENKRNQVLLDLASLIFEEQQSLEVILKKIAATIISFMQVQKCTIFIVDEDCSDSFSSVFHMECEELEKSSDTLTREHDANKINYMYAQYVKNTMEPLNIPDVSKDKRFPWTTENTGNVNQQCIRSLLCTPIKNGKKNKVIGVCQLVNKMEENTGKVKPFNRNDEQFLEAFVIFCGLGIQNTQMYEAVERAMAKQMVTLEVLSYHASAAEEETRELQSLAAAVVPSAQTLKITDFSFSDFELSDLETALCTIRMFTDLNLVQNFQMKHEVLCRWILSVKKNYRKNVAYHNWRHAFNTAQCMFAALKAGKIQNKLTDLEILALLIAALSHDLDHRGVNNSYIQRSEHPLAQLYCHSIMEHHHFDQCLMILNSPGNQILSGLSIEEYKTTLKIIKQAILATDLALYIKRRGEFFELIRKNQFNLEDPHQKELFLAMLMTACDLSAITKPWPIQQRIAELVATEFFDQGDRERKELNIEPTDLMNREKKNKIPSMQVGFIDAICLQLYEALTHVSEDCFPLLDGCRKNRQKWQALAEQQEKMLINGESGQAKRN

SEQ ID NO: 61271 - protein, 270 aa, Homo sapiens
MEAHNEGSNLERHQAKPKEKIEYKCSEREQRFIQHLDLIEHASTHTGKKLCESDVCQSSSLTGHKKVLSREKGHQCHECGKAFQRSSHLVRHQKIHLGEKPYQCNECGKVFSQNAGLLEHLRIHTGEKPYLCIHCGKNFRRSSHLNRHQRIHSQEEPCECKECGKTFSQALLLTHHQRIHSHSKSHQCNECGKAFSLTSDLIRHHRIHTGEKPFKCNICQKAFRLNSHLAQHVRIHNEEKPYQCSECGEAFRQRSGLFQHQRYHHKDKLA

SEQ ID NO: 61272 - protein, 165 aa, Homo sapiens
MHRGTQEGAMASRLLHRLRHALAGDGPGEAAASPEAEQFPESSELEDDDAEGLSSRLSGTLSFTSAEDDEDDEDEDDEEAGPDQLPLGDGTSGEDAERSPPPDGQWGSQLLARQLQDFWKKSRNTLAPQRLLFEVTSANVVKDPPSKYVRQGLAMLPRLVSNSWP

SEQ ID NO: 61273 - protein, 78 aa, Homo sapiens
MASFRKLTLSEKVPPNHPSRKKVNFLDMSLDDIIIYKELEGTNAEEEKNKRQNHSKKESPSRQQSKAHRHRHRRGEVQ

SEQ ID NO: 61274 - protein, 190 aa, Homo sapiens
MEDEGQTKIKQRRSRTNFTLEQLNELERLFDETHYPDAFMREELSQRLGLSEARVQVWFQNRRAKCRKQENQLHKGVLIGAASQFEACRVAPYVNVGALRMPFQQVQAQLQLDSAVAHAHHHLHPHLAAHAPYMMFPAPPFGLPLATLAADSASAASVVAAAAAAKTTSKNSSIADLRLKAKKHAAALGL

SEQ ID NO: 61275 - protein, 37 aa, Homo sapiens
MESTDTKRQKPSVHSRQLVSKPLSSSVSNNKRIVSTK

SEQ ID NO: 61276 - protein, 957 aa, Homo sapiens
MEESSSVAMLVPDIGEQEAILTAESIISPSLEIDEQRKTKPDPLIHVIQKLSKIVENEKSQKCLLIGKKRPRSSAATHSLETQELCEIPAKVIQSPAADTRRAEMSQTNFTPDTLAQNEGKAMSYQCSLCKFLSSSFSVLKDHIKQHGQQNEVILMCSECHITSRSQEELEAHVVNDHDNDANIHTQSKAQQCVSPSSSLCRKTTERNETIPDIPVSVDNLQTHTVQTASVAEMGRRKWYAYEQYGMYRCLFCSYTCGQQRMLKTHAWKHAGEVDCSYPIFENENEPLGLLDSSAAAAPGGVDAVVIAIGESELSIHNGPSVQVQICSSEQLSSSSPLEQSAERGVHLSQSVTLDPNEEEMLEVISDAEENLIPDSLLTSAQKIISSSPNKKGHVNVIVERLPSAEETLSQKRFLMNTEMEEGKDLSLTEAQIGREGMDDVYRADKCTVDIGGLIIGWSSSEKKDELMNKGLATDENAPPGRRRTNSESLRLHSLAAEALVTMPIRAAELTRANLGHYGDINLLDPDTSQRQVDSTLAAYSKMMSPLKNSSDGLTSLNQSNSTLVALPEGRQELSDGQVKTGISMSLLTVIEKLRERTDQNASDDDILKELQDNAQCQPNSDTSLSGNNVVEYIPNAERPYRCRLCHYTSGNKGYIKQHLRVHRQRQPYQCPICEHIADNSKDLESHMIHHCKTRIYQCKQCEESFHYKSQLRNHEREQHSLPDTLSIATSNEPRISSDTADGKCVQEGNKSSVQKQYRCDVCDYTSTTYVGVRNHRRIHNSDKPYRKEFRCSLCGYVCSHPPSLKSHMWKHASDQNYNYEQVNKAINDAISQSGRVLGKSPGKTQLKSSEESADPVTGSSENAVSSSELMSQTPSEVLGTNENEKLSPTSNTSYSLEKISSLAPPSMEYCVLLFCCCICGFESTSKENLLDHMKEHEGEIVNIILNKDHNTALNTN

SEQ ID NO: 61277 - protein, 114 aa, Homo sapiens
MWSLTASEGESTTAHFFLGAGDEGLGTRGIGMRPEESDSELLEDEEDEVPPEPQIIVGICAMTKKSKSKPMTQILERLCRFDYLTVVILGEDVILNEPVENWPSCHCLISFHSK

SEQ ID NO: 61278 - protein, 812 aa, Homo sapiens
MDSKKRSSTEAEGSKERGLVHIWQAGSFPITPERLPGWGGKTVLQAALGVKHGVLLTEDGEVYSFGTLPWRSGPVEICPSSPILENALVGQYVITVATGSFHSGAVTDNGVAYMWGENSAGQCAVANQQYVPEPNPVSIADSEASPLLAVRILQLACGEEHTLALSISREIWAWGTGCQLGLITTAFPVTKPQKVEHLAGRVVLQVACGAFHSLALVQCLPSQDLKPVPERCNQCSQLLITMTDKEDHVIISDSHCCPLGVTLTESQAENHASTALSPSTETLDRQEEVFENTLVANDQSVATELNAVSAQITSSDAMSSQQNVMGTTEISSARNIPSYPDTQAVNEYLRKLSDHSVREDSEHGEKPVPSQPLLEEAIPNLHSPPTTSTSALNSLVVSCASAVGVRVAATYEAGALSLKKVMNFYSTTPCETGAQAGSSAIGPEGLKDSREEQVKQESMQGKKSSSLVDIREEETEGGSRRLSLPGLLSQVSPRLLRKAARVKTRTVVLTPTYSGEADALLPSLRTEVWTWGKGKEGQLGHGDVLPRLQPLCVKCLDGKEVIHLEAGGYHSLALTAKSQVYSWGSNTFGQLGHSDFPTTVPRLAKISSENGVWSIAAGRDYSLFLVDTEDFQPGLYYSGRQDPTEGDNLPENHSGSKTPVLLSCSKLGYISRVTAGKDSYLALVDKNIMGYIASLHELATTERRFYSKLSDIKSQILRPLLSLENLGTTTTVQLLQEVASRFSKLCYLIGQHGASLSSFLHGVKEARSLVILKHSSLFLDSYTEQVSSPVSCSISAGLFCQGEQLLNQKRLD

SEQ ID NO: 61279 - protein, 89 aa, Homo sapiens
MSLVDLGKKLLEAARAGQDDEVRILMANGAPFTTDWLGTSPLHLAAQYGHYSTTEVLLRAGVSRDARTKVDRTPLHMAASEGHASIVEV

SEQ ID NO: 61280 - protein, 274 aa, Homo sapiens
MGAGNLPPITQEEALHILGFQPPFEDIRFGPFTGNTTLMRWFRQINDHFHVKGCSYVLYKPHGKNKTAGETASGALSKLTRGLKDESLAYIYHCQNHYFCPIGFEATPVKANKAFSRGPLSPQEVEYWILIGESSRKHPAIHCKKWADIVTDLNTQNPEYLDIRHLERGLQYRKTKKVGGNLHCIIAFQRLNWQRFGLWNFPFGTIRQESQPPTHAQGIAKSESEDNISKKQHGRLGRSFSASFHQDSAWKKMSSIHERRNSGYQGYSDYDGND

SEQ ID NO: 61281 - protein, 106 aa, Homo sapiens
MAAPWRRWPTGLLAVLRPLLTCRPLQGTTLQRDVLLFEHDRGRFFTILGLFCAGQGVFWASMAVAAVSRPPVPVQPLDAEVPNRGPFDLRSALWRYGLAVGCGAIA

SEQ ID NO: 61282 - protein, 1478 aa, Homo sapiens
  MOD_RES (1)..(1): Any amino acid
XLDQPRAIALDPSSGFMYWTDWGEVPKIERAGMDGSSRFIIINSEIYWPNGLTLDYEEQKLYWADAKLNFIHKSNLDGTNRQAVVKGSLPHPFALTLFEDILYWTDWSTHSILACNKYTGEGLREIHSDIFSPMDIHAFSQQRQPNATNPCGIDNGGCSHLCLMSPVKPFYQCACPTGVKLLENGKTCKDGATELLLLARRTDLRRISLDTPDFTDIVLQLEDIRHAIAIDYDPVEGYIYWTDDEVRAIRRSFIDGSGSQFVVTAQIAHPDGIAVDWVARNLYWTDTGTDRIEVTRLNGTMRKILISEDLEEPRAIVLDPMVGYMYWTDWGEIPKIERAALDGSDRVVLVNTSLGWPNGLALDYDEGKIYWGDAKTDKIEVMNTDGTGRRVLVEDKIPHIFGFTLLGDYVYWTDWQRRSIERVHKRSAEREVIIDQLPDLMGLKATNVHRVIGSNPCAEENGGCSHLCLYRPQGLRCACPIGFELISDMKTCIVPEAFLLFSRRADIRRISLETNNNNVAIPLTGVKEASALDFDVTDNRIYWTDISLKTISRAFMNGSALEHVVEFGLDYPEGMAVDWLGKNLYWADTGTNRIEVSKLDGQHRQVLVWKDLDSPRALALDPAEGFMYWTEWGGKPKIDRAAMDGSERTTLVPNVGRANGLTIDYAKRRLYWTDLDTNLIESSNMLGLNREVIADDLPHPFGLTQYQDYIYWTDWSRRSIERANKTSGQNRTIIQGHLDYVMDILVFHSSRQSGWNECASSNGHCSHLCLAVPVGGFVCGCPAHYSLNADNRTCSAPTTFLLFSQKSAINRMVIDEQQSPDIILPIHSLRNVRAIDYDPLDKQLYWIDSRQNMIRKAQEDGSQGFTVVVSSVPSQNLEIQPYDLSIDIYSRYIYWTCEATNVINVTRLDGRSVGVVLKGEQDRPRAVVVNPEKGYMYFTNLQERSPKIERAALDGTEREVLFFSGLSKPIALALDSRLGKLFWADSDLRRIESSDLSGANRIVLEDSNILQPVGLTVFENWLYWIDKQQQMIEKIDMTGREGRTKVQARIAQLSDIHAVKELNLQEYRQHPCAQDNGGCSHICLVKGDGTTRCSCPMHLVLLQDELSCGEPPTCSPQQFTCFTGEIDCIPVAWRCDGFTECEDHSDELNCPVCSESQFQCASGQCIDGALRCNGDANCQDKSDEKNCEVLCLIDQFRCANGQCIGKHKKCDHNVDCSDKSDELDCYPTEEPAPQATNTVGSVIGVIVTIFVSGTVYFICQRMLCPRMKGDGETMTNDYVVHGPASVPLGYVPHPSSLSGSLPGMSRGKSMISSLSIMGGSSGPPYDRAHVTGASSSSSSSTKGTYFPAILNPPPSPATERSHYTMEFGYSSNSPSTHRSYSYRPYSYRHFAPPTTPCSTDVCDSDYAPSRRMTSVATAKGYTSDLNYDSEPVPPPPTPRSQYLSAEENYESCPPSPYTERSYSHHLYPPPPSPCTDSS

SEQ ID NO: 61283 - protein, 45 aa, Homo sapiens
MVALENPECGPEAAEGTPGGRRLLLALLPRLECSGAIMPTSTSWT

SEQ ID NO: 61284 - protein, 225 aa, Homo sapiens
MSTVKEQLIEKLIEDDENSQCKITIVGTGAVGMACAISILLKDLADELALVDVALDKLKGEMMDLQHGSLFFSTSKITSGKDYSVSANSRIVIVTAGARQQEGETRLALVQRNVAIMKSIIPAIVHYSPDCKILVVSNPVDILTYIVWKISGLPVTRVIGSGCNLDSARFRYLIGEKLGVHPTSCHGWIIGEHGDSSGIIWNKRRTLSQYPLCLGAEWCLRCCEN

SEQ ID NO: 61285 - protein, 48 aa, Homo sapiens
WSHPRKFGQGSRSCRVCSNRHGLIRKYGLNMCRQCFRQYAKDIGFIKR

SEQ ID NO: 61286 - protein, 181 aa, Homo sapiens
  MOD_RES (1)..(1): Any amino acid
XSIGSEPHEDHVFLVANFSQIETLTSVFQKKLCIQDLCAMEDHNCEQLCVNVPGSFVCQCYSGYALAEDGKRCVAVDYCASENHGCEHECVNADGSYLCQCHEGFALNPDKKTCTKIDYCASSNHGCQHECVNTDDSYSCHCLKGFTLNPDKKTCRRINYCALNKPGCEHECVNMEESYYC

SEQ ID NO: 61287 - protein, 4738 aa, Homo sapiens
MMMCAATASPAAASSGLGGDGFYPAATFSSSPAPGALFMPVPDGSVAAAGLGLGLPAADSRGHYQLLLSGRALADRYRRIYTAALNDRDQGGGSAGHPASRNKKILNKKKLKRKQKSKSKVKTRSKSENLENTVIIPDIKLHSNPSAFNIYCNVRHCVLEWQKKEISLAAASKNSVQSGESDSDEEEESKEPPIKLPKIIEVGLCEVFELIKETRFSHPSLCLRSLQALLNVLQGQQPEGLQSEPPEVLESLFQLLLEITVRSTGMNDSTGQSLTALSCACLFSLVASWGETGRTLQAISAILTNNGSHACQTIQVPTILNSLQRSVQAVLVGKIQIQDWFSNGIKKAALMHKWPLKEISVDEDDQCLLQNDGFFLYLLCKDGLYKIGSGYSGTVRGHIYNSTSRIRNRKEKKSWLGYAQGYLLYRDVNNHSMTAIRISPETLEQDGTVMLPDCHTEGQNILFTDGEYINQIAASRDDGFVVRIFATSTEPVLQQELQLKLARKCLHACGISLFDLEKDLHIISTGFDEESAILGAGREFALMKTANGKIYYTGKYQSLGIKQGGPSAGKWVELPITKSPKIVHFSVGHDGSHALLVAEDGSIFFTGSASKGEDGESTKSRRQSKPYKPKKIIKMEGKIVVYTACNNGSSSVISKDGELYMFGKDAIYSDSSSLVTDLKGHFVTQVAMGKAHTCVLMKNGEVWTFGVNNKGQCGRDTGAMNQGGKGFGVENMATAMDEDLEEELDEKDEKSMMCPPGMHKWKLEQCMVCTVCGDCTGYGASCVSSGRPDRVPGGICGCGSGESGCAVCGCCKACARELDGQEARQRGILDAVKEMIPLDLLLAVPVPGVNIEEHLQLRQEEKRQRVIRRHRLEEGRGPLVFAGPIFMNHREQALARLRSHPAQLKHKRDKHKDGSGERGEKDASKITTYPPGSVRFDCELRAVQVSCGFHHSVVLMENGDVYTFGYGQHGQLGHGDVNSRGCPTLVQALPGPSTQVTAGSNHTAVLLMDGQVFTFGSFSKGQLGRPILDVPYWNAKPAPMPNIGSKYGRKATWIGASGDQTFLRIDEALINSHVLATSEIFASKHIIGLVPASISEPPPFKCLLINKVDGSCKTFNDSEQEDLQGFGVCLDPVYDVIWRFRPNTRELWCYNAVVADARLPSAADMQSRCSILSPELALPTGSRALTTRSHAALHILGCLDTLAAMQDLKMGVASTEEETQAVMKVYSKEDYSVVNRFESHGGGWGYSAHSVEAIRFSADTDILLGGLGLFGGRGEYTAKIKLFELGPDGGDHETDGDLLAETDVLAYDCAAREKYAMMFDEPVLLQAGWWYVAWARVSGPSSDCGSHGQASITTDDGVVFQFKSSKKSNNGTDVNAGQIPQLLYRLPTSDGSASKGKQQTSEPVHILKRSFARTVSVECFESLLSILHWSWTTLVLGVEELRGLKGFQFTATLLDLERLRFVGTCCLRLLRVYTCEIYPVSATGKAVVEETSKLAECIGKTRTLLRKILSEGVDHCMVKLDNDPQGYLSQPLSLLEAVLQECHNTFTACFHSFYPTPALQWACLCDLLNCLDQDIQEANFKTSSSRLLAAVMSALCHTSVKLTSIFPIAYDGEVLLRSIVKQVSTENDSTLVHRFPLLVAHMEKLSQSEENISGMTSFREVLEKMLVIVVLPVRNSLRRENELFSSHLVSNTCGLLASIVSELTASALGSEVDGLNSLHSVKASANRFTKTSQGRSWNTGNGSPDAICFSVDKPGIVVVGFSVYGGGGIHEYELEVLVDDSEHAGDSTHSHRWTSLELVKGTYTTDDSPSDIAEIRLDKVVPLKENVKYAVRLRNYGSRTANGDGGMTTVQCPDGVTFTFSTCSLSSNGTNQTRGQIPQILYYRSEFDGDLQSQLLSKANEEDKNCSRALSVVSTVVRASKDLLHRALAVDADDIPELLSSSSLFSMLLPLIIAYIGPVAAAIPKVAVEVFGLVQQLLPSVAILNQKYAPPAFNPNQSTDSTTGNQPEQGLSACTTSSHYAVIESEHPYKPACVMHYKVTFPECVRWMTIEFDPQCGTAQSEDVLRLLIPVRTVQNSGYGPKLTSVHENLNSWIELKKFSGSSGWPTMVLVLPGNEALFSLETASDYVKDDKASFYGFKCFAIGYEFSPGPDEGVIQLEKELANLGGVCAAALMKKDLALPIGNELEEDLEILEEAALQVCKTHSGILGKGLALSHSPTILEALEGNLPLQIQSNEQSFLDDFIACVPGSSGGRLARWLQPDSYADPQKTSLILNKDDIRCGWPTTITVQTKDQYGDVVHVPNMKVEVKAVPVSQKKMSLQQDQAKKPQRIPGSPAVTAASSNTDMTYGGLASPKLDVSYEPMIVKEARYIAITMMKVYENYSFEELRFASPTPKRPSENMLIRVNNDGTYCANWTPGAIGLYTLHVTIDGIEIDAGLEVKVKDPPKGMIPPGTQLVKPKSEPQPNKVRKFVAKDSAGLRIRSHPSLQSEQIGIVKVNGTITFIDEIHNDDGVWLRLNDETIKKYVPNMNGYTEAWCLSFNQHLGKSLLVPVDESKTNTDDFFKDINSCCPQEATMQEQDMPFLRGGPGMYKVVKTGPSGHNIRSCPNLRGIPIGMLVLGNKVKAVGEVTNSEGTWVQLDQNSMVEFCESDEGEAWSLARDRGGNQYLRHEDEQALLDQNSQTPPPSPFSVQAFNKGASCSAQGFDYGLGNSKVLTVLPTAGDQLSAILNSIQSRPNLPAPSIFDQAAKPPSSLVHSPFVFGQPLSFQQPQLQSDRGNISTSSKPASTSGKSELSSKHSRSLKPDGRMSRTTADQKKPRGTESLSASESLILKSDAAKLRSDSHSRSLSPNHNTLQTLKSDGRMPSSSRAESPGPGSRLSSPKPKTLPANRSSPSGASSPRSSSPHDKNLPQKSTAPVKTKLDPPRERSKSDSYTLDPDTLRKKKMPLTEPLRGRSTSPKPKSVPKDSTDSPGSENRAPSPHVVQENLHSEVVEVCTSSTLKTNSLTDSTCDDSSEFKSVDEGSNKVHFSIGKAPLKDEQEMRASPKISRKCANRHTRPKKEKSSFLFKGDGSKPLEPAKQAMSPSVAECARAVFASFLWHEGIVHDAMACSSFLKFHPELSKEHAPIRSSLNSQQPTEEKETKLKNRHSLEISSALNMFNIAPHGPDISKMGSINKNKVLSMLKEPPLHEKCEDGKTETTFEMSMHNTMKSKSPLPLTLQHLVAFWEDISLATIKAASQNMIFPSPGSCAVLKKKECEKENKKSKKEKKKKEKAEVRPRGNLFGEMAQLAVGGPEKDTICELCGESHPYPVTYHMRQAHPGCGRYAGGQGYNSIGHFCGGWAGNCGDGGIGGSTWYLVCDRCREKYLREKQAAAREKVKQSRRKPMQVKTPRALPTMEAHQVIKANALFLLSLSSAAEPSILCYHPAKPFQSQLPSVKEGISEDLPVKMPCLYLQTLARHHHENFVGYQDDNLFQDEMRYLRSTSVPAPYISVTPDASPNVFEEPESNMKSMPPSLETSPITDTDLAKRTVFQRSYSVVASEYDKQHSILPARVKAIPRRRVNSGDTEVGSSLLRHPSPELSRLISAHSSLSKGERNFQWPVLAFVIQHHDLEGLEIAMKQALRKSACRVFAMEAFNWLLCNVIQTTSLHDILWHFVASLTPAPVEPEEEEDEENKTSKENSEQEKDTRVCEHPLSDIVIAGEAAHPLPHTFHRLLQTISDLMMSLPSGSSLQQMALRCWSLKFKQSDHQFLHQSNVFHHINNILSKSDDGDSEESFSISIQSGFEAMSQELCIVMCLKDLTSIVDIKTSSRPAMIGSLTDGSTETFWESGDEDKNKTKNITINCVKGINARYVSVHVDNSRDLGNKVTSMTFLTGKAVEDLCRIKQVDLDSRHIGWVTSELPGGDNHIIKIELKGPENTLRVRQVKVLGWKDGESTKIAGQISASVAQQRNCEAETLRVFRLITSQVFGKLISGDAEPTPEQEEKALLSSPEGEEKVYNATSDADLKEHMVGIIFSRSKLTNLQKQVCAHIVQAIRMEATRVREEWEHAISSKENANSQPNDEDASSDAYCFELLSMVLALSGSNVGRQYLAQQLTLLQDLFSLLHTASPRVQRQVTSLLRRVLPEVTPSRLASIIGVKSLPPADISDIIHSTEKGDWNKLGILDMFLGCIAKALTVQLKAKGTTITGTAGTTVGKGVTTVTLPMIFNSSYLRRGESHWWMKGSTPTQISEIIIKLIKDMAAGHLSEAWSRVTKNAIAETIIALTKMEEEFRSPVRCIATTRLWLALASLCVLDQDHVDRLSSGRWMGKDGQQKQMPMCDNHDDGETAAIILCNVCGNLCTDCDRFLHLHRRTKTHQRQVFKEEEEAIKVDLHEGCGRTKLFWLMALADSKTMKAMVEFREHTGKPTTSSSEACRFCGSRSGTELSAVGSVCSDADCQEYAKIACSKTHPCGHPCGGVKNEEHCLPCLHGCDKSATSLKQDADDMCMICFTEALSAAPAIQLDCSHIFHLQCCRRVLENRWLGPRITFGFISCPICKNKINHIVLKDLLDPIKELYEDVRRKALMRLEYEGLHKSEAITTPGVRFYNDPAGYAMNRYAYYVCYKCRKAYFGGEARCDAEAGRGDDYDPRELICGACSDVSRAQMCPKHGTDFLEYKCRYCCSVAVFFCFGTTHFCNACHDDFQRMTSIPKEELPHCPAGPKGKQLEGTECPLHVVHPPTGEEFALGCGVCRNAHTF

SEQ ID NO: 61288 - protein, 24 aa, Homo sapiens
MDGGDDGNLIIKKRFVSEAELDER

SEQ ID NO: 61289 - protein, 435 aa, Homo sapiens
MGYVREYILWAASKSQLLAHQFIWNMKTNIYLDEEGHQKDPDIGDLLDQLVEEITGSLSGPAKDFYQREFDFFNKITNVSAIIKPYPKGDERKKACLSALSEVKVQPGCYLPSNPEAIVLDIDYKSGTPMQSAAKAPYLAKFKVKRCGVSELEKEGLRCRSDSEDECSTQEADGQKISWQAAIFKVGDDCRQDMLALQIIDLFKNIFQLVGLDLFVFPYRVVATAPGCGVIECIPDCTSRDQLGRQTDFGMYDYFTRQYGDEALSAQARYNFIRSMAAYSLLLFLLQIKDRHNGNIMLDKKGHIIHIDFGFMFESSPGGNLGWEPDIKLTDEMVMIMGGKMEATPFKWFMEMCVRGYLAVRPYMDAVVSLVTLMLDTGLPCFRGQTIKLLKHRFSPNMTEREAANFIMKVIQSCFLSNRSRTYDMIQYYQNDIPY

SEQ ID NO: 61290 - protein, 891 aa, Homo sapiens
MVPWVRTMGQKLKQRLRLDVGREICRQYPLFCFLLLCLSAASLLLNRQQDQPLLFSLPSVKTMKMKTFVIIHFHLIQLGLQELFPQGHSCAVCGKVKCKRHRPSLLLENYQPWLDLKISSKVDASLSEVDIPSIITKKLLKAAMKHIEVIVKARQKVKNTEFLQQAALEEYGPELHVALRSRRDELHYLRKLTELLFPYILPPKATDCRSLTLLIREILSGSVFLPSLDFLADPDTVNHLLIIFIDDSPPEKATEPASPLVPFLQKFAEPRNKKPSVLKLELKQIREQQDLLFRFMNFLKQEGAVHVLQFCLTVEEFNDRILRPELSNDEMLSLHEELQKIYKTYCLDESIDKIRFDPFIVEEIQRIAEGPYIDVVKLQTMRCLFEAYEHVLSLLENVFTPMFCHSDEYFRQLLRGAESPTRNSKLNRGSLSLDDFRNTQKRGESFGISRIGSKIKGVFKSTTMEGAMLPNYGVAEGEDDFIEEGIVVMEDDSPVEAVSTPNTPRNLAAWKISIPYVDFFEDPSSERKEKKERIPVFCIDVERNDRRAVGHEPEHWSVYRRYLEFYVLESKLTEFHGAFPDAQLPSKRIIGPKNYEFLKSKREEFQEYLQKLLQHPELSNSQLLADFLSPNGGETQFLDKILPDVNLGKIIKSVPGKLMKEKGQHLEPFIMNFINSCESPKPKPSRPELTILSPTSENNKKLFNDLFKNNANRAENTERKQNQNYFMEVMTVEGVYDYLMYVGRVVFQVPDWLHHLLMGTRILFKNTLEMYTDYYLQCKLEQLFQEHRLVSLITLLRDAIFCENTEPRSLQDKQKGAKQTFEEMMNYIPDLLVKCIGEETKYESIRLLFDGLQQPVLNKQLTYVLLDIVIQELFPELNKVQKEVTSVTSWM

SEQ ID NO: 61291 - protein, 935 aa, Homo sapiens
MKRLTCFFICFFLSEVSGFEIPINGLSEFVDYEDLVELAPGKFQLVAENRRYQEEVDQVTLYSYKVQSTITSRMATTMIQSKVVNNSPQPQNVVFDVQIPKGAFISNFSMTVDGKTFRSSIKEKTVGRALYAQARAKGKTAGLVRSSALDMENFRTEVNVLPGAKVQFELHYQEVKWRKLGSYEHRIYLQPGRLAKHLEVDVWVIEPQGLRFLHVPDTFEGHFDGVPVISKGQQKAHVSFKPTVAQQRICPNCRETAVDGELVVLYDVKREEKAGELEVFNGYFVHFFAPDNLDPIPKNILFVIDVSGSMWGVKMKQTVEAMKTILDDLRAEDHFSVIDFNQNIRTWRNDLISATKTQVADAKRYIEKIQPSGGTNINEALLRAIFILNEANNLGLLDPNSVSLIILVSDGDPTVGELKLSKIQKNVKENIQDNISLFSLGMGFDVDYDFLKRLSNENHGIAQRIYGNQDTSSQLKKFYNQVSTPLLRNVQFNYPHTSVTDVTQNNFHNYFGGSEIVVAGKFDPAKLDQIESVITATSANTQLVLETLAQMDDLQDFLSKDKHADPDFTRKLWAYLTINQLLAERSLAPTAAAKRRITRSILQMSLDHHIVTPLTSLVIENEAGDERMLADAPPQDPSCCSGALYYGSKVVPDSTPSWANPSPTPVISMLAQGSQVLESTPPPHVMRVENDPHFIIYLPKSQKNICFNIDSEPGKILNLVSDPESGIVVNGQLVGAKKPNNGKLSTYFGKLGFYFQSEDIKIEISTETITLSHGSSTFSLSWSDTAQVTNQRVQISVKKEKVVTITLDKEMSFSVLLHRVWKKHPVNVDFLGIYIPPTNKFSPKAHGLIGQFMQEPKIHIFNERPGKDPEKPEASMEVKGQKLIITRGLQKDYRTDLVFGTDVTCWFVHNSGKGFIDGHYKDYFVPQLYSFLKRP

SEQ ID NO: 61292 - protein, 477 aa, Homo sapiens
MELDSALEAPSQEDSNLSEELSHSAFGQAFSKILHCLARPEARRGNVKDAVLKDLGDLIEATEFDRLFEGTGARLRGMPETLGQVAKALEKYAAPSKEEEGGGDGHSEAAEKAAQVGLLFLKLLGKVETAKNSLVGPAWQTGLHHLAGPVYIFAITHSLEQPWTTPRSREVAREVLTSLLQVTECGSVAGFLHGENEDEKGRLSVILGLLKPDLYKESWKNNPAIKHVFSWTLQQVTRPWLSQHLERVLPASLVISDDYQTENKILGVHCLHHIVLNVAVLLCLLDLFPILEKTLHWKGDGARPTTHCDEVLRLILTHMEPEHRLLLRRTYARNLPAFVNRLGILTVRHLKRLERVIIGYLEVYDGPEEEARLKILETLKLLMQHTWPRVSCRLVVLLKALLKLICDVARDPNLTPESVKSALLQEATDCLILLDRCSQGRVKGLLAKIPQSCEDRKVVNYIRKVQQVSEGAPYNGT

SEQ ID NO: 61293 - protein, 723 aa, Homo sapiens
MLKEWAIKQGILLKVAETIKSWIFFSQCNKKDDLLHKLDIGFRLDSLHTILQQEVLLQEDVELIELLDPSILSAGQSQQQENGHLPTLCSLATPNIWDLSMLFAFISLLVMLPTWWIVSSWLVWGVILFVYLVIRALRLWRTAKLQVTLKKYSVHLEDMATNSRAFTNLVRKALRLIQETEVISRGFTLLLDRVSAACPFNKAGQHPSQHLIGLRKAVYRTLRANFQAARLATLYMLKNYPLNSESDNVTNYICVVPFKELGLGLSEEQISEEEAHNFTDGFSLPALKVLFQLWVAQSSEFFRRLALLLSTANSPPGPLLTPALLPHRILSDVTQGLPHAHSACLEELKRSYEFYRYFETQHQSVPQCLSKTQQKSRELNNVHTAVRSLQLHLKALLNEVIILEDELEKLVCTKETQELVSEAYPILEQKLKLIQPHVQASNNCWEEAISQVDKLLRRNTDKKGKPEIACENPHCTVVPLKQPTLHIADKDPIPEEQELEAYVDDIDIDSDFRKDDFYYLSQEDKERQKREHEESKRVLQELKSVLGFKASEAERQKWKQLLFSDHAVLKSLSPVDPVEPISNSEPSMNSDMGKVSKNDTEEESNKSATTDNEISRTEYLCENSLEGKNKDNSSNEVFPQGAEERMCYQCESEDEPQADGSGLTTAPPTPRDSLQPSIKQRLARLQLSPDFTFTAGLAAEVAARSLSFTTMQEQTFGGEEEEQ

SEQ ID NO: 61294 - protein, 168 aa, Homo sapiens
MEPGSVENLSIVYRSRDFLVVNKHWDVRIDSKAWRETLTLQKQLRYRFPELADPDTCYGFRFCHQLDFSTSGALCVALNKAAAGSAYRCFKERRVTKAYLALLRGHIQESRVTISHAIGRNSTEGRAHTMCIEGSQGVAGCENPKPSLTDLVVLEHGLYAGDPVSKVL

SEQ ID NO: 61295 - protein, 29 aa, Homo sapiens
MNISGSSCGSPNSADTSSDFKDLWTKLKE

SEQ ID NO: 61296 - protein, 68 aa, Homo sapiens
MISVKRNTWRALSLVIGDCRKKGNFEYCQGARAQHPASGDAAPAPLMALLSAATHSRTGGMSPERACF

SEQ ID NO: 61297 - protein, 157 aa, Homo sapiens
PKIVQMSNYCGIGIDAELSLDFHQAREEEPGKFTSSWGSGADLWGSDSDTRFEKPRMDDGLLEVVGVTGVVHMGQVQGGLRSGIRIAQGSYFRVTLLKATPVQVDGEPWVQAPGHMIISAAGPKVHMLRKAKQKPRRAGTTRDARADAAPAPESDPR

SEQ ID NO: 61298 - protein, 118 aa, Homo sapiens
MPLRHWGMARGSKPVGDGAQPMAAMGGLKVLLHWAGPGGGEPWVTFSESSLTAEEVCIHIAHKVGITPPCFNLFALFDAQAQVWLPPNHILEIPRDASLMLYFRIRFYFRNWHGMNPR

SEQ ID NO: 61299 - protein, 33 aa, Homo sapiens
LLVFTSFNFCVLGFWATVITHRCCESRDRVSPC

SEQ ID NO: 61300 - protein, 103 aa, Homo sapiens
MQHLCLLAAVGVTRHKSKELSRKQSQQLELLESELRKEIRDGFAELQMDKLDVVDSFGTVPFLDYKHFALRTFFPENRDANDKNESLTALDALICNKSFLVTV

SEQ ID NO: 61301 - protein, 234 aa, Homo sapiens [sequence omitted]

SEQ ID NO: 61302 - protein, 47 aa, Homo sapiens
MAERRRHKKRIQYNFRFSCPIEVSSKRTVVTFPSWTHYWSLKTRRSW

SEQ ID NO: 61303 - protein, 608 aa, Homo sapiens
MDSSIHLSSLISRHDDEATRTSTSEGLEEGEVEGETLLIVESEDQASVDLSHDQSGDSLNSDEGDVSWMEEQLSYFCDKCQKWIPASQLREQLSYLKGDNFFRFTCSDCSADGKEQYERLKLTWQQVVMLAMYNLSLEGSGRQGYFRWKEDICAFIEKHWTFLLGNRKKTSTWWSTVAGCLSVGSPMYFRSGAQEFGEPGWWKLVHNKPPTMKPEGEKLSASTLKIKASKPTLDPIITVEGLRKRASRNPVESAMELKEKRSRTQEAKDIRRAQKEAAGFLDRSTSSTPVKFISRGRRPDVILEKGEVIDFSSLSSSDRTPLTSPSPSPSLDFSAPGTPASHSATPSLLSEADLIPDVMPPQALFHDDDEMEGDGVIDPGMEYVPPPAGSVASGPVVGVRKKVRGPEQIKQEVESEEEKPDRMDIDSEDTDSNTSLQTRAREKRKPQLEKDTKPKEPRYTPVSIYEEKLLLKRLEACPGAVAMTPEARRLKRKLIVRQAKRDRGLPLFDLDQVVNAALLLVDGIYGAKEGGISRLPAGQATYRTTCQDFRILDRYQCFFLIDFLAVQEGISTPDHQVFVSLGRIRRYGCGPEYCQPLYLSDLETLYQA

SEQ ID NO: 61304 - protein, 41 aa, Homo sapiens
MPKEKYDPPDPRRIYTIMSAEEVANGKKSHWAELEISECGA

SEQ ID NO: 61305 - protein, 49 aa, Homo sapiens
MEEEASSPGLGCSKPHLEKLTLGITRILGQGTHRPTPNSRSWRNRLTSQ

SEQ ID NO: 61306 - protein, 308 aa, Homo sapiens
KVYTRCFCLEEPQNSEVDAQLTGRISQKAERGAKVHQETAADECPPCVHGARDSNGGKGERGLPGPPGSKGEKGARGNDCVRISPDAPLQCAEGPKGEKGESGALGPSGLPGSTGEKGQKGEKGDGGIKGVPGKPGRDGRPGEICVIGPKGQKGDPGFVGPEGLAGEPGPPGLPGPPGIGLPGTPGDPGGPPGPKGDKGSSGIPGKEGPGGKPGKPGVKGEKGDPCEVCPTLPEGFQNFVGLPGKPGPKGEPGDPVPARGDPGIQGIKGEKGEPCLSCSSVVGAQHLVSSTGASGDVGSPGFGLPGLP

SEQ ID NO: 61307 - protein, 147 aa, Homo sapiens
MAASCVLLHTGQKMPLIGLGTWKSEPGQVKAAVKYALSVGYRHIDCAAIYGNEPEIGEALKEDVGPGKAVPREELFVTSKLWNTKHHPEDVEPALRKTLADLQLEYLDLYLMHWPYAFERGDNPFPKNADGTICYDSTHYKETWKAL

SEQ ID NO: 61308 - protein, 70 aa, Homo sapiens
MQPDEALHVEEPGNPEETVCVEETTEPDRIQFVEGPVEPGKPTSPEHVVYEGETVTRAEKSNPEESLRAE

SEQ ID NO: 61309 - protein, 55 aa, Homo sapiens
MVAKQRIRMANEKHSKNITQRGNVAKTSQFSRLFKVSGWACEVTDLKMFPFSCEF

SEQ ID NO: 61310 - protein, 330 aa, Homo sapiens
MPTAESEAKVKTKVRFEELLKTHSDLMREKKKLKKKLVRSEENISPDTIRSNLHYMKETTSDDPDTIRSNLPHIKETTSDDVSAANTNNLKKSTRVTKNKLRNTQLATENPNGDASVEEDKQGKPNKKVIKTVPQLTTQDLKPETPENKVDSTHQKTHTKPQPGVDHQKSEKANEGREETDLEEDEELMQAYQCHVTEEMAKEIKRKIRKKLKEQLTYFPSDTLFHDDKLSSEKRKKKKEVPVFSKAETSTLTISGDTVEGEQKKESSVRSVSSDSHQDDEISSMEQSTEDSMQDDTKPKPKKTKKKTKAVDGLFHLTMKKRMWIIFFLL

SEQ ID NO: 61311 - protein, 190 aa, Homo sapiens
MSDEGSRGSRLPLALPPASQGCSSGGGGGGSSAGGSGNSRPPRNLQGLLQMAITAGSEEPDPPPEPMSEEMKSCLRVLSQPMPPTAGEAEQAADQQEREGALELLADLCENMDNAADFCQLSGMHLLVGRYLEAGAAGLRWRAAQLIGTCSQNVAAIQEQVLGLGALCCSSMRSTRRSWSSVKSCYRPVS

SEQ ID NO: 61312 - protein, 117 aa, Homo sapiens
MGAGEERREGTDSPSPESGTDAAGGAASGSDSADKKAQGPKGGGNAVKVRHILCEKHGKIMEAMEKLKSGMRFNEVAAQYSEDKARQGIPSLQQHAGHHRDLRSTLISLVSYLQTTP

SEQ ID NO: 61313 - protein, 44 aa, Homo sapiens
MQRICSFTTFMRNKNLDNFLMALLYYLSHYLEKNSLEKKPKSYM

SEQ ID NO: 61314 - protein, 35 aa, Homo sapiens
  MOD_RES (1)..(1): Any amino acid
XVIPNLFPKYIRAPNGPEANPVKQLQPNEEADYLG

SEQ ID NO: 61315 - protein, 258 aa, Homo sapiens
  MOD_RES (1)..(1): Any amino acid
XEHQKLEENIDNIKRNHNLALGRQKGYEEEIIHFKKELREPQFRDAEEKYREMMIVMRTTELVNKDLDIYYKTLDQAIMKFHSMKMEEINKIIRDLWRSTYRGQDIEYIEIRSDADENVSASDKRRNYNYRVVMLKGDTALDMRGRCSAGQKVLASLIIRLALAETFCLNCGIIALDEPTTNLDRENIESLAHALVEIIKSRSQQRNFQLLVITHDEDFVELLGRSEYVEKFYRIKKNIDQCSEIVKCSVSSLGFNVH

SEQ ID NO: 61316 - protein, 39 aa, Homo sapiens
MATGRGRILQQHWLGLQTLRGPSRGGGAARGRARAFGCR

SEQ ID NO: 61317 - protein, 98 aa, Homo sapiens
MQLFVRAQELHTFEVTGQETVAQIKALTTLEVAGRMLGGKVHGSLARAGKVRGQTPKVAKQEKKKKKTGRAKRRMQYNRRFVNVVPTFGKKKGPNANS

SEQ ID NO: 61318 - protein, 976 aa, Homo sapiens
MYGSARSVGKVEPSSQSPGRSPRLPRSPRLGHRRTNSTGGSSGSSVGGGSGKTLSMENIQSLNAAYATSGPMYLSDHENVGSETPKSTMTLGRSGGRLPYGVRMTAMGSSPNIASSGVASDTIAFGEHHLPPVSMASTVPHSLRQARDNTIMDLQTQLKEVLRENDLLRKDVEVKESKLSSSMNSIKTFWSPELKKERALRKDEASKITIWKEQYRVVQEENQHMQMTIQALQDELRIQRDLNQLFQQDSSSRTGEPCVAELTEENFQRLHAEHERQAKELFLLRKTLEEMELRIETQKQTLNARDESIKKLLEMLQSKGLSAKATEEDHERTRRLAEAEMHVHHLESLLEQKEKENSMLREEMHRRFENAPDSAKTKALQTVIEMKDSKISSMERGLRDLEEEIQMLKSNGALSTEEREEEMKQMEVYRSHSKFMKNKVEQLKEELSSKEAQWEELKKKAAGLQAEIGQVKQELSRKDTELLALQTKLETLTNQFSDSKQHIEVLKESLTAKEQRAAILQTEVDALRLRLEEKETMLNKKTKQIQDMAEEKGTQAGEIHDLKDMLDVKERKVNVLQKKIENLQEQLRDKEKQMSSLKERVKSLQADTTNTDTALTTLEEALAEKERTIERLKEQRDRDEREKQEEIDNYKKDLKDLKEKVSLLQGDLSEKEASLLDLKEHASSLASSGLKKDSRLKTLEIALEQKKEECLKMESQLKKAHEAALEARASPEMSDRIQHLEREITRYKDESSKAQAEVDRLLEILKEVENEKNDKDKKIAELESLTSRQVKDQNKKVANLKHKEQVEKKKSAQMLEEARRREDNLNDSSQQLQVEELLMAMEKVKQELESMKAKLSSTQQSLAEKETHLTNLRAERRKHLEEVLEMKQEALLAAISEKDANIALLELSSSKKKTQEEVAALKREKDRLVQQLKQQTQNRMKLMADNYEDDHFKSSHSNQTNHKPSPDQDEEEGIWA

SEQ ID NO: 61319 - protein, 25 aa, Homo sapiens
MAAAEPMGPAQEHELNNYSCKKAHS

SEQ ID NO: 61320 - protein, 997 aa, Homo sapiens
MAETNNECSIKVLCRFRPLNQAEILRGDKFIPIFQGDDSVVIGGKPYVFDRVFPPNTTQEQVYHACAMQIVKDVLAGYNGTIFAYGQTSSGKTHTMEVSYFEIYLDKIRDLLDVTKTNLSVHEDKNRVPFVKGCTERFVSSPEEILDVIDEGKSNRHVAVTNMNEHSSRSHSIFLINIKQENMETEQKLSGKLYLVDLAGSEKVSKTGAEGAVLDEAKNINKSLSALGNVISALAEGTKSYVPYRDSKMTRILQDSLGGNCRTTMFICCSPSSYNDAETKSTLMFGQRAKTIKNTASVNLELTAEQWKKKYEKEKEKTKAQKETIAKLEAELSRWRNGENVPETERLAGEEAALGAELCEETPVNDNSSIVVRIAPEERQKYEEEIRRLYKQLDDKDDEINQQSQLIEKLKQQMLDQEELLVSTRGDNEKVQRELSHLQSENDAAKDEVKEVLQALEELAVNYDQKSQEVEEKSQQNQLLVDELSQKVATMLSLESELQRLQEVSGHQRKRIAEVLNGLMKDLSEFSVIVGNGEIKLPVEISGAIEEEFTVARLYISKIKSEVKSVVKRCRQLENLQVECHRKMEVTGRELSSCQLLISQHEAKIRSLTEYMQSVELKKRHLEESYDSLSDELAKLQAQETVHEVALKDKEPDTQDADEVKKALELQMESHREAHHRQLARLRDEINEKQKTIDELKDLNQKLQLELEKLQADYEKLKSEEHEKSTKLQELTFLYERHEQSKQDLKGLEETVARELQTLHNLRKLFVQDVTTRVKKSAEMEPEDSGGIHSQKQKISFLENNLEQLTKVHKQLVRDNADLRCELPKLEKRLRATAERVKALEGALKEAKEGAMKDKRRYQQEVDRIKEAVRYKSSGKRGHSAQIAKPVRPGHYPASSPTNPYGTRSPECISYTNSLFQNYQNLYLQATPSSTSDMYFANSCTSSGATSSGGPLASYQKANMDNGNATDINDNRSDLPCGYEAEDQAKLFPLHQETAAS

SEQ ID NO: 61321 - protein, 345 aa, Homo sapiens
MTQLCELINKSGELLAKNLSHLDTVLGALDVQEHSLGVLAVLFVKFSMPSVPDFETLFSQVQLFISTCNGEHIRYATDTFAGLCHQLTNALVERKQPLRGIGILKQAIDKMQMNTNQLTSIHADLCQLCLLAKCFKPALPYLDVDMMDICKENGAYDAKHFLCYYYYGGMIYTGLKNFERALYFYEQAITTPAMAVSHIMLESYKKYILVSLILLGKVQQLPKYTSQIVGRFIKTFLTLSLQDMASRVQLSGPQEAEKYVLHMIEDGEIFASINQKDGMVSFHDNPEKYNNPAMLHNIDQEMLKCIELDERLKAMDQEITVNPQFVQKSMGSQEDDSGNKPSSYS

SEQ ID NO: 61322 - protein, 495 aa, Homo sapiens
MWQLTSLLLFVATWGISGTPAPLDSVFSSSERAHQVLRIRKRANSFLEELRHSSLERECIEEICDFEEAKEIFQNVDDTLAFWSKHVDGDQCLVLPLEHPCASLCCGHGTCIDGIGSFSCDCRSGWEGRFCQRGEGERWMLAGGGAGLGPGWGRGTSTSCPRPPLPAEVSFLNCSLDNGGCTHYCLEEVGWRRCSCAPGYKLGDDLLQCHPAVKFPCGRPWKRMEKKRSHLKRDTEDQEDQVDPRLIDGKMTRRGDSPWQVVLLDSKKKLACGAVLIHPSWVLTAAHCMDESKKLLVRLGEYDLRRWEKWELDLDIKEVFVHPNYSKSTTDNDIALLHLAQPATLSQTIVPICLPDSGLAERELNQAGQETLVTGWGYHSSREKEAKRNRTFVLNFIKIPVVPHNECSEVMSNMVSENMLCAGILGDRQDACEGDSGGPMVASFHGTWFLVGLVSWGEGCGLLHNYGVYTKVSRYLDWIHGHIRDKEAPQKSWAP

SEQ ID NO: 61323 - protein, 155 aa, Homo sapiens
MDTMMLNVRNLFEQLVRRVEILSEGNEVQFIQLAKDFEDFRKKWQRTDHELGKYKDLLMKAETERSALDVKLKHARNQVDVEIKRRQRAEADCEKLERQIQLIREMLMCDTSGSIQLSEEQKSALAFLNRGQPSSSNAGNKRLSTIDESGSILSD

SEQ ID NO: 61324 - protein, 415 aa, Homo sapiens
MTGSSVFDYIHPGDHSEVLEQLGLRTPTPGPPTPPSVSSSSSSSSSLADTPEIEASLTKVPPSSLVQERSFFVRMKSTLTKRGLHVKASGYKQVIHVTGRLRAHALGLVALGHTLPPAPLAELPLHGHMIVFRLSLGLTILACESRVSDHMDLGPSELVGRSCYQFVHGQDATRIRQSHVDLLDKGQVMTGYYRWLQRAGGFVWLQSVATVAGSGKSPGEHHVLWVSHVLSQAEGGQTPLDAFQLPASVACEEASSPGPEPTEPEPPTEGKQAAPAENEAPQTQGKRIKVEPGPRETKGSEDSGDEDPSSHPATPRPEFTSVIRAGVLKQDPVRPWGLAPPGDPPPTLLHAGFLPPVVRGLCTPGTIRYGPAELGLVYPHLQRLGPGPALPEAFYPPLGLPYPGPAGTRLPRKGD

SEQ ID NO: 61325 - protein, 46 aa, Homo sapiens
MAFKDTGKTPVEPEVAIHRIRITLTSRNVKSLEKDFENHYKKNSLW

SEQ ID NO: 61326 - protein, 131 aa, Homo sapiens
EMRLPDIPLRQVIAEECVAFMLNWRENEYLTLQVPAFLLQSNPYVKLGQLLAATCKELPGPKESRRTAKDLWEVVVQICSVSSQHKRGNDGRVSLIKQRESTLGIMYRSELLSFIKKLRGQGLDLSPKLEC

SEQ ID NO: 61327 - protein, 77 aa, Homo sapiens
IIYLRRFKCLRTLSLSRNPISEAEDYKMFICAYLPDLMYLDYRRIDDHTASVSLSVSQPCETDSSSPQVSWKRGIEE

SEQ ID NO: 61328 - protein, 266 aa, Homo sapiens
MSDGFDRAPGAGRGRSRGLGRGGGGPEGGGFPNGAGPAERARHQPPQPKAPGFLQPPPLRQPRTTPPPGAQCEVPASPQRPSRPGALPEQTRPLRAPPSSQDKIPQQNSESAMAKPQVVVAPVLMSKLSVNAPEFYPSGYSSSYTESYEDGCEDYPTLSEYVQDFLNHLTEQPGSFETEIEQFAETLNGCVTTDDALQELVELIYQQATSIPNFSYMGARLCNYLSHHLTISPQSGNFRQLLLQRSREQMDRLQEQIFFRLVFENC

SEQ ID NO: 61329 - protein, 189 aa, Homo sapiens
MPMTLGYWDIRGLAHAIRLLLEYTDSSYVEKKYTLGDAPDYDRSQWLNEKFKLGLDFPNLPYLIDGAHKITQSNAILRYIARKHNLCGETEEEKIRVDILENQVMDNHMELVRLCYDPDFEKLKPKYLEELPEKLKLYSEFLGKRPWFAGDKITFVDFLAYDVLDMKRIFEPKCLDAFLNLKDFISRFE

SEQ ID NO: 61330 - protein, 288 aa, Homo sapiens [sequence omitted]

SEQ ID NO: 61331 - protein, 43 aa, Homo sapiens
MKMASFLAFLLLNFRVCLLLLQLLMPHSAQFSVLGPSGPILAM

SEQ ID NO: 61332 - protein, 47 aa, Homo sapiens
LNIVGLQFSHHHLFNQEQVLCARLLQLYECFQDRQQQNVSQLLYEKL

SEQ ID NO: 61333 - protein, 259 aa, Homo sapiens
ELHLLKQIKVKGPRYWELLIDLSKGTQHLKSILSKDGVLYVKLRAGQLSYKEDPMGWQSLLAQTVANRNSEARAFKPETISAFTSDPALLSFAEYFCKPTVNMGQKQEILDLFSSVLYECVTQETPEMLPAYIAMDQAIRRLGRREMSETSELWQIKLVLEFFSSRSHQERLQNHPKRGLFMNSEFLPVVKCTIDNTLDQWLQVGGDMCVHAYLSGQPLEESQLSMLACFLVYHSVPAPQHLPPIGLEGLLKDLAGDSG

SEQ ID NO: 61334 - protein, 54 aa, Homo sapiens
MPPPGKVPRKENLWLQCEWGSCSFVCSTMEKFFEHVTQHLQQHLHGSGEEEEEE

SEQ ID NO: 61335 - protein, 133 aa, Homo sapiens
MFYIIGGVATLLLILVIIVFKEKPKYPPSRAQSLSYALTSPDASYLGSIARLFKNLNFVLLVITYGLNAGAFYALSTLLNRMVIWHYPGEEVNAGRIGLTIVIAGMLGAVISGIWLDRSKTYKNLCHPNCLIQ

SEQ ID NO: 61336 - protein, 130 aa, Homo sapiens
MGSGCRIECIFFSEFHPTLGPKITYQVPEDFISRELFDTVQVYIITKPELQNKLITVTAMEKKLIGCPVCIEHKKYSRNALLFNLGFVCDAQAKTCALEPIVKKLAGYLTTLERAASCPWRRASRSWCPS

SEQ ID NO: 61337 - protein, 166 aa, Homo sapiens
MQPPVPGPLGLLDPAEGLSRRKKTSLWFVGSLLLVSVLIVTVGLAATTRTENVTVGGYYPGIILGFGSFLGIIGINLVENRRQMLVAAIVFISFGVVAAFCCAIVDGVFAAQHIEPRPLTTGRCQFYSSGVGYLYDVYQTEVSRSTEIHVGFAQLTPPTPRGFPCT

SEQ ID NO: 61338 - protein, 171 aa, Homo sapiens
LGGLLGRQRLLLRMGGGRLGAPMERHGRASATSVSSAGEQAAGDPEGRRQEPLRRRASSASVPAVGASAEGTRRDRLGSYSGPTSVSRQRVESLRKKRPLFPWFGLDIGGTLVKLVYFEPKDITAEEEEEEVESLKSIRKYLTSNVAYGSTGIRDVHLELKDLTLCGRKDR

SEQ ID NO: 61339 - protein, 626 aa, Homo sapiens
MRKPRRKSRQNAEGRRSPSPYSLKCSPTRETLTYAQAQRIVEVDIDGRLHRISIYDPLKIITEDELTAQDITECNSNKENSEQPQFPGKSKKPSSKGKKKESCSKHASGTSFHLPQPSFRMVDSGIQPEAPPLPAAYYRYIEKPPEDLDAEVEYDMDEEDLAWLDMVNEKRRVDGHSLVSADTFELLVDRLEKESYLESRSSGAQQSLIDEDAFCCVCLDDECHNSNVILFCDICNLAVHQECYGVPYIPEGQWLCRCCLQSPSRPVDCILCPNKGGAFKQTSDGHWAHVVCAIWIPEVCFANTVFLEPIEGIDNIPPARWKLTCYICKQKGLGAAIQCHKVNCYTAFHVTCAQRAGLFMKIEPMRETSLNGTIFTVRKTAYCEAHSPPGAATARRKGDSPRSISETGDEEGLKEGDGEEEEEEEVEEEEQEAQGGVSGSLKGVPKKSKMSLKQKIKKEPEEAGQDTPSTLPMLAVPQIPSYRLNKICSGLSFQRKNQFMQRLHNYWLLKRQARNGVPLIRRLHSHLQSQRNAEQREQDEKTSAVKEELKYWQKLRHDLERARLLIELIRKREKLKREQVKVQQAAMELELMPFNVLLRTTLDLLQEKDPAHIFAEPVNLSEVLYV

SEQ ID NO: 61340 - protein, 117 aa, Homo sapiens
MAGPGSTGGQIGAAALAGGARSKVAPSVDFDHSCSDSVEYLTLNFGPFETVHRWRRLPPCDEFVGARRSKHTVVAYKDAIYVFGGDNGKTMLNDLLRFDVKDCSWCRGLHWGHLFQF

SEQ ID NO: 61341 - protein, 206 aa, Homo sapiens
  MOD_RES (1)..(1): Any amino acid
XNLRYLMKFLARLAEEQEVNKMTPSNIAIVLGPNLLWPPEKEGDQAQLDAASVSSIQVVGVVEALIQSADTLFPGDINFNVSGLFSAVTLQDTVSDRLASEELPSTAVPTPATTPAPAPAPAPAPAPALASAATKERTESEVPPRPASPKVTRSPPETAAPVEDMARRSPRGATGRKERFACSYGTDSSLADMFFVRLVNKLFWTK

SEQ ID NO: 61342 - protein, 353 aa, Homo sapiens [sequence omitted]

SEQ ID NO: 61343 - protein, 102 aa, Homo sapiens
MPKRKAAGQGDMRQEPKRRSARLSAMLVPVTPEVKPKRTSSSRKMKTKSDMMEENIDTSAQAVAETKQEAVVEEDYNENAKNGEAKITEAPASEKEIVEVKE

SEQ ID NO: 61344 - protein, 1188 aa, Homo sapiens
MGDMTNSDFYSKNQRNESSHGGEFGCTMEELRSLMELRGTEAVVKIKETYGDTEAICRRLKTSPVEGLPGTAPDLEKRKQIFGQNFIPPKKPKTFLQLVWEALQDVTLIILEIAAIISLGLSFYHPPGEGNEGCATAQGGAEDEGEAEAGWIEGAAILLSVICVVLVTAFNDWSKEKQFRGLQSRIEQEQKFTVVRAGQVVQIPVAEIVVGDIAQVKYGDLLPADGLFIQGNDLKIDESSLTGESDQVRKSVDKDPMLLSGTHVMEGSGRMLVTAVGVNSQTGIIFTLLGAGGEEEEKKDKKAADGAAASNAADSANASLVNGKMQDGNVDASQSKAKQQDGAAAMEMQPLKSAEGGDADDRKKASMHKKEKSVLQGKLTKLAVQIGKAGLVMSAITVIILVLYFTVDTFVVNKKPWLPECTPVYVQYFVKFFIIGVTVLVVAVPEGLPLAVTISLAYSVKKMMKDNNLVRHLDACETMGNATAICSDKTGTLTTNRMTVVQAYVGDVHYKEIPDPSSINTKTMELLINAIAINSAYTTKILPPEKEGALPRQVGNKTECGLLGFVLDLKQDYEPVRSQMPEEKLYKVYTFNSVRKSMSTVIKLPDESFRMYSKGASEIVLKKCCKILNGAGEPRVFRPRDRDEMVKKVIEPMACDGLRTICVAYRDFPSSPEPDWDNENDILNELTCICVVGIEDPVRPEVPEAIRKCQRAGITVRMVTGDNINTARAIAIKCGIIHPGEDFLCLEGKEFNRRIRNEKGEIEQERIDKIWPKLRVLARSSPTDKHTLVKGIIDSTHTEQRQVVAVTGDGTNDGPALKKADVGFAMGIAGTDVAKEASDIILTDDNFSSIVKAVMWGRNVYDSISKFLQFQLTVNVVAVIVAFTGACITQDSPLKAVQMLWVNLIMDTFASLALATEPPTETLLLRKPYGRNKPLISRTMMKNILGHAVYQLALIFTLLFVGEKMFQIDSGRNAPLHSPPSEHYTIIFNTFVMMQLFNEINARKIHGERNVFDGIFRNPIFCTIVLGTFAIQIVIVQFGGKPFSCSPLQLDQWMWCIFIGLGELVWGQVIATIPTSRLKFLKEAGRLTQKEEIPEEELNEDVEEIDHAERELRRGQILWFRGLNRIQTQIEVVNTFKSGASFQGALRRQSSVTSQSQDVANLSSPSRVSLSNALSSPTSLPPAAAGQG

SEQ ID NO: 61345 - protein, 166 aa, Homo sapiens
  MOD_RES (1)..(1): Any amino acid
XRPPRPPPRGTPPRRHSFRKHLYLLRGLPGSGKTTLARQLQHDFPRALIFSTDDFFFREDGAYEFNPDFLEEAHEWNQKRARKAMRNGISPIIIDNTNLHAWEMKPYAVMALENNYEVIFREPDTRWKFNVQELARQIVSSKWICGLLHQNCLRWLLKSEFMDPIQ

SEQ ID NO: 61346 - protein, 728 aa, Homo sapiens
MVAERTHKAAATGARGPGELGAPGTVALVAARAERGARLPSPGSCGLLTLALCSLALSLLAHFRTAELQARVLRLEAERGEQQMETAILGRVNQLLDEKWKLHSRRRREAPKTSPGCNCPPGPPGPTGRPGLPGDKGAIGMPGRVGVKGQPGEKGSPGDAGLSIIGPRGPPGQPGTRGFPGFPGPIGLDGKPGHPGPKGDMGLTGPPGQPGPQGQKGEKGQCGEYPHRLLPLLNSVRLAPPPVIKRRTFQGEQSQASIQGPPGPPGPPGPSGPLGHPGLPGPMGPPGLPGPPGPKGDPGIQGYHGRKGERGMPGMPGKHGAKGAPGIAVAGMKGEPGIPGTKGDPGAEGKPGPPGLLGKRGQRGEKGAEGSPGLPGLLGQKGEKGDAGNSIGGGRGEPGPPGLPGPPGPKGEAGVDGQVGPPGQPGDKGERGAAGEQGPDGPKGSKGEPGKGEMVDYNGNINEALQEIRTLALMGPPGLPGQIGPPGAPGIPGQKGEIGLPGPPGHDGEKGPRGKPGDMGPPGPQGPPGKDGPPGVKGENGHPGSPGEKGEKGETGQAGSPGEKGEAGEKGNPGAEVPGLPGPEGPPGPPGLQGVPGPKGEAGLDGAKGEKGFQGEKGDRGPLGLPGASGLDGRPGPPGTPGPIGVPGPAGPKGERGSKGDPGMTGPTGAAGLPGLHGPPGDKGNRGERGKKGSRGPKGDKGDQGAPGLDAPCPLGEDGLPVQGCWNK

SEQ ID NO: 61347 - protein, 612 aa, Homo sapiens
MPRRKQEQPKRLPSHVSRQEEAEGELSEGEHWYGNSSETPSEASYGEVQENYKLSLEDRIQEQSTSPDTSLGSTTPSSHTLELVALDSEVLRDSLQCQDHLSPGVSSLCDDDPGSNKPLSSNLRRLLEAGSLKLDAAATANGRVESPVNVGSNLSFSPPSHHAQQLSVLARKLAEKQEQNDQYTPSNRFIWNQGKWLPNSTTTCSLSPDSAILKLKAAANAVLQDKSLTRTEETMRFESFSSPFSSQSASSTLAALSKKVSERSLTPGQEHPPPASSFLSLASMTSSAALLKEVAARAAGSLLAEKSSLLPEDPLPPPPSEKKPEKVTPPPPPPPPPPPPPPPQSLELLLLPVPKGRVSKPSNSASEEESGKPFQCPICGLVIKRKSYWKRHMVIHTGLKSHQCPLCPFRCARKDNLKSHMKVHQHQDRGETFQCQLCPFTSSRHFSLKLHMRCHQHFLRTEAKVKEEIPDPDVKGSPHLSDSACLGQQREGGGTELVGTMMTSNTPERTSQGGAGVSPLLVKEEPKEDNGLPTSFTLNAADRPANHTKLKDPSEYVANSASALFSQDISVKMASDFLMKLSGSPQLKKSISFCFKVDNIWQLPSFLIINGR

SEQ ID NO: 61348 - protein, 1901 aa, Homo sapiens
MDQMGKMRPQPYGGTNPYSQQQGPPSGPQQGHGYPGQPYGSQTPQRYPMTMQGRAQSAMGGLSYTQQIPPYGQQGPSGYGQQGQTPYYNQQSPHPQQQQPPYSQQPPSQTPHAQPSYQQQPQSQPPQLQSSQPPYSQQPSQPPHQQSPAPYPSQQSTTQQHPQSQPPYSQPQAQSPYQQQQPQQPAPSTLSQQAAYPQPQSQQSQQTAYSQQRFPPPQELSQDSFGSQASSAPSMTSSKGGQEDMNLSLQSRPSSLPDLSGSIDDLPMGTEGALSPGVSTSGISSSQGEQSNPAQSPFSPHTSPHLPGIRGPSPSPVGSPASVAQSRSGPLSPAAVPGNQMPPRPPSGQSDSIMHPSMNQSSIAQDRGYMQRNPQMPQYSSPQPGSALSPRQPSGGQIHTGMGSYQQNSMGSYGPQGGQYGPQGGYPRQPNYNALPNANYPSAGMAGGINPMGAGGQMHGQPGIPPYGTLPPGRMSHASMGNRPYGPNMANMPPQVGSGMCPPPGGMNRKTQETAVAMHVAANSIQNRPPGYPNMNQGGMMGTGPPYGQGINSMAGMINPQGPPYSMGGTMANNSAGMAASPEMMGLGDVKLTPATKMNNKADGTPKTESKSKKSSSSTTTNEKITKLYELGGEPERKMWVDRYLAFTEEKAMGMTNLPAVGRKPLDLYRLYVSVKEIGGLTQVNKNKKWRELATNLNVGTSSSAASSLKKQYIQCLYAFECKIERGEDPPPDIFAAADSKKSQPKIQPPSPAGSGSMQGPQTPQSTSSSMAEGGDLKPPTPASTPHSQIPPLPGMRSNSVGIQDAFNDGSDSTFQKRNSMTPNPGYQPSMNTSDMMGRMSYEPNKDPYGSMRKAPGSDPFMSSGQGPNGGMGDPYSRAAGPGLGNVAMGPRQHYPYGGPYDRVRTEPGIGPEGNMSTGAPQPNLMPSNPDSGMYSPSRYPPQQQQQQQQRHDSYGNQFSTQGTPSGSPFPSQQTTMYQQQQQNYKRPMDGTYGPPAKRHEGEMYSVPYSTGQGQPQQQQLPPAQPQPASQQQAAQPSPQQDVYNQYGNAYPATATAATERRPAGGPQNQFPFQFGRDRVSAPPGTNAQQNMPPQMMGGPIQASAEVAQQGTMWQGRNDMTYNYANRQSTGSAPQGPAYHGVNRTDEMLHTDQRANHEGSWPSHGTRQPPYGPSAPVPPMTRPPPSNYQPPPSMQNHIPQVSSPAPLPRPMENRTSPSKSPFLHSGMKMQKAGPPVPASHIAPAPVQPPMIRRDITFPPGSVEATQPVLKQRRRLTMKDIGTPEAWRVMMSLKSGLLAESTWALDTINILLYDDNSIMTFNLSQLPGLLELLVEYFRRCLIEIFGILKEYEVGDPGQRTLLDPGRFSKVSSPAPMEGGEEEEELLGPKLEEEEEEEVVENDEEIAFSGKDKPASENSEEKLISKFDKLPVKIVQKNDPFVVDCSDKLGRVQEFDSGLLHWRIGGGDTTEHIQTHFESKTELLPSRPHAPCPPAPRKHVTTAEGTPGTTDQEGPPPDGPPEKRITATMDDMLSTRSSTLTEDGAKSSEAIKESSKFPFGISPAQSHRNIKILEDEPHSKDETPLCTLLDWQDSLAKRCVCVSNTIRSLSFVPGNDFEMSKHPGLLLILGKLILLHHKHPERKQAPLTYEKEEEQDQGVSCNKVEWWWDCLEMLRENTLVTLANISGQLDLSPYPESICLPVLDGLLHWAVCPSAEAQDPFSTLGPNAVLSPQRLVLETLSKLSIQDNNVDLILATPPFSRLEKLYSTMVRFLSDRKNPVCREMAVVLLANLAQGDSLAARAIAVQKGSIGNLLGFLEDSLAATQFQQSQASLLHMQNPPFEPTSVDMMRRAARALLALAKVDENHSEFTLYESRLLDISVSPLMNSLVSQVICDVLFLIGQS

SEQ ID NO: 61349 - protein, 92 aa, Homo sapiens
MVESIKHCIVLLQIAKDQSNAEKHADGMISTINPVDAIYQPSPLEPVISTMPSQTVLPPEPVQLCKSEQRPSSLPVGPVLATLGHHQTPTPN

SEQ ID NO: 61350 - protein, 180 aa, Homo sapiens
MTLLPGDNSDYDYSALSCTSDASFHPAFLPQRQAIKGAFYRRAQRLRPQDEPRQGCQPEDRRRRIIINVGGIKYSLPWTTLDEFPLTRLGQLKACTNFDDILNVCDDYDVTCNEFFFDRNPGAFGTILTFLRAGKLRLLREMCALSFQEELLYWGIAEDHLDGCCKRRYLQKIEEFAEMV

SEQ ID NO: 61351 - protein, 37 aa, Homo sapiens
MQPQESHVHYSRWEDGSRDGVSLGAVSSTEEASRCRR

SEQ ID NO: 61352 - protein, 90 aa, Homo sapiens
  MOD_RES (1)..(1): Any amino acid
XMLWERLSSTKRAVKAALADDFDTPRVVDAILGLAHHGNGQLRASLKEPEGPRSPAVFGAIISYFEQFFETVGISLANQQLANSRAQNQR

SEQ ID NO: 61353 - protein, 597 aa, Homo sapiens
MGHPPLEFSDCYLDSPDFRERLKCYEQELERTNKFIKDVIKDGNALISAMRNYSSAVQKFSQTLQSFQFDFIGDTLTDDEINIAESFKEFAELLNEVENERMMMVHNASDLLIKPLENFRKEQIGFTKERKKKFEKDGERFYSLLDRHLHLSSKKKESQLQEADLQVDKERHNFFESSLDYVYQIQEVQESKKFNIVEPVLAFLHSLFISNSLTVELTQDFLPYKQQLQLSLQNTRNHFSSTREEMEELKKRMKEAPQTCKLPGQPTIEGYLYTQEKWALGISWVKYYCQYEKETKTLTMTPMEQKPGAKQGPLDLTLKYCVRRKTESIDKRFCFDIETNERPGTITLQALSEANRRLWMEAMDGKEPIYHSPITKQQEMELNEVGFKFVRKCINIIETKGIKTEGLYRTVGSNIQVQKLLNAFFDPKCPGDVDFHNSDWDIKTITSSLKFYLRNLSEPVMTYRLHKELVSAAKSDNLDYRLGAIHSLVYKLPEKNREMLELLIRHLVNVCEHSKENLMTPSNMGVIFGPTLMRAQEDTVAAMMNIKFQNIVVEILIEHFGKVDELAQWLMPVIPALWKVNMRELFEPRSSRQAWAA

SEQ ID NO: 61354 - protein, 130 aa, Homo sapiens
TRQEQGAENEELHQLWRKLTQFLAESTEDQNNETQQLLFTAFENALGLSDKIPSEDHQVLYRHFIQSLSKFPHESARLKKACEGMINIYPTVQYPLEVLCLHLIESGNGFSYPNNSNSKGKCWNGKMGLA

SEQ ID NO: 61355 - protein, 102 aa, Homo sapiens
MSDPYMPSYYAPSIGFPYSLGEAAWSTAGDQPMPYLTTYGQMSNGEHHYIPDGVFSQPGALGNTPPFLGQHGFNFFPGNADFSTWGTSGSQGQSTQSSAYSS

SEQ ID NO: 61356 - protein, 159 aa, Homo sapiens
  MOD_RES (1)..(1): Any amino acid
XYVGHLRATEKMKTRELHRESSNFDSIYICPSTFACAQLATGAACRLVEAVLSGEVLNGAAVVRPPGHHAEQDAACGFCFFNSVAVAARHAQTISGHALRILIVDWDVHHGNGTQHMFEDDPSLTQNWCWSQLALMLHGGIRWGAARCHLRVMPTSPTC

SEQ ID NO: 61357 - protein, 75 aa, Homo sapiens
MAEEVVVVAKFDYVAQQEQELDIKKNERLWLLDDSKSWWRVRNSMNKTGFVPSNYVERKNSARKASIVKNLKDTL

SEQ ID NO: 61358 - protein, 136 aa, Homo sapiens
MCGICLSSLCAGWRFSVKEMKSERQIQLIREMLMCDTSGSIQLSEEQKSALAFLNRGQPSSSNAGNKRLSTIDESGSILSDISFDKTDESLDWDSSLVKTFKLKKREKRRSTSRQFVDGPPGPVKKTRSIGSAVDQ

SEQ ID NO: 61359 - protein, 69 aa, Homo sapiens
MAPIGLKAVVGEKIMHDVIKKVKKKGEWKVLVVDQLSMRMLSSCCKMTDIMTEGITNSSSNLCAKTRSS

SEQ ID NO: 61360 - protein, 653 aa, Homo sapiens
MVPWVRTMGQKLKQRLRLDVGREICRQYPLFCFLLLCLSAASLLLNRYIHILMIFWSFVAGVVTFYCSLGPDSLLPNIFFTIKYKPKQLGLQELFPQGHSCAVCGKVKCKRHRPSLLLENYQPWLDLKISSKVDASLSEVLELVLENFVYPWYRDVTDDESFVDELRITLRFFASVLIRRIHKVDIPSIITKKLLKAAMKHIEVIVKARQKVKNTEFLQQAALEEYGPELHVALRSRRDELHYLRKLTELLFPYILPPKATDCRSLTLLIREILSGSVFLPSLDFLADPDTVNHLLIIFIDDSPPEKATEPASPLVPFLQKFAEPRNKKPSVLKLELKQIREQQDLLFRFMNFLKQEGAVHVLQFCLTVEEFNDRILRPELSNDEMLSLHEELQKIYKTYCLDESIDKIRFDPFIVEEIQRIAEGPYIDVVKLQTMRCLFEAYEHVLSLLENVFTPMFCHSDELFNDLFKNNANRAENTERKQNQNYFMEVMTVEGVYDYLMYVGRVVFQVPDWLHHLLMGTRILFKNTLEMYTDYYLQCKLEQLFQEHRLVSLITLLRDAIFCENTEPRSLQDKQKGAKQTFEEMMNYIPDLLVKCIGEETKYESIRLLFDGLQQPVLNKQLTYVLLDIVIQELFPELNKVQKEVTSVTSWM

SEQ ID NO: 61361 - protein, 392 aa, Homo sapiens
MEFSIKQSPLSVQSVVKCIKMKQAPEILGSANGKTPSCEVNRECSVFLSKAQLSSSLQEGVMQKFNGHDALPFIPADKLKDLTSRVFNGEPGAHDAKLRFESQEMKGIGTPPNTTPIKNGSPEIKLKITKTYMNGKPLFESSICGDSAADVSQSEENGQKPENKARRNRKRSIKYDSLLEQGLVEAALVSKISSPSDKKIPAKKESCPNTGRDKDHLLKYNVGDLVWSKVSGYPWWPCMVSADPLLHSYTKLKGQKKSARQYHVQFFGDAPERAWIFEKSLVAFEGEGQFEKLCQESAKQAPTKAEKIKLLKPISGKLRAQWEMGIVQAEEAASMSVEERKAKFTFLYVGDQLHLNPQVAKEAGIAAESLGEMAESSGVSEEAAENPKSVRE

SEQ ID NO: 61362 - protein, 265 aa, Homo sapiens
MDFLEEPIPGVGTYDDFNTIDWVREKSRDRDRHREITNKSKESTWALIHSVSDAFSGWLLMLLIGLLSGSLAGLIDISAHWMTDLKEGICTGGFWFNHEHCCWNSEHVTFEERDKCPEWNSWSQLIISTDEGAFAYIVNYFMYVLWALLFAFLAVSLVKVFAPYACGSGIPEIKTILSGFIIRGYLGKWTLVIKTITLVLAVSSGLSLGKEGPLVHVACCCGNILCHCFNKYRKNEAKRREVIGHGVGHRVRETLNTYCMNTCSC

SEQ ID NO: 61363 - protein, 85 aa, Homo sapiens
GGRALKENPVDLPATEQKENCLDCYMDPLRLSLLPPRARKPVCPPSLCSSVITIGDLVLDSDEEENGQGEGKVSGKEQKAGKGDG

SEQ ID NO: 61364 - protein, 41 aa, Homo sapiens
MYNDTLNGSTEKRSAELPDAVGPIVQLQEKLYVPVKEYPDL

SEQ ID NO: 61365 - protein, 209 aa, Homo sapiens
MDPQNQHGSGSSLVVIQQPSLDSRQRLDYEREIQPTAILSLDQIKAIRGSNEYTEGPSVVKRPAPRTAPRQEKHERTHEIIPINVNNNYEHRHTSHLGHAVLPSNARGPILSRSTSTGSAASSGSNSSASSEQGLLGRSPPTRPVPGHRSERAIRTQPKQLIVDDLKGSLKEDLTQHKFICEQCGKCKCGECTAPRTLPSCLACNRQCL

SEQ ID NO: 61366 - protein, 207 aa, Homo sapiens
  MOD_RES (1)..(1): Any amino acid
XQNITPVNESVVSSARAVNVLSVTGANLSLGSFPVTSASASAGAQPPVLVSGNDTSSRIMPILSNRLCSSSLGNTVAISTVKTGHLASSVLISTTQPVVSPKCLTSALQIPVTVALPTPATTSPKIINTVPHSAAVPGATRSVSISKRQSRTSLQFHSPGISTTVPTNVNTNKPQTELSSLSTSPVSFLLSVPSCHPTFLSIFSHGK

SEQ ID NO: 61367 - protein, 44 aa, Homo sapiens
MTKNEKKSLNQSLAEWKLFIYNPTTGEFLGRTAKSWGSQYVVGK

SEQ ID NO: 61368 - protein, 158 aa, Homo sapiens
MTAEDSTAAMSSDSAAGSSAKVPEGVAGAPNEAALLALMERTGYSMVQENGQRKYGGPPPGWEGPHPQRGCEVFVGKIPRDVYEDELVPVFEAVGRIYELRLMMDFDGKNRGYAFVMYCHKHEAKRAVRELNNYEIRPGRLLGVCCSVDNCRLFIGGI

SEQ ID NO: 61369 - protein, 173 aa, Homo sapiens
MDEDGLPLMGSGIDLTKVPAIQQKRTVAFLNQFVVHTVQFLNRFSTVCEEKLADLSLRIQQIETTLNILDAKLSSIPGLDDVTVEVSPLNVTSVTNGAHPEATSEQPQNSTQDSGLQESEVSAENILTVAKDPRYARYLKMVQVGVPVMAIRNKMISEGLDPDLLEKIKKRKK

SEQ ID NO: 61370 - protein, 223 aa, Homo sapiens
  MOD_RES (1)..(1): Any amino acid
XDGADASEEDLTRARQEEGADASEEDPTPAGEEDVKDAREEDGVDTIEEDLTRAGEEDGKDTREEDGADASEEDPTWAGEEEGADSGEEDGADASEEDDTITNEKAHSILNFLKSTQEMYFYDGVSRDAASAALADAAEELLDRLASHSMLPSDVSILYHMKTLLLLQDTERLKHALEMFPEHCTMPPGKYRTIYSRSCLRYSHRGLPLKDLHATKTAMSWKI

SEQ ID NO: 61371 - protein, 764 aa, Homo sapiens
MADLDSPPKLSGVQQPSEGVGGGRCSEISAELIRSLTELQELEAVYERLCGEEKVVERELDALLEQQNTIESKMVTLHRMGPNLQLIEGDAKQLAGMITFTCNLAENVSSKVRQLDLAKNRLYQAIQRADDILDLKFCMDGVQTALRSEDYEQAAAHTHRYLCLDKSVIELSRQGKEGSMIDANLKLLQEAEQRLKAIVAEKFAIATKEGDLPQVERFFKIFPLLGLHEEGLRKFSEYLCKQVASKAEENLLMVLGTDMSDRRAAVIFADTLTLLFEGIARIVETHQPIVETYYGPGRLYTLIKYLQVECDRQVEKVVDKFIKQRDYHQQFRHVQNNLMRNSTTEKIEPRELDPILTEVTLMNARSELYLRFLKKRISSDFEVGDSMASEEVKQEHQKCLDKLLNNCLLSCTMQELIGLYVTMEEYFMRETVNKAVALDTYEKGQLTSSMVDDVFYIVKKCIGRALSSSSIDCLCAMINLATTELESDFRDVLCNKLRMGFPATTFQDIQRGVTSAVNIMHSSLQQGKFDTKGIESTDEAKMSFLSDCTKLFSQGIGGEQAQAKFDSCLSDLAAVSNKFRDLLQEGLTELNSTAIKPQVQPWINSFFSVSHNIEEEEFNDYEANDPWVQQFILNLEQQMAEFKASLSPVIYDSLTGLMTSLVAVELEKVVLKSTFNRLGGLQFDKELRSLIAYLTTVTTWTIRDKFARLSQMATILNLERVTEILDYWGPNSGPLTWRLTPAEVRQVLALRIDFRSEDIKRLRL

SEQ ID NO: 61372 - protein, 411 aa, Homo sapiens
MSIKVTLLMVGLDNAGKTATAKGIQGEYPEDVAPTVGFSKINLRQGKFEVTIFDLGGGIRIRGIWKNYYAESYGVIFVVDSSDEERMEETKEAMSEMLRHPRISGKPILVLANKQDKEGALGEADVIECLSLEKLVNEHKCLCQIEPCSAISGYGKKIDKSIKKGLYWLLHVIARDFDALNERIQKETTEQRALEEQEKQERAERVRKLREERKQNEQEQAELDGTSGLAELDPEPTNPFQPIASVIIENEGKLEREKKNQKMEKDSDGCHLKHKMEHEQIETQGQVNHNGQKNNEFGLVENYKEALTQQLKNEDETDRPSLESANGKKKTKKLRMKRNHRVEPLNIDDCAPESPTPPPPPPPVGWGTPKVTRLPKLEPLGETHHNDFYRKPLPPLAVPQRPNSDAHDVIS

SEQ ID NO: 61373 - protein, 148 aa, Homo sapiens
MYRHLQYYGYFKAQRGSLPNSATHQHVRKNNPQCLLNGSLGEKDDLIPDTLQKEKLLWPISLSSAVHRQIEAINRDSHMLSLPHLRSRQLLYDELDEVNPRLREPQELFSILSTKRPLQAPRWPIECEVIKENIHHIEWAPPQPEYFY

SEQ ID NO: 61374 - protein, 152 aa, Homo sapiens
  MOD_RES (1)..(1): Any amino acid
XVWSSTLPAGSSMGTYHNNMTTQSSSLLNTNAYSAGSVFGVPNNMASCSPTLHPGLSTSSSAQKQRHRVAQNLPSTTGRTQTPREKSQARGREPTLTVWHAEQSGPQLDHPVPWHHHHFHSIWGEEKHAPESCGCEHWRFHLRRLHHKCAER

SEQ ID NO: 61375 - protein, 161 aa, Homo sapiens
MVPFDQKSGGKGGEDESVILKSCTRRKTDSIEKRFCFDVEAVDRPGVITMQALSEEDRRLWMEAMDGREPVYNSNKDSQSEGTAQLDSIGFSIIRKCIHAVETRGINEQGLYRIVGVNSRVQKLLSVLMDPKTASETETDICAEWEIKTITSALKTYLRML

SEQ ID NO: 61376 - protein, 50 aa, Homo sapiens
MLTPAFDLSQDPDFLTIAIRVPYARVSEFDVYFEGSDFKFYAKPYFLRTS

SEQ ID NO: 61377 - protein, 645 aa, Homo sapiens
MNIVENSIFLSNLMKSANTFELKYDLSCELYRMSTYSTFPAGVPVSERSLARAGFYYTGVNDKVKCFCCGLMLDNWKRGDSPTEKHKKLYPSCRFVQSLNSVNNLEATSQPTFPSSVTNSTHSLLPGTENSGYFRGSYSNSPSNPVNSRANQDFSALMRSSYHCAMNNENARLLTFQTWPLTFLSPTDLAKAGFYYIGPGDRVACFACGGKLSNWEPKDNAMSEHLRHFPKCPFIENQLQDTSRYTVSNLSMQTHAARFKTFFNWPSSVLVNPEQLASAGFYYVGNSDDVKCFCCDGGLRCWESGDDPWVQHAKWFPRWSLALLPRLECDGVMSAHCNLRLLGSGNSHASSLASSWDYRCEYLIRIKGQEFIRQVQASYPHLLEQLLSTSDSPGDENAESSIIHFEPGEDHSEDAIMMNTPVINAAVEMGFSRSLVKQTVQRKILATGENYRLVNDLVLDLLNAEDEIREEERERATEEKESNDLLLIRKNRMALFQHLTCVIPILDSLLTAGIINEQEHDVIKQKTQTSLQARELIDTILVKGNIAATVFRNSLQEAEAVLYEHLFVQQDIKYIPTEDVSDLPVEEQLRRLQEERTCKVCMDKEVSIVFIPCGHLVVCKDCAPSLRKCPICRSTIKGTVRTFLS

SEQ ID NO: 61378 - protein, 135 aa, Homo sapiens
  MOD_RES (1)..(1): Any amino acid
XTARKERKKQFIFSDGDCVDLNPEFGIFLTMNPGYAGRQELPENLKIQFRTVAMMVPDRQVHYDFGLRNILSVLRTLGSQKRARPEDSELSIVMRGLRDMNLSKLVDEDEPLFLSLINDLFPGLQLDSNTYAELQ

SEQ ID NO: 61379 - protein, 413 aa, Homo sapiens
  MOD_RES (1)..(1): Any amino acid
XCTKRHTDSIDRRFCFDIEAADRPGVSLTMQAFSEEERKQWLEALGGKEALSHSFNTAIIPRPEGNAQLDKMGFTIIRKCISAVETRGINDQGLYRVVGVSSKVQRLLSMLMDVKTCNEVDLENSADWEVKTITSALKQYLRSLPEPLMTYELHGDFIVPAKSGSPESRVNAIHFLVHKLPEKNKEMLDILVKHLTNVSNHSKQNLMTVANLGVVFGPTLMRPQEETVAALMDLKFQNIVVEILIENHEKIFRTPPDTTFPEPTCLSASPPNAPPRQSKRQGQRTKRPVAVYNLCLELEDGDNPYPSKEDTPTSSLDSLSSPSPVTTAVPGPPGPDKNHLLADGGSFGDWASTIIRSRKARAVYPCEAEHSSELSFEIGAIFEDVQTSREPGWLEGTLNGKRGLIPQNYVKLL

SEQ ID NO: 61380 - protein, 89 aa, Homo sapiens
MTPCTTAARGTPSALQDTRPPRLSICFEGPPLRRRGGVVDHRDVILAHQAHKIHSTPQARRKEWEKLPEDVLHPNKGVNQEEGNREHWT

SEQ ID NO: 61381 - protein, 209 aa, Homo sapiens; identical to SEQ ID NO: 43167

SEQ ID NO: 61382 - protein, 238 aa, Homo sapiens
MPSLWREILLESLLGCVSWSLYHDLGPMIYYFPLQTLELTGLEGFSIAFLSPIFLTITPFWKLVNKKWMLTLLRIITIGSIASFQAPNAKLRLMVLALGVSSSLIVQAVTWWSGSHLQRYLRIWGFILGQIVLVVLRIWYTSLNPIWSYQMSNKVILTLSAIATLDRIGTDGDCSKPEEKKTGEVATGMASRPNWLLAGAAFGSLVFLTHWVFGEVSLVSRWAVSGHPHPGPDPNPFG

SEQ ID NO: 61383 - protein, 127 aa, Homo sapiens
  MOD_RES (1)..(1): Any amino acid
XSQSPADQLLIAPANSPLQYPLQGVEVQPLRSILVPGLSLQAASGQEVYQVNLTASLGTWDVAGEVTGVTLTGEGQADLTLVSPGLDQLNRQLQLVTYSSRSYQTNTADTGSNAMSFLPSPVLHRGT

SEQ ID NO: 61384 - protein, 1132 aa, Homo sapiens
MPEPTKKEENEVPAPAPPPEDWTLVETPPGEEQAKQNANSQLSILFIEKPQGGTVKVGEDITFIAKVKAEDLLRKPTIKWFKGKWMDLASKAGKHLQLKETFERHSRVYTFEMQIIKAKDNFAGNYRCEVTYKDKFDSCSFDLEVHESTGTTPNIDIRSAFKRSGEGQEDAGELDFSGLLKRREVKQQEEEPQVDVWELLKNAKPSEYEKIAFQYGITDLRGMLKRLKRMRREEKKSAAFAKILDPAYQVDKGGRVRFVVELADPKLEVKWYKNGQEIRPSTKYIFEHKGCQRILFINNCQMTDDSEYYVTAGDEKCSTELFVREPPIMVTKQLEDTTAYCGERVELECEVSEDDANVKWFKNGEEIIPGPKSRYRIRVEGKKHILIIEGATKADAAEYSVMTTGGQSSAKLSVDLKPLKILTPLTDQTVNLGKEICLKCEISENIPGKWTKNGLPVQESDRLKVVHKGRIHKLVIANALTEDEGDYVFAPDAYNVTLPAKVHVIDPPKIILDGLDADNTVTVIAGNKLRLEIPISGEPPPKAMWSRGDKAIMEGSGRIRTESYPDSSTLVIDIAERDDSGVYHINLKNEAGEAHASIKVKVVDFPDPPVAPTVTEVGDDWCIMNWEPPAYDGGSPILGYFIERKKKQSSRWMRLNFDLCKETTFEPKKMIEGVAYEVRIFAVNAIGISKPSMPSRPFVPLAVTSPPTLLTVDSVTDTTVTMRWRPPDHIGAAGLDGYVLEYCFEGTEDWIVANKDLIDKTKFTITGLPTDAKIFVRVKAVNAAGASEPKYYSQPILVKEIIEPPKIRIPRHLKQTYIRRVGEAVNLVIPFQGKPRPELTWKKDGAEIDKNQINIRNSETDTIIFIRKAERSHSGKYDLQVKVDKFVETASIDIQIIDRPGPPQIVKIEDVWGENVALTWTPPKDDGNAAITGYTIQKADKKSMEWFTVIEHYHRTSATITELVIGNEYYFRVFSENMCGLSEDATMTKESAVIARDGKIYKNPVYEDFDFSEAPMFTQPLVNTYAIAGYNATLNCSVRGNPKPKITWMKNKVAIVDDPRYRMFSNQGVCTLEIRKPSPYDGGTYCCKAVNDLGTVEIECKLEVKVIYQGVNTPGQPVFLEGQQQSLHNKDF

SEQ ID NO: 61385 - protein, 157 aa, Homo sapiens
MVSWKGIYFILTLFWGSFFGSIFMLSPFLPLMFVNPSWYRWINNRLVATWLTLPVALLETMFGVKVIITGDAFVPGERSVIIMNHRTRMDWMFLWNCLMRYSYLRLEKICLKASLKGVPGFENSKSRSNAFAEKNGLQKYEYVLHPRTTGFTFVVDR

SEQ ID NO: 61386 - protein, 103 aa, Homo sapiens
MRLWHVVGIFSLFVLSIIITLCCVFNCRVPRTRKEIEARYLQRKAAKMYTDKLETVPPLNELTEVPGEDKKKKKKKKKDSVDTVAIKVEEDEKNEAKKKKGEK

SEQ ID NO: 61387 - protein, 507 aa, Homo sapiens
MAGPQMGGSAEDHPPRKRHAAEKQKKKTVIYTKCFEFESATQRPIDRQRYDENEDLSDVEEIVSVRGFSLEEKLRSQLYQGDFVHAMEGKDFNYEYVQREALRVPLIFREKDGLGIKMPDPDFTVRDVKLLVGSRRLVDVMDVNTQKGTEMSMSQFVRYYETPEAQRDKLYNVISLEFSHTKLEHLVKRPTVVDLVDWVDNMWPQHLKEKQTEATNAIAEMKYPKVKKYCLMSVKGCFTDFHIDFGGTSVWYHVFRGGKVQPKFRYPFYYEMCWYVLERYVYCVTQRSHLTQEYQRESMLIDAPRKPSIDGFSSDSWLEMEEEACDQQPQEEEEKDEEGEGRDRAPKPPTDGSTSPTSTPSEDQEALGKKPKAPALRFLKRTLSNESEESVKSTTLAVDYPKTPTGSPATEVSAKWTHLTEFELKGLKALVEKLESLPENKKCVPEGIEDPQALLEGVKNVLKEHADDDPSLAITGVPVVTWPKKTPKVRRSLPAAGGRFPPPSHLL

SEQ ID NO: 61388 - protein, 45 aa, Homo sapiens
  MOD_RES (1)..(1): Any amino acid
XPGGTWLCGDRVDLARHQPYTLLHLAQLPHGCGACLQGTLESRPL

SEQ ID NO: 61389 - protein, 953 aa, Homo sapiens
  MOD_RES (1)..(1): Any amino acid
XSSDEVILKPTGNQLTVEFLEENSFSVPILVLKKDGLGMTLPSPSFTVRDVEHYVGSDKEIDVIDVTRQADCKMKLGDFVKYYYSGKREKVLNVISLEFSDTRLSNLVETPKIVRKLSWVENLWPEECVFERPNVQKYCLMSVRDSYTDFHIDFGGTSVWYHVLKGEKIFYLIRPTNANLTLFECWSSSSNQNEMFFGDQVDKCYKCSVKQGQTLFIPTGWIHAVLTPVDCLAFGGNFLHSLNIEMQLKAYEIEKRLSTADLFRFPNFETICWYVGKHILDIFRGLRENRRHPASYLVHGGKALNLAFRAWTRKEALPDHEDEIPETVRTVQLIKDLAREIRLVEDIFQQNVGKTSNIFGLQRIFPAGSIPLTRPAHSTSVSMSRLSLPSKNGSKKKGLKPKELFKKAERKGKESSALGPAGQLSYNLMDTYSHQALKTGSFQKAKFNITGACLNDSDDDSPDLDLDGNESPLALLMSNGSTKRVKSLSKSRRTKIAKKVDKARLMAEQVMEDEFDLDSDDELQIDERLGKEKATLIIRPKFPRKLPRAKPCSDPNRVREPGEVEFDIEEDYTTDEDMVEGVEGKLGNGSGAGGILDLLKASRQVGGPDYAALTEAPASPSTQEAIQGMLCMANLQSSSSSPATSSLQAWWTGGQDRSSGSSSSGLGTVSNSPASQRTPGKRPIKRPAYWRTESEEEEENASLDEQDSLGACFKDAEYIYPSLESDDDDPALKSRPKKKKNSDDAPWSPKARVTPTLPKQDRPVREGTRVASIETGLAAAAAKLAQQELQKAQKKKYIKKKPLLKEVEQPRPQDSNLSLTVPAPTVAATPQLVTSSSPLPPPEPKQEALSGSLADHEYTARPNAFGMAQANRSTTPMAPGVFLTQRRPSVGSQSNQAGQGKRPKKGLATAKQRLGRILKIHRNGKLLLRQVIVQAECRQAIHEPKLKRRDAHP

SEQ ID NO: 61390 - protein, 160 aa, Homo sapiens
  MOD_RES (1)..(1): Any amino acid
XHLDVSDEKQRKACMSKITKELLNKRGFPAIRDYHFVNATEESDALAKLRKTIINESLNFKIRDQLVVGQLIPDCYVELEKIILSERKNVPIEFPVIDRKRLLQLVRENQLQLDENELPHAVHFLNESGVLLHFQDPALQLSDLYFVEPKWLCKIMAQFV

SEQ ID NO: 61391 - protein, 69 aa, Homo sapiens
MNISVDLETNYAELVLDVGRVTLGENSRKKMKDCKLRKKQNESVSRAMCALLNSGGGVIKAEIENEDYS

SEQ ID NO: 61392 - protein, 77 aa, Homo sapiens
MGMCSRQERIQKDIDVVIQKSRAEKDCLFADFRYSDSTFTFTYVGGPRSVSYSVHVSEDYPDNTYVSSSENDEDVLV

SEQ ID NO: 61393 - protein, 80 aa, Homo sapiens
MWPHSAGARPWASTLTGKDPRVMACWCLDGLPSGLAEPWRELWRWRSRPLHCVPPFSPLARSSRDHRNLRRRGLSLWKVA

SEQ ID NO: 61394 - protein, 59 aa, Homo sapiens
MRLTRCQAALAAAITLNLLVLFYVSWLQHQPRNSRARGPRRASAAGPRVTVLVREFEAF

SEQ ID NO: 61395 - protein, 648 aa, Homo sapiens
MWPQARLPPHPAMAEETRQSKLAAAKRKLKEYWQRNSPGVPAGAKRNRKTNGSIHETATSGGCHSPGDSATGIHGESPTSSATLKDLESPCQELAVVPDSRSVKVSQLKNTIKSLKQQNKQVEHQLEEEKKANNEKQKAERELEVQIQRLNIQKGKLNTDLYHTKRSLRYFEEESKDLAVRLQHSLQRKGELERALSAVTATQKKKAERQFSSRSKARMEWKLEQSMREQALLKAQLTQLKESLKEVQLERDEYAEHLKGERARWQQRMRKMSQEVCSLKKEKKHDKYRVEKLERSLSKLKHQMAEPLPPEPPAVPSEVELQHLRKELERVAGELQAQVEYNQRISLLNEGQKERLREQEERLQEQQERLPEQEERLQQLAEPQNSFKELNNENKSVLQLEQQVKELQEKLGKERLEAASQQNQQLTAQLSLMALPGEGDGGGHLDSEGEEAPRPIPSIPQDLESREAMSGFMDHLEEKADLSELVEKEELGFFQYYRERCHQKVYHPITKPGGSAKDAAPGGGHHQAGPGQGGDEGEAAGAAGDGVAAGGDYKGHSKFLVTAQNPAHEPSPGAPAPQELGAAHKHGDLCEVSLTDSVEPVQGEAREGSPHDNPTAQPIVQDHQEHPGLGSNCCVPFFCWAWLPRRRR

SEQ ID NO: 61396 - protein, 171 aa, Homo sapiens
MASQKRPSQRHGSKYLATASTMDHARHGFLPRHRDTGILDSIGRFFGGDRGAPKRGSGKVPWLKPGRSPLPSHARSQPGLCNMYKDSHHPARTAHYGSLPQKSHGRTQDENPVVHFFKNIVTPRTPPPSQGKGRGLSLSRFSWVGDERTSIGFLFRPSPHSPATFVFCSVS

SEQ ID NO: 61397 - protein, 115 aa, Homo sapiens
MLKKQSAGLVLWGAILFVAWNALLLLFFWTRPAPGRPPSVSALDGDPASLTREVIRLAQDAEVELERQRGLLQQIGDALSSQRGRVPTAAPPAQPRVPVTPAPAVIPILVIACDR

SEQ ID NO: 61398 - protein, 138 aa, Homo sapiens
MWATLPLLCAGAWLLGVPVCGAAELCVNSLEKFHFKSWMSKHRKTYSTEEYHHRLQTFASNWRKINAHNNGNHTFKNCGSAVTLCVMWDRKFGTKPVPLWVVVKFTRDSVEAPAPFLPSEGPAWKPSGTEPIFRHELC

SEQ ID NO: 61399 - protein, 537 aa, Homo sapiens
NSFTVHPRGLHRGAGARLLSNGHSAPEPRAGPANRLAGSPPGSGQWKPKVESGDPSLHPPPSPGTPSATPASPPASATPSQRQCVSAATSTNDSFEIRPAPKPVMETIPLGDLQARALASLRANSRNSFMVIPKSKASGAPPPEGRQSVELPKGDLGPASPSQELGSQPVPGGDGAPALGKSPLEVEAQWAVEEGACPRTATALADRAIRWQRPSSPPPFLPAASEEAEPAEGLRVPGLAKNSREYVRPGLPVTFIDEVDSEEAPQAAKLPYLPHPARPLHPARPGCVAELQPRGSNTFTVVPKRKPGTLQDQHFSQANREPRPREAEEEEASCLLGPTLKKRYPTVHEIEVIGGYLALQKSCLTKAGSSRKKMKISFNDKSLQTTFEYPSESSLEQEEEVDQQEEEEEEEEEEEEEEEGSGSEEKPFALFLPRATFVSSVRPESSRLPEGSSGLSSYTPKHSVAFSKWQEQALEQAPREAEPPPVEAMVRCGGVERWGESDTRASPCVHILSSHFQLTPASQNDLSDFRSEPALYF

SEQ ID NO: 61400 - protein, 175 aa, Homo sapiens
MDISTRSKDPGSAERTAQKRKFPSPPHSSNGHSPQDTSTSPIKKKKKPGLLNSNNKEQDGRNDFYCWVCHREGQVLCCELCPRVYHAKCLRLTSEPEGDWFCPECEKITVAECIETQSKAMTMLTIEQLSYLLKFAIQKMKQPGTDAFQKPVPLEQHPDYAEYIFHPMDLCTLEK

SEQ ID NO: 61401 - protein, 36 aa, Homo sapiens
MTKKTRDLRRQLRKAVMDHVSDSFLETNVPLLVLIE

SEQ ID NO: 61402 - protein, 96 aa, Homo sapiens
  MOD_RES (1)..(1): Any amino acid
XGGLLQIFPEGRPVVANIEPLFDRLLIFWSDRRNPHEVKPAYATRYAITVWYFDAKERAAAKDKYQLGTCFPPFSPSYSVGPLGPDATPSPSSASC

SEQ ID NO: 61403 - protein, 321 aa, Homo sapiens
MALRLLKLAATSASARVVAAGAQRVRGIHSSVQCKLRYGMWHFLLGDKASKRLTERSRVITVDGNICTGKGKLAKEIAEKLGFKHFPEAGIHYPDSTTGDGKPLATDYNGNCSLEKFYDDPRSNDGNSYRLQSWLYSSRLLQYSDALEHLLTTGQGVVLERSIFSDFVFLEAMYNQGFIRKQCVDHYNEPHEMKITSAYLQDIENAYKKTFLPEMSEKCEVLQYSAREAQDSKKVVEDIEYLKFDKGPWLKQDNRTLYHLRLLVQDKFEVLNYTSIPIFLPEVTIGAHQTDRVLHQFRELPGRKYSPGYNTEVGDKWIWLK

SEQ ID NO: 61404 - protein, 136 aa, Homo sapiens
GKTPVEPEVAIHRIRITLTSRNVKSLEKVCADLIRGAKEKNLKVKGPVRMPTKTLRITTRKTPCGEGSKTWDRFQMRIHKRLIDLHSPSEIVKQITSISIEPGVELIESTDAEPMDTEGQQYTLRSVFESPGTCPF

SEQ ID NO: 61405 - protein, 23 aa, Homo sapiens
MAAMPLKAQYQEMVTFEDVAVHF

SEQ ID NO: 61406 - protein, 56 aa, Homo sapiens
MTPQSLLQTTLFLLSLLFLVQGAHGRGHREDFRFCSQRNQTHRSSLHYKPTPDLRI

SEQ ID NO: 61407 - protein, 65 aa, Homo sapiens
MGVSKLDILYRRLLLTKLFIRGWGRPEDLKRLFEFRKMIGNRERCQNLVSSDYPVHIDKVPIYCA

SEQ ID NO: 61408 - protein, 328 aa, Homo sapiens
  MOD_RES (1)..(1): Any amino acid
XQDLDGGKEHERITDVLDQKNYVEELNRHLSCTVGDLQTKIDGLEKTNSKLQEEITKQDTKVELETYKQTRQGLDEMYSDVWKQLKEEKKVRLELEKELELQIGMKTEMEIAMKLLEKDTHEKQDTLVALRQQLEEVKAINLQMFHKAQNAESSLQQKNEAITSFEGKTNQVMSSMKQMEERLQHSERARQGAEERSHKLQQELGGRIGALQLQLSQLHEQCSSLEKELKSEKEQRQALQRELQHEKDTSSLLRMELQQVEGLKKELRELQDEKAELQKICEEQEQALQEMGLHLSQSKLKMEDIKEVNQALKGHAWLKDDEATHCRQ

SEQ ID NO: 61409 - protein, 114 aa, Homo sapiens
MKRHRPVSSSDSSDESPSTSFTSGSMYRIKSKIPNEHKKPAEVFRKDLISAMKLPDSHHINPDSYYLFADTWKEEWEKGVQVPASPDTVPQPSLRIIAEKVKDVLFIRPRKYIH

SEQ ID NO: 61410 - protein, 142 aa, Homo sapiens
MAVARAALGPLVTGLYDVQAFKFGDFVLKSGLSSPIYIDLRGIVSRPRLLSQVADILFQTAQNAGISFDTVCGVPYTALPLATVICSTNQIPMLIRRKETKDYGSTQRTQLRCTCRAAQDPPSCIEASQAYAKEGDQSVSIC

SEQ ID NO: 61411 - protein, 52 aa, Homo sapiens
MRHDVGEFPVLFFGSNDYLWTHQARVFPYMEGDVSSKDKMGKGVDGTYKKAL

SEQ ID NO: 61412 - protein, 340 aa, Homo sapiens
MGLGRVLLFLAVAFPFAPPAAAAEPHSLRYNLMVLSQDGSVQSGFLAEGHLDGQPFLRYDRQKRRAKPQGQWAEDVLGAKTWDTETEDLTENGQDLRRTLTHIKDQKGVPQSSRAQTLAMNVTNFWKEDAMKTKTHYRAMQADCLQKLQRYLKSGVAIRRTVPPMVNVICSEVSEGNITVTCRASSFYPRNITLTWRQDGVSLSHNTQQWGDVLPDGNGTYQTWVATRIRQGEEQRFTCYMEHSGNHGTHPVPSGKALVLQSQRTDFPYVSAAMPCFVIIIILCVPCCKKKTSAAEGPELVSLQVLDQHPVGTGDHRDAAQLGFQPLMSATGSTGSTEGT

SEQ ID NO: 61413 - protein, 106 aa, Homo sapiens
VFSYTADKEIRTDDLCLDVSRLNGPVIMLKCHHMRGNQLWEYDAETHTLLHIITQSCLSVNKVADGSQHPTVETCNDSTLQKWLLRNYTRMEIFRNIFGNSTDYIL

SEQ ID NO: 61414 - protein, 651 aa, Homo sapiens
MTPILTVLICLGLSLGPRTHVQAGHLPKPTLWAEPGSVITQGSPVTLRCQGGQETQEYRLYREKKTAPWITRIPQELVKKGQFPIPSITWEHAGRYRCYYGSDTAGRSESSDPLELVVTGAYIKPTLSAQPSPVVNSGGNVTLQCDSQVAFDGFILCKEGEDEHPQCLNSQPHARGSSRAIFSVGPVSPSRRWWYRCYAYDSNSPYEWSLPSDLLELLVLGVSKKPSLSVQPGPIVAPEETLTLQCGSDAGYNRFVLYKDGERDFLQLAGAQPQAGLSQANFTLGPVSRSYGGQYRCYGAHNLSSEWSAPSDPLDILIAGQFYDRVSLSVQPGPTVASGENVTLLCQSQGWMQTFLLTKEGAADDPWRLRSTYQSQKYQAEFPMGPVTSAHAGTYRCYGSQSSKPYLLTHPSDPLELVVSGPSGGPSSPTTGPTSTSAGPEDQPLTPTGSDPQSGLGRHLGVVIGILVAVILLLLLLLLLFLILRHRRQGKHWTSTQRKADFQHPAGAVGPEPTDRGLQWRSSPAADAQEENLYAAVKHTQPEDGVEMDTRSPHDEDPQAVTYAEVKHSRPRREMASPPSPLSGEFLDTKDRQAEEDRQMDTEAAASEAPQDVTYAQLHSLTLRRKATEPPPSQEGPSPAVPSIYATLAIH

SEQ ID NO: 61415 - protein, 157 aa, Homo sapiens
MNEVSVIKEGWLHKRGEYIKTWRPRYFLLKSDGSFIGYKERPEAPDQTLPPLNNFSVAECQLMKTERPRPNTFVIRCLQWTTVIERTFHVDSPDEREEWMRAIQMVANSLKQRAPGEDPMDYKCGSPSDSSTTEEMEVAVSKARAKVTMNDFDYLKL

SEQ ID NO: 61416 - protein, 672 aa, Homo sapiens
MASKTKASEALKVVARCRPLSRKEEAAGHEQILTMDVKLGQVTLRNPRAAPGELPKTFTFDAVYDASSKQADLYDETVRPLIDSVLQGFNGTVFAYGQTGTGKTYTMQGTWVEPELRGVIPNAFEHIFTHISRSQNQQYLVRASYLEIYQEEIRDLLSKEPGKRLELKENPETGVYIKDLSSFVTKNVKEIEHVMNLGNQTRAVGSTHMNEVSSRSHAIFIITVECSERGSDGQDHIRVGKLNLVDLAGSERQNKAGPNTAGGAATPSSGGGGGGGGSGGGAGGERPKEASKINLSLSALGNVIAALAGNRSTHIPYRDSKLTRLLQDSLGGNAKTIMVATLGPASHSYDESLSTLRFANRAKNIKNKPRVNEDPKDTLLREFQEEIARLKAQLEKRGMLGKRPRRKSSRRKKAVSAPPGYPEGPVIEAWVAEEEDDNNNNHRPPQPILESALEKNMENYLQEQKERLEEEKAAIQDDRSLVSEEKQKLLEEKEKMLEDLRREQQATELLAAKYKAMESKLLIGGRNIMDHTNEQQKMLELKRQEIAEQKRREREMQQEMMLRDEETMELRGTYTSLQQEVEVKTKKLKKLYAKLQAVKAEIQDQHDEYIRVRQDLEEAQNEQTRELKLKYLIIENFIPPEEKNKIMNRLFLDCEEEQWKFQPLVPAGVYFM

SEQ ID NO: 61417 - protein, 148 aa, Homo sapiens
MATACKRSGEPQSDDIEASRMKRAAAKHLIERYYHQLTEGCGNEACTNEFCASCPTFLRMDNNAAAIKALELYKINAKLCDPHPSKKGASSAYLENSKGAPNNSCSEIKMNKKGARIDFKDVTYLTEEKVYEILELCREREDYSPLIR

SEQ ID NO: 61418 - protein, 85 aa, Homo sapiens
MSFAEIKHKYLWSEPQNCSATKSNYLRGTGPYPPSVDWRKKGNFVSPVKNQGACGSCWTFSTTGALESAIAIATGKMLSLPQLSS

SEQ ID NO: 61419 - protein, 312 aa, Homo sapiens
  MOD_RES (1)..(1): Any amino acid
XPSEPNTAALQAALARVVPSYMQAVNRERERQVVMAVLEALTGVLRSCGTLTLKPPGRLAELCGVLKAVLQRKTACQDTDEEEEEEDDDQAEYDAMLLEHAGEAIPALAAAAGGDSFAPFFAGFLPLLVCKTKQGCTVAEKSFAVGTLAETIQGLGAASAQFVSRLLPVLLSTAQEADPEVRSNAIFGMGVLAEHGGHPAQEHFPKLLGLLFPLLARERHDRVRDNICGALARLLMASPTRKPEPQVIDVAPELLRICSLILADNKIPPDTKAALLLLLTFLAKQHTDSFQAALGSLPVDKAQELQAVLGLS

SEQ ID NO: 61420 - protein, 1560 aa, Homo sapiens
MNTPSQPRQHFYPSRAQPPSSAASRVQSAAPARPGPAAHVYPAGSQVMMIPSQISYPASQGAYYIPGQGRSTYVVPTQQYPVQPGAPGFYPGASPTEFGTYAGAYYPAQGVQQFPTGVAPTPVLMNQPPQIAPKRERKTIRIRDPNQGGKDITEEIMSGARTASTPTPPQTGGGLEPQANGETPQVAVIVRPDDRSQGAIIADRPGLPGPEHSPSESQPSSPSPTPSPSPVLEPGSEPNLAVLSIPGDTMTTIQMSVEESTPISRETGEPYRLSPEPTPLAEPILEVEVTLSKPVPESEFSSSPLQAPTPLASHTVEIHEPNGMVPSEDLEPEVESSPELAPPPACPSESPVPIAPTAQPEELLNGAPSPPAVDLSPVSEPEEQAKEVTASMAPPTIPSATPATAPSATSPAQEEEMEEEEEEEEGEAGEAGEAESEKGGEELLPPESTPIPANLSQNLEAAAATQVAVSVPKRRRKIKELNKKEAVGDLLDAFKEANPAVPEVENQPPAGSNPGPESEGSGVPPRPEEADETWDSKEDKIHNAENIQPGEQKYEYKSDQWKPLNLEEKKRYDREFLLGFQFIFASMQKPEGLPHISDVVLDKANKTPLRPLDPTRLQGINCGPDFTPSFANLGRTTLSTRGPPRGGPGGELPRGPQAGLGPRRSQQGPRKEPRKIIATVLMTEDIKLNKAEKAWKPSSKRTAADKDRGEEDADGSKTQDLFRRVRSILNKLTPQMFQQLMKQVTQLAIDTEERLKGVIDLIFEKAISEPNFSVAYANMCRCLMALKVPTTEKPTVTVNFRKLLLNRCQKEFEKDKDDDEVFEKKQKEMDEAATAEERGRLKEELEEARDIARRRSLGNIKFIGELFKLKMLTEAIMHDCVVKLLKNHDEESLECLCRLLTTIGKDLDFEKAKPRMDQYFNQMEKIIKEKKTSSRIRFMLQDVLDLRGSNWVPRRGDQGPKTIDQIHKEAEMEEHREHIKVQQLMAKGSDKRRGGPPGPPISRGLPLVDDGGWNTVPISKGSRPIDTSRLTKITKPGSIDSNNQLFAPGGRLSWGKGSSGGSGAKPSDAASEAARPATSTLNRFSALQQAVPTESTDNRRVVQRSSLSRERGEKAGDRGDRLERSERGGDRGDRLDRARTPATKRSFSKEVEERSRERPSQPEGLRKAASLTEDRDRGRDAVKREAALPPVSPLKAALSEEELEKKSKAIIEEYLHLNDMKEAVQCVQELASPSLLFIFVRHGVESTLERSAIAREHMGQLLHQLLCAGHLSTAQYYQGLYEILELAEDMEIDIPHVWLYLAELVTPILQEGGVPMGELFREITKPLRPLGKAASLLLEILGLLCKSMGPKKVGTLWREAGLSWKEFLPEGQDIGAFVAEQKVEYTLGEESEAPGQRALPSEELNRQLEKLLKEGSSNQRVFDWIEANLSEQQIVSNTLVRALMTAVCYSAIIFETPLRVDVAVLKARAKLLQKYLCDEQKELQALYALQALVVTLEQPPNLLRMFFDALYDEDVVKEDAFYSWESSKDPAEQQGKGVALKSVTAFFKWLREAEEESDHN

SEQ ID NO: 61421 - protein, 39 aa, Homo sapiens
MEAPEGGGGGPAARGPEGQPAPEARVHFRVARFIMEAGG

SEQ ID NO: 61422 - protein, 84 aa, Homo sapiens
MKKLWVKKRFQKTGHSRRAFGRLTHAKFSAPAESKVTTQRRLRMTSAMCREPSAWSFGMTGPSAPPRGVLTPWWAPPWTHPRPP

SEQ ID NO: 61423 - protein, 87 aa, Homo sapiens
MHRLPLLGEKQEAKENGTNLTFIGDKTAMHEPLQTWQDAPYIFIVHIGISSSKESSKENSLSNLFTMTVEVKGPYEYLTLEDYPLMI

SEQ ID NO: 61424 - protein, 137 aa, Homo sapiens
  MOD_RES (1)..(1): Any amino acid
XLLEQVDEQTFLQESQLLQPPGPLGPLTPLQWDEDQQLGDLKQLLSRLCGLLLEEGSHPGAPAKPVDLAPVEAPGPLAPVPSTVCPLRRKLWQNYRNLTFDPVSANRHFYLSRQDQQVESCSLKKTYSDPNPQDLWL

SEQ ID NO: 61425 - protein, 138 aa, Homo sapiens
DVLSKEATKRKINLNISYEINEVSVKHTLKLIHPKLEYQLLLAKKVQLIDALKELQIHEGNTNFLIPEYHCILEEADHLQEEYKKQPAHLERLYGMITDLFIDKFKFKGTNVKTKVPLLLEILDSYDQNALISFFDAA

SEQ ID NO: 61426 - protein, 512 aa, Homo sapiens
  MOD_RES (1)..(1): Any amino acid
XTGPSFWLGNETLKVPLALFALNRQRLCERLRKNPAVQAGSIVVLQGGEETQRYCTDTGVLFRQESFFHWAFGVTEPGCYGVIDVDTGKSTLFVPRLPASHATWMGKIHSKEHFKEKYAVDDVQYVDEIASVLTSQKPSVLLTLRGVNTDSGSVCREASFDGISKFEVNNTILHPEIVECRVFKTDMELEVLRYTNKISSEAHREVMKAVKVGMKEYELESLFEHYCYSRGGMRHSSYTCICGSGENSAVLHYGHAGAPNDRTIQNGDMCLFDMGGEYYCFASDITCSFPANGKFTADQKAVYEAVLRSSRAVMGAMKPGARTGRTVFSVGTMSTPPAGRNGVWWPDMHRLADRIHLEELAHMGILSGSVDAMVQAHLGAVFMPHGLGHFLGIDVHDVGGYPEGVERIDEPGLRSLRTARHLQPGMVLTVEPGIYFIDHLLDEALADPARASFLNREVLQRFRGFGGVRIEEDVVVTDSGIELLTCVPRTVEEIEACMAGCDKAFTPFSGPK

SEQ ID NO: 61427 - protein, 51 aa, Homo sapiens
  MOD_RES (1)..(1): Any amino acid
XLSLWTHRTFREVLKEEDVHVGDRSFSCIMPRPESRVCVCSSGKNSSTWSW

SEQ ID NO: 61428 - protein, 104 aa, Homo sapiens
  MOD_RES (1)..(1): Any amino acid
XLKWLEKKVNQTVAALKTNNVNVSSRVQSTAFFSGDQASTDKEEDYIRYAHGLISDYIPKELSDDLSKYLKLPEPSASLPNPPSKALGLAEDRARSCLCPPGNC

SEQ ID NO: 61429 - protein, 284 aa, Homo sapiens
MSRIYLDSGWCEVPWGDGDLGSWADRSPLHEAASQGRLLALRTLLSQGYNVNAVTLDHVTPLHEACLGDHVACARTLLEAGANVNAITIDGVTPLFNACSQGSPSCAELLLEYGAKAQLESCLPSPTHEAASKGHHECLDILISWGIDVDQEIPHLGTPLYVACMSQQFHCIWKLLYAGADVQKGKYWDTPLHAAAQQSSTEIVNLLLEFGADINAKNTELLRPIDVATSSSMVERILLQHEATPSSLYQLCRLCIRSYIGKPRLHLIPQLQLPTLLKNFLQYR

SEQ ID NO: 61430 - protein, 376 aa, Homo sapiens
MLENFALVSSLGLAPSRSPVFTQLEDDEQSWVPSWVDVTPVSRAEARRGFGLDGLCRVEDERAHPEHLKSYRVIQHQDTHSEGKPRRHTEHGAAFPPGSSCGQQQEVHVAEKLFKCSDCGKVFLKAFALLDHLITHSEERPFRCPTGRSAFKKSAHINPRKIHTGETAHVCNECGKAFSYPSKLRKHQKVHTGIKPFKCSDCGKTFNRKDALVLHQRIHTGERPYECSKCGKTFSVLSTLIRHRKVHIGERPYECTECGKFFKYNNSFILHQRVHTGERPFECKQCGKGYVTRSGLYQHWKVHTGERPYECSLCGKTFTTRSYRNRHQQFHTEERSYECTECGKAFKHSSTLLQHKKVHTPERRQEDRAHGKVVSC

SEQ ID NO: 61431 - protein, 229 aa, Homo sapiens; identical to SEQ ID NO: 47106

SEQ ID NO: 61432 - protein, 758 aa, Homo sapiens
MAVLLLLLRALRRGPGPGPRPLWGPGPAWSPGFPARPGRGRPYMASRPPGDLAEAGGRALQSLQLRLLTPTFEGINGLLLKQHLVQNPVRLWQLLGGTFYFNTSRLKQKNKEKDKSKGKAPEEDEEERRRRERDDQMYRERLRTLLVIAVVMSLLNALSTSGGSISWNDFVHEMLAKGEVQRVQVVPESDVVEVYLHPGAVVFGRPRLALMYRMQVANIDKFEEKLRAAEDELNIEAKDRIPVSYKRTGFFGNALYSVGMTAVGLAILWYVFRLAGMTGREGGFSAFNQLKMARFTIVDGKMGKGVSFKDVAGMHEAKLEVREFVDYLKSPERFLQLGAKVPKGALLLGPPGCGKTLLAKAVATEAQVPFLAMAGPEFVEVIGGLGAARVRSLFKEARARAPCIVYIDEIDAVGKKRSTTMSGFSNTEEEQTLNQLLVEMDGMGTTDHVIVLASTNRADILDGALMRPGRLDRHVFIDLPTLQERREIFEQHLKSLKLTQSSTFYSQRLAELTPGFSGTAKKSKILSKEEQKVVAFHESGHALVGWMLEHTEAVMKVSITPRTNAALGFAQMLPRDQHLFTKEQLFERMCMALGGRASEALSFNEVTSGAQDDLRKVTRIAYSMVKQFGMAPGIGPISFPEAQEGLMGIGRRPFSQGLQQMMDHEARLLVAKAYRHTEKVLQDNLDKLQALANALLEKEVINYEDIEALIGPPPHGPKKMIAPQRWIDAQREKQDLGEEETEETQQPPLGGEEPTWPK

SEQ ID NO: 61433 - protein, 924 aa, Homo sapiens
MITSAAGIISLLDEDEPQLKEFALHKLNAVVNDFWAEISESVDKIEVLYEDEGFRSRQFAALVASKVFYHLGAFEESLNYALGAGDLFNVNDNSEYVETIIAKCIDHYTKQCVENADLPEGEKKPIDQRLEGIVNKMFQRCLDDHKYKQAIGIALETRRLDVFEKTILESNDVPGMLAYSLKLCMSLMQNKQFRNKVLRVLVKIYMNLEKPDFINVCQCLIFLDDPQAVSDILEKLVKEDNLLMAYQICFDLYESASQQFLSSVIQNLRTVGTPIASVPGSTNTGTVPGSEKDSDSMETEEKTSSAFVGKTPEASPEPKDQTLKMIKILSGEMAIELHLQFLIRNNNTDLMILKNTKDAVRNSVCHTATVIANSFMHCGTTSDQFLRDNLEWLARATNWAKFTATASLGVIHKGHEKEALQLMATYLPKDTSPGSAYQEGGGLYALGLIHANHGGDIIDYLLNQLKNASNDIVRHGGSLGLGLAAMGTARQDVYDLLKTNLYQDDAVTGEAAGLALGLVMLGSKNAQAIEDMVGYAQETQHEKILRGLAVGIALVMYGRMEEADALIESLCRDKDPILRRSGMYTVAMAYCGSGNNKAIRRLLHVAVSDVNDDVRRAAVESLGFILFRTPEQCPSVVSLLSESYNPHVRYGAAMALGICCAGTGNKEAINLLEPMTNDPVNYVRQGALIASALIMIQQTEITCPKVNQFRQLYSKVINDKHDDVMAKFGAILAQGILDAGGHNVTISLQSRTGHTHMPSVVGVLVFTQFWFWFPLSHFLSLAYTPTCVIGLNKDLKMPKVQYKSNCKPSTFAYPAPLEVPKEKEKEKDEAEKKEEKEKKKEPEPNFQLLDNPARVMPAQLKVLTMPETCRYQPFKPLSIGGIIILKDTSEDIEELVEPVAAHGPKIEEEEQEPEPPEPFEYIDD

SEQ ID NO: 61434 - protein, 30 aa, Homo sapiens
  MOD_RES (1)..(1): Any amino acid
XCKRVIGLEGDKILTTSPSDFFKSHSYHFR

SEQ ID NO: 61435 - protein, 253 aa, Homo sapiens
  MOD_RES (1)..(1): Any amino acid
XEVFQPQMALPTDGPYLQILEQPKQRGFRFRYVCEGPSHGGLPGASSEKNKKSYPQVKICNYVGPAKVIVQLVTNGKNIHLHAHSLVGKHCEDGICTVTAGPKDMVVGFANLGILHVTKKKVFETLEARMTEACIRGYNPGLLVHPDLAYLQAEGGGDRQLGDREKELIRQAALQQTKEMDLSVVRLMFTAFLPDSTGSFTRRLEPVVSDAIYDSKAPNASNLKIVRMDRTAGCVTGGEEIYLLCDKVQKGLA

SEQ ID NO: 61436 - protein, 484 aa, Homo sapiens
MTTSSIRRQMKNIVNNYSEAEIKVREATSNDPWGPSSSLMTEIADLTYNVVAFSEIMSMVWKRLNDHGKNWRHVYKALTLLDYLIKTGSERVAQQCRENIFAIQTLKDFQYIDRDGKDQGINVREKSKQLVALLKDEERLKAERAQALKTKERMAQVATGMGSNQITFGRGSSQPNLSTSHSEQEYGKAGGSPASYHGSPEASLCPQHRTGAPLGQSEELQPLSQRHPFLPHLGLASRPNGDWSQPCLTCDRAARATSPRVSSELEQARPQTSGEEELQLQLALAMSREVAEQEERLRRGDDLRLQMALEESRRDTVKIPKKKEHGSLPQQTTLLDLMDALPSSGPAAQKAEPWGPSASTNQTNPWGGPAAPASTSDPWPSFGTKPAASIDPWGVPTGATVQSVPKNSDPWAASQQPASSAGKRASDAWGAVSTTKPVSVSGSFELFSNLNGTIKDDFSEFDNLRTSKKTGMQGLTGLLFTMEI

SEQ ID NO: 61437 - protein, 286 aa, Homo sapiens
MAAEEPQQQKQEPLGSDSEGVNCLAYDEAIMAQQDRIQQEIAVQNPLVSERLELSVLYKEYAEDDNIYQQKIKDLHKKYSYIRKTRPDGNCFYRAFGFSHLEALLDDSKELQRFKAVSAKSKEDLVSQGFTEFTIEDFHNTFMDLIEQVEKQTSVADLLASFNDQSTSDYLVVYLRLLTSGYLQRESKFFEHFIEGGRTVKEFCQQEVEPMCKESDHIHIIALAQALSVSIQGVLVVSRVCVSLLCCPPGCSVCCPLPPDGQTKATFSFITSVSAQFQGCQGERQL

SEQ ID NO: 61438 - protein, 89 aa, Homo sapiens
MTMSKEAVTFKDVAVVFTEEELGLLDLAQRKLYRDVMLENFRNLLSVGHQPFHRDTFHFLREEKFWMMDIATQREGNSGKKHATVCPCL

SEQ ID NO: 61439 - protein, 101 aa, Homo sapiens
MTPSQVAFEIRGTLLPGEVFAICGSCDALGNWNPQNAVALLPENDTGESMLWKATIVLSRGVSVQYRYFKGYFLEPKKAKLLLTMDNLESTMVLKLWILDG

SEQ ID NO: 61440 - protein, 209 aa, Homo sapiens
MDALNRNQIGPGCQTQTMVQKGPLDLIETGKGLKVQTDKPHLVSLGSGRLSTAITLLPLEEGRTVIGSAARDISLQGPGLAPEHCYIENLRGTLTLYPCGNACTIDGLPVRQPTRLTQVETGLHHIGQAGLQLPTSGCMLCLGQSTFLRFNHPAEAKWMKSMIPAGGRAPGPPYSPVPAESESLVNGNHTPQTATRGPSACASHSSLVS

SEQ ID NO: 61441 - protein, 410 aa, Homo sapiens
MSLMVVSMACVGFFLLEGPWPHVGGQDKPFLSAWPGTVVSEGQHVTLQCRSRLGFKEFSLSKEDGMPVPELYNRIFRNSFLMGPVTPAHAGTYRCCSSHPHSPTGWSAPSNPVVIMVTGVHRKPSLLAHPGPLVKSGETVILQCWSDVRFERFLLHREGITEDPLRLVGQLHDAGSQVNYSMGPMTPALAGTYRCFGSVTHLPYELSAPSDPLDIVVVGLYGKPSLSAQPGPTVQAGENVTLSCSSRSLFDIYHLSREAEAGELRLTAVLRVNGTFQANFPLGPVTHGGTYRCFGSFRALPHAWSDPSDPLPVSVTGNSRHLHVLIGTSVVIIPFAILLFFLLHRWCANKKNAVVMDQEPAGNRTVNREDSDEQDPQEVTYAQLNHCVFTQRKITRPSQRPKTPPTDTSV

SEQ ID NO: 61442 - protein, 81 aa, Homo sapiens
MSTHVAGLGLDKMKLGNPQSFLDQEEADDQQLLEPEAWKTYTERRNALREFLTSDLSPHLLKRHHARMQLLRKCSYYIEVL

SEQ ID NO: 61443 - protein, 131 aa, Homo sapiens
MRVMAPRTLILLLSGALALTETWACSHSMRYFDTAVSRPGRGEPRFISVGYVDDTQFVRFDSDAASPRGEPRAPWVEQEGPEYWDRETQKYKRQAQADRVNLRKLRGYYNQSEDVDVWLRPGARRAPPPRV

SEQ ID NO: 61444 - protein, 60 aa, Homo sapiens
DITEGNLRDSFDIIKRYMDGMTVAPLLNCHILKDLQSWEMKTVASAILDSDLYSEHFQSS

SEQ ID NO: 61445 - protein, 346 aa, Homo sapiens
YEGYDSTANPTVSNVFSTAAFRFGHATIHPLVRRLDASFQEHPDLPGLWLHQAFFSPWTLLRGGYNEWREFCGLPRLETPADLSTAIASRSVADKILDLYKHPDNIDVWLGGLAENFLPRARTGPLFACLIGKQMKALRDGDWFWWENSHVFTDAQRRELEKHSLSRVICDNTGLTRVPMDAFQVGKFPEDFESCDSITGMNLEAWRETFPQDDKCGFPESVENGDFVHCEESGRRVLVYSCRHGYELQGREQLTCTQEGWDFQPPLCKDSGRLPRVTWISMSLAALLIGGFAGLTSTVICRWTRTGTKSTLPISETGGGTPELRCGKHQAVGTSPQRAAAQDSEQ

SEQ ID NO: 61446 - protein, 32 aa, Homo sapiens
MMSQSSGSGDGNDDEATTSKDGGLLNISHTAW

SEQ ID NO: 61447 - protein, 39 aa, Homo sapiens
NSSCGEGNHLPTTPCYLQWGTHREFLRRFSIWNHGHLHM

SEQ ID NO: 61448 - protein, 48 aa, Homo sapiens
  MOD_RES (1)..(1): Any amino acid
XERNLNPKAACLKRREEEKVSAVSAEPPTTLPGTHPGLSETTNPMGHM

SEQ ID NO: 61449 - protein, 147 aa, Homo sapiens
MQEVGVGLYPSISLLNHSCDPNCSIVFNGPHLLLRAVRDIEVGEELTICYLDMLMTSEERRKQLRDQYCFECDCFRCQTQDKDADMLTGDEQVWKEVQESLKKIEELKAHWKWEQVLAMCQAIISSNSERLPDINIYQLKVLDCAMD

SEQ ID NO: 61450 - protein, 100 aa, Homo sapiens
MRKPAAGFLPSLLKVLLLPLAPAAAQDSTQASTPGSPLSPTEYERFFALLTPTWKAETTCRLRATHGCRNPTLVQLDQYENHGLVPDESPVFPASLYSLT

SEQ ID NO: 61451 - protein, 91 aa, Homo sapiens
MAMTVVTKEKNKKVPTIFLSKKPREKEVDSKSQVIEGISRLICSAKQQQTMLRVSIDGVEWSDIKFFQLAAQWPTHVKHFPVGLFSGSKAT

SEQ ID NO: 61452 - protein, 69 aa, Homo sapiens
  MOD_RES (1)..(1): Any amino acid
XELRLKSPVGAEPAVYPWPLPVYDKHHDAAHEIIETIRWVCEEIPDLKLAMENYVLIDYDTKSCWLRKT

SEQ ID NO: 61453 - protein, 134 aa, Homo sapiens
MTSRKKVLLKVIILGDSGVGKTSLMNQYVNKKFSNQYKATIGADFLTKEVMVDDRLVTMQVATKRAQAWCYSKNNIPYFETSAKEAINVEQAFQTIARNALKQETEVELYNEFPEPIKLDKNDRAKASAESCSC

SEQ ID NO: 61454 - protein, 162 aa, Homo sapiens
MPKGGCPKAPQQEELPLSSDMVEKQTGKKDKDKVSLTKTPKLERGDGGKEVRERASKRKLPFTAGANGEQKDSDTVLCVDAFRCLQPSPCCGAARLVRSSKHHGMRWRFLEARRKRSRALSGRGLRRSLSPGRPGCCLAWGCLESEPATPSPSASRWPFSCR

SEQ ID NO: 61455 - protein, 642 aa, Homo sapiens
MLTLQTWLVQALFIFLTTESTGELLDPCGYISPESPVVQLHSNFTAVCVLKEKCMDYFHVNANYIVWKTNHFTIPKEQYTIINRTASSVTFTDIASLNIQLTCNILTFGQLEQNVYGITIISGLPPEKPKNLSCIVNEGKKMRCEWDGGRETHLETNFTLKSEWATHKFADCKAKRDTPTSCTVDYSTVYFVNIEVWVEAENALGKVTSDHINFDPVYKVKPNPPHNLSVINSEELSSILKLTWTNPSIKSVIILKYNIQYRTKDASTWSQIPPEDTASTRSSFTVQDLKPFTEYVFRIRCMKEDGKGYWSDWSEEASGITYEDRPSKAPSFWYKIDPSHTQGYRTVQLVWKTLPPFEANGKILDYEVTLTRWKSHLQNYTVNATKLTVNLTNDRYLATLTVRNLVGKSDAAVLTIPACDFQATHPVMDLKAFPKDNMLWVEWTTPRESVKKYILEWCVLSDKAPCITDWQQEDGTVHRTYLRGNLAESKCYLITVTPVYADGPGSPESIKAYLKQAPPSKGPTVRTKKVGKNEAVLEWDQLPVDVQNGFIRNYTIFYRTIIGNETAVNVDSSHTEYTLSSLTSDTLYMVRMAAYTDEGGKDGPEFTFTTPKFVSWIHYGFFTWLESCQRGPYSLVEEILHK

SEQ ID NO: 61456 - protein, 142 aa, Homo sapiens
MKSCGVSLATAAAAAAAFGDEEKKMAAGKASGESEEASPSLTAEEREALGGLDSRLFGFVRFHEDGARTKALLGKHYLHTRGTTVYSLTTGRMLPFYMVLVWSTSIIMHFSGQLKHFRRCFMLIPAFVEPRKFIYDLGLCSK

SEQ ID NO: 61457 - protein, 100 aa, Homo sapiens
MSKSFQQSSLSRDSQGHGRDLSAAGIGLLAAATQSLSMPASLGRMNQGTARLASLMNLGMSSSLNQQGAHSALSSASTSSHNLQSIFNIGSRGPLPLSSQ

SEQ ID NO: 61458 - protein, 50 aa, Homo sapiens
MASRAGPRAAGTDGSDFQHRERVAMHYQMRLFYSNLYPSVQYSCLAYSWW

SEQ ID NO: 61459 - protein, 16 aa, Homo sapiens
MSGMGENTSDPSRAET

SEQ ID NO: 61460 - protein, 447 aa, Homo sapiens
MKQIDIMVAHKKSEWEGRTHALETCLKIREQELKSLRSQLDVTHKEVGMLHQQVEEHEKIKQEMTMEYKQELKKLHEELCILKRSYEKLQKKQMREFRGNTKNHREDRSEIERLTAKIEEFRQKSLDWEKQRLIYQQQVSSLEAQRKALAEQSEIIQAQLVNRKQKLESVELSSQSEIQHLSSKLERANDTICANELEIERLTMRVNDLVGTSMTVLQEQQQKEEKLRESEKLLEALQEEKRELKAALQSQENLIHEARIQKEKLQEKVKATNTQHAVEAISLESVSATCKQLSQELMEKYEELKRMEAHNNEYKAEIKKLKEQILQGEQSYSSALEGMKMEISHLTQELHQRDITIASTKGSSSDMEKRLRAEMQKAEDKAVEHKEILDQLESLKLENRHLSEMVMKLELGLHERWGFTMLSSLVLNFGIQAIRQPQRPKVLELQV

SEQ ID NO: 61461 - protein, 84 aa, Homo sapiens
  MOD_RES (1)..(1): Any amino acid
XNWELSVKLHDKVHTVVASNNGSVFSVEVDGSKLNVTSTWNLASPLLSVSVDGTQRTVQCLSREAGGNMSIQFLGTVPWRKLLD

SEQ ID NO: 61462 - protein, 1335 aa, Homo sapiens
MKSCAVSLTTAAVAFGDEAKKMAEGKASRESEEESVSLTVEEREALGGMDSRLFGFVRLHEDGARTKTLLGKAVRCYESLILKAEGKVESDFFCQLGHFNLLLEDYSKALSAYQRYYSLQADYWKNAAFLYGLGLVYFYYNAFHWAIKAFQDVLYVDPSFCRAKEIHLRLGLMFKVNTDYKSSLKHFQLALIDCNPCTLSNAEIQFHIAHLYETQRKYHSAKEAYEQLLQTENLPAQVKATVLQQLGWMHHNMDLVGDKATKESYAIQYLQKSLEADPNSGQSWYFLGRCYSSIGKVQDAFISYRQSIDKSEASADTWCSIGVLYQQQNQPMDALQAYICAVQLDHGHAAAWMDLGTLYESCNQPQDAIKCYLNAARSKRCSNTSTLAARIKFLQAQLCNLPQSSLQNKTKLLPSIEEAWSLPIPAELTSRQGAMNTAQQNGSDNWNGGQSLSHHPVQQVYSLCLTPQKLQHLEQLRANRDNLNPAQKHQLEQLESQFVLMQQMRHKEVAQVRTTGIHNGAITDSSLPTNSVSNRQPHGALTRVSSVSQPGVRPACVEKLLSSGAFSAGCIPCGTSKILGSTDTILLGSNCIAGSESNGNVPYLQQNTHTLPHNHTDLNSSTEEPWRKQLSNSAQGLHKSQSSCLSGPNEEQPLFSTGSAQYHQATSTGIKKANEHLTLPSNSVPQGDADSHLSCHTATSGGQQGIMFTKESKPSKNRSLVPETSRHTGDTSNGCADVKGLSNHVHQLIADAVSSPNHGDSPNLLIADNPQLSALLIGKANGNVGTGTCDKVNNIHPAVHTKTDHSVASSPSSAISTATPSPKSTEQRSINSVTSLNSPHSGLHTVNGEGLGKSQSSTKVDLPLASHRSTSQILPSMSVSICPSSTEVLKACRNPGKNGLSNSCILLDKCPPPRPPTSPYPPLPKDKLNPPTPSIYLENKRDAFFPPLHQFCTNPKNPVTVIRGLAGALKLDLGLFSTKTLVEANNEHMVEVRTQLLQPADENWDPTGTKKIWRCESNRSHTTIAKYAQYQASSFQESLREENEKRTQHKDHSDNESTSSENSGRRRKGPFKTIKFGTNIDLSDNKKWKLQLHELTKLPAFARVVSAGNLLTHVGHTILGMNTVQLYMKVPGSRTPGHQENNNFCSVNINIGPGDCEWFVVPEDYWGVLNDFCEKNNLNFLMSSWWPNLEDLYEANVPVYRFIQRPGDLVWINAGTVHWVQAVGWCNNIAWNVGPLTACQYKLAVERYEWNKLKSVKSPVPMVHLSWNMARNIKVSDPKLFEMIKYCLLKILKQYQTLREALVAAGKEVIWHGRTNDEPAHYCSICEALSLSSSS

SEQ ID NO: 61463 - protein, 108 aa, Homo sapiens
MPIMGSSVYITVELAIAVLAILGNVLVCWAVWLNSNLQNVTNYFVVSLAAADIAVGVLAIPFAITISTGFCAACHGCLFIACFVLVLTQSSIFSLLAIAIDRYIAIRI

SEQ ID NO: 61464 - protein, 452 aa, Homo sapiens
MGAGPSLLLAALLLLLSGDGAVRCDTPANCTYLDLLGTWVFQVGSSGSQRDVNCSVMGPQEKKVVVYLQKLDTAYDDLGNSGHFTIIYNQGFEIVLNDYKWFAFFKYKEEGSKVTTYCNETMTGWVHDVLGRNWACFTGKKVGTASENVYVNIAHLKNSQEKYSNRLYKYDHNFVKAINAIQKSWTATTYMEYETLTLGDMIRRSGGHSRKIPRPKPAPLTAEIQQKILHLPTSWDWRNVHGINFVSPVRNQASCGSCYSFASMGMLEARIRILTNNSQTPILSPQEVVSCSQYAQGKYAQDFGLVEEACFPYTGTDSPCKMKEDCFRYYSSEYHYVGGFYGGCNEALMKLELVHHGPMAVAFEVYDDFLHYKKGIYHHTGLRDPFNPFELTNHAVLLVGYGTDSASGMDYWIVKNSWGTGWGENGYFRIRRGTDECAIESIAVAATPIPKL

SEQ ID NO: 61465 - protein, 170 aa, Homo sapiens
  MOD_RES (1)..(1): Any amino acid
XTLEPNKDLRPGDTVTITCSSYRGYPEAEVFWQDGQGVPLTGNVTTSQMANEQGLFDVHSVLRVVLGANGTYSCLVRNPVLQQDAHGSVTITGQPMTFPPEALWVTVGLSVCLIALLVALAFVCWRKIKQSCEEENAGAEDQDGEGEGSKTALQPLKHSDSKEDDGQEIA

SEQ ID NO: 61466 - protein, 258 aa, Homo sapiens
MRDSSRLRLVYADTCFSTIKLKAEDASGREHLITLKLKAKYPAESPDYFVDFPVPFCASWTPQSSLISIYSQFLAAIESLKAFWDVMDEIDEKTWVLEPEKPPRSATARRIALGNNVSINIEVDPRHPTMLPECFFLGADHVVKPLGIKLSRNIHLWDPENSVLQNLKDVLEIDFPARAILEKSDFTMDCGICYAYQLDGTIPDQVCDNSQCGQPFHQICLYEWLRGLLTSRQSFNIIFGECPYCSKPITLKMSGRKH

SEQ ID NO: 61467 - protein, 88 aa, Homo sapiens
MSLFKARDWWSTILGDKEEFDQGCLCLANVDNSGNGQDKIIVGSFMGYLRIFSPHPAKTGDGAQAEDLLLEVDLRDPVLQVEVGKFVS

SEQ ID NO: 61468 - protein, 206 aa, Homo sapiens
KRDGDDRRPRLVLSFDEEKRREYLTGFHKRKVERKKAAIEEIKQRLKEEQRKLREERHQEYLKMLAEREEALEEADELDRLVTAKTESVQYDHPNHTVTVTTISDLDLSGARLLGLTPPEGGAGDRSEEEASSTEKPTKALPRKSRDPLLSQRISSLTASLHAHSRKKVKRKHPRRAQDSKKPPRAPRTSKAQRRRLTGKARHSGE

SEQ ID NO: 61469 - protein, 38 aa, Homo sapiens
MGNPENIEDAYVAVIRPKNTASLNSREYRAKSYEILLH

SEQ ID NO: 61470 - protein, 238 aa, Homo sapiens
  MOD_RES (1)..(1): Any amino acid
XSGEGAIYLFNMCLQQLFEVKVFKEKHHSWFINQSVQSGGLLHFATPVDPLFLLLHYLIKADKEGKFQPLDQVVVDNVFPNCILLLKLPGLEKLLHHVTEEKGNPEIDNKKYYKYSKEKTLKWLEKKVNQTVAALKTNNVNVSSRVQSTAFFSGDQASTDKEEDYIRYAHGLISDYIPKELSDDLSKYLKLPEPSASLPNPPSKKIKLSDEPVEAKEDYTKFNTKDLKTEKVYQLVIL

SEQ ID NO: 61471 - protein, 73 aa, Homo sapiens
MTLQVQDPAIYDSRSSAPTHRGTVPRGGRWLTKSSLKGFGSWSPSPRLTWTSWHLRGNWIKPSCGSGWTSRRL

SEQ ID NO: 61472 - protein, 263 aa, Homo sapiens
MKIGDFFPQLSLRSSFLESLLQPESLRLDWLLLAVSLDAPPSTSTMDDEGYPRPHSHLLSWGYSQLILHLIKLPADFITKEKMTDICRSCGFWPGYLILCLELERRREAFTNIVYLNDMSLMEGDNGWIPETVEEWKLLLHLIQSKSTRPAPQESLNGSLSDGPSPINVENVALLLAKAMGPDRAWSLLQECGLALELSEKFTRTCDILRIAEKRQRHLNCFHFLAIVNNAAMNMSIQICLPDTAFSSFGYIPESGILESYGP

SEQ ID NO: 61473 - protein, 182 aa, Homo sapiens
MLIEKKLEPLSQDEDQHADLTQSRRPLTSCTIFLGYTSNLISSGIRETIRYLVQHNMVDVLVTTAGGVEEDLIKCLAPTYLGEFSLRGKELRENGINRIGNLLVPNENYCKFEDWLMPILDQMVMEQNTEGVKWTPSKMIARLGKEINNPESVYYWAQKNHIPVFSPALTDGSLGDMIFFHS

SEQ ID NO: 61474 - protein, 27 aa, Homo sapiens
MAAAADSFSGGPAGVRLPRSPPLKESM

SEQ ID NO: 61475 - protein, 36 aa, Homo sapiens
  MOD_RES (1)..(1): Any amino acid
XEMDGRRVLGRFWSGWRRGLGVRPVPEDAGFGTEAR

SEQ ID NO: 61476 - protein, 53 aa, Homo sapiens
MSVTLHTDVGDIKIEVFCERTPKTCEEYQGFHGSNRRSNRNWKRRQQYLGQEV

SEQ ID NO: 61477 - protein, 80 aa, Homo sapiens
MTTGDCCHLPGSLCDCSGSPAFSKVVEATGLGPPQYVAQVTSRDGRLLSTVIRALDTPSDGPFCRICHEGANGECLLSPC

SEQ ID NO: 61478 - protein, 1118 aa, Homo sapiens
MGVDFDVKTFCHNLRATKPPYECPVETCRKVYKSYSGIEYHLYHYDHDNPPPPQQTPLRKHKKKGRQSRPANKQSPSPSEVSQSPGREVMSYAQAQRMVEVDLHGRVHRISIFDNLDVVSEDEEAPEEAPENGSNKENTETPAATPKSGKHKNKEKRKDSNHHHHHNVSASTTPKLPEVVYRELEQDTPDAPPRPTSYYRYIEKSAEELDEEVEYDMDEEDYIWLDIMNERRKTEGVSPIPQEIFEYLMDRLEKESYFESHNKGDPNALVDEDAVCCICNDGECQNSNVILFCDMCNLAVHQECYGVPYIPEGQWLCRRCLQSPSRAVDCALCPNKGGAFKQTDDGRWAHVVCALWIPEVCFANTVFLEPIDSIEHIPPARWKLTCYICKQRGSGACIQCHKANCYTAFHVTCAQQAGLYMKMEPVRETGANGTSFSVRKTAYCDIHTPPGSARRLPALSHSEGEEDEDEEEDEGKGWSSEKVKKAKAKSRIKMKKARKILAEKRAAAPVVSVPCIPPHRLSKITNRLTIQRKSQFMQRLHSYWTLKRQSRNGVPLLRRLQTHLQSQRNCDQVGRDSEDKNWALKEQLKSWQRLRHDLERARLLVELIRKREKLKRETIKVQQIAMEMQLTPFLILLRKTLEQLQEKDTGNIFSEPVPLSEVPDYLDHIKKPMDFFTMKQNLEAYRYLNFDDFEEDFNLIVSNCLKYNAKDTIFYRAAVRLREQGGAVLRQARRQAEKMGIDFETGMHIPHSLAGDEATHHTEDAEEERLVLLENQKHLPVEEQLKLLLERLDEVNASKQSVGRSRRAKMIKKEMTALRRKLAHQRETGRDGPERHGPSSRGSLTPHPAACDKDGQTDSAAEESSSQETSKDLPANGFSGGNQPVKKSFLVYRNDCSLPRSSSDSESSSSSSSSAASDRTSTTPSKQGRGKPSFSRGTFPEDSSEDTSGTENEAYSVGTGRGVGHSMVRKSLGRGAGWLSEDEDSPLDALDLVWAKCRGYPSYPALIIDPKMPREGMFHHGVPIPVPPLEVLKLGEQMTQEAREHLYLVLFFDNKRTWQWLPRTKLVPLGVNQDLDKEKMLEGRKSNIRKSVQIAYHRALQHRSKVQGEQSSETSDSD

SEQ ID NO: 61479 - protein, 118 aa, Homo sapiens
  MOD_RES (1)..(1): Any amino acid
XGVCAEKQDGYDSLQRDQAVCISTNGAVFVNGKEMTNQLPAVTSGSTVTFDIEAVTLGTTSNNEGGHFKLRERGLAMLSKLVSNSWAQSLRTLDSQSVRVTESRCHQAGLQWHDLNSL

SEQ ID NO: 61480 - protein, 1192 aa, Homo sapiens
  MOD_RES (1)..(1): Any amino acid
XPNPHMSKQDRNQRPSSMVSETSTAGTASTLEAKPGPKIIKSSSKVHSFGKRDQAIRRNPNVPVVVRGWLHKQDSSGMRLWKRRWFVLADYCLFYYKDSREEAVLGSIPLPSYVISPVAPEDRISRKYSFKAVHTGMRALIYNSSTAGSQAEQSGMRTYYFSADTQEDMNAWVRAMNQAAQVLSRSSLKRDMEKVERQAVPQANHTESCHECGRVGPGHTRDCPHRGHDDIVNFERQEQEGEQYRSQRDPLEGKRDRSKARSPYSPAEEDALFMDLPTGPRGQQAQPQRAEKNGMLPASYGPGEQNGTGGYQRAFPPRTNPEKHSQRKSNLAQVEHWARAQKGDSRSLPLDQTLPRQGPGQSLSFPENYQTLPKSTRHPSGGSSPPPRNLPSDYKYAQDRASHLKMSSEERRAHRDGTVWQLYEWQQRQQFRHGSPTAPICLGSPEFTDQGRSRSMLEVPRSISVPPSPSDIPPPGPPRVFPPRRPHTPAERVTVKPPDQRRSVDISLGDSPRRARGHAVKNSSHVDRRSMPSMGYMTHTVSAPSLHGKSLEELSLLLTRLRRHQAKLASVRNFAISQLLQHQLTFPTCQADDTYLQLKKDLEYLDLKMTGRDLLKDRSLKPVKIAESDTDVKLSIFCEQDRVLQDLEDKIRALKENKDQLESVLEVLHRQMEQYRDQPQHLEKIAYQQKLLQEDLVHIRAELSRESTEMENAWNEYLKLENDVEQLKQTLQEQHRRAFFFQPSPPTSPVRTPLEVRLFPQLQTYVPYRPHPPQLRKVTSPLQSPTKAKPKVQEDEAPPRPPLPELYSPEDQPPAVPPLPREATIIRHTSVRGLKRQSDERKRDRELGQCVNGDSRVELRSYVSEPELATLSGDMAQPSLGLVGPESRYQTLPGRGLSGSTSRLQQSSTIAPYVTLRRGLNAESSKATFPRPKSALERLYSGDHQRGKMSAEEQLERMKRHQKALVRERKRTLGQGERTGLPSSRYLSRPLPGDLGSWKREQDFDLQLLERVVQGEKKDKEENGWLKVQAMPVTELDLEPQDYDLDISRELSKPEKVSIPERYVELDPEEPPSLEELQARYRKAEKIRNILARSSMCNLQPTSGQDQNSVADLDLQLQEQERIINISYALASEASQRSKQVAGPVDLSLTLKPRPFVVGSRAHATPACQMGHLVLQELMRSLTHRLIPVCPI

SEQ ID NO: 61481 - protein, 1724 aa, Homo sapiens
MAGASVKVAVRVRPFNSREMSRDSKCIIQMSGSTTTIVNPKQPKETPKSFSFDYSYWSHTSPEDINYASQKQVYRDIGEEMLQHAFEGYNVCIFAYGQTGAGKSYTMMGKQEKDQQGIIPQLCEDLFSRINDTTNDNMSYSVEVSYMEIYCERVRDLLNPKNKGNLRVREHPLLGPYVEDLSKLAVTSYNDIQDLMDSGNKARTVAATNMNETSSRSHAVFNIIFTQKRHDAETNITTEKVSKISLVDLAGSERADSTGAKGTRLKEGANINKSLTTLGKVISALAEMDSGPNKNKKKKKTDFIPYRDSVLTWLLRENLGGNSRTAMVAALSPADINYDETLSTLRYADRAKQIRCNAVINEDPNNKLIRELKDEVTRLRDLLYAQGLGDITDTNTVPGGPKYVSDLENNNLNRGGTVNEAPDPLSTVTNALVGMSPSSSLSALSSRAASVSSLHERILFAPGSEEAIERLKETEKIIAELNETWEEKLRRTEAIRMEREALLAEMGVAMREDGGTLGVFSPKKTPHLVNLNEDPLMSECLLYYIKDGITRVGREDGERRQDIVLSGHFIKEEHCVFRSDSRGGSEAVVTLEPCEGADTYVNGKKVTEPSILRSGNRIIMGKSHVFRFNHPEQARQERERTPCAETPAEPVDWAFAQRELLEKQGIDMKQEMEQRLQELEDQYRREREEATYLLEQQRLDYESKLEALQKQMDSRYYPEVNEEEEEPEDEVQWTERECELALWAFRKWKWYQFTSLRDLLWGNAIFLKEANAISVELKKKVQFQFVLLTDTLYSPLPPDLLPPEAAKDRETRPFPRTIVAVEVQDQKNGATHYWTLEKLRQRLDLMREMYDRAAEVPSSVIEDCDNVVTGGDPFYDRFPWFRLVGRAFVYLSNLLYPVPLVHRVAIVSEKGEVKGFLRVAVQAISADEEAPDYGSGVRQSGTAKISFDDQHFEKFQSESCPVVGMSRSGTSQEELRIVEGQGQGADVGPSADEVNNNTCSAVPPEGLLLDSSEKAALDGPLDAALDHLRLGNTFTFRVTVLQASSISAEYADIFCQFNFIHRHDEAFSTEPLKNTGRGPPLGFYHVQNIAVEVTKSFIEYIKSQPIVFEVFGHYQQHPFPPLCKDVLSPLRPSRRHFPRVMPLSKPVPATKLSTLTRPCPGPCHCKYDLLVYFEICELEANGDYIPAVVDHRGGMPCMGTFLLHQGIQRRITVTLLHETGSHIRWKEVRELVVGRIRNTPETDESLIDPNILSLNILSSGYIHPAQDDRTFYQFEAAWDSSMHNSLLLNRVTPYREKIYMTLSAYIEMENCTQPAVVTKDFCMVFYSRDAKLPASRSIRNLFGSGSLRASESNRVTGVYELSLCHVADAGSPGMQRRRRRVLDTSVAYVRGEENLAGWRPRSDSLILDHQWELEKLSLLQEVEKTRHYLLLREKLETAQRPVPEALSPAFSEDSESHGSSSASSPLSAEGRPSPLEAPNERQRELAVKCLRLLTHTFNREYTHSHVCVSASESKLSEMSVTLLRDPSMSPLGVATLTPSSTCPSLVEGRYGATDLRTPQPCSRPASPEPELLPEADSKKLPSPARATETDKEPQRLLVPDIQEIRVSPIVSKKGYLHFLEPHTSGWARRFVVVRRPYAYMYNSDKDTVERFVLNLATAQVEYSEDQQAMLKTPNTFAVCTEHRGILLQAASDKDMHDWLYAFNPLLAGTIRSKLSRRRSAQMRV

SEQ ID NO: 61482 - protein, 31 aa, Homo sapiens
  MOD_RES (1)..(1): Any amino acid
XCLGVHPVQGLPPEDQRSVTLKVTVIQNRNH

SEQ ID NO: 61483 - protein, 39 aa, Homo sapiens
  MOD_RES (1)..(1): Any amino acid
XAFGESAGQEIKGSKKLSHGPKGNVDVRTAIAKFYLKDE

SEQ ID NO: 61484 - protein, 205 aa, Homo sapiens
MLRASRVLLVGLKGLGAEIAKNLILAGVKGLTMLDHEQVTPEDPGAQFLIRTGSVGRNRAEASLERAQNLNPMVDVKVDTEDIEKKPESFFTQFDAVCLTCCSRDVIVKVDQICHKNSIKFFTGDVFGYHGYTFANLGEHEFVEEKTKVAKVSQGVEDGPDTKRAKLDSSETTMVKKKVVFCPVKEALEVDWSSEKAKAALKRTT

SEQ ID NO: 61485 - protein, 628 aa, Homo sapiens
MEGTAVAVFEILRFLIIHWKCDIDVSKGALLEGQLVISIEGLNSKHQANALHCVTTRWSLTLLPRPECSGAVSAHCNLHLPGSSDSHASVPRVAGITDAHHHAWLIMVASAGSLFGGMVLKKFLKEIQSILPGISAKLTWTSEEGSYSQDMTGVTPFQMIFEVDEKPRTLMTDCLVIKHFLRKIIMVHPKVRFHFSVKVNGILSTEIFGVENEPTLNLGNGIALLVDSQHYVRPNFGTIESHCSRIHPVLGHPVMLFIPEDVAGMDLLGELILTPAAALCPSPKVSSNQLNRISSVSIFLYGPLGLPLILSTWEQPMTTFFKDTSSLVDWKKYHLCMIPNLDLNLDRDLVLPDVSYQVESSEEDQSQTMDPQGQTLLLFLFVDFHSAFPVQQMEIWGVYTLLTTHLNAILVESHSVVQGSIQFTVDKVLEQHHQAAKAQQKLQASLSVAVNSIMSILTGSTRSSFRKMCLQTLQAADTQEFRTKLHKVFREITQHQFLHHCSCEVKQQLTLEKKDSAQGTEDAPDNSSLELLADTSGQAENKRLKRGSPRIEEMRALRSARAPSPSEAAPRRPEATAAPLTPRGREHREAHGRALAPGRASLGSRLEDVLWLQEVSNLSEWLSPSPGP

SEQ ID NO: 61486 - protein, 65 aa, Homo sapiens
  MOD_RES (1)..(1): Any amino acid
XIHPVEQSLTRYSSTEIVEGTRDPLFLTGVTFPSEYPIYEETKIKLTVYDVKDKSHDTIANSSRI

SEQ ID NO: 61487 - protein, 322 aa, Homo sapiens
PQPQFGRRMESKVSEGGLNVTLTIRLLMHGKEVGSIIGKKGETVKKMREESGARINISEGNCPERIVTITGPTDAIFKAFAMIAYKFEEDIINSMSNSPATSKPPVTLRLVVPASQCGSLIGKGGSKIKEIRESTGAQVQVAGDMLPNSTERAVTISGTPDAIIQCVKQICVVMLEAYTIQGQYAIPHPDQLTKLHQLAMQQTPFPPLGQTNPAFPGEKLPLHSSEEAQNLMGQSSGLDASPPASTHELTIPNDLIGCIIGRQGTKINEIRQMSGAQIKIANATEGSSERQITITGTPANISLAQYLINARLTSEVTGMGTL

SEQ ID NO: 61488 - protein, 123 aa, Homo sapiens
MMKGEFYVIEYAACDATYNEIVTFERLRPVNQNKTVKKNTFFKCTVDVPEDLREACANENAHKDFKKAVGACRIFYHPETTQLMILSASEATVKRVNILSDMHLRSIRTKLMLMSRNEEATKH

SEQ ID NO: 61489 - protein, 81 aa, Homo sapiens
  MOD_RES (1)..(1): Any amino acid
XLYNNCICDVGAESLARVLPDMVSLRVMDVQYNKFTAAGAQQLAASLRRCPHVETLAMWTPTIPFSVQEHLQQQDSRISLR

SEQ ID NO: 61490 - protein, 1827 aa, Homo sapiens
MVDKNIYIIQGEINIVVGAIKRNARWSTHTPLDEERDPLLHSFGHLKEVLNSITELSEIEPNVFLRPFLEVIRSEDTTGPITGLALTSVNKFLSYALIDPTHEGTAEGMENMADAVTHARFVGTDPASDEVVLMKILQVLRTLLLTPVGAHLTNESVCEIMQSCFRICFEMRLSELLRKSAEHTLVDMVQLLFTRLPQFKEEPKNYVGTNMKKLKMRAGGMSDSSKWKKQKRSPRPPRHMTKVTPGSELPTPNGTTLSSNLTGGMPFIDVPTPISSASSEAASAVVSPSTDSGLEFSSQTTSKEDLTDLEQPGSPGYSTATEPGSSELGVPEQPDLQEGTHVEKSQSASVESIPEVLEECTSPADHSDSASVHDMDYVNPRGVRFTQSSQKEGTALVPYGLPCIRELFRFLISLTNPHDRHNSEVMIHMGLHLLTVALESAPVAQCQTLLGLIKDEMCRHLFQLLSIERLNLYAASLRVCFLLFESMREHLKFQMEMYIKKLMEIITVENPKMPYEMKEMALEAIVQLWRIPSFVTELYINYDCDYYCSNLFEELTKLLSKNAFPVSGQLYTTHLLSLDALLTVIDSTEAHCQAKVLNSLTQQEKKETARPSCEIVDGTREASNTERTASDGKAVGMASDIPGLHLPGGGRLPPEHGKSGCSDLEEAVDSGADKKFARKPPRFSCLLPDPRELIEIKNKKKLLITGTEQFNQKPKKGIQFLQEKGLLTIPMDNTEVAQWLRENPRLDKKMIGEFVSDRKNIDLLESFVSTFSFQGLRLDEALRLYLEAFRLPGEAPVIQRLLEAFTERWMNCNGSPFANSDACFSLAYAVIMLNTDQHNHNVRKQNAPMTLEEFRKNLKGVNGGKDFEQDILEDMYHAIKNEEIVMPEEQTGLVRENYVWNVLLHRGATPEGIFLRVPTASYDLDLFTMTWGPTIAALSYVFDKSLEETIIQKAISGFRKCAMISAHYGLSDVFDNLIISLCKFTALSSESIENLPSVFGSNPKAHIAAKTVFHLAHRHGDILREGWKNIMEAMLQLFRAQLLPKAMIEVEDFVDPNGKISLQREETPSNRGESTVLSFVSWLTLSGPEQSSVRGPSTENQEAKRVALECIKQCDPEKMITESKFLQLESLQELMKALVSVTPDEETYDEEDAAFCLEMLLRIVLENRDRVGCVWQTVRDHLYHLCVQAQDFCFLVERAVVGLLRLAIRLLRREEISAQVLLSLRILLLMKPSVLSRVSHQVAYGLHELLKTNAANIHSGDDWATLFTLLECIGSGVKPPAALQATARADAPDAGAQSDSELPSYHQNDVSLDRGYTSDSEVYTDHGRPGKIHRSATDADVVNSGWLVVGKDDVDNSKPGPSRPGPSPLINQYSLTVGLDLGPHDTKSLLKCVESLSFIVRDAAHITPDNFELCVKTLRIFVEASLNGGCKSQEKRGKSHKYDSKGNRFKKKSKEGSMLRRPRTSSQHASRGGQSDDDEDEGVPASYHTVSLQLLDLMHTLHTRAASIYSSWAEEQRHLETGGQKIEADSRTLWAHCWCPLLQGIACLCCDARRQVRMQALTYLQRALLVHDLQKLDALEWESCFNKVLFPLLTKLLENISPADVGGMEETRMRASTLLSKYMHAGSSDLLSEAIPESLKNMLLVMDTAEIFHSADARGGGPSALWEITWERIDCFLPHLRDELFKQTVIQDPMPMEPQGQKPLASAHLTSAAGDTRTPGHPPPPEIPSELGACDFEKPESPRAASSSSPGSPVASSPSRLSPTPDGPPPLAQPPLILQPLASPLQVGVPPMTLPIILNPALIEATSPVPLLATPRPTDPIPTSEVN

SEQ ID NO: 61491 - protein, 28 aa, Homo sapiens
MCGIWALFGSDDCLSVQCLSAMKIAHRG

SEQ ID NO: 61492 - protein, 454 aa, Homo sapiens
  MOD_RES (1)..(1): Any amino acid
XFVGLFQLLFTILGGIFQILWSTVFGGGLVEGAKNIRVTKILGDMPDPTQFGIHDDTMEAERAEVMEPGITTELVHFIKGEKGDTDIMSDLFGLHPKKEGSLKHGPEVGLGDLSEIIGKDEPPTLESTVQKKRKAQAAEMKAANEAEGKVESEKADMEDGEKEDKDKEEEQAEYLWTEVTKKKKRRCGQKVEKPEAFTANFFKGLEIYQTKLLVTEEPLEEETEDVANLWNSFNDEEEEEAMVFFVLQESTGYMAPTLRALAIIHTIISLVCVVGYYCLKVPLVVFKREKEIARKLEFDGLYITEQPSEDDIKGQWDRLVINTPSFPNNYWDKFVKRKVINKYGDLYGAERIAELLGLDKNALDFSPVEETKAEAASLVSWLSSIDMKYHIWKLGVVFTDNSFLYLAWYTTMSVLGHYNNFFFAAHLLDIAMGFKTLRTILSSVTHNGKQIQTV

SEQ ID NO: 61493 - protein, 67 aa, Homo sapiens
MLLVQGQFPRQCPRRGRGPLARVASPSLPAARGHFRCCFCEFFRCTRVLLKRQLRSPRSAEPAEPQP

SEQ ID NO: 61494 - protein, 212 aa, Homo sapiens
MLSLKLPQLLQVHQVPRVFWEDGIMSGYRRPTSSALDCVLSSFQMTNETVNIWTHFLPTWYFLWRLLALAGGPGFRAEPYHWPLLVFLLPACLYPFASCCAHTFSSMSPRMRHICYFLDYGALSLYSLGCAFPYAAYSMPASWLHGHLHQFFVPAAALNSFLCTGLSCYSRTAMVTGLFLPPPSFLELESPGLSKVLRTGAFAYPFLFDNLP

SEQ ID NO: 61495 - protein, 65 aa, Homo sapiens
GFFDIPVDNLYAEPAVLKWIRENISEWRNCTIVSPDAGGAKSTEGSDEDTGIGTGWMLLLSCQSE

SEQ ID NO: 61496 - protein, 255 aa, Homo sapiens
  MOD_RES (1)..(1): Any amino acid
XYPVPVSPGVQPLYPIPMTPMPVNQAKTYRAVKYLELELLRYVPNMPQQRQDQHHQSAMMHPASAAGPPIAATPPAYSTQYVAYSPQQFPNQPLVQHVPHYQSQHPHVYSPVIQGNARMMAPPTHAQPGLVSSSATQYGAHEQTHAMYVSTGSLAQQYAHPNATLHPHTPHPQPSATPTGQQQSQHGGSHPAPSPVQHHQHQAAQALHLASPQQQSAIYHAGLAPTPPSMTPASNTQSPQNSFPAAQQTVFTIHP

SEQ ID NO: 61497 - protein, 177 aa, Homo sapiens
MTEEACRTRSQKRALERDPTEDDVESKKIKMERGLLASDLNTDGDMRVTPEPGAGPTQGLLRATEATAMAMGRGEGLVGDGPVDMRTSHSDMKSERRPPSPDVIVLSDNEQPSSPRVNGLTTVALKETSTEALMKSSPEERERMIKQLKEELRLEEAKLVLLKKLRQSQIQKEATAQ

SEQ ID NO: 61498 - protein, 292 aa, Homo sapiens
  MOD_RES (1)..(1): Any amino acid
XNMVEADRPGKLFIGGLNTETNEKALEAVFGKYGRIVEVLLMKDRETNKSRGFAFVTFESPADAKDAARDMNGKSLDGKAIKVEQATKPSFESGRRGPPPPPRSRGPPRGLRGGRGGSGGTRGPPSRGGHMDDGGYSMNFNMSSSRGPLPVKRGPPPRSGGPPPKRSAPSGPVRSSSGMGGRAPVSRGRDSYGGPPRREPLPSRRDVYLSPRDDGYSTKDSYSSRDYPSSRDTRDYAPPPRDYTYRDYGHSSSRDDYPSRGYSDRDGYGRDRDYSDHPSGGSYRDSYESYGW

SEQ ID NO: 61499 - protein, 198 aa, Homo sapiens
MAHESERSSRLGVPCGEPAELGGDASEEDHPQVCAKCCAQFTDPTEFLAHQNACSTDPPVMVIIGGQENPNNSSASSEPRPEGHNNPQVMDTEHSNPPDSGSSVPTDPTWGPERRGEESSGHFLVAATEPVCGIPVKWPAHEALEFQLHLHYHSKPGPTSAVWPRNCGWEGASNNGIQGSQGEDSPPPISASCTQGSA

SEQ ID NO: 61500 - protein, 59 aa, Homo sapiens
  MOD_RES (1)..(1): Any amino acid
XFRAPEVARGNVIYNQQADVYSFGLLLYDILTTGGRIVEGLKFPNEFDELEIQGKLPGL

SEQ ID NO: 61501 - protein, 15 aa, Homo sapiens
MGKQNSKLRPEVMQD

SEQ ID NO: 61502 - protein, 149 aa, Homo sapiens
MLAIGLSLCDHLSQDVFCLHESKFEEERMVAGWLTNYSQDSVTFEDVAVDFTQEEWTLLDQTQRNLYRDVMLENYKNLVAVDWESHINTKWSAPQQNFLQGKTSSVVEMSLTVSPRLECSGTISAHGSFHLPGSSNSCASASRVAGTCA

SEQ ID NO: 61503 - protein, 275 aa, Homo sapiens
GGASLLLLDCRPHELFESSHIETAINLAIPGLMLRRLRKGNLPIRSIIPNHADKERFATRCKAATVLLYDEATAEWQPEPGAPASVLGLLLQKLRDDGCQAYYLQGGFNKFQTEYSEHCETNVDSSSSPSSSPPTSVLGLGGLRISSDCSDGESDRELPSSATESDGSPVPSSQPAFPVQILPYLYLGCAKDSTNLDVLGKYGIKYILNVTPNLPNAFEHGGEFTYKQIPISDHWSQNLSQFFPEAISFIGRCCVLGRGVWVHQGVCRTLGGAPA

SEQ ID NO: 61504 - protein, 44 aa, Homo sapiens
MSGYSSDRDRGRDRGFGAPRFGGSRAGPLSGKKFGNPGEKLVKK

SEQ ID NO: 61505 - protein, 109 aa, Homo sapiens
MDNLSSEEIQQRAHQITDESLESTRRILGLAIESQDAGIKTITMLDEQKEQLNRIEEGLDQINKDMRETEKTLTELNKCCGLCVCPCNRTKNFESGKAYKTTWGDGGEN

SEQ ID NO: 61506 - protein, 192 aa, Homo sapiens
MYRALRLLARSRPLVRAPAAALASAPGLGGAAVPSFWPPNAARMASQNSFRIEYDTFGELKVPNDKYYGAQTVRSTMNFKIGGVTERMPTPVIKAFGILKRAAAEVNQDYGLDPKIANAIMKAADEVAEGKLNDHFPLVVWQTGSGTQTNMNVNEVISNRAIEMLGGELGSKIPVHPNDHVNKSQQCTLLLQ

SEQ ID NO: 61507 - protein, 113 aa, Homo sapiens
GKFTDGQLVSQKSDSSKDIRGDKITWIEGKEPGCETIGLLMSSMDDLIRHCNGKLGSYKINGRTKAMVACYPGNGTGYVRHVDNPNGDGRCVTCIYYLNKDWDAKVRNNCLVF

SEQ ID NO: 61508 - protein, 154 aa, Homo sapiens
  MOD_RES (1)..(1): Any amino acid
XPPNPSPTSPLSPSWPMFSAPSSPMPTSSTSSDSSPVRSVAGFVWFSVAAVVLSLARSSLHAVFSLLVNFVPCHPNLHLLFDRPEEAVHEDSSTPFRKAKALYACKAEHDSELSFTAGTVFDNAECPSASTAIFTATPKLRAPPPLTWALPLAA

SEQ ID NO: 61509 - protein, 69 aa, Homo sapiens
MGTRDDVPEAKVLVPVAVYCGSIPRTSAGPRVLPPGSINSSLPHGEGSLQPEPRALLNNEEPSQLLRGL

SEQ ID NO: 61510 - protein, 291 aa, Homo sapiens
  MOD_RES (1)..(1): Any amino acid
XEFEKVYFPYLLISKKRYAGLLFSSRPDAHDRMDCKGLEAVRRDNCPLVANLVTASLRRLLIDRDPEGAVAHAQDVISDLLCNRIDISQLVITKELTRAASDYAGKQAHVELAERMRKRDPGSAPSLGDRVPYVIISAAKGVAAYMKSEDPLFVLEHSLPIDTQYYLEQQLAKPLLRIFEPILGEGRAEAVLLRGDHTRCKTVLTGKVGGLLAFAKRRNCCIGCRTVLSHQGIPSECPGGALLAPLDAVPALPGQPARGRHLHQPGLPHLLHAQEGAEGPGRPGAAPAALR

SEQ ID NO: 61511 - protein, 235 aa, Homo sapiens
MSRYGRYGGETKVYVGNLGTGAGKGELERAFSYYGPLRTVWIARNPPGFAFVEFEDPRDAEDAVRGLDGKVICGSRVRVELSTGMPRRSRFDRPPARRPFDPNDRCYECGEKGHYAYDCHRYSRRRRSRSRSRSHSRSRGRRYSRSRSRSRGRRSRSASPRRSRSISLRRSRSASLRRSRSGSIKGSRSPSRSRSRSRSISRPRSSRSKSRSPSPKRSRSPSGSPRRSASPERMD

SEQ ID NO: 61512 - protein, 64 aa, Homo sapiens
MIVREETRGECTDLDSRCEIISDGKMQLYRKHSCVTLHQRIHNGQKPYEWNTTDLRSLGLRNNL

SEQ ID NO: 61513 - protein, 663 aa, Homo sapiens
MESTLTLATEQPVKKNTLKKYKIACIVLLALLVIMSLGLGLGLGLRKLEKQGSCRKKCFDASFRGLENCRCDVACKDRGDCCWDFEDTCVESTRIWMCNKFRCGETRLEASLCSCSDDCLQRKDCCADYKSVCQGETSWLEENCDTAQQSQCPEGFDLPPVILFSMDGFRAEYLYTWDTLMPNINKLKTCGIHSKYMRAMYPTKTFPNHYTIVTGLYPESHGIIDNNMYDVNLNKNFSLSSKEQNNPAWWHGQPMWLTAMYQGLKAATYFWPGSEVAINGSFPSIYMPYNGSVPFEERISTLLKWLDLPKAERPRFYTMYFEEPDSSGHAGGPVSARVIKALQVVDHAFGMLMEGLKQRNLHNCVNIILLADHGMDQTYCNKMEYMTDYFPRINFFYMYEGPAPRIRAHNIPHDFFSFNSEEIVRNLSCRKPDQHFKPYLTPDLPKRLHYAKNVRIDKVHLFVDQQWLAVRSKSNTNCGGGNHGYNNEFRSMEAIFLAHGPSFKEKTEVEPFENIEVYNLMCDLLRIQPAPNNGTHGSLNHLLKVPFYEPSHAEEVSKFSVCGFANPLPTESLDCFCPHLQNSTQLEQVNQMLNLTQEEITATVKVNLPFGRPRVLQKNVDHCLLYHREYVSGFGKAMRMPMWSSYTVPQLPAIEHQIANMML

SEQ ID NO: 61514 - protein, 119 aa, Homo sapiens
MNTGRDSQSPDSAKGFRSVRPNLQDKRSPTQSQITVNGNSGGAVSPMSYYQRPFSPSAYSLPASLNSSIVMQHGTSLDSTDTYPQHAQSLDGTTSSSIPLYRSSEEEKRVTVIKAPHYP

SEQ ID NO: 61515 - protein, 156 aa, Homo sapiens
  MOD_RES (1)..(1): Any amino acid
XFAEVLGVECRGGSTLELSLKSEQLVLHTARARAIEALVELFLNELKKDSGYVIALRSYITDNCSLLSFHRGDLIKLLPVATLEPGWQFGSAGGRSGLFPADIVQPAAAPDFSFSKEQRSGWHKGQLSNGEPGLARWDRASEVRKMGEGQAEARPA

SEQ ID NO: 61516 - protein, 132 aa, Homo sapiens
MQMGQPVPETGPAILLDGYSGPAYSDTYSSAGDSVYTYFSAVAGQDGEVDAEELQRCLTQSGINGTYSPFSLETCRIMIAMLDRDHTGKMGFNAFKELWAALNAWKENFMTVDQDGSGTVEHHELRQAIGLM

SEQ ID NO: 61517 - protein, 268 aa, Homo sapiens
MQWNVPRTVSRLARRTCLEPHNAGLFGHCQNVKGPLLLYNAESKVVLVQGPQKQWLHLSAAQCVAKERRPLDAHPPQPGVLRHKQGKQHVSFRRVFSSSATAQGTPEKKEEPDPLQDKSISLYQRFKKTFRQYGKVLIPVHLITSGVWFGTFYYAALKGVNVVPFLELIGLPDSVVSILKNSQSGNALTAYALFKIATPARYTVTLGGTSVTVKYLRSHGYMSTPPPVKEYLQDRMEETKELITEKMEETKDRLTEKLQETKEKVSFK

SEQ ID NO: 61518 - protein, 114 aa, Homo sapiens
MGRVFLTGEKANSILKRYPRANGFFEEIRQGNIERECKEEFCTFEEAREAFENNEKTKEFWSTYTKAQQGESNRGSDWFQFYLTFPLIFGLFIILLVIFLIWRCFLRNKTRRQT

SEQ ID NO: 61519 - protein, 130 aa, Homo sapiens
  MOD_RES (1)..(1): Any amino acid
XYAQAALDGDSQGFFNLALLIEEGTIIPHHILDFLEIDSTLHSNNISILQELYERCWSHSNEESFSPCSLAWLYLHLRLLWGAILHSALIYFLGTFLLSILIAWTVQYFQSVSEFCLCVPENTAPKLLAA

SEQ ID NO: 61520 - protein, 113 aa, Homo sapiens
  MOD_RES (1)..(1): Any amino acid
XTTEPETEPEDDRGPVVPKHSTFGQSLTQRLHALKLRSPDASPSRAPPSTQEPQSPREGEELKPEDKDPRDPEESKEPKEEKQRRRCKPKKPTRRDASPESPSKKGPIPIRRH

SEQ ID NO: 61521 - protein, 112 aa, Homo sapiens
MVFVPMAVPWSPEHQLQRLQVTRKLLEMEEQAAFLVGSATPRYLYLASNHSNKWGHPRGYRIQMLSFAGEPLPQNSSMARGFSWERYQLAVTQRKEEEPSSSSVFNQNDPWA

SEQ ID NO: 61522 - protein, 95 aa, Homo sapiens
MINSTSTQPPDESCSQNLLITQQIIPVLYCMVFIAGILLNGVSGWIFFYVPSSKSFIIYLKNIVIADFVMSLTFPFKILGDSGLGPWQLNVFVCR

SEQ ID NO: 61523 - protein, 591 aa, Homo sapiens
MYIKSTYDGLHVITGTTENSPADRCKKIHAGDEVIQVNHQTVPLIPRSPTSSVATPSSTISTPTKRDSSALQDLYIPPPPAEPYIPRDEKGNLPCEDLRGHMVGKPVHKGSESPNSFLDQEYRKRFNIVEEDTVLYCYEYEKGRSSSQGRRESTPTYENSLLRYMSNEKIAQEEYMFQRNSKKDTGKKSKKKGDKSNSPTHYSLLPSLQMDALRQDIMGTPVPETTLYHTFQQSSLQHKSKKKNKGPIAGKSKRRISCKDLGRGDCEGWLWKKKDAKSYFSQKWKKYWFVLKDASLYWYINEEDEKAEGFISLPEFKIDRASECRKKYAFKACHPKIKSFYFAAEHLDDMNRWLNRINMLTAGYAERERIKQEQDYWSESDKEEADTPSTPKQDSPPPPYDTYPRPPSMSCASPYVEAKHSRLSSTETSQSQSSHEEFRQEVTGSSAVSPIRKTASQRRSWQDLIETPLTSSGLHYLQTLPLEDSVFSDSAAISPEHRRQSTLPTQKCHLQDHYGPYPLAESERMQVLNGNGGKPRSFTLPRDSGFNHCCLNAPVSACDPQDDVQPPEVEEEEEEEEEEGEAAGENIGEKS

SEQ ID NO: 61524 - protein, 46 aa, Homo sapiens
MWNLLHETDSAVATARRPRWLCAGALVLAGGFFLLGFLFVKVGKRN

SEQ ID NO: 61525 - protein, 76 aa, Homo sapiens
MMMSDNAKGRAAHSWKKRGSISSLSNHEFWRKEIHGRIKDSMSTVSYMEEPSQRDDISRLTVQMENTYQLAQYKGL

SEQ ID NO: 61526 - protein, 1102 aa, Homo sapiens
  MOD_RES (1)..(1): Any amino acid
XGGEEEKAEGGAGEEHDLFAGLKPLEQESRMEVLFACAEALHAHGYSSEASRLTVELAQDLLANPPDLKVEPPPAKGKKNKVSTSRQTWVATNTLSKAAFLLTVLSERPEHHNLAFRVGMFALELQRPPASTKALEVKLAYQESEVAALLKKIPLGPSEMSTMRCRAEELREGTLCDYRPVLPLMLASFIFDVLCAPVVSPTGSRPPSRNWNSETPGDEELGFEAAVAALGMKTTVSEAEHPLLCEGTRREKGDLALALMITYKDDQAKLKKVTASVFQILDKLLDRESQTHKPQTLSSFYSSSRPTTASQRSPSKHGGPSAPGALQPLTSGSAGPAQPGSVAGAGPGPTEGFTEKNVPESSPHSPCEGLPSEAALTPRPEGKVPSRLALGSRGGYNGRGWGSPGRPKKKHTGMASIDSSAPETTSDSSPTLSRRPLRGGWAPTSWGRGQDSDSISSSSSDSLGSSSSSGSRRASASGGARAKTVEVGRYKGRRPESHAPHVPNQPSEAAAHFYFELAKTVLIKAGGNSSTSIFTHPSSSGGHQGPHRNLHLCAFEIGLYALGLHNFVSPNWLSRTYSSHVSWITGQAMEIGSAALTILVECWDGHLTPPEVASLADRASRARDSNMVRAAAELALSCLPHAHALNPNEIQRALVQCKEQDNLMLEKACMAVEEAAKGGGVYPEVLFEVAHQWFWLYEQTAGGSSTAREGATSCSASGIRAGGEAGRGMPEGRGGPGTEPVTVAAAAVTAAATVVPVISVGSSLYPGPGLGHGHSPGLHPYTALQPHLPCSPQYLTHPAHPAHPMPHMPRPAVFPVPSSAYPQGVHPAFLGAQYPYSVTPPSLAATAVSFPVPSMAPITVHPYHTEPGLPLPTSVALSSVHPASTFPAIQGASLPALTTQPSPLVSGGFPPPEEETHSQPVNPHSLHHLHAAYRVGMLALEMLGRRAHNDHPNNFSRSPPYTDDVKWLLGLAAKLGVNYVHQFCVGAAKGVLSPFVLQEIVMETLQRLSPAHAHNHLRAPAFHQLVQRCQQAYMQYIHHRLIHLTPADYDDFVNAIRSARSAFCLTPMGMMQFNDILQNLKRSKQTKELWQRVSLEMATFSP

SEQ ID NO: 61527 - protein, 300 aa, Homo sapiens
MTVVGNPRSWSCQWLPILILLLGTGHGPGVEGVTHYKAGDPVILYVNKVGPYHNPQETYHYYQLPVCCPEKIRHKSLSLGEVLDGDRMAESLYEIRFRENVEKRILCHMQLSSAQVEQLRQAIEELYYFEFVVDDLPIRGFVGYMEESGFLPHSHKIGLWTHLDFHLEFHGDRIIFANVSVRDVKPHSLDGLRPDEFLGLTHTYSVRWSETSVERRSDRRRGDDGGFFPRTLEIHWLSIINSMVLVFLLVGFVAVILMRVLRNDLARYNLDEETTSAGSGDDFDQGDNGWKIIHTDVFRF

SEQ ID NO: 61528 - protein, 437 aa, Homo sapiens
MQRADSEQPSKRPRCDDSPRTPSNTPSAEADWSPGLELHPDYKTWGPEQVCSFLRRGGFEEPVLLKNIRENEITGALLPCLDESRFENLGVSSLGERKKLLSYIQRLVQIHVDTMKVINDPIHGHIELHPLLVRIIDTPQFQRLRYIKQLGGGYYVFPGASHNRFEHSLGVGYLAGCLVHALGEKQPELQISERDVLCVQIAGLCHDLGHGPFSHMFDGRFIPLARPEVKWTHEQGSVMMFEHLINSNGIKPVMEQYGLIPEEDICFIKEQIVGPLESPVEDSLWPYKGRPENKSFLYEIVSNKRNGIDVDKWDYFARDCHHLGIQNNFDYKRFIKFARVCEVDNELRICARDKEVGNLYDMFHTRNSLHRRAYQHKVGNIIDTMITDAFLKADDYIEITGAGGKKYRISTAIDDMEAYTKLTGYQHGLWNARKESN

SEQ ID NO: 61529 - protein, 89 aa, Homo sapiens
MNGKARKEAVQTAAKELLKFVNRSPSPFHAVAECRNRLLQAGFSELKETEKWNIKPESKYFMTRNSSTIIAFAVGGQYVPGNGFSLIGA

SEQ ID NO: 61530 - protein, 167 aa, Homo sapiens
MEYFMVPTQKVPSLQHFRKTEKEVIGGLCRRRKPRLGVAQLPCQHSTNPRDSAGPGAADSAGDRQQQRAETHAEHQRGIPVPQDPHPPHRRREAQQGSHSPADSRVHLLPGAGEDQALAAEHTAQALHPGAERLVPQATAGRGQGRRHRLPGHLGGREGGGPAAGDD

SEQ ID NO: 61531 - protein, 76 aa, Homo sapiens
  MOD_RES (1)..(1): Any amino acid
XLKELVEPVSRFFEEVNDPAKNDALEMVEETTWQGLKELGAFGLQVPSELGGVGLCNTQIPASPPVRPFGGDRGHA

SEQ ID NO: 61532 - protein, 23 aa, Homo sapiens
MVGAGISTPSGIPDFRSPGSGLY

SEQ ID NO: 61533 - protein, 245 aa, Homo sapiens
MSGGARGFCMLKAPHSARPFFSSRSPTALQDESCGADLGRALPDGLKLLDNWDSVTSTFSKLREQLGPVTQEFWDNLEKETEGLRQEMSKDLEEVKAKVQPYLDDFQKKWQEEMELYRQKVEPLRAELQEGARQKLHELQEKLSPLGEEMRDRARAHVDALRTHLAPYSDELRQRLAARLEALKENGGARLAEYHAKATEHLSTLSEKAKPALEDLRQGLLPVLESFKVSFLSALEEYTKKLNTQ

SEQ ID NO: 61534 - protein, 589 aa, Homo sapiens
  MOD_RES (1)..(1): Any amino acid
XHIRIMKRRVHTHWDVNISFREASCSQDGNLPTLISSVHRSRHLVMPEHQSRCEFQRGSLEIGLRPAGDLLGKRLGRSPRISSDCFSEKRARSESPQEALLLPRELGPSMAPEDHYRRLVSALSEASTFEDPQRLYHLGLPSHDLLRVRQEVAAAALRGPSGLEAHLPSSTAGQRRKQGLAQHREGAAPAAAPSFSERELPQPPPLLSPQNAPHVALGPHLRPPFLGVPSALCQTPGYGFLPPAQAEMFAWQQELLRKQNLARLELPADLLRQKELESARPQLLAPETALRPNDGAEELQRRGALLVLNHGAAPLLALPPQGPPGSGPPTPSRDSARRAPRKGGPGPASARPSESKEMTGARLWAQDGSEDEPPKDSDGEDPETAAVGCRGPTPGQAPAGGAGAEGKGLFPGSTLPLGFPYAVSPYFHTGAVGGLSMDGEEAPAPEDVTKWTVDDVCSFVGGLSGCGEYTRVFREQGIDGETLPLLTEEHLLTNMGLKLGPALKIRAQVARRLGRVFYVASFPVALPLQPPTLRAPERELGTGEQPLSPTTATSPYGGGHALAGQTSPKQENGTLALLPGAPDPSQPLC

SEQ ID NO: 61535 - protein, 481 aa, Homo sapiens
MAHCVTLVQLSISCDHLIDKDIGSKSDPLCVLLQDVGGGSWAELGRTERVRNCSSPEFSKTLQLEYRFETVQKLRFGIYDIDNKTPELRDDDFLGGAECSLGQIVSSQVLTLPLMLKPGKPAGRGTITVSAQELKDNRVVTMEVEARNLDKKDFLGKSDPFLEFFRQGDGKWHLVYRSEVIKNNLNPTWKRFSVPVQHFCGGNPSTPIQVQCSDYDSDGSHDLIGTFHTSLAQLQAVPAEFECIHPEKQQKKKSYKNSGTIRVKICRVETEYSFLDYVMGGCQINFTVGVDFTGSNGDPSSPDSLHYLSPTGVNEYLMALWSVGSVVQDYDSDKLFPAFGFGAQVPPDWQVSHEFALNFNPSNPYCAGIQGIVDAYRQALPQVRLYGPTNFAPIINHVARFAAQAAHQGTASQYFMLLLLTDGAVTDVEATREAVAPREALAQTVLAEVPTQLVSYFRAQGWAPLKPLPPSAKDPAQAPQA

SEQ ID NO: 61536 - protein, 115 aa, Homo sapiens
MATNFSDIVKQGYVKMKSRKLGIYRRCWLVFRKSSSKGPQRLEKYPDEKSVCLRGCPKVTEISNVKCVTRLPKETKRQAVAIIFTDDSARTFTCDSELEAEEWYKTLSVECLGSR

SEQ ID NO: 61537 - protein, 38 aa, Homo sapiens
MKAQSTASMPPARPAPRAFPAPQPGRREDTLRLKALRC

SEQ ID NO: 61538 - protein, 264 aa, Homo sapiens
MLNTLQTNAGYLEQVKRQRGDPQTQLEAMELYLARSGLQVEDLDRLNIIHVTGTKGKGSTCAFTECILRSYGLKTGFFSSPHLVQVRERIRINGQPISPELFTKYFWRLYHRLEETKDGSCVSMPPYFRFLTLMAFHVFLQEKVDLAVVEVGIGGAYDCTNIIRKPVVCGVSSLGIDHTSLLGDTVEKIAWQKGGIFKQGVPAFTVLQPEGPLAVLRDRAQQISVLGSQRHPGQGSCGSCPWHLCSSPHPTCGSGFGTRSGRAG

SEQ ID NO: 61539 - protein, 76 aa, Homo sapiens
MIIPSLEELDSLKYSDLQNLAKSLGLRANLRATKLLKALKGYIKHEARKGNENQFHSCCPGWSAMTRSRLTATSTS

SEQ ID NO: 61540 - protein, 210 aa, Homo sapiens
MNAAVRAVVRMGIYVGAKVYFIYEGYQGMVDGGSNIAEADWESVSSILQVGGTIIGSARCQAFRTREGRLKAACNLLQRGITNLCVIGGDGSLTGANLFRKEWSGLLEELARNGQIDKEAVQKYAYLNVVGMVGSIDNDFCGTDMTIGTDSALHRIIEVVDAIMTTAQSHQRTFVLEVMGRHCGYLALVSALACGADWVFLPESPPEEGW

SEQ ID NO: 61541 - protein, 115 aa, Homo sapiens
MEDHNCEQLCVNVPGSFVCQCYSGYALAEDGKRCVAVDYCASENHGCEHECVNADGSYLCQCHEGFALNPDKKTCTKIDYCASSNHGCQHECVNTDDSYSCHCLKGFTLNPDKKT

SEQ ID NO: 61542 - protein, 98 aa, Homo sapiens
MFGDLFEEEYSTVSNNQYGKGKKLKTKALEPPAPREFTNLSGIRNQGGTCYLNSLLQTLHFTPEFREALFSLGPEELGLFEDKDKPDAKKVTWPIPYG

SEQ ID NO: 61543 - protein, 156 aa, Homo sapiens
MADTATTASAAAASAASASSDAPPFQLGKPRFQQTSFYGRFRHFLDIIDPRTLFVTERRLREAVQLLEDYKHGTLRPGVTNEQLWSAQKIKQVIFLLGRQFRSSLAQPDTGIHCLLWLNQSHNACVNYANRNATKPSPASKFIQGYLGAVISAVSI

SEQ ID NO: 61544 - protein, 48 aa, Homo sapiens
MTKMDIRGAVDAAVPTNIIAAKAAEVRANKVNWQSYLQGQMISAEDLC

SEQ ID NO: 61545 - protein, 152 aa, Homo sapiens
SSISDLKEVPRKNITLIRGLGHGAFGEVYEGQVSGMPNDPSPLQVAVKTLPEVCSEQDELDFLMEALIISLSWKQLFCFTFCLRPSWEKSTMNSSTQSTHQYLRKTLSCPLRHFLTQVPEQHPHSSSHSPANGTPVEPAVVLPTCSPARFWV

SEQ ID NO: 61546 - protein, 164 aa, Homo sapiens
MVLEMLNPIHYNITSIVPEAMPAATMPVLLLTGLFLLVWNYEGTSSIPGPGYCMGIGPLISHGRFLWMGIGSACNYYNRVYGEFMRVWISGEETLIISKSSSMFHIMKHNHYSSRFGSKLGLQCIGMHEKGIIFNNNPELWKTTRPFFMKALSGPGLVRMVTVC

SEQ ID NO: 61547 - protein, 164 aa, Homo sapiens
MDSNTAPLGPSCPQPPPAPQPQARSRLNATASLEQERSERPRAPGPQAGPGPGVRDAAAPAEPQAQHTRSRERADGTEYLLNQGVELGSSAAQPGRCCVLDYARISEGERAAAGPICSGFLLESPSAPCVLSSVVVEAGGETGETHGHRWHPRRLAEPVIDDGR

SEQ ID NO: 61548 - protein, 145 aa, Homo sapiens
MAAVFLVTLYEYSPLFYIAVVFTCFIVTTGLVLGWFGWDVPVILRNSEETQFSTRVFKKQMRQVKNPFGLEITNPSSASITTGITLTTDCLEDSLLTCYWGCSVQKLYEALQKHVYCFRISTPQALEDALYSEYLYQEQYLYPFV

SEQ ID NO: 61549 - protein, 91 aa, Homo sapiens
FFSRVVPPDSYQAQAMVDIVTALGWNYVSTLASEGNYGESGVEAFTQISREIGYPSLFGIQGCLHECFAILCQVVYQFLLLMQLSDAQTVY

SEQ ID NO: 61550 - protein, 89 aa, Homo sapiens
MNELKNLQAEGLTTLGQSLRTAFDLLNLNRLVTGIDNYGQGRNPFFLEPAIIITITDGSKLTTTSGVQDEVSCAYITWIMQMQLNNPLF

SEQ ID NO: 61551 - protein, 59 aa, Homo sapiens
QQKAALLKNNTALQSVSLRSKNISMMSLPWGCAGSSHSPQTPSTCGTEPYPWNPSLTKR

SEQ ID NO: 61552 - protein, 117 aa, Homo sapiens
  MOD_RES (1)..(1): Any amino acid
XSVEWEGRSLLKALVKKSALCGEQVHILGCEVSEEEFREGFDSDINNRLVYHDFFRDPLNWSKTEEAFPGGPLGALRAMCKRTDPVPVTIALDSLSWLLLRLPCTTLCQVTAPQWGK

SEQ ID NO: 61553 - protein, 393 aa, Homo sapiens
MFLEEASQQEKLAKEWCFKPCEIRELSHHEFFMPGLVDTHIHASQYSFAGSSIDLPLLEWLTKYTFPAEHRFQNIDFAEEVYTRVVRRTLKNGTTTACYFATIHTDSSLLLADITDKFGQRAFVGKVCMDLNDTFPEYKETTEESIKETERFVSEMLQKNSHISENRDEVEAVKNLYPSYKNYTSVYDKNNLLTNKTVMAHGCYLSAEELNVFHERGASIAHCPNSNLSLSSGFLNVLEVLKHEVKIGLGTDVAGGYSYSMLDAIRRAVMVSNILLINKVNEKSLTLKEVFRLATLGGSQALGLDGEIGNFEVGKEFDAILINPKASDSPIDLFYGDFFGDISEAVIQKFLYLGDDRNIEEVYVGGKQVVPFSSSVKETIHLPASSPHPPPFP

SEQ ID NO: 61554 - protein, 271 aa, Homo sapiens
MAGYLPPKGYAPSPPPPYPVTPGYPEPALHPGPGQAPVPAQVPAPAPGFALFPSPGPVALGSAAPFLPLPGVPSGLEFLVQIDQILIHQKAERVETFLGWETCNRYELRSGAGQPLGQAAEESNCCARLCCGARRPLRVRLADPGDREVLRLLRPLHCGCSCCPCGLQEFSIQDADRQTVLRVVGPCWTCGCGTDTNFEVKTRDESRSVGRISKQWGGLVREALTDADDFGLQFPLDLDVRVKAVLLGATFLIDYMFFEKRGGAGPSAVTS

SEQ ID NO: 61555 - protein, 85 aa, Homo sapiens
MSGAPTAGAALMLCAATAVLLSAQGGPVQSKSPRFASWDEMNVLAHGLLQLGQGLREHAERTRSQLSALERRLSACGSACQGTEG

SEQ ID NO: 61556 - protein, 181 aa, Homo sapiens
MSGIGNKRAAGEPGTSMPPEKKAAVEDSGTTVETIKLGGVSSTEELDIRTLQTKNRKLAEMLDQRQAIEDELREHIEKLERRQATDDASLLIVNRYWSQFDENIRIILKRYDLEQGLGDLLTERKALVVPEPEPDSDSNQERKDDRERGEGQEPAFSFLATLASSSSEEMESQLQERVESS

SEQ ID NO: 61557 - protein, 40 aa, Homo sapiens
  MOD_RES (1)..(1): Any amino acid
XMLRTCWSHSHWDPFSSGSVTAMWATHSPTKPKAAAAISW

SEQ ID NO: 61558 - protein, 126 aa, Homo sapiens
MPRGSRARGSKRKRSWNTECPSFPGERPLQVRRAGLRTAGAAASLSEAWLRCGEGFQNTSGNPSLTAEEKTITEKHLELCPRPKQETTTSKSTSGLTDITWSSSGSDLSDEDKTLSQLQRGFGNYD

SEQ ID NO: 61559 - protein, 199 aa, Homo sapiens
MSSEMLPAFIETSNVDKKQGINEDQEESQKPRLGEGCEPISKRQMKKLIKQKQWEEQRELRKQKRKEKRKRKKLERQCQMEPNSDGHDRKRVRRDVVHSTLRLIIDCSFDHLMVLKDIKKLHKQIQRCYAENRRALHPVQFYLTSHGGQLKKNMDENDKGWVNWKDIHIKPEHYSELIKKEDLIYLTSDSPNILKELDE

SEQ ID NO: 61560 - protein, 506 aa, Homo sapiens
MHSMISSVDVKSEVPVGLEPISPLDLRTDLRMMMPVVDPVVREKQLQQELLLIQQQQQIQKQLLIAEFQKQHENLTRQHQAQLQEHIKLQQELLAIKQQQELLEKEQKLEQQRQEQEVERHRREQQLPPLRGKDRGRERAVASTEVKQKLQEFLLSKSATKDTPTNGKNHSVSRHPKLWAAHHTSLDQSSPPLSGTSPSYKYTLPGAQDAKDDFPLRKTASEPNLKVRSRLKQKVAERRSSPLLRRKDGNVVTSFKKRMFEVTESSVSSSSPGSGPSSPNNGPTGSVTENETSVLPPTPHAEQMVSQQRILIHEDSMNLLSLYTSPSLPNITLGLPAVPSQLNASNSLKEKQKCETQTLRQGVPLPGQYGGSIPASSSHPHVTLEGKPPNSSHQALLQHLLLKEQMRQQKLLVAGGVPLHPQSPLATKERISPGIRGTHKLPRHRPLNRTQSAPLPQSTLAQLVIQQQHQQFLEKQKQYQQQIHMNKICHDEEIPFPSSASQLHTH

SEQ ID NO: 61561 - protein, 78 aa, Homo sapiens
MSKSFQQSSLSRDSQGHGRDLSAAGIGLLAAATQSLSMPASLGRMNQGTARLASLMNLGMSSSLNQQGAHSALSSAST

SEQ ID NO: 61562 - protein, 39 aa, Homo sapiens
MAAAVLTDRAQVSVTFDDVAVTFTKEEWGQLDLAQRTLY

SEQ ID NO: 61563 - protein, 417 aa, Homo sapiens
MQNSHSGVNQLGGVFVNGRPLPDSTRQKIVELAHSGARPCDISRILQVSNGCVSKILGRYYETGSIRPRAIGGSKPRVATPEVVSKIAQYKRECPSIFAWEIRDRLLSEGVCTNDNIPSVSSINRVLRNLASEKQQMGADGMYDKLRMLNGQTGSWGTRPGWYPGTSVPGQPTQDGCQQQEGGGENTNSISSNGEDSDEAQMRLQLKRKLQRNRTSFTQEQIEALEKEFERTHYPDVFARERLAAKIDLPEARIQVWFSNRRAKWRREEKLRNQRRQASNTPSHIPISSSFSTSVYQPIPQPTTPVSSFTSGSMLGRTDTALTNTYSALPPMPSFTMANNLPMQPPVPSQTSSYSCMLPTSPSVNGRSYDTYTPPHMQTHMNSQPMGTSGTTSTGLISPGVSVPVQVPGSEPDMSQY

SEQ ID NO: 61564 - protein, 93 aa, Homo sapiens
MSPASSTTSLPVSPLTEEPVPFKDIMKDECSMLKLQLKEKDELISQLQEELLPKILCSMRGGFICLAVFLEDSTDVFSDMHAPIKDSKANYYT

SEQ ID NO: 61565 - protein, 625 aa, Homo sapiens
MALSLQSFCPTTRRYLQQLAEKPLETRTYEQGPDTPVSADAPVHPPALEQHPYEHCEPSTMPGDLGLGLRMVRGVVHVYTRREPDEHCSEVELPYPDLQEFVADVNVLMALIINGPIKSFCYRRLQYLSSKFQMHVLLNEMKELAAQKKVPHRDFYNIRKVDTHIHASSCMNQKHLLRFIKRAMKRHLEEIVHVEQGREQTLREVFESMNLTAYDLSVDTLDVHADRNTFHRFDKFNAKYNPIGESVLREIFIKTDNRVSGKYFAHIIKEVMSDLEESKYQNAELRLSIYGRSRDEWDKLARWAVMHRVHSPNVRWLVQVPRLFDVYRTKGQLANFQEMLENIFLPLFEATVHPASHPELHLFLEHVDGFDSVDDESKPENHVFNLESPLPEAWVEEDNPPYAYYLYYTFANMAMLNHLRRQRGFHTFVLRPHCGEAGPIHHLVSAFMLAENISHGLLLRKAPVLQYLYYLAQIGIAMSPLSNNSLFLSYHRNPLPEYLSRGLMVSLSTDDPLQFHFTKEPLMEEYSIATQVWKLSSCDMCELARNSVLMSGFSHKVKSHWLGPNYTKEGPEGNDIRRTNVPDIRVGYRYETLCQELALITQAVQSEMLETIPEEAGITMSPGPQ

SEQ ID NO: 61566 - protein, 73 aa, Homo sapiens
MDGDGLTFRDVAIEFSQDEWKCLNSTQRTLYRDVMLENYRNLVSLGWSAMVQSRLTATFASRIQMILLPQPPE

SEQ ID NO: 61567 - protein, 304 aa, Homo sapiens
MELQPPEASIAVVSIPRQLPGSHSEAGVQGLSAGDDSETGSDCVTQAGLQLLASSDPPALASKNAEVTGTMSQDTEVDMKEVELNELEPEKQPMNAASGAAMSLAGAEKNGLVKIKVAEDEAEAAAAAKFTGLSKEELLKVAGSPGWVRTRWALLLLFWLGWLGMLAGAVVIIVRAPRCRELPAQKWWHTGALYRIGDLQAFQGHGAGNLAGLKGRLDYLSSLKVKGLVLGPIHKNQKDDVAQTDLLQIDPNFGSKEDFDSLLQSAKKKNGVSLLSPRLQCSGTISAYCSLLPQGSSDSRASAS

SEQ ID NO: 61568 - protein, 496 aa, Homo sapiens
MASPAPPEHAEEGCPAPAAEEQAPPSPPPPQASPAERQQQEEEAQEAGAAEGAGLQVEEAAGRAAAAVTWLLGEPVLWLGCRADELLSWKRPLRSLLGFVAANLLFWFLALTPWRVYHLISVMILGRVIMQIIKDMVLSRTRGAQLWRSLSESWEVINSKPDERPRLSHCIAESWMNFSIFLQEMSLFKQQSPGKFCLLVCSVCTFFTILGSYIPGVILSYLLLLCAFLCPLFKCNDIGQKIYSKIKSVLLKLDFGIGEYINQKKRERSADKEKSHKDDSELDFSALCPKISLTVAAKELSVSDTDVSEVSWTDNGTFNLSEGYTPQTDTSDDLDRPSEEVFSRDLSDFPSLENGMGTNDEDELSLGLPTELKRKKEQLDSGHRPSKETQSAAGLTLPLNSDQTFHLMSNLAGDVITAAVTAAIKDQLEGVQQALSQAAPIPEEDTDTEEGDDFELLDQSELDQIESELGLTQDQEAEAQQNKKSSGFLSNLLGGH

SEQ ID NO: 61569 - protein, 186 aa, Homo sapiens
MSKEEERAVKDELLSEKPEVKQKWASRLLAKLRKDIRPEYREDFVLTVTGKKPPCCVLSNPDQKGKMRRIDCLRQADKVWRLDLVMVILFKGIPLESTDGERLVKSPQCSNPGLCVQPHHIGVSVKELDLYLAYFVHAADSSQSESPSQPSDADIKDQPENGHLGFQDSFVTSGVFSVTELVRVSQ

SEQ ID NO: 61570 - protein, 225 aa, Homo sapiens
MEYWYVALKQQSLKADILPSLFLSIFLVKGVVNVLLTTPLWVVNTRLKLQGAKFRNEDIVPTNYKGIIDAFHQIIRDEGISALWNGTFPSLLLVFNPAIQFMFYEGLKRQLLKKRMKLSSLDVFIIGAVAKAIATTVTYPLQTVQSILRFGRHRLNPENRTLGSLRNILYLLHQRVRRFGIMGLYKGLEAKLLQTVLTAALMFLVYEKLTAATFTVMGLKRAHQH

SEQ ID NO: 61571 - protein, 139 aa, Homo sapiens
MNVMLENYKNLVFLGIAVSKQDPITSLEQEKEPWNMKICEMVDESPAMCSSFTRDLWPEQDIKDSFQQVILRRHGKCEHENLQLRKGSANVVECKVYKKGYNELNQCLTTTQSKIFPCDKYIKVFHKIFNSNRHKTRHT

SEQ ID NO: 61572 - protein, 79 aa, Homo sapiens
MARFLTLCTWLLLLGPGLLATVRAECSQDCATCSYRLVRPADINFLDCGGGEEEGCSFQNFPYCFLCSCCYHLLLLSLL

SEQ ID NO: 61573 - protein, 782 aa, Homo sapiens
MESTLSASNMQDPSSSPLEKCLGSANGNGDLDSEEGSSLEETGFNWGEYLEETGASAAPHTSFKHVEISIQSNFQPGMKLEVANKNNPDTYWVATIITTCGQLLLLRYCGYGEDRRADFWCDVVIADLHPVGWCTQNNKVLMPPDEIYPLKMASEWKCTLEKSLIDAAKFPLPMEVFKDHADLRSHFFTVGMKLETVNMCEPFYISPASVTKVFNNHFFQVTIDDLRPEPSKLSMLCHADSLGILPVQWCLKNGVSLTPPKGYSGQDFDWADYHKQHGAQEAPPFCFRNTSFSRGFTKNMKLEAVNPRNPGELCVASVVSVKGRLMWLHLEGLQTPVPEVIVDVESMDIFPVGWCEANSYPLTAPHKTVSQKKRKIAVVQPEKQLPPTVPVKKIPHDLCLFPHLDTTGTVNGKYCCPQLFINHRCFSGPYLNKGRIAELPQSVGPGKCVLVLKEVLSMIINAAYKPGRVLRELQLVEDPHWNFQEETLKAKYRGKTYRAVVKIVRTSDQVANFCRRVCAKLECCPNLFSPVLISENCPENCSIHTKTKYTYYYGKRKKISKPPIGESNPDSGHPKPARRRKRRKSIFVQKKRRSSAVDFTAGSGEESEEEDADAMDDDTASEETGSELRDDQTDTSSAEVPSARPRRAVTLRSGSEPVRRPPPERTRRGRGAPAASSAEEGEKCPPTKPEGTEDTKQEEEERLVLESNPLEWTVTDVVRFIKLTDCAPLAKIFQEQDIDGQALLLLTLPTVQECMELKLGPAIKLCHQIERVKVAFYAQYAN

SEQ ID NO: 61574 - protein, 275 aa, Homo sapiens
MNTSPGTVGSDPVILATAGYDHTVRFWQAHSGICTRTVQHQDSQVNALEVTPDRSMIAAAVQPVSLGYQHIRMYDLNSNNPNPIISYDGVNKNIASVGFHEDGRWMYTGGEDCTARIWDLRSRNLQCQRIFQVNAPINCVCLHPNQAELIVGDQSGAIHIWDLKTDHNEQLIPEPEVSITSAHIDPDASYMAAVNSTGNCYVWNLTGGIGDEVTQLIPKTKIPAHTRYALQCRFSPDSTLLATCSADQTCKIWRTSNFSLMTELSIKSGNPGESS

SEQ ID NO: 61575 - protein, 253 aa, Homo sapiens
ASSSSCMGGKQMTQNYSTIFAEGNISQPVLMDINAVLCCPPIALRNLIIITWEIILRGQPSCTKAYKKETNETKETNCTVERITWVSRPDQNSDLQIRPVDTTHDGYYRGIVVTPDGNFHRGYHLQVLVTPEVNLFQSRNITAVCKAVTGKPAAQISWIPEGSILATKQEYWGNGTVTVKSTCPWEGHKSTVTCHVSHLTGNKSLSVKLNSGLRTSGSPALSLLIILYVKLSLFVVILVTTGFVFFQRINHVR

SEQ ID NO: 61576 - protein, 84 aa, Homo sapiens
  MOD_RES (1)..(1): Any amino acid
XINQDGFQDIAVGAPFEGLGKVYIYHSSSKGLLRQPQQVIHGEKLGLPGLATFGYSLSGQMDVDENFYPDLLVGSLSDHIVLLR

SEQ ID NO: 61577 - protein, 100 aa, Homo sapiens
MSKSVPAFLQDEVSGSVMSVYSGDFGNLEVKGNIQFAIEYVESLKELHVFVAQCKDLAAADVKKQRSDPWSFTVVAQAGTISAHSNLRLPGSSDSPASAS

SEQ ID NO: 61578 - protein, 52 aa, Homo sapiens
MVYWTGDIPAHDVWHQTRQDQLRALTTVTALVRKFLGPVPVYPAVGNHESTP

SEQ ID NO: 61579 - protein, 668 aa, Homo sapiens
VIKIKDNENQRLQALLSALRDGGPEKVKTVLLSEAKEEAKKGFEVEKVKMQQEISELKGAKRQVEEALTLVIQADKIKAAEIRSVYHLHQEEITRIKKECEREIRRLEQQLDEKDARRFQLKIAELSAIIRKLEDRNALLSEERNELLKRVREAESQYKPLLDKNKRLSRKNEDLSHALRRMENKLKFVTQENIEMRQRAGIIRRPSSLNDLDQSQDEREVDFLKLQIVEQQNLIDELSKTLETAGYVKSVLERDKLLRFRKQRKKMAKLPKPVVVETFFGYDEEASLESDGSSVSYQTDRTDQTPCTPDDDLEEGMAKEETELRFRQLTMEYQALQRAYALLQEQVGGTLDAEREVKTREQLQAEVQRAQARIEDLEKALAEQGQDMKWIEEKQALYRRNQELVEKIKQMETEEARLRHEVQDARDQNELLEFRILELEERERKSPAISFHHTPFVDGKSPLQVYCEAEGVTDIVVAELMKKLDILGDNANLTNEEQVVVIQARTVLTLAEKWLQQIEETEAALQRKMVDLESEKELFSKQKGYLDEELDYRKQALDQANKHILELEAMLYDALQQEAGAKVAELLSEEEREKLKVAVEQWKRQVMSELRERDAQILRERMELLQLAQQRIKELEERIEAQKRQIKELEEKFLFLFLFFSLAFILWS

SEQ ID NO: 61580 - protein, 187 aa, Homo sapiens
MSLQWTAVATFLYAEVFVVLLLCIPFISPKRWQKIFKSRLVELLVSYGNTFFVVLIVILVLLVIDAVREIRKYDDVTEKVNLQNNPGAMEHFHMKLFRAQRNLYIAGFSLLLSFLLRRLVTLISQQATLLASNEAFKKQAESASEAAKKYMEENDQLKKGAAVDGGKLDVGNAEVKLEEENRSLKAD

SEQ ID NO: 61581 - protein, 454 aa, Homo sapiens
MAAAAECDVVMAATEPELLDDQEAKREAETFKEQGNAYYAKKDYNEAYNYYTKAIDMCPKNASYYGNRAATLMMLGRFREALGDAQQSVRLDDSFVRGHLREGKCHLSLGNAMAACRSFQRALELDHKNAQAQQEFKNANAVMEYEKIAETDFEKRDFRKVVFCMDRALEFAPACHRFKILKAECLAMLGRYPEAQSVASDILRMDSTNADALYVRGLCLYYEDCIEKAVQFFVQALRMAPDHEKACIACRNAKALKAKKEDGNKAFKEGNYKLAYELYTEALGIDPNNIKTNAKLYCNRGTVNSKLRKLDDAIEDCTNAVKLDDTYIKAYLRRAQCYMDTEQYEEAVRDYEKVYQTEKTKEHKQLLKNAQLELKKSKRKDYYKILGVDKNASEDEIKKAYRKRALMHHPGRIGIVEPVLRFRRRRRRSSRKLERPLLSSLIPRKRLAMTVDRT

SEQ ID NO: 61582 - protein, 101 aa, Homo sapiens
MAEPDYIEDDNPELIRPQKLINPVKTSRNHQDLHRELLMNQKRGLAPQNKPELQKVMEKRKRDQVIKQKEEEAQKKKSDLEIELLKRQQKLEQLELEKQKL

SEQ ID NO: 61583 - protein, 175 aa, Homo sapiens
DDHTVCLWDINAGPKEGKIVDAKAIFTGHSAVVEDVAWHLLHESLFGSVADDQKLMIWDTRSNTTSKPSHLVDAHTAEVNCLSFNPYSEFILATGSADKTVALWDLRNLKLKLHTFESHKDEIFQVHWSPHNETILASSGTDRRLNVWDLSKIGEEQSAEDAEDGPPELLVRIGL

SEQ ID NO: 61584 - protein, 48 aa, Homo sapiens
MISVKRNTWRALSLVIGDCRKKGNFEYCQDRTEKHSTMPDSPVDVKTQ

SEQ ID NO: 61585 - protein, 621 aa, Homo sapiens
MLLFFTLGLLIHFVFFASIFDIYFTSPLVHGMTPQFTPLPPPARRLVLFVADGLRADALYELDENGNSRAPFIRNIIMHEGSWGISHTRVPTESRPGHVALIAGFYEDVSAVAKGWKENPVEFDSLFNESKYTWSWGSPDILPMFAKGASGDHVYTYSYDAKREDFGAQDATKLDTWVFDNVKDFFHHARNNQSLFSKINEEKIVFFLHLLGIDTNGHAHRPSSRDYKHNIKKVDDGVKEIVSMFNHFYGNDGKTTFIFTSDHGMTDWGSHGAGHPSETLTPLVTWGAGIKYPQRVSAQQFDDAFLKEWRLENWKRLDVNQADIAPLMTSLIGVPFPLNSVGILPVDYLNNTDLFKAESMFTNAVQILEQFKVKMTQKKEVTLPFLFTPFKLLSDSKQFNILRKARSYIKHRKFDEVVSLCKELIHLALKGLSYYHTYDRFFLGVNVVIGFVGWISYASLLIIKSHSNLIKGVSKEVKKPSHLLPCSFVAIGILVAFFLLIQACPWTYYVYGLLPLPIWYAVLREFQVIQDLVVSVLTYPLSHFVGYLLAFTLGIEVLVLSFFYRYMLTAGLTAFAAWPFLTRLWTRAKMTSLSWTFFSLLLAVFPLMPVVGRKPDISLVC

SEQ ID NO: 61586 - protein, 115 aa, Homo sapiens
MWLKVGGLLRGTGGQLGQTVGWPCGALGPGPHRWGPCGGSWAQKFYQDGPGRGLGEEDIRRAREARPRKTPRPQLSDRSRERKTTASSALSCSTSLSGSARAPTSCPAGRCCTPA

SEQ ID NO: 61587 - protein, 209 aa, Homo sapiens
MSHRRQVLQKRMRSFNQVSSAPGGASKGGGEEPGKLPEPAEEESQVLRGTGHCKWFNVRMGFGFISMINREGSPLDIPVDVFVHQSKLFMEGFRSLKEGEPVEFTFKKSSKGLESIRVTGPGGSPCLGSERRPKGKTLQKRKPKGDRCYNCGGLDHHAKECSLPPQPKKCHYCQSIMHMVANCPHKNVAQPPASSQGRQEAESQPCTST

SEQ ID NO: 61588 - protein, 136 aa, Homo sapiens
MLRRRGSPGMGVHVGAALGALWFCLTGALEVQVPEDPVVALVGTDATLCCSFSPEPGFSLAQLNLIWQLTDTKQLVHSFAEGQDQGSAYANRTALFPDLLAQGNASLRLQRVRVADEGSFTCFVSIRDFGSAAVSL

SEQ ID NO: 61589 - protein, 107 aa, Homo sapiens
MQCQGYVALLGSDDQSWGWNLVDNNLLHNGEVNGSFPQCNNAPKYQIGERIRVILDMEDKTLAFERGYEFLGVAFRGLPKVCLYPAVSAVYGNTEVTLVYLGKPLDG

SEQ ID NO: 61590 - protein, 631 aa, Homo sapiens
MAPRVATGTPEPNGGGGGKIDNTVEITPTSNGQVGTLGDAVPTEQLQGEREREREGEGDAGGDGLGSSLSLAVPPGPLSFEALLAQVGALGGGQQLQLGLCCLPVLFVALGMASDPIFTLAPPLHCHYGAFPPNASGWEQPPNASGVSVASAALAASAASRVATSTDPSCSGFAPPDFNHCLKDWDYNGLPVLTTNAIGQWDLVCDLGWQVILEQILFILGFASGYLFLGYPADRFGRRGIVLLTLGLVGPCGVGGAAAGSSTGVMALRFLLGFLLAGVDLGVYLMRLELCDPTQRLRVALAGELVGVGGHFLFLGLALVSKDWRFLQRMITAPCILFLFYGWPGLFLESARWLIVKRQIEEAQSVLRILAERNRPHGQMLGEEAQEALQDLENTCPLPATSSFSFASLLNYRNIWKNLLILGFTNFIAHAIRHCYQPVGGGGSPSDFYLCSLLASGTAALACVFLGVTVDRFGRRGILLLSMTLTGIASLVLLGLWDYLNEAAITTFSVLGLFSSQAAAILSTLLAAEVIPTTVRGRGLGLIMALGALGGLSGPAQRLHMGHGAFLQHVVLAACALLCILSIMLLPETKRKLLPEVLRDGELCRRPSLLRQPPPTRCDHVPLLATPNPAL

SEQ ID NO: 61591 - protein, 135 aa, Homo sapiens
  MOD_RES (1)..(1): Any amino acid
XVKVQSKVAEWLNSTFQNWNYTVYVVNISFHLSAGEDKIKVKRSLEDEPRLVLWALLVYNATNNTNLEGKIIQQKLLKNNESLDEGLRLHTVNVRQLGHCLAMEEPKGYYWPSIQPSEYVLPCPDKPGFSASRIW

SEQ ID NO: 61592 - protein, 171 aa, Homo sapiens
MVRYSLDPENPTKSCKSRGSNLRVHFKNTRETAQAIKGMHIRKATKYLKDVTLQKQCVPFRRYNGGVGRCAQAKQWGWTQGRWPKKSAEFLLHMLKNAESNAELKGLDVDSLVIEHIQVNKAPKMRRRTYRAHGRINPYMSSPCHIEMILTEKEQIVPKPEEEVAQKKKIS

SEQ ID NO: 61593 - protein, 800 aa, Homo sapiens
  MOD_RES (1)..(1): Any amino acid
XEKELTENILKVLKEQAADSILVLEAALKLNKDLYVHTMRTLDLLAMEPGMVNGETESSTAGLKVKTEEMQCQVCYDLGAAYFQQGSTNSAVYENAREKFFRTKELIAEIGSLSLHCTIDEKRLAGYCQACDVLVPSSDSTSQQLTPYSQVHICLRSGNYQEVIQIFIEDNLTLSLPVQFRQSVLRELFKKAQQGNEALDEICFKVCACNTVRDILEGRTISVQFNQLFLRPNKEKIDFLLEVCSRSVNLEKASESLKGNMAAFLKNVCLGLEDLQYVFMISSHELFITLLKDEERKLLVDQMRKRSPRVNLCIKPVTSFYDIPASASVNIGQLEHQLILSVDPWRIRQILIELHGMTSERQFWTVSNKWEVPSVYSGVILGIKDNLTRDLVYILMAKGLHCSTVKDFSHAKQLFAACLELVTEFSPKLRQVMLNEMLLLDIHTHEAGTGQAGERPPSDLISRVRGYLEMRLPDIPLRQVIAEECVAFMLNWRENEYLTLQVPAFLLQSNPYVKLGQLLAATCKELPGPKESRRTAKDLWEVVVQICSVSSQHKRGNDGRVSLIKQRESTLGIMYRSELLSFIKKLREPLVLTIILSLFVKLHNVREDIVNDITAEHISIWPSSIPNLQSVDFEAVAITVKELVRYTLSINPNNHSWLIIQADIYFATNQYSAALHYYLQAGAVCSDFFNKAVPPDVYTDQVAILCQFLREIDYKTAFKSLQEQNSHDAMDSYYDYIWDVTILEYLTYLHHKRGETDKRQIAIKAIGQTELNASNPEEVLQLAAQRRKKKFLQAMAKLYF

SEQ ID NO: 61594 - protein, 182 aa, Homo sapiens
MLFTVSCSKMSSIVDRDDSSIFDGLVEEDDKDKAKRVSRNKSEKKRRDQFNVLIKELGSMLPGNARKMDKSTVLQKSIDFLRKHKEITAQSDASEIRQDWKPTFLSNEEFTQLMLEALDGFFLAIMTDGSIIYVSESVTSLLEHLPSDLVDQSIFNFIPEGEHSEVYKILSTHLLESDSLTP

SEQ ID NO: 61595 - protein, 24 aa, Homo sapiens
SQLVTANPSIIRQRDFTAVERVKK

SEQ ID NO: 61596 - protein, 110 aa, Homo sapiens
MSPSRRAAGFLRASSPCHLMLLLLLQVLYIRKKKRLEKLRHQLMPMYNFDPTEEQDELEQELLEHGRDAASVQAATSVQAMQGKTTLPSQGPLQRPSRLVFTDVANAIHA

SEQ ID NO: 61597 - protein, 208 aa, Homo sapiens
MPVRKQDTQRALHLLEEYRSKLSQTEDRQLRSSIERVINIFQSNLFQALIDIQEFYEVTLLDNPKCIDRSKPSEPIQPVNTWEISSLPSSTVTSETLPSSLSPSVEKYRYQDEDTPPQEHISPQITNEVIGPELVHVSEKNLSEIENVHGFVSHSHISPIKPTEAVLPSPPTVPVIPVLPVPAENTVILPTIPQANPPPVLVNTDSLE

SEQ ID NO: 61598 - protein, 274 aa, Homo sapiens
MCVCQTMEVGQYGKNASRAGDRGVLLEPFIHQVGGHSSMMRYDDHTVCKPLISREQRFYESLPPEMKEFTPEYKGVVSVCFEGDSDGYINLVAYPYVESETVEQDDTTEREQPRRKHSRRSLHRSGSGSDHKEEKASLSLETSESSQEAKSPKVELHSHSEVPFQMLDGNSGLSSEKISHNPWSLRCHKQQLSRMRSESKDRKLYKFLLLENVVHHFKYPCVLDLKMGTRQHGDDASAEKAARQMRKCEQSTSATLGVRVCGMQEQVLWPWALH

SEQ ID NO: 61599 - protein, 139 aa, Homo sapiens
MAFLSRTSPVAAASFQSRQAGGQRLHPASELPAAPAMAEHRSMDGRMEAATRGGSHLQAAAQTPPRPGPPSAPPPPPKEGHQEGLVELPASFRELLTFFCTNATIHGAIRLVCSRGNRLKTTSWGLLSLGALVALCWQL

SEQ ID NO: 61600 - protein, 88 aa, Homo sapiens
DFETWDSYSPQGRRPETQGPKYCHSSFDAITVDRQQQLYIFKGSHFWEVAADGNVSEPRPLQERWVGLPPNIEAAAVSLNDGDFYFFK

SEQ ID NO: 61601 - protein, 137 aa, Homo sapiens
MGKRRCVPPLEPKLAAGCCGVKKPKLSGSGTHSHGNQSTTVPGSSSGPLQNHQHVDSSSGRENVSDLTLGPGNSPITRMNPASGALSPLPRPNGTANTTKNLVVTAEMCCYCFDVLYCHLYGFPQPRLPRFTNDPYC

SEQ ID NO: 61602 - protein, 146 aa, Homo sapiens
MDRSKENCISGPVKATAPVGGPKRVLVTQQFPCQNPLPVNSGQAQRVLCPSNSSQRIPLQAQKLVSSHKPVQNQKQKQLQATSVPHPVSRPLNNTQKSKQPLPSAPENNPEEELASKQKNEESKKRQWALEDFEIGRPLGKGKFGN

SEQ ID NO: 61603 - protein, 615 aa, Homo sapiens
MAAVGSGGYARNDAGEKLPSVMAGVPARRGQSSPPPAPPICLRRRTRLSTASEETVQNRVSLEKVLGITAQNSSGLTCDPGTGHVAYLAGCVVVILDPKENKQQHIFNTARKSLSALAFSPDGKYIVTGENGHRPAVRIWDVEEKNQVAEMLGHKYGVACVAFSPNMKHIVSMGYQHDMVLNVWDWKKDIVVASNKVSCRVIALSFSEDSSYFVTVGNRHVRFWFLEVSTETKVTSTVPLVGRSGILGELHNNIFCGVACGRGRMAGSTFCVSYSGLLCQFNEKRVLEKWINLKVSLSSCLCVSQELIFCGCTDGIVRIFQAHSLHYLANLPKPHYLGVDVAQGLEPSFLFHRKAEAVYPDTVALTFDPIHQWLSCVYKDHSIYIWDVKDINRVGKVWSELFHSSYVWNVEVYPEFEDQRACLPSGSFLTCSSDNTIRFWNLDSSPDSHWQKNIFSNTLLKVVYVENDIQHLQDMSHFPDRGSENGTPMDVKAGVRVMQVSPDGQHLASGDRSGNLRIHELHFMDELVKVEAHDAEVLCLEYSKPETGLTLLASASRDRLIHVLNVEKNYNLEQTLDDHSSSITAIKFAGEPLSSRSLRLASYPAKKGFILSTLL

SEQ ID NO: 61604 - protein, 643 aa, Homo sapiens
MQQRAGSKTAGPPCQWSRMASEGTNIPSPVVRQIDKQFLICSICLERYKNPKVLPCLHTFCERCLQNYIPAHSLTLSCPVCRQTSILPEKGVAALQNNFFITNLMDVLQRTPGSNAEESSILETVTAVAAGKPLSCPNHDGNVMEFYCQSCETAMCRECTEGEHAEHPTVPLKDVVEQHKASLQVQLDAVNKRLPEIDSALQFISEIIHQLTNQKASIVDDIHSTFDELQKTLNVRKSVLLMELEVNYGLKHKVLQSQLDTLLQGQESIKSCSNFTAQALNHGTETEVLLVKKQMSEKLNELADQDFPLHPRENDQLDFIVETEGLKKSIHNLGTILTTNAVASETVATGEGLRQTIIGQPMSVTITTKDKDGELCKTGNAYLTAELSTPDGSVADGEILDNKNGTYEFLYTVQKEGDFTLSLRLYDQHIRGSPFKLKVIRSADVSPTTEGVKRRVKSPGSGHVKQKAVKRPASMYSTGKRKENPIEDDLIFRVGTKGRNKGEFTNLQGVAASTNGKILIADSNNQCVQIFSNDGQFKSRFGIRGRSPGQLQRPTGVAVHPSGDIIIADYDNKWVSIFSSDGKFKTKIGSGKLMGPKGVSVDRNGHIIVVDNKACCVFIFQPNGKIVTRFGSRGNGDRQFAGV

SEQ ID NO: 61605 - protein, 149 aa, Homo sapiens
  MOD_RES (1)..(1): Any amino acid
XSNLILSRCLGKQLCDNTCPLFFSSSCRKIDGTRTPRDERRRAQHNEVERRRRDKINNWIVQLSKIIPDCNADNSKTGASKGGILSKACDYIRELRQTNQRMQETFKEAERLQMDNELLRQQIEELKNENALLRAQLQQHNLEMVGEGT

SEQ ID NO: 61606 - protein, 97 aa, Homo sapiens
MNLERVSNEEKLNLCRKYYLGGFAFLPFLWLVNIFWFFREAFLVPAYTEQSQIKGCESRAQRREASGRGEGEAGNLGGKGQWRIQNVGALGEKGRLV

SEQ ID NO: 61607 - protein, 126 aa, Homo sapiens
MLRPRFLPPDDRTVREGERKAAKLHFSQLGNSENFLLEVEKSSREKTMKNCVTGESSASKVSANVDSRIEMERVLLCRPDWSAVARSRLTATSTSWVQAVLLPQPSEQLGLQTQTKDFLFPSPTGK

SEQ ID NO: 61608 - protein, 343 aa, Homo sapiens
  MOD_RES (1)..(1): Any amino acid
XDDAKNGFARCTAAEIQRFAFSATGLLSHVEEGLDSDATDSSSDDDLDEYTLRKNVAVNCSTEWKWLVDRARVGSRWTWLQAQISDLECKIQQLTDIHRQIRASKGIVVLEECQLPKDILKKQMQFADQAASLNILGNPQVPQECQDPVPEQDFEMSPSSPTLLLRNIEKQSAQLTEIINSLIAPLNLSPTSSPLSSKSCSHKCLANGIYRSASENLDELSSSSSWLLNQKHSKKKRKDRTRLKSSSLTFMSTSARTRPLQSFHKRKLYRLSPTFYWTPQTLPSKETAFLNTTQMPCLQSASTWSSYEHNSESYLLREHVSELDSSFHSVLSLPSGKPPCNNF

SEQ ID NO: 61609 - protein, 57 aa, Homo sapiens
MAAVRVLVASRLAAASAFTSLSPGGRTPSQRAALHLSVPRPAARVALDPGAPEPWRG

SEQ ID NO: 61610 - protein, 53 aa, Homo sapiens
MTVKLGDGGSGEDGLKKLGKRAADEESLEGEGAGGADAAEESSGTKRDEKTPR

SEQ ID NO: 61611 - protein, 222 aa, Homo sapiens
CPGSIVQGVCGCCYTCASQRNESCGGTFGIYGTCDRGLRCVIRPPLNGDSLTEYEAGVCEEEKPDCSKARCEVQFSPRCPEDSVLIEGYAPPGECCPLPSRCVCNPAGCLRKVCQPGNLNILVSKASGKPGECCDLYECKPVFGVDCRTVECPPVQQTACPPDSYETQVRLTADGCCTLPTRCECLSGLCGFPVCEVGSTPRIVSRGDGTPGKCCDVFECVN

SEQ ID NO: 61612 - protein, 116 aa, Homo sapiens
MASIMEGPLSKWTNVMKGWQYRWFVLDYNAGLLSYYTSKDKMMRGSRRGCVRLRGAVIGIDDEDDSTFTITVDQKTFHFQGELKEEILSLHSPICFFSSLLGCLLDDLNGFATDPA

SEQ ID NO: 61613 - protein, 282 aa, Homo sapiens
LDMETTYSVATVCHPNGSCLQLEPDLTNVMATSRKYEDLLWAWEGWRDKAGRAILQFYPKYVELINQAARLNGYVDAGDSWRSMYETPSLEQDLERLFQELQPLYLNLHAYVRRALHRHYGAQHINLEGPIPAHLLGNMWAQTWSNIYDLVVPFPSAPSMDTTEAMLKQGWTPRRMFKEADDFFTSLGLLPVPPEFWNKSMLEKPTDGREVVCHASAWDFYNEHDINFLMKMALDKIAFIPFSYLVDQWRWRVFDGSITKENYNQEWWSLRLKYQGLCPPVP

SEQ ID NO: 61614 - protein, 68 aa, Homo sapiens
MCPMLLKNGYNGAEARSVCGFLLTWRWDSMICNHRRPRSMNSARVGSQDTGAGGAGRAWGSHTTAHPA

SEQ ID NO: 61615 - protein, 168 aa, Homo sapiens
MEKRTCALCPKDVEYNVLYFAQSENIAAHENCLLYSSGLVECEDQDPLNPDRSFDVESVKKEIQRGRKLKCKFCHKRGATVGCDLKNCNKNYHFFCAKKDDAVPQSDGVRGIYKLLCQQHAQFPIIAQSAKFSGVKRKRGRKKPLSGNHVQPPETMKCNTFIRQVKEE

SEQ ID NO: 61616 - protein, 57 aa, Homo sapiens
  MOD_RES (1)..(1): Any amino acid
XAAGPDMAANMYRVGDYVYFENSSSNPYLIRRIEELNKPCQSAIRPDRGRTTARKGK

SEQ ID NO: 61617 - protein, 268 aa, Homo sapiens
MPRPRLLAALCGALLCAPSLLVALDICSKNPCHNGGLCEEISQEVRGDVFPSYTCTCLKGYAGNHCETKCVEPLGLENGNIANSQIAASSVRVTFLGLQHWVPELARLNRAGMVNAWTPSSNDDNPWIQVNLLRRMWVTGVVTQGASRLASHEYLKAFKVAYSLNGHEFDFIHDVNKKHKEFVGNWNKNAVHVNLFETPVEAQYVRLYPTSCHTACTLRFELLGCELNAATRPGACISSAGTPPMHGWTSRATSTPGLRGATVTISGC

SEQ ID NO: 61618 - protein, 319 aa, Homo sapiens
MDQSVAIQETLAEGEYCVIAVQGVLCEGDSRQSRLLGLVRYRLEHGGQEHALFLYTHRRMAITGDDVSLDQIVPVSRDFTLEEVSPDGELYILGSDVTVQLDTAELSLVFQLPFGSQTRMFLHEVARACPGFDSATRDPEFLWLSRYRCAELELEMPTPRGCNSALVTWPGYATIGGGRYPSRKKRWGLEEARPQGAGSVLFWGGAMEKTGFRLMERAHGGGFVWGRSARDGRRDEELEEAGREMSAAAGSRERNTAGSAGGGKLGWGAGPGAAVRPALGWAGSAVWPVDARGEDQSPGGPLEAGTLGQKFCDVLLRRA

SEQ ID NO: 61619 - protein, 33 aa, Homo sapiens
  MOD_RES (1)..(1): Any amino acid
XFVADGIFKAELNEFLTRELAEDGYSGVERRPC

SEQ ID NO: 61620 - protein, 67 aa, Homo sapiens
  MOD_RES (1)..(1): Any amino acid
XGAEGPAISDGEEGGGEPGAGGGAAGAAGAGRRDFVEAPPPKVNPWTKNALPPVLTTVNGQSPPDTL

SEQ ID NO: 61621 - protein, 65 aa, Homo sapiens
MEVPPPAPRSFLCRALCLFPRVFAAEAVTADSEVLEERQKRLPYVPEPYYPESGWDRLRELFGKE

SEQ ID NO: 61622 - protein, 1105 aa, Homo sapiens
MFLYWRKRGTYELEALPGDLAELELGTVERFSWSSTLDIIEDLGDDQSPAEKKGLRCQNPACMDKGRAAKVCHHADCQQLHRRGPLNLCEACDSKFHSTMHYDGHVRFDLPPQGSVLARNVSTRSCPPRTSPAVDLEEEEEESSVDGKGDRKSTGLKLSKKKARRRHTDDPSKECFTLKFDLNVDIETEIVPAMKKKSLGEVLLPVFERKGIALGKVDIYLDQSNTPLSLTFEAYRFGGHYLRVKAPAKPGDEGKVEQGMKDSKSLSLPILRPAGTGPPALERVDAQSRRESLDILAPGRRRKNMSEFLGEASIPGQEPPTPSSCSLPSGSSGSTNTGDSWKNRAASRFSGFFSSGPSTSAFGREVDKMEQLEGKLHTYSLFGLPRLPRGLRFDHDSWEEEYDEDEDEDNACLRLEDSWRELIDGHEKLTRRQCHQQEAVWELLHTEASYIRKLRVIINLFLCCLLNLQESGLLCEVEAERLFSNIPEIAQLHRRLWASVMAPVLEKARRTRALLQPGDFLKGFKMFGSLFKPYIRYCMEEEGCMEYMRGLLRDNDLFRAYITWAEKHPQCQRLKLSDMLAKPHQRLTKYPLLLKSVLRKTEEPRAKEAVVAMIGSVERFIHHVNACMRQRQERQRLAAVVSRIDAYEVVESSSDEVDKLLKEFLHLDLTAPIPGASPEETRQLLLEGSLRMKEGKDSKMDVYCFLFTDLLLVTKAVKKAERTRVIRPPLLVDKIVCRELRDPGSFLLIYLNEFHSAVGAYTFQASGQALCRGWVDTIYNAQNQLQQLRAQEPPGSQQPLQSLEEEEDEQEEEEEEEEEEEEGEDSGTSAASSPTIMRKSSGSPDSQHCASDGSTETLAMVVVEPGDTLSSPEFDSGPFSSQSDETSLSTTASSATPTSELLPLGPVDGRSCSMDSAYGTLSPTSLQDFVAPGPMAELVPRAPESPRVPSPPPSPRLRRRTPVQLLSCPPHLLKSKSEASLLQLLAGAGTHGTPSAPSRSLSELCLAVPAPGIRTQGSPQEAGPSWDCRGAPSPGSGPGLVGCLAGEPAGSHRKRCGDLPSGASPRVQPEPPPGVSAQHRKLTLAQLYRIRTTLLLNSTLTASEV

SEQ ID NO: 61623 - protein, 81 aa, Homo sapiens
MRMLVSGRRVKKWQLIIQLFATCFLASLMFFWEPIDNHIVSHMKSYSYRYLINSYDFVNDTLSLKHTSAGPRYQYLINHKE

SEQ ID NO: 61624 - protein, 21 aa, Homo sapiens
MDNYADLSDTELTTLLRRINS

SEQ ID NO: 61625 - protein, 142 aa, Homo sapiens
MTRRRSRPSGGAGRRERARAAGPQKPQAPEPPPPPSLEAGAGAGPPEAPAEPDHDGPREDDEPNLVPGPQVGASGETSAARALSPSPSGSGSGAGLGMGHPAAAGVAAFPRVRRRSFLPRGGNGGWTPLPKAEARSALLRLG

SEQ ID NO: 61626 - protein, 207 aa, Homo sapiens
MAESLYEIRFRENVEKRILCHMQLSSAQVEQLRQAIEELYYFEFVVDDLPIRGFVGYMEESGFLPHSHKIGLWTHLDFHLEFHGDRIIFANVSVRDVKPHSLDGLRPDEFLGLTHTYSVRWSETSVERRSDRRRGDDGGFFPRTLEIHWLSIINSMVLVFLLVGFVAVILMRVLRNDLARYNLDEETTSAGSGDDFDQGDNGWKIIH

SEQ ID NO: 61627 - protein, 41 aa, Homo sapiens
MRRFLLLYATQQGQAKAIAEEICEQAVVHGFSADLHCISES

SEQ ID NO: 61628 - protein, 171 aa, Homo sapiens
MFAEAAKTTRPCGMAEFKEKPEAPTEQLDVACGQENLPVGAWPPGAAPAPFQYTPDHVVGPGADIDPTQITFPGCICVKTPCLPGTCSCLRHGENYDDNSCLRDIGSGGKYAEPVFECNVLCRCSDHCRNRVVQKGLQFHFQVFKTHKKGWGLRTLEFIPKGRKVEHQLWK

SEQ ID NO: 61629 - protein, 153 aa, Homo sapiens
MAKGDPKKPKGKMSAYAFFVQTCREEHKKKNPEVPVNFAEFSKKCSERWKTMSGKEKSKFDEMAKADKVRYDREMKDYGPAKGGKKKKDPNAPKRPPSGFFLFCSEFRPKIKSTNPGISIGDVAKKLGEMWNNLNDSEKQPYITKAAKLKEKY

SEQ ID NO: 61630 - protein, 66 aa, Homo sapiens
MNPEWGQAFVHVAVAGGLCAVAVFTGIFDSVSVQVGYEHYAEAPVAGLPAFLAMPFNSLVNMAYTL

SEQ ID NO: 61631 - protein, 72 aa, Homo sapiens
MAPPPAPLLAPRPGETRPGCRKPGTVSFADVAVYFSPEEWGCLRPAQRALYRDVMQETYGHLGALGPHFQHP

SEQ ID NO: 61632 - protein, 584 aa, Homo sapiens
MGPADSWGHHWMGILLSASLCTVWSPPAAAQLTLNANPLDATQSEDVVLPVFGTPRTPQIHGRSRELAKPSIAVSPGTAIEQKDMVTFYCTTKDVNITIHWVSNNLSIVFHERMQLSKDGKILTILIVQREDSGTYQCEARDALLSQRSDPIFLDVKYGPDPVEIKLESGVASGEVVEVMEGSSMTFLAETKSHPPCAYTWFLLDSILSHTTRTFTIHAVSREHEGLYRCLVSNSATHLSSLGTLKVRVLETLTMPQVVPSSLNLVENARSVDLTCQTVNQSVNVQWFLSGQPLLPSEHLQLSADNRTLIIHGLQRNDTGPYACEVWNWGSRARSEPLELTINYGPDQVHITRESASEMISTIEAELNSSLTLQCWAESKPGAEYRWTLEHSTGEHLGEQLIIRALTWEHDGIYNCTASNSLTGLARSTSVLVKVVGPQSSSLSSGAIAGIVIGILAVIAVASELGYFLCIRNARRPSRKTTEDPSHETSQPIPKEEHPTEPSSESLSPEYRNISQLQGRIRVELMQPPDLPEETYETKLPSASRRGNSFSPWKPPPKPLMPPLRLVSTVPKNMESIYEVFMPH

SEQ ID NO: 61633 - protein, 74 aa, Homo sapiens
MDNSGKEAEAMALLAEAERKVKNSQSFFSGLFGCWKRVLPGCTAAPAAPEQARRSHLLCGRWQRIQESRPPRGH

SEQ ID NO: 61634 - protein, 1887 aa, Homo sapiens
MAHAAASIKKVREADLDEKEKNLERDRKKQRKIPRERMERKRKSDSNASFLRAARAGNLDKVVEYLKGGIDINTCNQNGLNALHLAAKEGHVGLVQELLGRGSSVDSATKKGNTALHIASLAGQAEVVKVLVKEGANINAQSQNGFTPLYMAAQENHIDVVKYLLENGANQSTATEDGFTPLAVALQQGHNQAVAILLENDTKGKVRLPALHIAARKDDTKSAALLLQNDHNADVQSKMMVNRTTESGFTPLHIAAHYGNVNVATLLLNRGAAVDFTARNGITPLHVASKRGNTNMVKLLLDRGGQIDAKTRDGLTPLHCAARSGHDQVVELLLERGAPLLARTKNGLSPLHMAAQGDHVECVKHLLQHKAPVDDVTLDYLTALHVAAHCGHYRVTKLLLDKRANPNARALNGFTPLHIACKKNRIKVMELLVKYGASIQAITESGLTPIHVAAFMGHLNIVLLLLQNGASPDVTNIRGETALHMAARAGQVEVVRCLLRNGALVDARAREEQTPLHIASRLGKTEIVQLLLQHMAHPDAATTNGYTPLHISAREGQVDVASVLLEAGAAHSLATKKGFTPLHVAAKYGSLDVAKLLLQRRAAADSAGKNGLTPLHVAAHYDNQKVALLLLEKGASPHATAKNGYTPLHIAAKKNQMQIASTLLNYGAETNIVTKQGVTPLHLASQEGHTDMVTLLLDKGANIHMSTKSGLTSLHLAAQEDKVNVADILTKHGADQDAHTKLGYTPLIVACHYGNVKMVNFLLKQGANVNAKTKNGYTPLHQAAQQGHTHIINVLLQHGAKPNATTANGNTALAIAKRLGYISVVDTLKVVTEEVTTTTTTITEKHKLNVPETMTEVLDVSDEEGDDTMTGDGGEYLRPEDLKELGDDSLPSSQFLDGMNYLRYSLEGGRSDSLRSFSSDRSHTLSHASYLRDSAVMDDSVVIPSHQVSTLAKEAERNSYRLSWGTENLDNVALSSSPIHSGFLVSFMVDARGGAMRGCRHNGLRIIIPPRKCTAPTRVTCRLVKRHRLATMPPMVEGEGLASRLIEVGPSGAQFLGKLHLPTAPPPLNEGESLVSRILQLGPPGTKFLGPVIVEIPHFAALRGKERELVVLRSENGDSWKEHFCDYTEDELNEILNGMDEVLDSPEDLEKKRICRIITRDFPQYFAVVSRIKQDSNLIGPEGGVLSSTVVPQVQAVFPEGALTKRIRVGLQAQPMHSELVKKILGNKATFSPIVTLEPRRRKFHKPITMTIPVPKASSDVMLNGFGGDAPTLRLLCSITGGTTPAQWEDITGTTPLTFVNECVSFTTNVSARFWLIDCRQIQESVTFASQVYREIICVPYMAKFVVFAKSHDPIEARLRCFCMTDDKVDKTLEQQENFAEVARSRDVEVLEGKPIYVDCFGNLVPLTKSGQHHIFSFFAFKENRLPLFVKVRDTTQEPCGRLSFMKEPKSTRGLVHQAICNLNITLPIYTKESESDQEQEEEIDMTSEKNPQDEQERIEERLAYIADHLGFSWTELARELDFTEEQIHQIRIENPNSLQDQSHALLKYWLERDGKHATDTNLVECLTKINRMDIVHLMETNTEPLQERISHSYAEIEQTITLDHSEGFSVLQEELCTAQHKQKEEQAVSKESETCDHPPIVSEEDISVGYSTFQDGVPKTEGDSSATALFPQTHKEQVQQDFSGKMQDLPEESSLEYQQEYFVTTPGTETSETQKAMIVPSSPSKTPEEVSTPAEEEKLYLQTPTSSERGGSPIIQEPEEPSEHREESSPRKTSLVIVESADNQPETCERLDEDAAFEKGDDMPEIPPETVTEEEYIDEHGHTVVKKVTRKIIRRYVSSEGTEKEEIMVQGMPQEPVNIEEGDGYSKVIKRVVLKSDTEQSEDNNE

SEQ ID NO: 61635 - protein, 254 aa, Homo sapiens
  MOD_RES (1)..(1): Any amino acid
XAQLERSLRDVVEKTIQKYGTNPEETAAEESWDYVQFQLRCCGWHYPQDWFQVLILRGNGSEAHRVPCSCYNLSATNDSTILDKVILPQLSRLGHLARSRHSADICAVPAESHIYREGCAQGLQKWLHNNLISIVGICLGVGLLEMTVMVLSVQLQRRALRRKCEPHVPGAGDSSPGPSLIADGGGGHSGSLWGGWGMAGACPNWGDKAPQGKLPMALGLWPLWVQDEDQPDTGSAGAELEEAQLEAEAEGEDR

SEQ ID NO: 61636 - protein, 95 aa, Homo sapiens
EPPEMELLKFFRPENITVSSRPSVEQLSSLIKTSLHYPESFNHPFHQKSLCLVPVTLLLSNCSKADVDVIVDLRHKTTRSTGNPWIIHMAWTNTV

SEQ ID NO: 61637 - protein, 797 aa, Homo sapiens
MEQLDFETGPNIFDLQIYVKDEVGVTDLQVLTVQVTDVNEPPQFQGNLAEGLHLYIVERANPGFIYQVEAFDPEDTSRNIPLSYFLISPPKSFRMSANGTLFSTTELDFEAGHRSFHLIVEVRDSGGLKASTELQVNIVNLNDEVPRFTSPTRVYTVLEELSPGTIVANITAEDPDDEGFPSHLLYSITTVSKYFMINQLTGTIQVAQRIDRDAGELRQNPTISLEVLVKDRPYGGQENRIQITFIVEDVNDNPATCQKFTFSIMVPERTAKGTLLLDLNKFCFDDDSEAPNNRFNFTMPSGVGSGSRFLQDPAGSGKIVLIGDLDYENPSNLAAGNKYTVIIQVQDVAPPYYKNNVYVYILTSPENEFPLIFDRPSYVFDVSERRPARTRVGQVRATDKDLPQSSLLYSISTGGASLQYPNVFWINPKTGELQLVTKVDCETTPIYILRIQATNNEDTSSVTVTVNILEENDEKPICTPNSYFLALPVDLKVGTNIQNFKLTCTDLDSSPRSFRYSIGPGNVNNHFTFSPNAGSNVTRLLLTSRFDYAGGFDKIWDYKLLVYVTDDNLMSDRKKAEALVETGTVTLSIKVIPHPTTIITTTPRPRVTYQVLRKNVYSPSAWYVPFVITLGSILLLGLLVYLVVLLAKAIHRHCPCKTGKNKEPLTKKGETKTAERDVVVETIQMNTIFDGEAIDPVTGETYEFNSKTGARKWKDPLTQMPKWKESSHQGAAPRRVTAGEGMGSLRSANWEEDELSGKAWAEDAGLGSRNEGGKLGNPKNRNPAFMNRAYPKPHPGK

SEQ ID NO: 61638 - protein, 167 aa, Homo sapiens
MTTMQGMEQAMPGAGPGVPQLGNMAVIHSHLWKGLQEKFLKGEPKVLGVVQILTALMSLSMGITMMCMASNTYGSNPISVYIGYTIWGSVMFIISGSLSIAAGIRTTKGLGLDGMVLLLSVLEFCIAVSLSAFGCKVLCCTPGGVVLILPSHSHMAETASPTPLNEV

SEQ ID NO: 61639 - protein, 173 aa, Homo sapiens
MQDCPDLLPARRCEDPLVEEGNGRAPGRGRGARGREGGVGGRGRGQPEAAGGQRDGGRGAAAGSGGGRRPRAALSVLLPAAPGVQHPAGGAAAARGQRLLGLARPLSAAGRPNSSHRQEAEPPGGAVRAGDPATTAAPRGLCLLRAPLLQEMQESAQPPSLCGALRSGSPGSG

SEQ ID NO: 61640 - protein, 190 aa, Homo sapiens
  MOD_RES (1)..(1): Any amino acid
XSFELGLSSFPPLPGAAGNLKTEDLFENRLSSLIIGPSKERTLSADASVNTLPVVVSREPSVPASCAVSATYERSPSPAHLPDDPKVAEKQRETHSVDRLPSALTATACKSVQVNGAATVRTSCLPSCTTAARLWCEQTLRTPAPARFLITSNLVGFYLRLSVLCFLYKIPLIFANNFPLTTLVLSQTTM

SEQ ID NO: 61641 - protein, 291 aa, Homo sapiens
TKCGGAGHIASDCKFQRPGDPQSAQDKARMDKEYLSLMAELGEAPVPASVGSTSGPATTPLASAPRPAAPANNPPPPSLMSTTQSRPPWMNSGPSESRPYHGMHGGGPGGPGGGPHSFPHPLPSLTGGHGGHPMQHNPNGPPPPWMQPPPPPMNQGPHPPGHHGPPPMVPGKYACGLWGLSPASRKRYDAATTYGHDAAAAAASQWAAPTPSLWSSSPMATTAAAASATPSAQQQYGFQYPLAMAAKYDDYHHERWHRVHPAMATAAGGCRSFSRSPSDARQPHYGAPAPR

SEQ ID NO: 61642 - protein, 405 aa, Homo sapiens
MNSAHCNFRLPGSSDSPASASREAGITEAGITVAAGFVLRQCGSDGQWGLWRDHTQCENPEKNEAFLDQRLILERLQVMYTVGYSLSLATLLLALLILSLFRRLHCTRNYIHINLFTSFMLRAAAILSRDRLLPRPGPYLGDQALALWNQALAACRTAQIVTQYCVGANYTWLLVEGVYLHSLLVLVGGSEEGHFRYYLLLGWGAPALFVIPWVIVRYLYENTQCWERNEVKAIWWIIRTPILMTILINFLIFIRILGILLSKLRTRQMRCRDYRLRLARSTLTLVPLLGVHEVVFAPVTEEQARGALRFAKLGFEIFLSSFQGFLVSVLYCFINKEVQSEIRRGWHHCRLRRSLGEEQRQLPERAFRALPSGSGPGEVPTSRGLSSGTLPGPGNEASRELESYC

SEQ ID NO: 61643 - protein, 750 aa, Homo sapiens
MVVSAGPWSSEKAEMNILEINETLRPQLAEKKQQFRSLKEKCFLTQLAGFLANRQKKYKYEECKDLIKFMLRNERQFKEEKLAEQLKQAEELRQYKVLVHSQERELTQLREKLREGRDASRSLYEHLQALLTPDEPDKSQGQDLQEQLAEGCRLAQHLVQKLSPENDEDEDEDVQVEEAEKVLESSAPREVQKAEESKVPEDSLEECAITCSNSHGPCDSNQPHKNIKITFEEDEVNSTLVVDRESSHDECQDALNILPVPGPTSSATNVSMVVSAGPLSSEKAEMNILEINEKLRPQLAEKKQQFRNLKEKCFLTQLSGFLANQQKKYKYEECKDLIKFMLRNERQFKEEKLAEQLKQAEELRQYKVLVHAQERELTQLKEKLREGRDASRSLNEHLQALLTPYEPDKSQGQDLQEQLAEGCRLAQHLVQKLSPENDNDDDEDVQVEVAEKVQKSSAPREMQKAEEKEVPEDSLEECAITYSNSHGSYDSNQPHRKTKITFEEDKVDSTLIGSSSHVEWEDAVHIIPENESDDEEEEEKGPVSPRNLQESEEEEVPQESWDEGYSTLSIPPEMLASYQSYSSTFHSLEEQQVCMAVDIGRHRWDQVKKEDQEATGPRLSRELLDEKGPEVLQDSLDRCYSTPSGCLELTDSCQPYRSAFYVLEQQRVGFAFDMDGIKKDEEEEEDQDPPCPRLSRELLEVVEPEVLQDSLDRCYSTPSSCLEQPDSCQPYGSSFYALEEKHVGFSLDVG

SEQ ID NO: 61644 - protein, 52 aa, Homo sapiens
MDQGLREVVGDSRMPWTIWSPSCCRSCHHEWTPSGHHSKEVCRQEMESRSVA

SEQ ID NO: 61645 - protein, 181 aa, Homo sapiens
MFKKFDEKESVSNCIQLKTSVIKGIKSQLVEQFPGIEPWLNQIMPKKDPVKIVRCHEHTEILTVSGELLFFRQRKGPFCPTLRLLHKYPFILPHQQVDKGAIKFVLSGANIMCPGLTSPGAKLYPAAVDTIVAVTAEGKQHALCVGVMKMSAEDIEKVNKGIGIENIHYLNDGLWHMKTYK

SEQ ID NO: 61646 - protein, 113 aa, Homo sapiens
PDIEEVKDKSIKKGNNAFRVYRMLPLSERPSKKVVGQSHLDSNIENQEIVTNPPDICQVVEVTTESDEQPVSMSELYPLQISPVSSYAESETTDSVPSDEESAEGRPHWRKRN

SEQ ID NO: 61647 - protein, 542 aa, Homo sapiens
MSPLSLYGENSNSLSSAEPLKEDKPVTGPRNKTENGLTPKKKIQVNSKPSIQPKPLLLPAAPKTQTNSSVPAKTIIIQTVPTLMPLAKQQPIISLQPAPTKGQTVLLSQPTVVQLQAPGVLPSAQPVLAVAGGVTQLPNHVVNVVPAPSANSPVNGKLSVTKPVLQSTMRNVGSDIAVLRRQQRMIKNRESACQSRKKKKEYMLGLEARLKAALSENEQLKKENGTLKRQLDEVVSENQRLKVPSPKRRVVCVMIVLAFIILNYGPMSMLEQDSRRMNPSVSPANQRRHLLGFSAKEAQDTSDGIIQKNSYRYDHSVSNDKALMVLTEEPLLYIPPPPCQPLINTTESLRLNHELRGWVHRHEVERTKSRRMTNNQQKTRILQGALEQGSNSQLMAVQYTETTSSISRNSGSELQVYYASPRSYQDFFEAIRRRGDTFYVVSFRRDHLLLPATTHNKTTRPKMSIVLPAININENVINGQDYEVMMQIDCQVMDTRILHIKSSSVPPYLRDQQRNQTNTFFGSPPAATEATHVVSTIPESLQ

SEQ ID NO: 61648 - protein, 80 aa, Homo sapiens
MTPSPLLLLLLPPLLLGAFPPAAAARGPPKMADKVVPRQVARLGRTVRLQCPVEGDPPPLTMWTKDGRTIHSGWSRFRVL

SEQ ID NO: 61649 - protein, 32 aa, Homo sapiens
MSQGRGKYDFYIGLGLAMSSSIFIGGSFILKK

SEQ ID NO: 61650 - protein, 418 aa, Homo sapiens
MQDDKTGGVPIRTVKSFLSKIPSVVTGTDIVQWLMKNLSIEDPVEAIHLGSLIAAQGYIFPISDHVLTMKDDGTFYRFQAPYFWPSNCWEPENTDYAIYLCKRTMQNKARLELADYEAENLARLQRAFARKWEFIFMQAEAQVKIDRKKDKTERKILDSQERAFWDVHRPVPGCVNTTEMDIRKCRRLKNPQKVKKSVYGVTEESQAQSPVHVLSQPIRKTTKEDIRKQITFLNAQIDRHCLKMSKVAESKEPSQQRVKRWGFSFDEILKDQVGRDQFLRFLESEFSSENLRFWLAVQDLKKQPLQDVAKRVEEIWQEFLAPGAPSAINLDSHSYEITSQNVKDGGRYTFEDAQEHIYKLMKSDSYARFLRSNAYQDLLLAKKKPESEQGRRTSLEKFTRSVGKSLAGKRLTGLMQSS

SEQ ID NO: 61651 - protein, 397 aa, Homo sapiens
MLRDNSGDPADPHKVYALSRELCWREGPGTDQTEAEAPAAVPPPQGGPPGPFLAHTHAGLQAPGPLPAPAGDKGDLLLQAVQQSCLADHLLTASWGADPVPTKAPGEGQEGLPLTGACAGGPGLPAGELYGWAVETTPSPGPQPAALTTGEAAAPESPHQAEPYLSPSPSACTAVQEPSPGALDVTIMYKGRTVLQKVVGHPSCTFLYGPPDPAVRATDPQQVAFPSPAELPDQKQLRYTEELLRHVAPGLHLELRGPQLWARRMGKCKVYWEVGGPPGSASPSTPACLLPRNCDTPIFDFRVFFQELVEFRARQRRGSPRYTIYLGFGQDLSAGRPKEKSLVLVKLEPWLCRVHLEGTQREGVSSLDSSSLSLCLSSANSLYDDIECFLMELEQPA

SEQ ID NO: 61652 - protein, 292 aa, Homo sapiens [sequence omitted]

SEQ ID NO: 61653 - protein, 169 aa, Homo sapiens; identical to SEQ ID NO: 60738

SEQ ID NO: 61654 - protein, 145 aa, Homo sapiens
  MOD_RES (1)..(1): Any amino acid
XRAMALFFVLCWIQDHLSEEKNFKESCLFDRDLREQLTTIDKETLQGAAKPDAHFRTMPCGQLLHFLQRNTIIAAVSGVAILMAIVLLLLGLASYIRKKQPSSPLANTTYNIFIMDGKTWWHNSEEKNFTKLAKKQKQLKSSSCV

SEQ ID NO: 61655 - protein, 10 aa, Homo sapiens
MHTPPALPRR

SEQ ID NO: 61656 - protein, 148 aa, Homo sapiens
MQEHKLKVARLDNIFLTRMHWSNVGGLSGMILTLKETGLPKCVLSGPPQLEKYLEAIKIFSGPLKGIELAVRPHSAPEYEDETMTVYQIPIHSVSQRRGVRDSSLVVAFISSLKERKLLGAQSKGDGPPSWDSCHRSHHCCCQGREKH

SEQ ID NO: 61657 - protein, 177 aa, Homo sapiens
MGARLSRRRLPADPSLALDALPPELLVQVLSHVPPRSLVTRCRPVCRAWRDIVDGPTVWLLQLARDRSAEGRALYAVAQRCLPSNEDKEEFPLCALARYCLRAPFGRNLIFNSCGEQGFRGWEVEHGGNGWAIEKNLTPVPGAPSQTCFVTSFETVCPAPCHLSFPDGAPRGSLWTW

SEQ ID NO: 61658 - protein, 416 aa, Homo sapiens
REKELKLPTFRAHSPLLKSRRFFVDILTLLSSHCQLCPAARHLAVYLLDHFMDRYNVTTSKQLYTVAVSCLLLANGVSLLSPRLKCSGMISAHCNLHLPGSSNSPASAPHPPPTPPQVAETTGKFEDREDHVPKLEQINSTRILSSQNFTLTKKELLSTELLLLEAFSWNLCLPTPAHFLDYYLLASVSQKDHHCHTWPTTCPRKTKECLKEYAHYFLEVTLQDHIFYKFQPSVVAAACVGASRICLQLSPYWTRDLQRISSYSLEHLSTCIEILLVVYDNVLKDAVAVKSQALAMVPGTPPTPTQVLFQPPAYPALGQPATTLAQFQTPVQDLCLAYRDSLQAHRSGSLLSGSTGSSLHTPYQPLQPLDMCPVPVPASLSMHMAIAAEPRHCLATTYGSSYFSGSHMFPTGCFDR

SEQ ID NO: 61659 - protein, 74 aa, Homo sapiens
MGGCAGSRRRFSDSEGEETVPEPRLPLLDHQGAHWKNAVGFWLLGLCNNFSYVVMLSAAHDILSHKRTSGNQSH

SEQ ID NO: 61660 - protein, 1237 aa, Homo sapiens
MAVSDVPSLSVGKEVQWEKLIAKAASIRDICKQRPYQHGADMLAAISQVLNECTKPDQATPAALVLQGLHALCQAEVVCIRSTWNALSPKLSCDTRPLILKTLSELFSLVPSLTVNTTEYENFKVQVLSFLWTHTQNKDPIVANAAYRSLANFSAGEHTILHLPEKIRPEIPIPEELDDDEDVEDVDLSVPGSCYLKLLSLTPPLVLPALEEFFTSLVKQEMVNMPRGIYHSALKGGARSDQGKTVAGIPNFILKMYETNKQPGLKPGLAGGMLFCYDVSMYQSKDGKPLNRLMASRGRSFKQTSLALVHEVHIQLSEWHRAIFLPQAWLAYMNRAYHAILQGRLGELELQLKHGKEEPEEVQYKKSTAWLWVRDMLTDEITKAAAKESPVVKGNALLALSSLAVVVSRHEASLSSDSDGLLEVQPNFLSMKEWVSMVLDTLLVIVDSHYQPRGQLLSWFYYKSYSGENTASAIARSAAATALSLLVPVFIISCKEKVEEILNMLTARLPGKPSADESQAVQIHMGLALGMFLSRLCEEKLSDISGQEMNLLLMKSLDALENCCFDTSLEYNTGCILGVGLVLSLMSHSSQMQSRVHVAALLRKLSAHVDDSGSQSRTFQEVLAYTLSCVCTSAFSAGIIEATEAEDVMNKLRLLVENSQQTSGFALALGNIVHGLSVCGHGKAEDLGSKLLPAWIRIVLTEGTPTMLCLAALHGMVALVGSEGDVMQLKSEAIQTSHFQGRLNEVIRTLTQVISVSGVIGLQSNAVWLLGHLHLSTLSSSQSRASVPTDYSYLPESSFIGAAIGFFITGGKKGPESVPPSLLKVVMKPIATVGESYQYPPVNWAALLSPLMRLNFGEEIQQLCLEIMVTQAQSSQNAAALLGLWVTPPLIHSLSLNTKRYLLISAPLWIKHISDEQILGFVENLMVAVFKAASPLGSPELCPSALHGLSQAMKLPSPAHHLWSLLSEATGKIFDLLPNKIRRKDLELYISIAKCLLEMTDDDANRIAQVTKSNIEKAAFVKLYLVSQGRFPLVNLTDMLSVAVQHREKEVLAWMILHSLYQARIVSHANTGVLKRMEWLLELMGYIRNVAYQSTSFHNTALDKALDFFLLIFATAVVAWADHTAPLLLGLSASWLPWHQENGPAGPVPSFLGRSPMHRVTLQEVLTLLPNSMALLLQKEPWKEQTQKFIDWLFSIMESPKEALSAQSRDLLKATLLSLRVLPEFKKKAVWTRAYGW

SEQ ID NO: 61661 - protein, 251 aa, Homo sapiens
MSACREIALLRELKHPNVIALQKVFLSHSDRKVWLLFDYAEHDLWHIIKFHRASKANKKPMQLPRSMVKSLLYQILDGIHYLHANWVLHRDLKPANILVMGEGPERGRVKIADMGFARLFNSPLKPLADLDPVVVTFWYRAPELLLGARHYTKAIDIWAIGCIFAELLTSEPIFHCRQEDIKTSNPFHHDQLDRIFSVMGFPADKDWEDIRKMPEYPTLQKDFRRTTYANSSLIKYMEKHKVKPDSKVFLL

SEQ ID NO: 61662 - protein, 799 aa, Homo sapiens
MIPPLKSPAAFHEQRRSLERARTEDYLKRKIRSRPERSELVRMHILEETSAEPSLQAKQLKLKRARLADDLNEKIAQRPGPMELVEKNILPVESSLKEAIIVGQVNYPKVADSSSFDEDSSDALSPEQPASHESQGSVPSPLEARVSEPLLSATSASPTQVVSQLPMGRDSREMLFLAEQPPLPPPPLLPPSLTNGTTIPTAKSTPTLIKQSQPKSASEKSQRSKKAKELKPKVKKLKYHQYIPPDQKQDRGAPPMDSSYAKILQQQQLFLQLQILNQQQQQHHNYQAILPAPPKSAGEALGSSGTPPVRSLSTTNSSSSSGAPGPCGLARQNSTSLTGKPGALPANLDDMKVAELKQELKLRSLPVSGTKTELIERLRAYQDQISPVPGAPKAPAATSILHKAGEVVVAFPAARLSTGPALVAAGLAPAEVVVATVASSGVVKFGSTGSTPPVSPTPSERSLLSTGDENSTPGDTFGEMVTSPLTQLTLQASPLQILVKEEGPRAGSCCLSPGGRAELEGRDKDQMLQEKDKQIEALTRMLRQKQQLVERLKLQLEQEKRAQQPAPAPAPLGTPVKQENSFSSCQLSQQPLGPAHPFNPSLAAPATNHIDPCAVAPGPPSVVVKQEALQPEPEPVPAPQLLLGPQGPSLIKGVAPPTLITDSTGTHLVLTVTNKNADSPGLSSGSPQQPSSQPGSPAPAPSAQMDLEHPLQPLFGTPTSLLKKEPPGYEEAMSQQPKQQENGSSSQQMDDLFDILIQSGGNPRNFSRFQGAAIPAREGEAIPEDSLWVPPGSTAITFC

SEQ ID NO: 61663 - protein, 401 aa, Homo sapiens
MGQWIVYPLCSPGDSGKVTTVVATLGQGPERSQEVAYTDIKVIGNGSFGVVYQARLAETRELVAIKKVLQDKRFKNRELQIMRKLDHCNIVRLRYFFYSSGEKKDELYLNLVLEYVPETVYRVARHFTKAKLTIPILYVKVYMYQLFRSLAYIHSQGVCHRDIKPQNLLVDPDTAVLKLCDFGSAKQLVRGEPNVSYICSRYYRAPELIFGATDYTSSIDVWSAGCVLAELLLGQPIFPGDSGVDQLVEIIKVLGTPTREQIREMNPNYTEFKFPQIKAHPWTKVFKSRTPPEAIALCSSLLEYTPSSRLSPLEACAHSFFDELRCLGTQLPNNRPLPPLFNFSAGELSIQPSLNAILIPPHLRSPAGTTTLTPSSQALTETPTSSDWQSTDATPTLTNSS

SEQ ID NO: 61664 - protein, 134 aa, Homo sapiens
MKRLDSEMMNFDWQNVADFRDAGGSLTEVKVEEEERDPQSPEFEIEEEEEMLSSVIPDSRRENELPDFPHIDEFFTLNSTPSRSAYDEPHLLVNIEKQKLELEKRRLDIEAERAGRKGTPTNREREAAAFRHGT

SEQ ID NO: 61665 - protein, 136 aa, Homo sapiens
MREIVHIQAGQCGNQIGTKFWEVISDEHGIDPAGGYVGDSALQLERINVYYNESSSQKYVPRAALVDLEPGTMDSVRSGPFGQLFRPDNFIFGQTGAGNNWAKGASSSRTRWAAARAQAWARCSSARSVRSSRTAS

SEQ ID NO: 61666 - protein, 128 aa, Homo sapiens
MIRDLSKMYPQTRHPAPHQPAQPFKFTISESCDRIKEEFQFLQAQYHSLKLECEKLASEKTEMQRHYVMAEIVKRLNAICAQVIPFLSQEHQQQVVQAVERAKQVTMAELNAIIGQQQLQAQHLSHGH

SEQ ID NO: 61667 - protein, 147 aa, Homo sapiens
MVENERLRQEMRRCEAELQELRTKPAGPCPGCEHSQESAQLRDKLSQLQLEMAESKGMLSELNLEVQQKTDRLAEVELRLKDCLAEKAQEEERLSRRLRDSHETIASLRAQSPPVKYVIKTVEVESSKTKQALSESQARNQHLQEQV

SEQ ID NO: 61668 - protein, 604 aa, Homo sapiens
MEGDGSDPEPPDAGEDSKSENGENAPIYCICRKPDINCFMIGCDNCNEWFHGDCIRITEKMAKAIREWYCRECREKDPKLEIRYRHKKSRERDGNERDSSEPRDEGGGRKRPVPDPDLQRRAGSGTGVGAMLARGSASPHKSSPQPLVATPSQHHQQQQQQIKRSARMCGECEACRRTEDCGHCDFCRDMKKFGGPNKIRQKCRLRQCQLRARLSPVTPSESLPRPRRPLPTQQQPQPSQKLGRIREDEGAVASSTVKEPPEATATPEPLSDEDLPLDPDLYQDFCAGAFDDHGLPWMSDTEESPFLDPALRKRAVKVKHVKRREKKSEKKKEERYKRHRQKQKHKDKWKHPERADAKDPASLPQCLGPGCVRPAQPSSKYCSDDCGMKLAANRIYEILPQRIQQWQQSPCIAEEHGKKLLERIRREQQSARTRLQEMERRFHELEAIILRAKQQAVREDEESNEGDSDDTDLQIFCVSCGHPINPRVALRHMERCYAKYESQTSFGSMYPTRIEGAKHTVSGSRCCAPSTHGTPKCQLTRYAGAPLYVMSLSSRVTSAACPSASAIAITAGRSCGVRKWTWSACVCGTSWTSCLSRSAMCAQP

SEQ ID NO: 61669 - protein, 196 aa, Homo sapiens
MEGNGPAAVHYQPASPPRDACVYSSCYCEENIWKLCEYIKNHDQYPLEECYAVFISNERKMIPIWKQQARPGDGPVIWDYHVVLLHVSSGGQNFIYDLDTVLPFPCLFDTYVEDAFKSDDDIHPQFRRKFRVIRADSYLKNFASDRSHMKDSSGNWREPPPPYPCIETGGINPVDNFLTFKKIKGPSPYYYCLAFI

SEQ ID NO: 61670 - protein, 225 aa, Homo sapiens
MFYAHFVLSKRGPLAKIWLAAHWDKKLTKAHVFECNLESSVESIISPKVKMALRTSGHLLLGVVRIYHRKAKYLLADCNEAFIKIKMAFRPGVVDLPEENREAAYNAITLPEEFHDFDQPLPDLDDIDVAQQFSLNQSRVEEITMREEVGNISILQENDFGDFGMDDREIMREGSAFEDDDMLVSTTTSNLLLESEQSTSNLNEKINHLEYEDQYKDDNFGEGND

SEQ ID NO: 61671 - protein, 394 aa, Homo sapiens
MAVMAPRTLVLLLSGALALTQTWAGSHSMRYFYTSVSRPGRGEPRFIAVGYVDDTQFVRFDSDAASQRMEPRAPWIEQEGPEYWDRNTRNVKAHSQTDRANLGTLRGYYNQSEDGSHTIQRMYGCDVGPDGRFLRGYQQDAYDGKDYIALNEDLRSWTAADMAAQITQRKWETAHEAEQWRAYLEGRCVEWLRRYLENGKETLQRTDAPKTHMTHHAVSDHEATLRCWALSFYPAEITLTWQRDGEDQTQDTELVETRPAGDGTFQKWASVVVPSGQEQRYTCHVQHEGLPKPLTLRWEPSSQPTIPIVGIIAGLVLFGAVIAGAVVAAVMWRRKSSDRKGGSYSQAASSDSAQGSDMSLTACKGESLEGLMCVGCWAEQWTQLCYGVSLHWMY

SEQ ID NO: 61672 - protein, 110 aa, Homo sapiens
MRRSEVLAEESIVCLQKALNHLREIWELIGIPEDQRLQRTEVVKKHIKELLDMMIAEEESLKERLIKSISVCQKELNTLCSELHVEPFQEFTWNLITVVRCLIQEEGETT

SEQ ID NO: 61673 - protein, 34 aa, Homo sapiens
MAQFVRNLVEKTPALVNAAVTYSKPRLATFWKLC

SEQ ID NO: 61674 - protein, 85 aa, Homo sapiens
SQLSSNSLYAKAVKNHSSGTVSATSPNKCKRPMNAFMLFAKKYRVEYTQMYPGKDNRRSLAVSPKLESSGTISAHCNLRLPGSKP

SEQ ID NO: 61675 - protein, 445 aa, Homo sapiens
MPLAFCGSENHSAAYRVDQGVLNNGCFVDALNVVPHVFLLFITFPILFIGWGSQSSKVHIHHSTWLHFPGHNLRWILTFMLLFVLVCEIAEGILSDGVTESHHLHLYMPAGMAFMAAVTSVVYYHNIETSNFPKLLIALLVYWTLAFITKTIKFVKFLDHAIGFSQLRFCLTGLLVILYGMLLLVEVNVIRVRRYIFFKTPREVKPPEDLQDLGVRFLQPFVNLLSKGTYWWMNAFIKTAHKKPIDLRAIGKLPIAMRALTNYQRLCEAFDAQRKDIQGTQGARAIWQALSHAFGRRLVLSSTFRILADLLGFAGPLCIFGIVDHLGKENDVFQPKTQFLGVYFVSSQEFLANAYVLAVLLFLALLLQRTFLQASYYVAIETGINLRGAIQTKIYNKIMHLSTSNLSMGEMTAGQICNLVAIDTNQLMWFFFLCPNLWAMPVQFS

SEQ ID NO: 61676 - protein, 129 aa, Homo sapiens
ASGSGTKNLDFRRKWDKDEYEKLAEKRLTEEREKKDGKPVQPVKRELLRHRDYKVDLESKLGKTIVITKTTPQSEMGGYYCNVCDCVVKDSINFLDHINGKKRKAWRSEKPGHVYACGTFHPGSGEETF

SEQ ID NO: 61677 - protein, 271 aa, Homo sapiens
MWQLWASLCCLLVLANARSRPSFHPLSDELVNYVNKRNTTWQAGHNFYNVDMSYLKRLCGTFLGGPKPPQRVMFTEDLKLPASFDAREQWPQCPTIKEIRDQGSCGSCWAFGAVEAISDRICIHTNAHVSVEVSAEDLLTCCGSMCGDGCNGGYPAEAWNFWTRKGLVSGGLYESHVDRTPSLPVSTTSTAPGPHARGREIPPSVARSVSLATARPTNRTSTTDTIPTASPIARRTSWPRSTKTAPWRELSLCIRTSCSTSQECTNTSPER

SEQ ID NO: 61678 - protein, 150 aa, Homo sapiens
MLLLYHIGKPSLYGSLTCQGIGLDGIPEVTASEGFTVNEINKKSIHISCPKENASSKFLAPYTTFSRIHTKSITCLDISSRGGLGVSSSTDGTMKIWQASNGELRRVLEGHVFDVNCCRFFPSGLVVLSGGMDAQLKIWSAEDASCVVTF

SEQ ID NO: 61679 - protein, 226 aa, Homo sapiens
MLVSLKMSYKAAAGEDYKADCPPGNPAPTSNHGPDATEAEEDFVDPWTVQTSSAKGIDYDKLIVRFGSSKIDKELINRIERATGQRPHHFLRRGIFFSHRDMNQVLDAYENKKPFYLYTGRGPSSEAMHVGHLIPFIFTKWLQDVFNVPLVIQMTDDEKYLWKDLTLDQAYSYAVENAKDIIACGFDINKTFIFSDLDYMGMSSGFYKNVVKIQKHVTFNQVKGIF

SEQ ID NO: 61680 - protein, 1213 aa, Homo sapiens
MVVSAGPWSSEKAEMNILEINEKLRPQLAENKQQFRNLKERCFLTQLAGFLANRQKKYKYEECKDLIKFMLRNERQFKEEKLAEQLKQAEELRQYKVLVHSQERELTQLREKLREGRDASRSLNEHLQALLTPDEPDKSQGQDLQEQLAEGCRLAQQLVQKLSPENDEDEDEDVQVEEDEKVLESSAPREVQKAEESKVPEDSLEECAITCSNSHGPCDSIQPHKNIKITFEEDKVNSTVVVDRKSSHDECQDALNILPVPGPTSSATNVSMVVSAGPLSSEKAEMNILEINEKLRPQLAEKKQQFRSLKEKCFVTQLAGFLAKQQNKYKYEECKDLIKSMLRNELQFKEEKLAEQLKQAEELRQYKVLVHSQERELTQLREKLREGRDASRSLNEHLQALLTPDEPDKSQGQDLQEQLAEGCRLAQHLVQKLSPENDEDEDEDVQVEEDEKVLESSSPREMQKAEESKVPEDSLEECAITCSNSHGPCDSNQPHKNIKITFEEDKVNSSLVVDRESSHDECQDALNILPVPGPTSSATNVSMVVSAGPLSSEKAEMNILEINEKLRPQLAEKKQQFRSLKEKCFVTQVACFLAKQQNKYKYEECKDLLKSMLRNELQFKEEKLAEQLKQAEELRQYKVLVHSQERELTQLREKLREGRDASRSLNEHLQALLTPDEPDKSQGQDLQEQLAEGCRLAQHLVQKLSPENDNDDDEDVQVEVAEKVQKSSSPREMQKAEEKEVPEDSLEECAITCSNSHGPYDSNQPHRKTKITFEEDKVDSTLIGSSSHVEWEDAVHIIPENESDDEEEEEKGPVSPRNLQESEEEEVPQESWDEGYSTLSIPPERLASYQSYSSTFHSLEEQQVCMAVDIGRHRWDQVKKEDQEATGPRLSRELLAEKEPEVLQDSLDRCYSTPSVYLGLTDSCQPYRSAFYVLEQQRVGLAVDMDEIEKYQEVEEDQDPSCPRLSRELLAEKEPEVLQDSLDRCYSTPSGYLELPDLGQPYRSAVYSLEEQYLGLALDVDRIKKDQEEEEDQGPPCPRLSRELLEVVEPEVLQDSLDRCYSTPSSCLEQPDSCQPYRSSFYALEEKHVGFSLDVGEIEKKGKGKKRRGRRSKKKRRRGRKEGEEDQNPPCPRLNSVLMEVEEPEVLQDSLDRCYSTPSMYFELPDSFQHYRSVFYSFEEQHITFALDMDNSFFTLTVTSLHLVFQMGVIFPQ

SEQ ID NO: 61681 - protein, 80 aa, Homo sapiens
MPSESFCLAAQARLDSKWLKTDIQLAFTRDGLCGLWNEMVKDGEIVYTGTESTQNGELPPRKVETGFHRVSQDGLELLTS

SEQ ID NO: 61682 - protein, 968 aa, Homo sapiens
MEDFARGAASPGPSRPGLVPVSIIGAEDEDFENELETNSEEQNSQFQSLEQVKRRPAHLMALLQHVALQFEPGPLLCCLHADMLGSLGPKEAKKAFLDFYHSFLEKTAVLRVPVPPNVAFELDRTRADLISEDVQRRFVQEVVQSQQVAVGRQLEDFRSKRLMGMTPWEQELAQLEAWVGRDRASYEARERHVAERLLMHLEEMQHTISTDEEKSAAVVNAIGLYMRHLGVRTKSGDKKSGRNFFRKKVMGNRRSDEPAKTKKGLSSILDAARWNRGEPQVPDFRHLKAEVDAEKPGATDRKGGVGMPSRDRNIGAPGQDTPGVSLHPLSLDSPDREPGADAPLELGDSSPQGPMSLESLAPPESTDEGAETERLSGRLGRSESLRVSDRRRPSRGSLGAKGRGGGRSRSDVDMDPSSATAVLGPARRATPEPGDEGEPGRSGLELEPEEPPGWRELVPPDTLHSLPKSQVKRQEVISELLVTEAAHVRMLRVLHDLFFQPMAECLFFPLEELQNIFPSLDELIEVHSLFLDRLMKRRQESGYLIEEIGDVLLARFDGAEGSWFQKISSRFCSRQSFALEQLKAKQRKDPRFCAFVQEAESRPRCRRLQLKDMIPTEMQRLTKYPLLLQSIGQNTEEPTEREKVELAAECCREILHHVNQAVRDMEDLLRLKDYQRRLDLSHLRQSSDPMLSEFKNLDITKKKLVHEGPLTWRVTKDKAVEVHVLLLDDLLLLLQRQDERLLLKSHSRTLTPTPDGKTMLRPVLRLTSAMTREVATDHKAFYVLFTWDQEAQIYELVAQTVSERKNWCALITETAGSLKVPAPASRPKPRPSPSSTREPLLSSSENGNGGRETSPADARTERILSDLLPFCRPGPEGQLAATALRKVLSLKQLLFPAEEDNGAGPPRDGDGVPGGGPLSPARTQEIQENLLSLEETMKQLEELEEEFCRLRPLLSQLGGNSVPQPGCT

SEQ ID NO: 61683 - protein, 431 aa, Homo sapiens
MGLLLPFSDCFREPCNQNAQTNAASFDQDQLYTWAAVSQPTHSLDYSEGQFPRRVPSMGPPSKPPDEEHRLEDAETESQSAVSETPQKRSDAVQKVVKLLSNKRSQAVGILMSSLHLDMKDIQHAVVNLDNSVVDLETLQALYENRAQSDELEKIEKHGRSSKDKENAKSLDKPEQFLYELSLIPNFSERVFCILFQSTFSESICSIRRKLELLQKLCETLKNGPGVMQVLGLVLAFGNYMNGGNKTRGQADGFGLDILPKLKDVKSSDNSRSLLSYIVSYYLRNFDEDAGKEQCLFPLPEPQDLFQASQMKFEDFQKDLRKLKKDLKAKIDQEAEENSLTETHKCFLETTAYFFMKPKLGEKEVSPNAFFSIWHEFSSDFKDFWKKENKLLLQERVKEAEEVCRQKKGKSLYKIKPRHDSGIKAKISMKT

SEQ ID NO: 61684 - protein, 165 aa, Homo sapiens
MADTPRDAGLKQAPASRNEKAPVDFGYVGIDSILEQMRRKAMKQGFEFNIMVVGQSGLGKSTLINTLFKSKISRKSVQPTSEERIPKTIEIKSITHDIEEKGVRMKLTVIDTPGFGDHINNENCWQPIMKFINDQYEKYLQEEVNINRKKRIPDTRVHCCLYFIP

SEQ ID NO: 61685 - protein, 253 aa, Homo sapiens
MKIIILLGFLGATLSAPLLLNLNNGQLLPLQLQGPLNSWIPPFSGILQQQQQAQIPGLSQFSLSALDQFAGLLPNQIPLTGEASFAQGAQAGQVDPLQLQTPPQTQPGPSHVMPYVFSFKMPQEQGQMFQYYPVYMVLPWEQPQQTVPRSPQQTRQQQYEEQIPFYAQFGYIPQLAEPAISGGQQQLAFDPQLGTAPEIAVMSTGEEIPYLQKEAINFRHDSAGVFMPSTSPKPSTTNVFTSAVDQTITPELP

SEQ ID NO: 61686 - protein, 432 aa, Homo sapiens
MAAAMPLALLVLLLLGPGGWCLAEPPRDSLREELVITPLPSGDVAATFQFRTRWDSELQREGVSHYRLFPKALGQLISKYSLRELHLSFTQGFWRTRYWGPPFLQAPSGAELWVWFQDTVTDVDKSWKELSNVLSGIFCASLNFIDSTNTVTPTASFKPLGLANDTDHYFLRYAVLPREVVCTENLTPWKKLLPCSSKAGLSVLLKADRLFHTSYHSQAVHIRPVCRNARCTSISWELRQTLSVVFDAFITGQGKKDWSLFRMFSRTLTEPCPLASESRVYVDITTYNQDNETLEVHPPPTTTYQDVILGTRKTYAIYDLLDTAMINNSRNLNIQLKWKRPPENGYIHYQPAQDRLQPHLLEMLIQLPANSVTKVSIQFERALLKWTEYTPDPNHGFYVSPSVLSALVPSMVAAKPVDWEESPLFNSLLPWT

SEQ ID NO: 61687 - protein, 138 aa, Homo sapiens
MAHCVTLVQLSISCDHLIDKDIGSKSDPLCVLLQDVGGGSWAELGRTERVRNCSSPEFSKTLQLEYRFETVQKLRFGIYDIDNKTPELRDDDFLGGAECSLGQIVSSQVLTLPLMLKPGKPAGRGTITSPLPRSQLRN

SEQ ID NO: 61688 - protein, 207 aa, Homo sapiens
LGWCVHILHDQHLWGCALPEDWLAGGKHRSAPGHVPGVLRHPGGPRHGAVWHWRRGAQQHRQRWRLLHDLLGPGWADGRHHRAALCVWTEHGFIGYSPELLQNNTLPDYSPGESFFTVFGVFFPAATGVMAGFNMGGDLREPAASIPLGSLAAVGISWFLYIIFVFLLGAICTREALRYDFLIAEKVSLMGFLFLLGLYISSLASCM

SEQ ID NO: 61689 - protein, 114 aa, Homo sapiens
MTTRQATKDPLLRGVSPTPSKIPVRSQKRTPFPTVTSCAVDQENQDPRRWVQKPPLNIQRPLVDSAGPRPKARHQAETSQRLVGISQPRNPLEELRPSPRGQNVGPGPPAQTEA

SEQ ID NO: 61690 - protein, 159 aa, Homo sapiens
MRRLLIPLALWLGAVGVGVAELTEAQRRGLQVALEEFHKHPPVQWAFQETSVESAVDTPFPAGIFVRLEFKLQQTSCRKRDWKKPECKVRPNGRKRKCLACIKLGSEDKVLGRLVHCPIETQVLRRCVVPPGPLRVVTSGRPQPPGRGTRSIPSHDNKA

SEQ ID NO: 61691 - protein, 55 aa, Homo sapiens
MAATTANPEMTSDVPSLGPAIASGNSGPGIQGGGAIVQRAIKRRPGWSLAVVAQA

SEQ ID NO: 61692 - protein, 401 aa, Homo sapiens
  MOD_RES (1)..(1): Any amino acid
XIYSSAVVDNELNAVNDGHLVSSPAICSGSLSNFSTSDNGSYSSNGSDFGSCASITSGGSYTNSVISDSSSYTFPPSDDTFLGGNLPSDSTSNRSVPNRNTTPCEIFSRSTSTDPFVQDDLEHGLEIMKLPVSRNTKIPLKRYSSLVIFPRSPSTTRPTSPTSLCTLLSKGSYQTSHQFIISPSEIAHNEDGTSAKGFLSTAVNGLRLSKTICTPGEVRDIRPLHRKGSLQKKIVLSNNTPRQTVCEKSSEGYSCVSVHFTQRKAATLDCETTNGDCKPEMSEIKLNSDSEYIKLMHRTSACLPSSQNVDCQININGELERPHSQMNKNHGILRRSISLGGAYPNISCLSSLKHNCSKGGPSQLLIKFASGNEGKVDNLSRDSNRDCTNELSNSCKSQIKS

SEQ ID NO: 61693 - protein, 234 aa, Homo sapiens
IQDILKVLVSDLNRSNGVALPPLDKWKTPKDNAATLQPSDDTVLPGGVPSPGASLTSMAASQNHDADNVPNLMDETKTFSSTESLRQLSQQLNGLVCESATCVNGEGPASSANLKDLEKQQNQEITDQLEEEKKECHQKQGALREQLQVHIQTIGILVSEKAELQTALAHTQHAARQKEGESEDLASRLQYSRRRVGELERALSAVSTQQKKADRYNKELTKERDALRLELYKN

SEQ ID NO: 61694 - protein, 222 aa, Homo sapiens
  MOD_RES (1)..(1): Any amino acid
XRSVQNHNNKSVNESLNNLFITEEDYQALRTSIDAYDNFDNISLAQRLEKHELIEFRRIAAYLFKGNNRWKQSVELCKKDSLYKDAMQYASESKDTELAEELLQWFLQEEKRECFGACLFTCYDLLRPDVVLETAWRHNIMDFAMPYFIQVMKEYLTKVDAIKEKVDKLDASESLRKEEEQATETQPIVYGQPQLMLTAGPSVAVPPQAPFGYGYTAPPYGQ

SEQ ID NO: 61695 - protein, 46 aa, Homo sapiens
  MOD_RES (1)..(1): Any amino acid
XGIVRVKELDWLKDDLCTGVVVSLCGSMIIPELSQGPLQLVTRGNF

SEQ ID NO: 61696 - protein, 287 aa, Homo sapiens
  MOD_RES (1)..(1): Any amino acid
XISEPGSPSRNRENETSRQNLSECKVWRNPLNLFRGAEYRRYTWVTGKEPLTYYDMNLSAQDHQTFFTCDTDFLRPSDTVMQKAWRERNPPARIKAAYQALELNNDCATAYVLLAEEEATTIVDAERLFKQALKAGETIYRQSQQCQHQSPQHEAQLRRDTNVLVYIKRRLAMCARKLGRIREAVKIMRDYLLEMKSLILPPEHILKRGDSEAIAYAFFHLQHWKRIEGALNLLQCTWEGTFHHVSVYPKKELPLFIHFTAGFCSSTAMIAILTHQFPEIMGIFAKA

SEQ ID NO: 61697 - protein, 37 aa, Homo sapiens
MTSLLTTPSPRGSHSVTQTRVQWHNHSSLQPGPPGLQ

SEQ ID NO: 61698 - protein, 84 aa, Homo sapiens
  MOD_RES (1)..(1): Any amino acid
XPGAAVDIKLGFGRGRHLGCPRAFDGSGQEFAHAWRLGDIHFDDDEHFTPPTSDTGISLLKAPVRDHLILRLTGFAKRETNMER

SEQ ID NO: 61699 - protein, 962 aa, Homo sapiens
MEDGKPVWAPHPTDGFQMGNIVDIGPDSLTIEPLNQKGKTFLALINQVFPAEEDSKKDVEDNCSLMYLNEATLLHNIKVRYSKDRIYTYVANILIAVNPYFDIPKIYSSEAIKSYQGKSLGTRPPHVFAIADKAFRDMKVLKMSQSIIVSGESGAGKTENTKFVLRYLTESYGTGQDIDDRIVEANPLLEAFGNAKTVRNNNSSRFGKFVEIHFNEKSSVVGGFVSHYLLEKSRICVQGKEERNYHIFYRLCAGASEDIREKLHLSSPDNFRYLNRGCTRYFANKETDKQILQNRKSPEEDEYLKAGSMKDPLLDDHGDFIRMCTAMKKIGLDDEEKLDLFRVVAGVLHLGNIDFEEAGSTSGGCNLKNKSAQSLEYCAELLGLDQDDLRVSLTTRVMLTTAGGTKGTVIKVPLKVEQANNARDALAKTVYSHLFDHVVNRVNQCFPFETSSYFIGVLDIAGFEYFEHNSFEQFCINYCNEKLQQFFNERILKEEQELYQKEGLGVNEVHYVDNQDCIDLIEAKLVGILDILDEENRLPQPSDQHFTSAVHQKHKDHFRLTIPRKSKLAVHRNIRDDEGFIIRHFAGAVCYETTQFVEKNNDALHMSLESLICESRDKFIRELFESSTNNNKDTKQKAGKLSFISVGNKFKTQLNLLLDKLRSTGASFIRCIKPNLKMTSHHFEGAQILSQLQCSGMVSVLDLMQGGYPSRASFHELYNMYKKYMPDKLARLDPRLFCKALFKALGLNENDYKFGLTKVFFRPGKFAEFDQIMKSDPDHLAELVKRVNHWLTCSRWKKVQWCSLSVIKLKNKIKYRAEACIKMQKTIRMWLCKRRHKPRIDGLVKVGTLKKRLDKFNEVVSVLKDGKPEMNKQIKNLEISIDTLMAKIKSTMMTQEQIQKEYDALVKSSEELLSALQKKKQQEEEAERLRRIQEEMEKERKRREEDEKRRRKEEEERRMKLE

SEQ ID NO: 61700 - protein, 350 aa, Homo sapiens
MSGHKCSYPWDLQDRYAQDKSVVNKMQQKYWETKQAFIKATGKKEDEHVVASDADLDAKLELFHSIQRTCLDLSKAIVLYQKRICFLSQEENELGKFLRSQGFQDKTRAGKMMQATGKALCFSSQQRLALRNPLCRFHQEVETFRHRAISDTWLTVNRMEQCRTEYRGALLWMKDVSQELDPDLYKQMEKFRKVQTQVRLAKKNFDKLKMDVCQKVDLLGASRCNLLSHMLATYQTTLLHFWEKTSHTMAAIHESFKGYQPYEFTTLKVWKLEGPLENLEKSKVLFISQAKSIAESIIIPGLRMLKRELCPQQSLFLSFFLSFFFFFFFFTASGFNTMRIYCNPKARIEP

SEQ ID NO: 61701 - protein, 109 aa, Homo sapiens
MAVCIAVIAKENYPLYIRSTPTENELKFHYMVHTSLDVVDEKISAMGKALVDQRELYLGLLYPTEDYKMFRKLHNSYTDVMCNPFYNPGDRIQSRAFDNMVTSMMIQVC

SEQ ID NO: 61702 - protein, 117 aa, Homo sapiens
MYLQVETRTSSRLHLKRAPGIRSWSLLVGILSIGLAAAYYSGDSLGWKLFYVTGCLFVAVQNLEDWEEAIFDKSTGKVVLKTFSLYKKLLTLFRAGHDQVVVLLHDVRDVSVEEEKV

SEQ ID NO: 61703 - protein, 32 aa, Homo sapiens
MATYLEFIQQNEERDGVRFSWNVWPSSRLEAT

SEQ ID NO: 61704 - protein, 310 aa, Homo sapiens
MPWEGVRTQKPTRPATAATQPGTWAAPSFSQGPSSPPSAMAMWPCAQMPGASSASFMRWWGFRCLGSYWQGSGTGWAPPCAMASVTLKPSSCDAYHRGLWRLCGRRGPQAGLPGLSAAGVVLDPARPGLLRLSAHHHRELAASSVPPHSGRDGRPHGSGCQLDWHGDSARDPASRARRPAAGEGAATAASTALSSAAAGQAPIPFAPREGSAAFPAHGLGPGLSQREPGLHRRVLGYAERARLPAAPRAERSPPPKSPQEARAAPRPRASPRQRRAGVGAGSLAGPLKGFVSALPGMPGLFDQRALFPRD

SEQ ID NO: 61705 - protein, 139 aa, Homo sapiens
MEKKVDVTSKAVTEVLARTIEYLQPNPASRAKLTMLNTVSKIRGQVKNPGYPQSEGLLGECMIRHGKELGGESNFGDALLDAGESMKRLAEVKDSLDIEVKQNFIDPLQNLCEKDLKEIQHHLKKLEGRRLDFDYKKKR

SEQ ID NO: 61706 - protein, 67 aa, Homo sapiens
MPEGEDFGPGKSFVSWSVVCAHFLRSWEVTFLGLYSAIYCYCVHFCVHCLNVMILDKKFTAKLSQFC

SEQ ID NO: 61707 - protein, 127 aa, Homo sapiens
MSLPLNPKPFLNGLTGKPVMVKLKWGMEYKGYLVSVDGYMNMQIFIYILGILKQNGVSLSSPRLECNGMISAHCNLCLPGSSDSPASASRVAGITARTSRTLTKRSGAVEILALFLILGGKHSVFYH

SEQ ID NO: 61708 - protein, 5553 aa, Homo sapiens
MDSQKLAGEDKDSEPAADGPAASEDPSATESDLPNPHVGEVSVLSSGSPRLQETPQDCSGGPVRRCALCNCGEPSLHGQRELRRFELPFDWPRCPVVSPGGSPGPNEAVLPSEDLSQIGFPEGLTPAHLGEPGGSCWAHHWCAAWSAGVWGQEGPELCGVDKAIFSGISQRCSHCTRLGASIPCRSPGCPRLYHFPCATASGSFLSMKTLQLLCPEHSEGAAYLEEARCAVCEGPGELCDLFFCTSCGHHYHGACLDTALTARKRAGWQCPECKVCQACRKPGNDSKMLVCETCDKGYHTFCLKPPMEELPAHSWKCKACRVCRACGAGSAELNPNSEWFENYSLCHRCHKAQGGQTIRSVAEQHTPVCSRFSPPEPGDTPTDEPDALYVACQGQPKGGHVTSMQPKEPGPLQCEAKPLGKAGVQLEPQLEAPLNEEMPLLPPPEESPLSPPPEESPTSPPPEASRLSPPPEELPASPLPEALHLSRPLEESPLSPPPEESPLSPPPESSPFSPLEESPLSPPEESPPSPALETPLSPPPEASPLSPPFEESPLSPPPEELPTSPPPEASRLSPPPEESPMSPPPEESPMSPPPEASRLFPPFEESPLSPPPEESPLSPPPEASRLSPPPEDSPMSPPPEESPMSPPPEVSRLSPLPVVSRLSPPPEESPLSPPPEESPTSPPPEASRLSPPPEDSPTSPPPEDSPASPPPEDSLMSLPLEESPLLPLPEEPQLCPRSEGPHLSPRPEEPHLSPRPEEPHLSPQAEEPHLSPQPEEPCLCAVPEEPHLSPQAEGPHLSPQPEELHLSPQTEEPHLSPVPEEPCLSPQPEESHLSPQSEEPCLSPRPEESHLSPELEKPPLSPRPEKPPEEPGQCPAPEELPLFPPPGEPSLSPLLGEPALSEPGEPPLSPLPEELPLSPSGEPSLSPQLMPPDPLPPPLSPIITAAAPPALSPLGELEYPFGAKGDSDPESPLAAPILETPISPPPEANCTDPEPVPPMILPPSPGSPVGPASPILMEPLPPQCSPLLQHSLVPQNSPPSQCSPPALPLSVPSPLSPIGKVVGVSDEAELHEMETEKVSEPECPALEPSATSPLPSPMGDLSCPAPSPAPALDDFSGLGEDTAPLDGIDAPGSQPEPGQTPGSLASELKGSPVLLDPEELAPVTPMEVYPECKQTAGQGSPCEEQEEPRAPVAPTPPTLIKSDIVNEISNLSQGDASASFPGSEPLLGSPDPEGGGSLSMELGVSTDVSPARDEGSLRLCTDSLPETDDSLLCDAGTAISGGKAEGEKGRRRSSPARSRIKQGRSSSFPGRRRPRGGAHGGRGRGRARLKSTASSIETLVVADIDSSPSKEEEEEDDDTMQNTVVLFSNTDKFVLMQDMCVVCGSFGRGAEGHLLACSQCSQCYHPYCVNSKITKVMLLKGWRCVECIVCEVCGQASDPSRLLLCDDCDISYHTYCLDPPLLTVPKGGWKCKWCVSCMQCGAASPGFHCEWQNSYTHCGPCASLVTCPICHAPYVEEDLLIQCRHCERWMHAGCESLFTEDDVEQAADEGFDCVSCQPYVVKPVAPVAPPELVPMKVKEPEPQYFRFEGVWLTETGMALLRNLTMSPLHKRRQRRGRLGLPGEAGLEGSEPSDALGPDDKKDGDLDTDELLKGEGGVEHMECEIKLEGPVSPDVEPGKEETEESKKRKRKPYRPGIGGFMVRQRKSHTRTKKGPAAQAEVLSGDGQPDEVIPADLPAEGAVEQSLAEGDEKKKQQRRGRKKSKLEDMFPAYLQEAFFGKELLDLSRKALFAVGVGRPSFGLGTPKAKGDGGSERKELPTSQKGDDGPDIADEESRGLEGKADTPGPEDGGVKASPVPSDPEKPGTPGEGMLSSDLDRISTEELPKMESKDLQQLFKDVLGSEREQHLGCGTPGLEGSRTPLQRPFLQGGLPLGNLPSSSPMDSYPGLCQSPFLDSRERGGFFSPEPGEPDSPWTGSGGTTPSTPTTPTTEGEGDGLSYNQRSLQRWEKDEELGQLSTISPVLYANINFPNLKQDYPDWSSRCKQIMKLWRKVPAADKAPYLQKAKDNRAAHRINKVQKQAESQINKQTKVGDIARKTDRPALHLRIPPQPGALGSPPPAAAPTIFIGSPTTPAGLSTSADGFLKPPAGSVPGPDSPGELFLKLPPQVPAQVPSQDPFGLAPAYPLEPRFPTAPPTYPPYPSPTGAPAQPPMLGASSRPGAGQPGEFHTTPPGTPRHQPSTPDPFLKPRCPSLDNLAVPESPGVGGGKASEPLLSPPPFGESRKALEVKKEELGASSPSYGPPNLGFVDSPSSGTHLGGLELKTPDVFKAPLTPRASQVEPQSPGLGLRPQEPPPAQALAPSPPSHPDIFRPGSYTDPYAQPPLTPRPQPPPPESCCALPPRSLPSDPFSRVPASPQSQSSSQSPLTPRPLSAEAFCPSPVTPRFQSPDPYSRPPSRPQSRDPFAPLHKPPRPQPPEVAFKAGSLAHTSLGAGGFPAALPAGPAGELHAKVPSGQPPNFVRSPGTGAFVGTPSPMRFTFPQAVGEPSLKPPVPQPGLPPPHGINSHFGPGPTLGKPQSTNYTVATGNFHPSGSPLGPSSGSTGESYGLSPLRPPSVLPPPAPDGSLPYLSHGASQRSGITSPVEKREDPGTGMGSSLATAELPGTQDPGMSGLSQTELEKQRQRQRLRELLIRQQIQRNTLRQEKETAAAAAGAVGPPGSWGAEPSSPAFEQLSRGQTPFAGTQDKSSLVGLPPSKLSGPILGPGSFPSDDRLSRPPPPATPSSMDVNSRQLVGGSQAFYQRAPYPGSLPLQQQQQQLWQQQQATAATSMRFAMSARFPSTPGPELGRQALGSPLAGISTRLPGPGEPVPGPAGPAQFIELRHNVQKGLGPGGTPFPGQGPPQRPRFYPVSEDPHRLAPEGLRGLAVSGLPPQKPSAPPAPELNNSLHPTPHTKGPTLPTGLELVNRPPSSTELGRPNPLALEAGKLPCEDPELDDDFDAHKALEDDEELAHLGLGVDVAKGDDELGTLENLETNDPHLDDLLNGDEFDLLAYTDPELDTGDKKDIFNEHLRLVESANEKAEREALLRGVEPGPLGPEERPPPAADASEPRLASVLPEVKPKVEEGGRHPSPCQFTIATPKVEPAPAANSLGLGLKPGQSMMGSRDTRMGTGPFSSSGHTAEKASFGATGGPPAHLLTPSPLSGPGGSSLLEKFELESGALTLPGGPAASGDELDKMESSLVASELPLLIEDLLEHEKKELQKKQQLSAQLQPAQQQQQQQQQHSLLSAPGPAQAMSLPHEGSSPSLAGSQQQLSLGLAGARQPGLPQPLMPTQPPAHALQQRLAPSMAMVSNQGHMLSGQHGGQAGLVPQQSSQPVLSQKPMGTMPPSMCMKPQQLAMQQQLANSFFPDTDLDKFAAEDIIDPIAKAKMVALKGIKKVMAQGSIGVAPGMNRQQVSLLAQRLSGGPSSDLQNHVAAGSGQERSAGDPSQPRPNPPTFAQGVINEADQRQYEEWLFHTQQLLQMQLKVLEEQIGVHRKSRKALCAKQRTAKKAGREFPEADAEKLKLVTEQQSKIQKQLDQVRKQQKEHTNLMAEYRNKQQQQQQQQQQQQQQHSAVLALSPSQSPRLLTKLPGQLLPGHGLQPPQGPPGGQAGGLRLTPGGMALPGQPGGPFLNTALAQQQQQQHSGGAGSLAGPSGGFFPGNLALRSLGPDSRLLQERQLQLQQQRMQLAQKLQQQQQQQQQQQHLLGQVAIQQQQQQGPGVQTNQALGPKPQGLMPPSSHQGLLVQQLSPQPPQGPQGMLGPAQVAVLQQQHPGALGPQGPHRQVLMTQSRVLSSPQLAQQGQGLMGHRLVTAQQQQQQQQHQQQGSMAGLSHLQQSLMSHSGQPKLSAQPMGSLQQLQQQQQLQQQQQLQQQQQQQLQQQQQLQQQQLQQQQQQQQLQQQQQQQLQQQQQQLQQQQQQQQQQFQQQQQQQQMGLLNQSRTLLSPQQQQQQQVALGPGMPAKPLQHFSSPGALGPTLLLTGKEQNTVDPAVSSEATEGPSTHQGGPLAIGTTPESMATEPGEVKPSLSGDSQLLLVQPQPQPQPSSLQLQPPLRLPGQQQQQVSLLHTAGGGSHGQLGSGSSSEASSVPHLLAQPSVSLGDQPGSMTQNLLGPQQPMLERPMQNNTGPQPPKPGPVLQSGQGLPGVGIMPTVGQLRAQLQGVLAKNPQLRHLSPQQQQQLQALLMQRQLQQSQAVRQTPPYQEPGTQTSPLQGLLGCQPQLGGFPGPQTGPLQELGAGPRPQGPPRLPAPPGALSTGPVLGPVHPTPPPSSPQEPKRPSQLPSPSSQLPTEAQLPPTHPGTPKPQGPTLEPPPGRVSPAAAQLADTLFSKGLGPWDPPDNLAETQKPEQSSLVPGHLDQVNGQVVPEASQLSIKQEPREEPCALGAQSVKREANGEPIGAPGTSNHLLLAGPRSEAGHLLLQKLLRAKNVQLSTGRGSEGLRAEINGHIDSKLAGLEQKLQGTPSNKEDAAARKPLTPKPKRVQKASDRLVSSRKKLRKEDGVRASEALLKQLKQELSLLPLTEPAITANFSLFAPFGSGCPVNGQSQLRGAFGSGALPTGPDYYSQLLTKNNLSNPPTPPSSLPPTPPPSVQQKMVNGVTPSEELGEHPKDAASARDSERALRDTSEVKSLDLLAALPTPPHNQTEDVRMESDEDSDSPDSIVPASSPESILGEEAPRFPHLGSGRWEQEDRALSPVIPLIPRASIPVFPDTKPYGALGLEVPGKLPVTTWEKGKGSEVSVMLTVSAAAAKNLNGVMVAVAELLSMKIPNSYEVLFPESPARAGTEPKKGEAEGPGGKEKGLEGKSPDTGPDWLKQFDAVLPGYTLKSQLDILSLLKQESPAPEPPTQHSYTYNVSNLDVRQLSAPPPEEPSPPPSPLAPSPASPPTEPLVELPTEPLAEPPVPSPLPLASSPESARPKPRARPPEEGEDSRPPRLKKWKGVRWKRLRLLLTIQKGSGRQEDEREVAEFMEQLGTALRPDKVPRDMRRCCFCHEEGDGATDGPARLLNLDLDLWVHLNCALWSTEVYETQGGALMNVEVALHRGLLTKCSLCQRTGATSSCNRMRCPNVYHFACAIRAKCMFFKDKTMLCPMHKIKGPCEQELSSFAVFRRVYIERDEVKQIASIIQRGERLHMFRVGGLVFHAIGQLLPHQMADFHSATALYPVGYEATRIYWSLRTNNRRCCYRCSIGENNGRPEFVIKVIEQGLEDLVFTDASPQAVWNRIIEPVAAMRKEADMLRLFPEYLKGEELFGLTVHAVLRIAESLPGVESCQNYLFRYGRHPLMELPLMINPTGCARSEPKILTHYKRVFTSIISFDPHNNLMRPHTLNSTSMSKAYQSTFTGETNTPYSKQFVHSKSSQYRRLRTEWKNNVYLARSRIQGLGLYAAKDLEKHTMVIEYIGTIIRNEVANRREKIYEEQNRGIYMFRINNEHVIDATLTGGPARYINHSCAPNCVAEVVTFDKEDKIIIISSRRIPKGEELTYDYQFDFEDDQHKIPCHCGAWNCRKWMN

SEQ ID NO: 61709 - protein, 97 aa, Homo sapiens
MRENVPGEKKPQNGIPLPPQIFNEEQYCGDFDSFFSAKEENIIYSFLGLAPPPDSKEEEGETATEETEEIAMEGAEGEAEEEEETAEGEEPGEDEDS

SEQ ID NO: 61710 - protein, 367 aa, Homo sapiens
  MOD_RES (1)..(1): Any amino acid
XPTVSSGQATPTSPIKKFPTTATKISPKEEERKDESPATWRLGLRKTGSYGALAEITASKEGQKEKDTAGVTRSASSPRLSSSLDNKEKEKDSKGTRLAYVAPTIPRRLASTSDIEEKENRDSSSLRTSSSYTRRKWEDDLKKNSSVNEGSTYHKSSSVPSTTSTPTVTSAAGLQKSLLSSTSTTTKITTGSSSAGTQSSTSNRLWAEDSTEKEKDSVPTAVTIPVAPTVVNAAASTTTLTTTTAGTVSSTTEVRERRRSYLTPVRDEESESQRKARSRQARQSRRSTQGVTLTDLQEAEKTIGRSRSTRTREQENEEKEKEEKEKQDKEKQEEKKESETSREDEYKQKYSRTYDETYQRYRPVSTS

SEQ ID NO: 61711 - protein, 80 aa, Homo sapiens
MTQQPLRGVTSLRFNQDQSCFCCAMETGVRIYNVEPLMEKGHLDHEQVGSMGLVEMLHRSNLLALVGGGSSPKFSEISGS

SEQ ID NO: 61712 - protein, 858 aa, Homo sapiens [sequence omitted]

SEQ ID NO: 61713 - protein, 117 aa, Homo sapiens
  MOD_RES (1)..(1): Any amino acid
XPRTLSPEAKSLLAGLLKKDPKQRLGGGPSDAKEVMEHRFFLSINWQDVVQKKLLPPFKPQVTSEVDTRYFDDEFTAQSITITPPDRFREGFLEEEANVSAGRRNDVWDASNGRSMA

SEQ ID NO: 61714 - protein, 872 aa, Homo sapiens
MRSAAKPWNPAIRAGGHGPDRVRPLPAASSGMKSSKSSTSLAFESRLSRLKRASSEDTLNKPGSTAASGVVRLKKTATAGAISELTESRLRSGTGAFTTTKRTGIPAPREFSVTVSRERSVPRGPSNPRKSVSSPTSSNTPTPTKHLRTPSTKPKQENEGGEKAALESQVRELLAEAKAKDSEINRLRSELKKYKEKRTLNAEGTDALGPNVDGTSVSPGDTEPMIRALEEKNKNFQKELSDLEEENRVLKEKLIYLEHSPNSEGAASHTGDSSCPTSITQESSFGSPTGNQMSSDIDEYKKNIHGNALRTSGSSSSDVTKASLSPDASDFEHITAETPSRPLSSTSNPFKSSKCSTAGSSPNSVSELSLASLTEKIQKMEENHHSTAEELQATLQELSDQQQMVQELTAENEKLVDEKTILETSFHQHRERAEQLSQENEKLMNLLQERVKNEEPTTQEGKIIELEQKCTGILEQGRFEREKLLNIQQQLTCSLRKVEEENQGALEMIKRLKEENEKLNEFLELERHNNNMMAKTLEECRVTLEGLKMENGSLKSHLQGEKQKATEASAVEQTAESCEVQEMLKVARAEKDLLELSCNELRQELLKANGEIKHVSSLLAKVEKDYSYLKEICDHQAEQLSRTSLKLQEKASESDAEIKDMKETIFELEDQVEQHRAVKLHNNQLISELESSVIKLEEQKSDLERQLKTLTKQMKEETEEWRRFQADLQTAVVVANDIKCEAQQELRTVKRKLLEEEEKNARLQKELGDVQGHGRVVTSRAAPPPVDEEPESSEVDAAGRWPGVCVSRTSPTPPESATTVKSLIKSFDLGRPGGAGQNISVHKTPRSPLSGIPVRTAPAAAVSPMQVDEPQK

SEQ ID NO: 61715 - protein, 45 aa, Homo sapiens
MWGFLKRPVVVTADINLSLVALTGMGLLSRLWRLTYPRAVVCFWQ

SEQ ID NO: 61716 - protein, 135 aa, Homo sapiens
MDMGNPGTLSPTKPGSQYYQYSSNNPRRRPLHSSAMEVQTKKVRKVPPGLPSSVYAPSASTADYNRDSPGYPSSKPATSTFPSSFFMQDGHHSSDPWSSSSGMNQPGYAGMLGNSSHIPQSSSYCSLHPHERLSY

SEQ ID NO: 61717 - protein, 67 aa, Homo sapiens
MKKKLVVLGLLAVVLVLVIVGLCLWLPSASKEPDNHVYTRAAVAADAKQCSKIGRDALRDGGSAVDA

SEQ ID NO: 61718 - protein, 1406 aa, Homo sapiens
MKRLLAAAGKGVRGPEPPNPFSERVYTEKDYGTIYFGDLGKIHTAASRGQVQKLEKMTVGKKPVNLNKRDMKKRTALHWACVNGHAEVVTFLVDRKCQLNVLDGEGRTPLMKALQCEREACANILIDAGADLNYVDVYGNTALHYAVYSENLLMVATLLSYGAVIEVQNKASLTPLLLAIQKRSKQTVEFLLTKNANANAFNESKCTALMLAICEGSSEIVGMLLQQNVDVFAEDIHGITAERYAAACGVNYIHQQLLEHIRKLPKNPQNTNPEGTSTGTPDEAAPLAERTPDTAESLLEKTPDEAARLVEGTSAKIQCLGKATSGKFEQSTEETPRKILRPTKETSEKFSWPAKERSRKITWEEKETSVKTECVAGVTPNKTEVLEKGTSNMIACPTKETSTKASTNVDVSSVEPIFSLFGTRTIENSQCTKVEEDFNLATKIISKSAAQNYTCLPDATYQKDIKTINHKIEDQMFPSESKREEDEEYSWDSGSLFESSAKTQVCIPESMYQKVMEINREVEELPEKPSAFKPAVEMQKTVPNKAFELKNEQTLRAAQMFPSESKQKDDEENSWDSESPCETVSQKDVYLPKATHQKEFDTLSGKLEESPVKDGLLKPTCGRKVSLPNKALELKDRETFKAESPDKDGLLKPTCGRKVSLPNKALELKDRETLKAESPDNDGLLKPTCGRKVSLPNKALELKDRETFKAAQMFPSESKQKDDEENSWDFESFLETLLQNDVCLPKATHQKEFDTLSGKLEESPDKDGLLKPTCGMKISLPNKALELKDRETFKAEDVSSVESTFSLFGKPTTENSQSTKVEEDFNLTTKEGATKTVTGQQERDIGIIERAPQDQTNKMPTSELGRKEDTKSTSDSEIISVSDTQNYECLPEATYQKEIKTTNGKIEESPEKPSHFEPATEMQNSVPNKGLEWKNKQTLRADSTTLSKILDALPSCERGRELKKDNCEQITAKMEQTKNKFCVLQKELSEAKEIKSQLENQKAKWEQELCSVRLTLNQEEEKRRNVDILKEKIRPEEQLRKKLEVKQQLEQTLRIQDIELKSVTSNLNQVSHTHESENDLFHENCMLKKEIAMLKLEVATLKHQHQVKENKYFEDIKILQEKNAELQMTLKLKQKTVTKRASQYREQLKVLTAENTMLTSKLKEKQDKEILETEIESHHPRLASALQDHDQSVTSRKNQELAFHSAGDAPLQGIMNVDVSNTIYNNEVLHQPLYEAQRKSKSPKINLNYAGDDLRENALVSEHAQRDRCETQCQMKKAEHMYQNEQDNVDKHTEQQESLEQKLFQLESKNRWLRQQLVYAHKKVNKSKVTINIQFPEMKMQRHLNEKNEEVFNYGNHLKERIDQYEKEKAEREVIVRQLQKKLADLNKQCEASLKVTSHSHSLRHQ

SEQ ID NO: 61719 - protein, 241 aa, Homo sapiens
MQNSHSGVNQLGGVFVNGRPLPDSTRQKIVELAHSGARPCDISRILQTHADAKVQVLDNQNVSNGCVSKILGRYYETGSIRPRAIGGSKPRVATPEVVSKIAQYKRECPSIFAWEIRDRLLSEGVCTNDNIPSVSSINRVLRNLASEKQQMGADGMYDKLRMLNGQTGSWGTRPGWYPGTSVPGQPTQDGCQQQEGGGENTNSISSNGEDSDEAQMRLQLKRKLQRNRTSFTQEQIEALEK

SEQ ID NO: 61720 - protein, 122 aa, Homo sapiens
  MOD_RES (1)..(1): Any amino acid
XQMRLKKAIHLKKLNFLKSQKYAEQVSEPKSDDGLTKRLESASKNTLEKASSQSAEEKESEEVVSCENFNCISETERPEDPAALEDQSQTLQSQRQYACELCGKPFKHPSNLELHKRSHTGR

SEQ ID NO: 61721 - protein, 756 aa, Homo sapiens
MWERWVPVTVLPGCVGCRTVAALASWTVRDVKERIFAETGFPVSEQRLWRGGRELSDWIKIGDLTSKNCHLFVNLQSKGLKGGGRFGQTTPPLVDFLKDILRRYPEGGQILKELIQNAEDAGATEVKFLYDETQYGTETLWSKDMAPYQGPALYVYNNAVFTPEDWHGIQEIARSRKKDDPLKVGRFGIGFNSVYHITDVPCIFSGDQIGMLDPHQTLFGPHESGQCWNLKDDSKEISELSDQFAPFVGIFGSTKETFINGNFPGTFFRFPLRLQPSQLSSNLYNKQKVLELFESFRADADTVLLFLKSVQDVSLYVREADGTEKLVFRVTSSESKALKHERPNSIKILGTAISNYCKKTPSNNITCVTYHVNIVLEEESTKDAQKTSWLVCNSVGGRGISSKLDSLADELKFVPIIGIAMPLSSRDDEAKGATSDFSGKAFCFLPLPPGEESSTGLPVHISGFFGLTDNRRSIKWRELDQWRDPAALWNEFLVMNVVPKAYATLILDSIKRLEMEKSSDFPLSVDVIYKLWPEASKVKVHWQPVLEPLFSELLQNAVIYSISCDWVRLEQVYFSELDENLEYTKTVLNYLQSSGKQIAKVPGNVDAAVQLTAASGTTPVRKVTPAWVRQVLRKCAHLGCAEEKLHLLEFVLSDQAYSELLGLELLPLQNGNFVPFSSSVSDQDVIYITSAEYPRSLFPSLEGRFILDNLKPHLVAALKEAAQTRAQQQLWGYSGFLFDEDSNGKLKMVAVLITSC

SEQ ID NO: 61722 - protein, 27 aa, Homo sapiens
  MOD_RES (1)..(1): Any amino acid
XYSSCSTIFLDDSTASQHYLTMTIISH

SEQ ID NO: 61723 - protein, 123 aa, Homo sapiens
MNFLRRRLSDSSFMANLPNGYMTDLQRPDSSTSSPASPAMERRHPQPLAASFSSPGSSLFSSLSSAMKQAPQATSGLMEPPGPSTPIVQRPRILLVIDDAHTDWSKYFHGKKVNGEIEIRVEQ

SEQ ID NO: 61724 - protein, 853 aa, Homo sapiens
  MOD_RES (1)..(1): Any amino acid
XLGKAWGTPCEMCPAVNTSEYKILCPGGEGFRPNPITVILEDIDECQELPGLCQGGKCINTFGSFQCRCPTGYYLNEDTRVCDDVNECETPGICGPGTCYNTVGNYTCICPPDYMQVNGGNNCMDMRRSLCYRNYYADNQTCDGELLFNMTKKMCCCSYNIGRAWNKPCEQCPIPSTDEFATLCGSQRPGFVIDIYTGLPVDIDECREIPGVCENGVCINMVGSFRCECPVGFFYNDKLLVCEDIDECQNGPVCQRNAECINTAGSYRCDCKPGYRFTSTGQCNDRNECQEIPNICSHGQCIDTVGSFYCLCHTGFKTNDDQTMCLDINECERDACGNGTCRNTIGSFNCRCNHGFILSHNNDCIDVDECASGNGNLCRNGQCINTVGSFQCQCNEGYEVAPDGRTCVDINECLLEPRKCAPGTCQNLDGSYRCICPPGYSLQNEKCEDIDECVEEPEICALGTCSNTEGSFKCLCPEGFSLSSSGRRCQDLRMSYCYAKFEGGKCSSPKSRNHSKQECCCALKGEGWGDPCELCPTEPDEAFRQICPYGSGIIVGPDDSAVDMDECKEPDVCKHGQCINTDGSYRCECPFGYILAGNECVDTDECSVGNPCGNGTCKNVIGGFECTCEEGFEPGPMMTCEDINECAQNPLLCAFRCVNTYGSYECKCPVGYVLREDRRMCKDEDECEEGKHDCTEKQMECKNLIGTYMCICGPGYQRRPDGEGCVDENECQTKPGICENGRCLNTRGSYTCECNDGFTASPNQDECLDVILSLLLLSPAFPSCFFSPRTIGKGTASQRCYKTCVRSAPATGTPSPNRNAAVTEGEAGVPTVRSALSRGLWLSRNSVPMAEDS

SEQ ID NO: 61725 - protein, 724 aa, Homo sapiens
MPFPVTTQGSQQTQPPQKHYGITSPISLAAPKETDCVLTQKLIETLKPFGVFEEEEELQRRILILGKLNNLVKEWIREISESKNLPQSVIENVGGKIFTFGSYRLGVHTKGADIDALCVAPRHVDRSDFFTSFYDKLKLQEEVKDLRAVEEAFVPVIKLCFDGIEIDILFARLALQTIPEDLDLRDDSLLKNLDIRCIRSLNGCRVTDEILHLVPNIDNFRLTLRAIKLWAKRHNIYSNILGFLGGVSWAMLVARTCQLYPNAIASTLVHKFFLVFSKWEWPNPVLLKQPEECNLNLPVWDPRVNPSDRYHLMPIITPAYPQQNSTYNVSVSTRMVMVEEFKQGLAITDEILLSKAEWSKLFEAPNFFQKYKHYIVLLASAPTEKQRLEWVGLVESKIRILVGSLEKNEFITLAHVNPQSFPAPKENPDKEEFRTMWVIGLVFKKTENSENLSVDLTYDIQSFTDTVYRQAINSKMFEVDMKIAAMHVKRKQLHQLLPNHVLQKKKKHSTEGVKLTALNDSSLDLSMDSDNSMSVPSPTSATKTSPLNSSGSSQGRNSPAPAVTAASVTNIQATEVSVPQVNSSESSGGTSSESIPQTATQPAISPPPKPTVSRVVSSTRLVNPPPRSSGNAATSGNAATKIPTPIVGVKRTSSPHKEESPKKTKTEEEQLDTETSTTQSETIQTAASLLASQKTSSTDLSDIPALPANPIPVIKNSIKLRLNR

SEQ ID NO: 61726 - protein, 71 aa, Homo sapiens
MKLYSLSVLYKGEAKVVLLKAAYDVSSFSFFQRSSVQEFMTFTSQLIVERSSKGTRASVKEQALESSGSDP

SEQ ID NO: 61727 - protein, 160 aa, Homo sapiens
MAYHSGYGAHGSKHRARAAPDPPPLFDDTSGGYSSQPGGYPATGADVAFSVNHLLGDPMANVAMAYGSSIASHGKDMVHKELHRFVSVSKLKYFFAVDTAYVAKKLGLLVFPYTHQNWEVQYSRDAPLPPRQDLNAPDLYIPSSPRRCWACVQAQRWCGW

SEQ ID NO: 61728 - protein, 209 aa, Homo sapiens
MAHCVTLVQLSISCDHLIDKDIGSKSDPLCVLLQDVGGGSWAELGRTERVRNCSSPEFSKTLQLEYRFETVQKLRFGIYDIDNKTPELRDDDFLGGAECSLGQIVSSQVLTLPLMLKPGKPAGRGTITVSAQELKDNRVVTMEVEARNLDKKDFLGKSDPFLEFFRQGDGKWHLVYRSEVIKNNLNPTWKRFSVPVQHFCGGNPSTPIQ

SEQ ID NO: 61729 - protein, 144 aa, Homo sapiens
MWLLYLLVPALFCRAGGSIPIPQKLFGEVTSPLFPKPYPNNFETTTVITVPTGYRVKLVFQQFDLEPSEGCFYDYVKISADKKSLGRFCGQLGSPLGNPPGKKEFMSQGNKMLLTFHTDFSNEENGTIMFYKGFLAYYQAVGLW

SEQ ID NO: 61730 - protein, 224 aa, Homo sapiens
EKVFSRRADRHSDFSRLARVLTGNTIALVLGGGGARGCSHIGVLKALEEAGVPVDLVGGTSIGSFIGALYAEERSASRTKQRAREWAKSMTSVLEPVLDLTYPVTSMFTGSAFNRSIHRVFQDKQIEDLWLPYFNVTTDITASAMRVHKDGCVWRYVRASASYCPYLPPLCDPKDGHLLVDGCYVNNVPADIARSMGAKTVIAIDVGSQDETDLSTYGDSLSGW

SEQ ID NO: 61731 - protein, 88 aa, Homo sapiens
MQMVPKFCFPFDVEREPPSPAVQHFTFALTDLAGNRRFGFCRLRAGTQSCLCILSHLPWFEVFYKLLNTVGDLLAQDQVTEAEELLQN

SEQ ID NO: 61732 - protein, 59 aa, Homo sapiens
MASSAASSEHFEKLHEIFRGLHEDLQGVPERLLGTAGTAGRDGGGATLCTPVFPKPHDV

SEQ ID NO: 61733 - protein, 627 aa, Homo sapiens
MAELMLLSEIADPTRFFTDNLLSPEDWGLQNSTLYSGLDEVAEEQTQLFRCPEQDVPFDGSSLDVGMDVSPSEPPWELLPIFPDLQVKSEPSSPCSSSSLSSESSRLSTEPSSEALGVGEVLHVKTESLAPPLCLLGDDPTSSFETVQINVIPTSDDSSDVQTKIEPVSPCSSVNSEASLLSADSSSQAFIGEEVLEVKTESLSPSGCLLWDVPAPSLGAVQISMGPSLDGSSGKALPTRKPPLQPKPVVLTTVPMPSRAVPPSTTVLLQSLVQPPPVSPVVLIQGAIRVQPEGPAPSLPRPERKSIVPAPMPGNSCPPEVDAKLLKRQQRMIKNRESACQSRRKKKEYLQGLEARLQAVLADNQQLRRENAALRRRLEALLAENSELKLGSGNRKVVCIMVFLLFIAFNFGPVSISEPPSAPISPRMNKGEPQPRRHLLGFSEQEPVQGVEPLQGSSQGPKEPQPSPTDQPSFSNLTAFPGGAKELLLRDLDQLFLSSDCRHFNRTESLRLADELSGWVQRHQRGRRKIPQRAQERQSLDTSPSRSLSHGRSHLQLRQSPSNPLDPQKGILWASCNYIATQTVRSQHSWMQLTDGKTHFMLSLSEGTTCCSQPSATTRPPGPRCPW

SEQ ID NO: 61734 - protein, 99 aa, Homo sapiens
MGAPGGKINRPRTELKKKLFKRRRVLNRERRLRHRVVGAVIDQGLITRHHLKKRASSARANITLSGKKRRKLLQQIRLAQKEKTAMEVLRSCPRKSRLF

SEQ ID NO: 61735 - protein, 342 aa, Homo sapiens
MVTKAFVLLAIFAEASAKSCAPNKADVILVFCYPKTIITKIPECPYGWEVHQLALGGLCYNGVHEGGYYQFVIPDLSPKNKSYCGTQSEYKPPIYHFYSHIVSNDTTVIVKNQPVNYSFSCTYHSTYLVNQAAFDQSPYAKFSPLFRVATVHVKNGSMGTFESQLSLNFYTNAKFSIKKEAPFVLEASEIGSDLFAGVEAKGLSIRFKVVLNSCWATPSADFMYPLQWQLINKGCPTDETVLVHENGRDHRATFQFNAFRFQNIPKLSKVWLHCETFICDSEKLSCPVTCDKRKRLLRDQTGGVLVVELSLRSRGFSSLYSFSAHLSGAEGARSRGLPLTSP

SEQ ID NO: 61736 - protein, 1412 aa, Homo sapiens
MVKLDIHTLAHHLKQERLYVNSEKQLIQRLNADVLKTAEKLYRTAWIAKQQRINLDRLIITSAEASPAECCQHAKILEDTQFVDGYKQLGFQETAYGEFLSRLRENPRLIASSLVAGEKLNQENTQSVIYTVFTSLYGNCIMQEDESYLLQVLRYLIEFELKESDNPRRLLRRGTCAFSILFKLFSEGLFSAKLFLTATLHEPIMQLLVEDEDHLETDPNKLIERFSPSQQEKLFGEKGSDRFRQKVQEMVESNEAKLVALVNKFIGYLKQNTYCFPHSLRWIVSQMYKTLSCVDRLEVGEVRAMCTDLLLACFICPAVVNPEQYGIISDAPINEVARFNLMQVGRLLQQLAMTGSEEGDPRTKSSLGKFDKSCVAAFLDVVIGGRAVETPPLSSVNLLEGLSRTVVYITYSQLITLVNFMKSVMSGDQLREDRMALDNLLANLPPAKPGKSSSLEMTPYNTPQLSPATTPANKKNRLPIATRSRSRTNMLMDLHMDHEGSSQETIQEVQPEEVLVISLGTGPQLTPGMMSENEVLNMQLSDGGQGDVPVDENKLHGPSNRSNSVSSLDLEGESVSELGAGPSGSNGVEALQLLEHEQATTQDNLDDKLRKFEIRDMMGLTDDRDISETVSETWSTDVLGSDFDPNIDEDRLQEIAGAAAENMLGSLLCLPGSGSVLLDPCTGSTISETTSEAWSVEVLPSDSEAPDLKQEERLQELESCSGLGSTSDDTDVREVSSRPSTPGLSVVSGISATSEDIPNKIEDLRSECSSDFGGKDSVTSPDMDEITHGAHQLTSPPSQSESLLAMFDPLSSHEGASAVVRPKVHYARPSHPPPDPPILEGAVGGNEARLPNFGSHVLTPAEMEAFKQRHSYPERLVRSRSSDIVSSVRRPMSDPSWNRRPGNEERELPPAAAIGATSLVAAPHSSSSSPSKDSSRGETEERKDSDDEKSDRNRPWWRKRFVSAMPKDDPSPRLSAQAQVAEDILDKYRNAIKRTSPSDGAMANYESTEVMGDGESAHDSPRDEALQNISADDLPDSASQAAHPQDSAFSYRDAKKKLRLALCSADSVAFPVLTHSTRNGLPDHTDPEDNEIVCFLKVQIAEAINLQDKNLMAQLQETMRCVCRFDNRTCRKLLASIAEDYRKRAPYIAYLTRCRQGLQTTQAHLERLLQRVLRDKEVANRYFTTVCVRLLLESKEKKIREFIQDFQKLTAADDKTAQVEDFLQFLYGAMAQDVIWQNASEEQLQDAQLAIERSVMNRIFKLAFYPNQDGDILRDQVLHEHIQRLSKVVTANHRALQIPEVYLREAPWPSAQSEIRTISAYKTPRDKVQCILRMCSTIMNLLSLANEDSVPGADDFVPVLVFVLIKANPPCLLSTVQYISSFYASCLSGEESYWWMQFTAAVEFIKTIDDRK

SEQ ID NO: 61737 - protein, 21 aa, Homo sapiens
MKLTIDHTPERKDEKERIKKC

SEQ ID NO: 61738 - protein, 440 aa, Homo sapiens
MSTIPRHFGLKYKEESYMFKELEKVRQETKKDFLRFKQKLASKPAVDESPVHSLHAPGPARPARVSCAAARTSRRYPSLKGPAMSAAALLQEVLGGAPRPSGLGEAAAPGKTRSFRPRDFYLRSSAFLRHQALKKPPVIASGFGTARPVVLLPPPEPPVKRRARGVLESSRHAAPRRVFHLGREREQSQEVAPLAGPCMAKERKASSVSAEDGYMEASSGRRKVRIRSNFVSESGAREAREAAGLGAQGEQESWPPSDAREAAWQALLPSRVIPTSIEEIIASLQSEAQLASDQTIKELIRSVLGQNYDITMEDISLMGKMYLKTSPMQAETPEIQAEYKFQMGAEESQMSVHKELSETMSSILQIEQEDIEWGPSEAESIVFKPQEISQVQPAEELSKPLEDGQPTSDSKEAKWVSLTHTLYFLKGKITRILANRRKRN

SEQ ID NO: 61739 - protein, 155 aa, Homo sapiens
MCTALSPKVRSGPGLSDMHQYSQWLASRHEANLLPMKEDLALWLTNLLGKEITAETFMEKLDNGALLCQLAETMQEKFKESMDANKPTKNLPLKKIPCKTSAPSGSFFARDNTANFLSWCRDLGVDETCLFESEGLVLHKQPREVCLCLLELGRI

SEQ ID NO: 61740 - protein, 171 aa, Homo sapiens
MSNPSAPPPYEDRNPLYPGPPPPGGYGQPSVLPGGYPAYPGYPQPGYGHPAGYPQPMPPTHPMPMNYGPGHGYDGEERAVSDSFGPGEWDDRKVRHTFIRKVYSIISVQLLITVAIIAIFTFVEPVSAFVRRNVAVYYVSYAVFVVTYLILACCQGPRRRFPWNIILLTLF

SEQ ID NO: 61741 - protein, 904 aa, Homo sapiens
MAAAGGAEGRRADMEAEAAAAPERGGGSCVLCCGDLEATALGRCDHPVCYRCSTKMRVLCEQRYCAVCREELRQVVFGKKLPAFATIPIHQLQHEKKYDIYFADGKVYALYRQLLQHECPRCPELPPFSLFGDLEQHMRRQHELFCCRLCLQHLQIFTYERKWYSRKDLARHRMQGDPDDTSHRGHPLCKFCDERYLDNDELLKHLRRDHYFCHFCDSDGAQDYYSDYAYLREHFREKHFLCEEGRCSTEQFTHAFRTEIDLKAHRTACHSRSRAEARQNRHIDLQFSYAPRHSRRNEGVVGGEDYEEVDRYSRQGRVARAGTRGAQQSRRGSWRYKREEEDREVAAAVRASVAAQQQEEARRSEDQEEGGRPKKEEAAARGPEDPRGPRRSPRTQGEGPGPKETSTNGPVSQEAFSVTGPAAPGCVGVPGALPPPSPKLKDEDFPSLSASTSSSCSTAATPGPVGLALPYAIPARGRSAFQEEDFPALVSSVPKPGTAPTSLVSAWNSSSSSKKVAQPPLSAQATGSGQPTRKAGKGSRGGRKGGPPFTQEEEEDGGPALQELLSTRPTGSVSSTLGLASIQPSKVGKKKKVGSEKPGTTLPQPPPATCPPGALQAPEAPASRAEGPVAVVVNGHMEGPAPARSAPKEPPGLPRPLGSFPCPTPQEDFPALGGPCPPRMPPPPGFSAVVLLKGTPPPPPPGLVPPISKPPPGFSGLLPSPHPACVPSPATTTTTKAPRLLPAPRAYLVPENFRERNLQLIQSIRDFLQSDEARFSEFKSHSGEFRQGLISAAQYYKSCRDLLGENFQKVFNELLVLLPDTAKQQELLSAHTDFCNREKPLSTKSKKNKKSAWQATTQQAGLDCRVCPTCQQVLAHGDASSHQALHAARDDDFPSLQAIARIIT

SEQ ID NO: 61742 - protein, 196 aa, Homo sapiens
MLEPALEDSSSFSPLDSSLPEDIPVFTAAAAATPVPSVVLTRSPPMELQPPVSPQQSECNPVGALQELVVQKGWRLPEYTVTQESGPAHRKEFTMTCRVERFIEIGSGTSKKLAKRNAAAKMLLRVHTVPLDARDGNEVEPDDDHFSIGVGSRLDGLRNRGPGCTWDSLRNSVGEKILSLRSCSLGSLGALGPACC

SEQ ID NO: 61743 - protein, 45 aa, Homo sapiens
MSDPAAFESRLEKRSEFRKQPVGHSRQGDFIKCVEQKDGAQNKLV

SEQ ID NO: 61744 - protein, 77 aa, Homo sapiens
MDLVKNHLMYAVREEVEILKEQIRELVEKNSQLERENTLLKTLASPEQLEKFQSCLSPEEPAPESPQVPEAPGGSAV

SEQ ID NO: 61745 - protein, 704 aa, Homo sapiens
MWEEYPDVYGVRRSNRSRQEPSRFNIKEEASSGSESGSPKRRGQRQLKKQEKWKQEPSEDEQEQGTSAESEPEQKKVKARRPVPRRTVPKPRVKKQPKTQRGKRKKQDSSDEDDDDDEAPKRQTRRRAAKNVSYKEDDDFETDSDDLIEMTGEGVDEQQDNSETIEKVLDSRLGKKGATGASTTVYAIEANGDPSGDFDTEKDEGEIQYLIKWKGWSYIHSTWESEESLQQQKVKGLKKLENFKKKEDEIKQWLGKVSPEDVEYFNCQQELASELNKQYQIVERVIAVKTSKSTLGQTDFPAHSRKPAPSNEPEYLCKWMGLPYSECSWEDEALIGKKFQNCIDSFHSRNNSKTIPTRECKALKQRPRFVALKKQPAYLGGENLELRDYQLEGLNWLAHSWCKNNSVILADEMGLGKTIQTISFLSYLFHQHQLYGPFLIVVPLSTLTSWQREFEIWAPEINVVVYIGDLMSRNTIREYEWIHSQTKRLKFNALITTYEILLKDKTVLGSINWAFLGVDEAHRLKNDDSLLYKTLIDFKSNHRLLITGTPLQNSLKELWSLLHFIMPEKFEFWEDFEEDHGKGRENGYQSLHKVLEPFLLRRVKKDVEKSLPAKVEQILRVEMSALQKQYYKWILTRNYKALAKGTRGSTSGFLNIVMELKKCCNHCYLIKPPEENERENGQEILLSLIRSSGKLILLDKLLTR

SEQ ID NO: 61746 - protein, 58 aa, Homo sapiens
MLPRDERRFKAADLNGDLTATREEFTAFLHPEEFEHMKEIVVLETLEDIDKNGDGFVD

SEQ ID NO: 61747 - protein, 228 aa, Homo sapiens
  MOD_RES (1)..(1): Any amino acid
XEKQERKFEPGKLREGRNIIGLQMGTNKFASQQGMTAYGTRRHLYDPKLGTDQPLDQATISLQMGTNKGASQAGMTAPGTKRQIFEPGLGMEHCDTLNVSLQMGSNKGASQRGMTVYGLPRQVYDPKYCLTPEYPELAPKGRTEQRYSSCPPTPSQVGTPRTRSSPSKAPRAQARPAPTPFPQWEQTACPETQRTHAVWFAATGILCGCDSGVCNESTFFFFYFTGAQ

SEQ ID NO: 61748 - protein, 74 aa, Homo sapiens
  MOD_RES (1)..(1): Any amino acid
XGIQMCSEENGGAWRILDCGSPDIEVHTYPFGWYQKPIAQNNAPSFCPLVVLPSLTEKVFKVREVRGTQLKRME

SEQ ID NO: 61749 - protein, 341 aa, Homo sapiens
MATSGAASAELVIGWCIFGLLLLAILAFCWIYVRKYQSRRESEVVSTITAIFSLAIALITSALLPVDIFLVSYMKNQNGTFKDWANANVSRQIEDTVLYGYYTLYSVILFCVFFWIPFVYFYYEEKDDDDTSKCTQIKTALKYTLGFVVICALLLLVGAFVPLNVPNNKNSTEWEKVKSLFEELGSSHGLAALSFSISSLTLIGMLAAITYTAYGMSALPLNLIKGTRSAAYERLENTEDIEEVEQHIQTIKSKSKDGRPLPARDKRALKQFEERLRTLKKRERHLEFIENSWWTKFCGALRPLKMEFCSCCPGWSPMAQSRLTASSASQVQAILLPQPPK

SEQ ID NO: 61750 - protein, 355 aa, Homo sapiens
MRVMAPRTLILLLSGALALTETWAGSHSMRYFYTAVSRPGRGEPHFIAVGYVDDTQFVRFDSDAASPRGEPRAPWVEQEGPEYWDRETQKYKRQAQTDRVSLRNLRGYYNQSEAGSHIIQRMYGCDVGPDGRLLRGYDQYAYDGKDYIALNEDLRSWTAADTAAQITQRKWEAAREAEQLRAYLEGLCVEWLRRYLKNGKETLQRAEHPKTHVTHHPVSDHEATLRCWALGFYPAEITLTWQWDGEDQTQDTELVETRPAGDGTFQKWAAVVVPSGEEQRYTCHVQHEGLPEPLTLRWEPSSQPTIPIVGIVAGLAVLAVLAVLGAVVAVVMCRRKSSASNSAQGSDESLIACKA

SEQ ID NO: 61751 - protein, 87 aa, Homo sapiens
MHVNGKVALVTGAAQGIGRAFAEALLLKGAKVALVDWNLEAGVQCKAALDEQFEPQKTLFIQCDVADQQQLRGFCYQWNLSWFGLHE

SEQ ID NO: 61752 - protein, 115 aa, Homo sapiens
MDLTKMGMIQLQNPSHPTGLLCKANQMRLAGTLCDVVIMVDSQEFHAHRTVLACTSKMFEILFHRNSQHYTLDFLSPKTFQQILEYAYTATLQAKAEDLDDLLYAAEILEIEYLE

SEQ ID NO: 61753 - protein, 274 aa, Homo sapiens
MGKILPEYLSNWTMEKVRREGVKVMPNAIVQSVGVSSGKLLIKLKDGRKVETDHIVAAVGLEPNVELAKTGGLEIDSDFGGFRVNAELQARSNIWVAGDAACFYDIKLGRRRVEHHDHAVVSGRLAGENMTGAAKPYWHQSMFWSDLGPDVGYEAIGLVDSSLPTVGVFAKATAQDNPKSATEQSGTGIRSESETESEASEITIPPSTPAVPQAPVQGEDYGKGVIFYLRDKVVVGIVLWNIFNRMPIARKIIKDGEQHEDLNEVAKLFNIHED

SEQ ID NO: 61754 - protein, 50 aa, Homo sapiens
KTGDLFAIKVFNNISFLRPVDVQMREFEVLKKLNHKNIVKLFAIEEEKKD

SEQ ID NO: 61755 - protein, 80 aa, Homo sapiens
MVKCCSAIGCASRCLPNSKLKGLTFHVFPTDENIKRKWVLAMKRLDVNAAGIWEPKKGDVLCSRHFKKTDFDRSAPNIKL

SEQ ID NO: 61756 - protein, 156 aa, Homo sapiens
VQQVQTVQQVQHVYPAQVQYVEGSDTVYTNGAIRTTTYPYTETQMYSQNTGGNYFDTQGSSAQVTTVVSSHSMVGTGGIQMGVTGGQLISSSGGTYLIGNSMENSGHSVTHTTRASPATANSVPEMKLLRQITMNRLFPTLNHKLTEGSGPHFQSI

SEQ ID NO: 61757 - protein, 270 aa, Homo sapiens
MAQEKMKLGFKSLPSSTTADGNILRRVNSAPLINGLGFNSQVLQADMLRIRTNRTTFRNRRSLLLPPPPFHGSISRLHQIKQEEAMDLINRETMSEWKLQSEIQISHSWEEGLKLNDNGLQKSSSLKCIDLTPVSSMASSIKKTGKQCFSPSLQTCVSCTGSPSSPIPSPMQQYIIRSQNPTNIIRPSILGPLKRKGEMAFQYQPKKIFQGTTNMLSSDTSQLSENNVYLLPATFDGNDSNAGSSGNSSAEIGTVTNSPVSPSDTGSHLF

SEQ ID NO: 61758 - protein, 534 aa, Homo sapiens
MATAATIPSVATATAAALGEVEDEGLLASLFRDRFPEAQWRERPDVGRYLRELSGSGLERLRREPERLAEERAQLLQQTRDLAFANYKTFIRGAECTERIHRLFGDVEASLGRLLDRLPSFQQSCRNFVKEAEEISSNRRMNSLTLNRHTEILEILEIPQLMDTCVRNSYYEEALELAAYVRRLERKYSSIPVIQGIVNEVRQSMQLMLSQLIQQLRTNIQLPACLRVIGYLRRMDVFTEAELRVKFLQARDAWLRSILTAIPNDDPYFHITKTIEASRVHLFDIITQYRAIFSDEDPLLPPAMGEHTVNESAIFHGWVLQKVSQFLQVLETDLYRGIGGHLDSLLGQCMYFGLSFSRVGADFRGQLAPVFQRVAISTFQKAIQETVEKFQEEMNSYMLISAPAILGTSNMPAAVPATQPGTLQPPMVLLDFPPLACFLNNILVAFNDLRLCCPVALAQDVTGALEDALAKVTKIILAFHRAEEAAFSSGEQELFVQFCTVFLEDLVPYLNRCLQVLFPPAQIAQTLGKRMKIL

SEQ ID NO: 61759 - protein, 147 aa, Homo sapiens
MVVGESGLGKSTLINSLFLTDLYSPEYPGPSHRIKKTVQVEQSKVLIKEGGVQLLLTIVDTPGFGDAVDNSNCWQPVIDYIDSKFEDYLNAESRVNRRQMPDNRVQCCLYFIAPSGHGLKPLDIEFMKRLHEKVNIIPLIAKADTLT

SEQ ID NO: 61760 - protein, 157 aa, Homo sapiens
MEDLGENTMVLSTLRSLNNFISQRVEGGSGLDISTSAPGSLQMQYQQSMQLEERAEQIRSKSHLIQVEREKMQMELSHKRARVELERAASTSARNYEREVDRNQELLTRIRQLQEREAGAEEKMQEQLERNRQCQQNLDAASKRLREKEDSLAQAGE

SEQ ID NO: 61761 - protein, 47 aa, Homo sapiens
  MOD_RES (1)..(1): Any amino acid
XIGCKELVLMEEQDARVPALEPFRVEQVVRTQGAEGEGGTTCNLLCP

SEQ ID NO: 61762 - protein, 133 aa, Homo sapiens
MENEIFTPLLEQFMTSPLVTWVKTFGPLAAGNGTNLDEYVALVDGVFLNQVMLQINPKLESQRVNKKVNNDASLRMHNLSILVRQIKFYYQETLQQLIMMSLPNVLIIGKNPFSGRKRLSSCWIVNKNLSKWK

SEQ ID NO: 61763 - protein, 133 aa, Homo sapiens
MMEEEELEFVEELEAVLQLTPEVQLAIEQVFPSQDPLDRADFNAVEYINTLFPTEQSLANIDEVVNKIRLKIRRLDDNIRTVVRGQTNVGQDGRQRQGLAPGSSRLECGVHSSLSQTPGLKRSSHLRLPSRFF

SEQ ID NO: 61764 - protein, 81 aa, Homo sapiens
  MOD_RES (1)..(1): Any amino acid
XRSKVSFKITLTSDPRLPYKVLSVPESTPFTAVLKFAAEEFKVPAATSAIITNDGIGINPAQTAGEYLKTHRGVGGVIYVN

SEQ ID NO: 61765 - protein, 51 aa, Homo sapiens
MGVKLEIFRMIIYLTFPVAMFWVSNQAEWFEDDVIQRKRELWPPEKFLGAE

SEQ ID NO: 61766 - protein, 57 aa, Homo sapiens
IFANLFPAACTGAHERTFLAVKPDGVQRRLVGEIVRRFERKGFKRPDPSAGLRGAAA

SEQ ID NO: 61767 - protein, 26 aa, Homo sapiens
  MOD_RES (1)..(1): Any amino acid
XDMLILQRKINVCYQVQGKMVQEGDG

SEQ ID NO: 61768 - protein, 57 aa, Homo sapiens
MFCVTPPELETKMNITKGGLVLFSANSNSSCMELSKKIAENKSTNSRVCEGKRCFHH

SEQ ID NO: 61769 - protein, 20 aa, Homo sapiens
  MOD_RES (1)..(1): Any amino acid
XLPVATLEPAPCPPLEPGTQ

SEQ ID NO: 61770 - protein, 99 aa, Homo sapiens
MALCLYLGEGPDVLVYSLDFGGHLRMIKRVQNLLGHYLIHGFRVRPEPNGDLDLEAMVAVFGSKGLRVVKISWGQGHFWELWRSGLWNMSDWIWDARWL

SEQ ID NO: 61771 - protein, 149 aa, Homo sapiens
MTPPLQGPRARFRKKPKALPYRRENSPGDLPPPPLPPPEEEASWALELRAAGSMSSLERERSGERKAVQAVPLAAQRVLHPDEEAWLPYSRPSFLSRGQGTSTCSTAGSNSSRGSSSSRGSRGPGRSRSRSQSRSQSQRPGQKRREEPR

SEQ ID NO: 61772 - protein, 133 aa, Homo sapiens
  MOD_RES (1)..(1): Any amino acid
XGDLEEELKIVTNNLKSLEAQADKYSTKEDKYEEEIKLLEEKLKEAETRAEFAERSVAKLEKTIDDLEESTSIATTEHWFTPDTLALTDTPSPCTEPTHKTPWPTLKPLCTGTPWLSLSDSPLHVGTCGPIKP

SEQ ID NO: 61773 - protein, 100 aa, Homo sapiens
MAETREEETVSAEASGFSDLSDSEFLEFLDLEDAQESKALVNMPGPSSESLGKDDKPISLQNWKRGLDILSPMERFHLKYLYVTDLATQNWCELQTAYGK

SEQ ID NO: 61774 - protein, 75 aa, Homo sapiens
MQRRGALFGMPGGSGGRKMAAGDIGELLVPHMPTIRVPRSGDRVYKNECAFSYDSPVRGASGGALPKRRNSKIFL

SEQ ID NO: 61775 - protein, 40 aa, Homo sapiens
MCDIEEATNQLLDVNLHENQKSVQVTESDLGSESELLVTI

SEQ ID NO: 61776 - protein, 270 aa, Homo sapiens
ECQHRHLCAHGQCRNTEGSFQCVCDQGYRASGLGDHCEDINECLEDKSVCQRGDCINTAGSYDCTCPDGFQLDDNKTCQDINECEHPGLCGPQGECLNTEGSFHCVCQQGFSISADGRTCEDVNECELLSGVCGEAFCENVEGSFLCVCADENQEYSPMTGQCRSRTSTDLDVDVDQPKEEKKECYYNLNDASLCDNVLAPNVTKQECCCTSGVGWGDNCEIFPCPVLGTAEFTEMCPKGKGFVPAGESSSEAGGENYKDADECLLFGQE

SEQ ID NO: 61777 - protein, 585 aa, Homo sapiens
MSDCCSAPGISWEAGVGRPAVPGLELQIRRGAMSEETVSESQFSLKTAALRVFDLPLTWYYSLSQIKFSPVAKKLFVVTAVSAISVIFLAHHFKRKRGKKKGKILPWEPEHLILEYTKRAASDKGSSCSSSRQNLTLSLSSTKDKGSQVCNYANGGLFSKYSGSAQSLASVQSVNSCHSCACGNSNSWDKADEDDIKLVNIPVTTPENLYLMGMELFEEALRRWEQALTFRNRQAEDEACGSIKLGAGDAIAEENVDDIISTEFIHKLEALLQRAYRLQEEFEATLGASDPNSLADDIDKDTDITMKGNVEDFGLRDTLSIASTDSFASAAELAEHREVRHTYSLESLCHCPFYEEAMHLVEEGKIYSRVLRTEMLECLGDSDFLAKLHCIRQAFQVILSESANRIFLAESGRKILSALIVKARKNPKKFEDVFDEMIYFLEQTDHWGSTEMELAARGVKNLNFYDVVLDFILMDSFEDLENPPTSIQNVVNNRWLNSSFKETAVASSCWSVLKQKRQQMKTESHSVAQAGVQWHDLSSLQPLPPRFKRFFCLSLSSSWDYRRLPPCPANLYIFGKDGVSSCWPG

SEQ ID NO: 61778 - protein, 192 aa, Homo sapiens
  MOD_RES (1)..(1): Any amino acid
XKQVTGHPRPEHCTRGWSFLSLLTGFFPPSTRLMPYLTKFLQDSGPSQELARSSQEHLQRTVKYGGRRRMPPPGEMKAFLKGQAIRLLLIHLPGGVDYRTNIQTFTVAAEVQEELCRQMGITEPQEVQEFALFLIKEKSKLGDGASRWGHSPAQGPAGAAPAARRIPQQRGSGPGREPAQPAAPLGDPTALR

SEQ ID NO: 61779 - protein, 156 aa, Homo sapiens
MEEIDRFQVPTAHSEMQPLDPAAASISDGDCDAREGESVAMNYKPSPLQVKLEKQRELARKGSLKNGSMGSPVNQQPKKNNVMARTRLVVPNKGYSSLDQSPDEKPLVALDTDRCVWGLGGSWAAQRNLYSTSGLYRPHLLYCQNWDILQPESLQG

SEQ ID NO: 61780 - protein, 103 aa, Homo sapiens
MCYGKCARCIGHSLVGLALLCIAANILLYFPNGETKYASENHLSRFVWFFSGIVGGGLLMLLPAFVFIGLEQDDCCGCCGHENCGKRCAVGPPALVVKMTPKM

SEQ ID NO: 61781 - protein, 288 aa, Homo sapiens
  MOD_RES (1)..(1): Any amino acid
XAVTEASLLRQCPLLLPQNRSKTVYEGFISAQGRDFHLRIVLPEDLQLKNARLLCSWQLRTILSGYHRIVQQRMQHSPDLMSFMMELKMLLEVALKNRQELYALPPPPQFYSSLIEEIGTLGWDKLVYADTCFSTIKLKAEDASGREHLITLKLKAKYPAESPDYFVDFPVPFCASWTPQVTDQAKMDVKIAVLPSSLISIYSQFLAAIESLKAFWDVMDEIDEKTWVLEPEKPPRSATARRIALGNNVSINIEVDPRHPTMLPECFFLGADHVVKPLGIKLSRNIHL

SEQ ID NO: 61782 - protein, 18 aa, Homo sapiens
MAEKFDCHYCRDPLQGKK

SEQ ID NO: 61783 - protein, 171 aa, Homo sapiens
MGHFKDVVTVFLQEILFSFGPCEDAVITKAAPGASPGRRGEKLLVITVATAETEGYLRFLRSAEFFNYTVRTLGLGEEWRGGDVARTVGGGQKVRWLKKEMEKYADREDMIIMFVDSYDVILAGSPTELLKKFVQSGSRLLFSAESFCWPEWGLAEQYPEVGTGKRFLNSG

SEQ ID NO: 61784 - protein, 390 aa, Homo sapiens
MGRAGLEAPPPPCGVTGTPGARGLQGRVGPRPQSLAFRGCPPRASSLPGSPRCRRRCHTMAFVTRQFMRSVSSSSTASASAKKIIVKHVTVIGGGLMGAGIAQVAAATGHTVVLVDQTEDILAKSKKGIEESLRKVAKKKFAENLKAGDEFVEKTLSTIATSTDAASVVHSTDLVVEAIVENLKVKNELFKRLDKFAAEHTIFASNTSSLQITSIANATTRQDRFAGLHFFNPVPVMKLVEVIKTPMTSQKTFESLVDFSKALGKHPVSCKDTPGFIVNRLLVPYLMEAIRLYERDFQTCGDSNSGLGFSLKGDASKEDIDTAMKLGAGYPMGPFELLDYVGLDTTKFIVDGWHEMDAENPLHQPSPSLNKLVAENKFGKKTGEGFYKYK

SEQ ID NO: 61785 - protein, 152 aa, Homo sapiens
ENPYSSGRISSKETAPGLVVATGNIGPELSYTDIGVFISSDGGNTWRQIFDEEYNVWFLDWGGALVAMKHTPLPVRHLWVSFDEGHSWDKYGFTSVPLFVDGALVEAGMETHIMTDYGYERHGESQCVPAFWYNPASPSKDCSLGQSYLNST

SEQ ID NO: 61786 - protein, 137 aa, Homo sapiens
  MOD_RES (1)..(1): Any amino acid
XTTKEEKETAEHENRELQSKEFLSAKEETPGAGQKQELRSFWSYAFSRRFAWHLVWLSVIQLWHYLFIGTLNSLLTNMAGGDMARVSTYTNAFAFTQFGVLCAPWNGLLMDRLKQKYQKEARKTVSLQSTLASSLGW

SEQ ID NO: 61787 - protein, 60 aa, Homo sapiens
  MOD_RES (1)..(1): Any amino acid
XAERGAGEARLEEAVNRWVLKFYFHEALRAFRGSRFACQALGEGAHRVPIAAGYAVSVAD

SEQ ID NO: 61788 - protein, 251 aa, Homo sapiens
  MOD_RES (1)..(1): Any amino acid
XERKKKSTKGKKRSQPATKTEDYGMGPGRSGPYGVTVPPDLLHHPNPGSITHLNYRQGSIGLYTQNQPLPAGGPRVDPYRPVRLPMQKLPTRPTYPGVLPTTMTGVMGLEPSSYKTSVYRQQQPAVPQGQRLRQQLQQSQGMLGQSSVHQMTPSSSYGLQTSQGYTPYVSHVGLQQHTGPADPTRHLQQRPSGYVHQQAPTYGHGLTSTQRFSHQTLQQTPMISTMTPMSAQGVQAGVRSTAILPEQQQQQ

SEQ ID NO: 61789 - protein, 152 aa, Homo sapiens
  MOD_RES (1)..(1): Any amino acid
XKGRIQARRMKMQRIAALLDLPIQPTTEVLGFGLGSSTSTQHLPFRFYDQGRRGSSDPTVQRSVFASVDKVPGFAVAQCINQHSSPSLSSQSPPSASGSPSGSGSTSHCDSGGTSSSSTPSTAQSPAVRSGRKGRRRVFSLSEADSHGGHWV

SEQ ID NO: 61790 - protein, 25 aa, Homo sapiens
  MOD_RES (1)..(1): Any amino acid
XKVIVEAEDRYKSELRKSLICNKSN

SEQ ID NO: 61791 - protein, 137 aa, Homo sapiens
MSQLSSTLKRYTESARYTDAHYAKSGYGAYTPSSYGANLAASLLEKEKLGFKPVPTSSFLTRPRTYGPSSLLDYDRGRPLLRPDITGGGKRAESQTRGTERPLGSGLSGGSGFPYGVTNNCLSYLPINAYDQGVTLT

SEQ ID NO: 61792 - protein, 35 aa, Homo sapiens
MLGALVWMLVAGFLLALPPSWAAGAPRAGRRPARP

SEQ ID NO: 61793 - protein, 35 aa, Homo sapiens
MWSGGSGKARGWEAAAGGRSSPGRLSAYAPPLVAA

SEQ ID NO: 61794 - protein, 90 aa, Homo sapiens
MDNMSITNTPTSNDACLSIVHSLMCHRQGGESETFAKRAIESLVKKLKEKKDELDSLITAITTNGAHPSKCVTIQRTLDGRLQVAGRKGF

SEQ ID NO: 61795 - protein, 46 aa, Homo sapiens
  MOD_RES (1)..(1): Any amino acid
XSNLQIRETSLDTKSVSEGHLKRNIVVKTVEMRDGEGTHPETSGII

SEQ ID NO: 61796 - protein, 141 aa, Homo sapiens
MYPRDTILVGMEDLSGKGGAVASGVSLFQQLGGWHLNLNCWSNKVPVVQHPHHVHPLTPLITYSNEHFTPGNPPPHLPADVDPKTGIPRPPHPPDISPYYPLSPGTVGQIPHPLGWQGQPVYPITTGGFRHPYPTALTVNA

SEQ ID NO: 61797 - protein, 29 aa, Homo sapiens
MKRNTCDLLSRSKSPAYCDLIFLLWPLKL

SEQ ID NO: 61798 - protein, 258 aa, Homo sapiens
  MOD_RES (1)..(1): Any amino acid
XDSGSDEEEGEAEASSSTPATGVFLKSWVYQPGEDTEEEEDEDSDTGSAEDEREAETSASTPPASAFLKAWVYRPGEDTEEEEDEDVDSEDKEDDSEAALGEAESDPHPSHPDQRAHFRGWGYRPGKETEEEEAAEDWGEAEPCPFRVAIYVPGEKPPPPWAPPRLPLRLQRRLKRPETPTHDPDPETPLKARKVGAESPDSIFFFFLIELESWAVTQAGVQRHDLGSLPTSAAQVQAILVPQPPEYLGLQAHDTTPS

SEQ ID NO: 61799 - protein, 82 aa, Homo sapiens
MTKGTSSFGKRRNKTHTLCRRCGSKAYHLQKSTCGKCGYPAKRKRKYNWSAKAKRRNTTGTGRMRHLKIVYRRFRYSLYVRS

SEQ ID NO: 61800 - protein, 30 aa, Homo sapiens
KYSQKPKLAKALFEYIFHHENDVKTVGNVS

SEQ ID NO: 61801 - protein, 1218 aa, Homo sapiens
MSGGGGGGGSAPSRFADYFVICGLDTETGLEPDELSALCQYIQASKARDGASPFISSTTEGENFEQTPLRRTFKSKVLARYPENVEWNPFDQDAVGMLCMPKGLAFKTQADPREPQFHAFIITREDGSRTFGFALTFYEEVTSKQICSAMQTLYHMHNAEYDVLHAPPADDRDQSSMEDGEDTPVTKLQRFNSYDISRDTLYVSKCICLITPMSFMKACRSVLEQLHQAVTSPQPPPLPLESYIYNVLYEVPLPPPGRSLKFSGVYGPIICQRPSTNELPLFDFPVKEVFELLGVENVFQLFTCALLEFQILLYSQHYQRLMTVAETITALMFPFQWQHVYVPILPASLLHFLDAPVPYLMGLHSNGLDDRSKLELPQEANLCFVDIDNHFIELPEDLPQFPNKLEFVQEVSEILMAFGIPPEGNLHCSESASKLKRLRASELVSDKRNGNIAGSPLHSYELLKENETIARLQALVKRTGVSLEKLEVREDPSSNKDLKVQCDEEELRIYQLNIQIREVFANRFTQMFADYEVFVIQPSQDKESWFTNREQMQNFDKASFLSDQPEPYLPFLSRFLETQMFASFIDNKIMCHDDDDKDPVLRVFDSRVDKIRLLNVRTPTLRTSMYQKCTTVDEAEKAIELRLAKIDHTAIHPHLLDMKIGQGKYEPGFFPKLQSDVLSTGPASNKWTKRNAPAQWRRKDRQKQHTEHLRLDNDQREKYIQEARTMGSTIRQPKLSNLSPSVIAQTNWKFVEGLLKECRNKTKRMLVEKMGREAVELGHGEVNITGVEENTLIASLCDLLERIWSHGLQVKQGKSALWSHLLHYQDNRQRKLTSGSLSTSGILLDSERRKSDASSLMPPLRISLIQDMRHIQNIGEIKTDVGKARAWVRLSMEKKLLSRHLKQLLSDHELTKKLYKRYAFLRCDDEKEQFLYHLLSFNAVDYFCFTNVFTTILIPYHILIVPSKKLGGSMFTANPWICISGELGETQIMQIPRNVLEMTFECQNLGKLTTVQIGHDNSGLYAKWLVEYVMVRNEITGHTYKFPCGRWLGKGMDDGSLERILVGELLTSQPEVDERPCRTPPLQQSPSVIRRLVTISPNNKPKKAQTYYETLEKNEVVPEENWHTRARNFCRFVTAINNTPRNIGKDGKFQMLVCLGARDHLLHHWIALLADCPITAHMYEDVALIKDHTLVNSLIRVLQTLQEFNITLETSLVKGIDI

SEQ ID NO: 61802 - protein, 1493 aa, Homo sapiens
MVDKNIYIIQGEINIVVGAIKRNARWSTHTPLDEERDPLLHSFGHLKEVLNSITELSEIEPNVFLRPFLEVIRSEDTTGPITGLALTSVNKFLSYALIDPTHEGTAEGMENMADAVTHARFVGTDPASDEVVLMKILQVLRTLLLTPVGAHLTNESVCEIMQSCFRICFEMRLSELLRKSAEHTLVDMVQLLFTRLPQFKEEPKNYVGTNMKKLKMRAGGMSDSSKWKKQKRSPRPPRHMTKVTPGSELPTPNGTTLSSNLTGGMPFIDVPTPISSASSEAASAVVSPSTDSGLEFSSQTTSKEDLTDLEQPGSPGYSTATEPGSSELGVPEQPDLQEGTHVEKSQSASVESIPEVLEECTSPADHSDSASVHDMDYVNPRGVRFTQSSQKEGTALVPYGLPCIRELFRFLISLTNPHDRHNSEVMIHMGLHLLTVALESAPVAQCQTLLGLIKDEMCRHLFQLLSIERLNLYAASLRVCFLLFESMREHLKFQMEMYIKKLMEIITVENPKMPYEMKEMALEAIVQLWRIPSFVTELYINYDCDYYCSNLFEELTKLLSKNAFPVSGQLYTTHLLSLDALLTVIDSTEAHCQAKVLNSLTQQEKKETARPSCEIVDGTREASNTERTASDGKAVGMASDIPGLHLPGGGRLPPEHGKSGCSDLEEAVDSGADKKFARKPPRFSCLLPDPRELIEIKNKKKLLITGTEQFNQKPKKGIQFLQEKGLLTIPMDNTEVAQWLRENPRLDKKMIGEFVSDRKNIDLLESFVSTFSFQGLRLDEALRLYLEAFRLPGEAPVIQRLLEAFTERWMNCNGSPFANSDACFSLAYAVIMLNTDQHNHNVRKQNAPMTLEEFRKNLKGVNGGKDFEQDILEDMYHAIKNEEIVMPEEQTGLVRENYVWNVLLHRGATPEGIFLRVPTASYDLDLFTMTWGPTIAALSYVFDKSLEETIIQKAISGFRKCAMISAHYGLSDVFDNLIISLCKFTALSSESIENLPSVFGSNPKAHIAAKTVFHLAHRHGDILREGWKNIMEAMLQLFRAQLLPKAMIEVEDFVDPNGKISLQREETPSNRGESTVLSFVSWLTLSGPEQSSVRGPSTENQEAKRVALECIKQCDPEKMITESKFLQLESLQELMKALVSVTPDEETYDEEDAAFCLEMLLRIVLENRDRVGCVWQTVRDHLYHLCVQAQDFCFLVERAVVGLLRLAIRLLRREEISAQVLLSLRILLLMKPSVLSRVSHQVAYGLHELLKTNAANIHSGDDWATLFTLLECIGSGVKPPAALQATARADAPDAGAQSDSELPSYHQNDVSLDRGYTSDSEVYTDHGRPGKIHRSATDADVVNSGWLVVGKDDVDNSKPGPSRPGPSPLINQYSLTVGLDLGPHDTKSLLKCVESLSFIVRDAAHITPDNFELCVKTLRIFVEDASPRRNVARVTNMTAKGTASRRNPKRDQCFAGLEPPANMPLGAGRVMMMRTKACLPATIRCLYRSVRTC

SEQ ID NO: 61803 - protein, 868 aa, Homo sapiens
MTTRQATKDPLLRGVSPTPSKIPVRSQKRTPFPTVTSCAVDQENQDPRRWVQKPPLNIQRPLVDSAGPRPKARHQAETSQRLVGISQPRNPLEELRPSPRGQNVGPGPPAQTEAPGTIEFVADPAALATILSGEGVKSCHLGRQPSLAKRVLVRGSQGGTTQRVQGVRASAYLAPRTPTHRLDPARASCFSRLEGPGPRGRTLCPQRLQALISPSGPSFHPSTRPSFQELRRETAGSSRTSVSQASGLLLETPVQPAFSLPKGEREVVTHSDEGGVASLGLAQRVPLRENREMSHTRDSHDSHLMPSPAPVAQPLPGHVVPCPSPFGRAQRVPSPGPPTLTSYSVLRRLTVQPKTRFTPMPSTPRVQQAQWLRGVSPQSCSEDPALPWEQVAVRLFDQESCIRSLEGSGKPPVATPSGPHSNRTPSLQEVKIQRIGILQQLLRQEVEGLVGGQCVPLNGGSSLDMVELQPLLTEISRTLNATEHNSGTSHLPGLLKHSGLPKPCLPEECGEPQPCPPAEPGPPEAFCRSEPEIPEPSLQEQLEVPEPYPPAEPRPLESCCRSEPEIPESSRQEQLEVPEPCPPAEPRPLESYCRIEPEIPESSRQEQLEVPEPCPPAEPGPLQPSTQGQSGPPGPCPRVELGASEPCTLEHRSLESSLPPCCSQWAPATTSLIFSSQHPLCASPPICSLQSLRPPAGQAGKELAGKECEHKRSSPHCELHTCPAPTPGNLMLPHLPPWPSLALPQEEGRGCTSSPVLLIGLAVGGGGGEDSTWWKYRTPDLPLNFPCPSGLSNLAPRTLALRERLKSCLTAIHCFHEARLDDECAFYTSRAPPSGPTRVCTNPVATLLEWQDALCFIPVGSAAPQGSP

SEQ ID NO: 61804 - protein, 53 aa, Homo sapiens
TKISEDLGSEKFCVDANQAGAGSWLKYIRVACSCDDQNLTMCQISEQMKVKLE

SEQ ID NO: 61805 - protein, 100 aa, Homo sapiens
MKPHRIRMTHNLLLNYGLYRKMEIYRPHKATAEEMTKYHSDEYIKFLRSIRPDNMSEYSKQMQRFNVGEDCPVFDGLFEFCQLSTGGSVAGAVKLNRQQT

SEQ ID NO: 61806 - protein, 700 aa, Homo sapiens
MSRRKQGNPQHLSQRELITRKDEPSSYICTTCKQPFNSAWFLLQHAQNTHGFRIYLEPGPASSSLTPRLTIPPPLGPEAVAQSPLMNFLGDSNPFNLLRMTGPILRDHPGFGEGRLPGTPPLFSPPPRHHLDPHRLSAEEMGLVAQHPSAFDRVMRLNPMAIDSPAMDFSRRLRELAGNSSTPPPVSPGRGNPMHRLLNPFQPSPKSPFLSTPPLPPMPPGGTPPPQPPAKSKSCEFCGKTFKFQSNLIVHRRSHTGEKPYKCQLCDHACSQASKLKRHMKTHMHKAGSLAGRSDDGLSAASSPEPGTSELAGEGLKAADGDFRHHESDPSLGHEPEEEDEEEEEEEEELLLENESRPESSFSMDSELSRNRENGGGGVPGVPGAGGGAAKALADEKALVLGKVMENVGLGALPQYGELLADKQKRGAFLKRAAGGGDAGDDDDAGGCGDAGAGGAVNGRGGGFAPGTEPFPGLFPRKPAPLPSPGLNSAAKRIKVEKDLELPPAALIPSENVYSQWLVGYAASRHFMKDPFLGFTDARQSPFATSSEHSSENGSLRFSTPPGDLLDGGLSGRSGTASGGSTPHLGGPGPGRPSSKEGRRSDTCEYCGKVFKNCSNLTVHRRSHTGERPYKCELCNYACAQSSKLTRHMKTHGQIGKEVYRCDICQMPFSVYSTLEKHMKKWHGEHLLTNDVKIEQAERS

SEQ ID NO: 61807 - protein, 65 aa, Homo sapiens
MTPGNILTRPASWMAVFNAMPTICFGFQCHVSSVPVFNSMQQPEVKTWGGVVTAAMVIALAVYMG

SEQ ID NO: 61808 - protein, 81 aa, Homo sapiens
MRQAFGQWTQGYGRDDRQVQPCQHRSGLGMDPKRVRRWNKLPAHMVSGRMRRLQGTERTVSLSTRSSRSLCPDTLPPSPAL

SEQ ID NO: 61809 - protein, 167 aa, Homo sapiens
  MOD_RES (1)..(1): Any amino acid
XRTFSDLAAQLHVTPGSAQQRFTQVSDELFQGGPNWGRLVAFFVFGAALCAESVNKEMEPLVGQVQEWMVAYLETQLADWIHSSGGWAEFTALYGDGALEEARRLREGNWASVRTVLTGAVALGALVWSTLFTLPSTTGHISLLAFPGTFSQEELQGPWPGYQNALL

SEQ ID NO: 61810 - protein, 442 aa, Homo sapiens
MKVDHFGFNTVKTFNQRYLVADKYWKKNGGSILFYTGNEGDIIWFCNNTGFMWDVAEELKAMLVFAEHRYYGESLPFGDNSFKDSRHLNFLTSEQALADFAELIKHLKRTIPGAENQPVIAIGGSYGGMLAAWFRMKYPHMVVGALAASAPIWQFEDLVPCGVFMKIVTTDFRKSGPHCSESIHRSWDAINRLSNTGSGLQWLTGALHLCSPLTSQDIQHLKDWISETWVNLAMVDYPYASNFLQPLPAWPIKVVCQYLKNPNVSDSLLLQNIFQALNVYYNYSGQVKCLNISETATSSLGTLGWSYQACTEVVMPFCTNGVDDMFEPHSWNLKELSDDCFQQWGVRPRPSWITTMYGGKNISSHTNIVFSNGELDPWSGGGVTKDITDTLVAVTISEGAHHLDLRTKNALDPMSVLLARSLEVRHMKNWIRDFYDSAGKQH

SEQ ID NO: 61811 - protein, 41 aa, Homo sapiens
MEPKVINQMLSKAAQSGQWKYGQHACFCQKQGSGNNWAYGY

SEQ ID NO: 61812 - protein, 1284 aa, Homo sapiens
MSLSFCGNNISSYNINDGVLQNSCFVDALNLVPHVFLLFITFPILFIGWGSQSSKVQIHHNTWLHFPGHNLRWILTFALLFVHVCEIAEGIVSDSRRESRHLHLFMPAVMGFVATTTSIVYYHNIETSNFPKLLLALFLYWVMAFITKTIKLVKYCQSGLDISNLRFCITGMMVILNGLLMAVEINVIRVRRYVFFMNPQKVKPPEDLQDLGVRFLQPFVNLLSKATYWWMNTLIISAHKKPIDLKAIGKLPIAMRAVTNYVCLKDAYEEQKKKVADHPNRTPSIWLAMYRAFGRPILLSSTFRYLADLLGFAGPLCISGIVQRVNETQNGTNNTTGISETLSSKEFLENAYVLAVLLFLALILQRTFLQASYYVTIETGINLRGALLAMIYNKILRLSTSNLSMGEMTLGQINNLVAIETNQLMWFLFLCPNLWAMPVQIIMGVILLYNLLGSSALVGAAVIVLLAPIQYFIATKLAEAQKSTLDYSTERLKKTNEILKGIKLLKLYAWEHIFCKSVEETRMKELSSLKTFALYTSLSIFMNAAIPIAAVLATFVTHAYASGNNLKPAEAFASLSLFHILVTPLFLLSTVVRFAVKAIISVQKLNEFLLSDEIGDDSWRTGESSLPFESCKKHTGVQPKTINRKQPGRYHLDSYEQSTRRLRPAETEDIAIKVTNGYFSWGSGLATLSNIDIRIPTGQLTMIVGQVGCGKSSLLLAILGEMQTLEGKVHWSNVNESEPSFEATRSRNRYSVAYAAQKPWLLNATVEENITFGSPFNKQRYKAVTDACSLQPDIDLLPFGDQTEIGERGINLSGGQRQRICVARALYQNTNIVFLDDPFSALDIHLSDHLMQEGILKFLQDDKRTLVLVTHKLQYLTHADWIIAMKDGSVLREGTLKDIQTKDVELYEHWKTLMNRQDQELEKDMEADQTTLERKTLRRAMYSREAKAQMEDEDEEEEEEEDEDDNMSTVMRLRTKMPWKTCWRYLTSGGFFLLILMIFSKLLKHSVIVAIDYWLATWTSEYSINNTGKADQTYYVAGFSILCGAGIFLCLVTSLTVEWMGLTAAKNLHHNLLNKIILGPIRFFDTTPLGLILNRFSADTNIIDQHIPPTLESLTRSTLLCLSAIGMISYATPVFLVALLPLGVAFYFIQKYFRVASKDLQELDDSTQLPLLCHFSETAEGLTTIRAFRHETRFKQRMLELTDTNNIAYLFLSAANRWLEVRTDYLGACIVLTASIASISGSSNSGLVGLGLLYALTILLKFQNIGHKKGRSRYMICVSDMKII

SEQ ID NO: 61813 - protein, 723 aa, Homo sapiens
MDLYSTPAAALDRFVARRLQPRKEFVEKARRALGALAAALRERGGRLGAAAPRVLKTVKGGSSGRGTALKGGCDSELVIFLDCFKSYVDQRARRAEILSEMRASLESWWQNPVPGLRLTFPEQSVPGALQFRLTSVDLEDWMDVSLVPAFNVLGQAGSGVKPKPQVYSTLLNSGCQGGEHAACFTELRRNFVNIRPAKLKNLILLVKHWYHQVCLQGLWKETLPPVYALELLTIFAWEQGCKKDAFSLAEGLRTVLGLIQQHQHLCVFWTVNYGFEDPAVGQFLQRQLKRPRPVILDPADPTWDLGNGAAWHWDLLAQEAASCYDHPCFLRGMGDPVQSWKGPGLPRAGCSGLGHPIQLDPNQKTPENSKSLNAVYPRAGSKPPSCPAPGPTGAASIVPSVPGMALDLSQIPTKELDRFIQDHLKPSPQFQEQGGSFGRGTDLRDGCDVELIIFLNCFTDYKDQGPRRAEILDEMRAQLESWWQDQVPSLSLQFPEQNVPEALQFQLVSTALKSWTDVSLLPAFDAVGQLSSGTKPNPQVYSRLLTSGCQEGEHKACFAELRRNFMNIRPVKLKNLILLVKHWYRQVAAQNKGKGPAPASLPPAYALELLTIFAWEQGCRQDCFNMAQGFRTVLGLVQQHQQLCVYWTVNYSTEDPAMRMHLLGQLRKPRPLVLDPADPTWNVGHGSWELLAQEAAALGMQACFLSRDGTSVQPWDVMAEPIL

SEQ ID NO: 61814 - protein, 107 aa, Homo sapiens
KLADLSLRIQQIETTLNILDAKLSSIPGLDDVTVEVSPLNVTSVTNGAHPEATSEQPQGVPVMAIRNKMISEGLDPDLLERPDAPVPDGESEKTVEESSDSESSFSD

SEQ ID NO: 61815 - protein, 63 aa, Homo sapiens
MPVDWKSSHTRTLHLLTLNLSEKGVSDSLLFDTSDDEELREQLDMHSIIVSCVNDEPLFTADQ

SEQ ID NO: 61816 - protein, 84 aa, Homo sapiens
MAKERCLKKSFQDSLEDIKKRMKEKRNKNLAEIGKRRSFIAAPCQIITNTSTLLKNYQDNNKITRKYVPLEWTPIVMTAPEIYL

SEQ ID NO: 61817 - protein, 551 aa, Homo sapiens
QVNGQQGGGSEPAAAAAVVAAGDKWKPPQGTDSIKMENGQSTAAKLGLPPLTPEQQEALQKAKKYAMEQSIKSVLVKQTIAHQQQQLTNLQMAAVTMGFGDPLSPLQSMAAQRQRALAIMCRVYVGSIYYELGEDTIRQAFAPFGPIKSIDMSWDSVTMKHKGFAFVEYEVPEAAQLALEQMNSVMLGGRNIKVGRPSNIGQAQPIIDQLAEEARAFNRIYVASVHQDLSDDDIKSVFEAFGKIKSCTLARDPTTGKHKGYGFIEYEKAQSSQDAVSSMNLFDLGGQYLRVGKAVTPPMPLLTPATPGGLPPAAAVAAAAATAKITAQEAVAGAAVLGTLGTPGLVSPALTLAQPLGTLPQAVMAAQAPGVITGVTPARPPIPVTIPSVGVVNPILASPPTLGLLEPKKEKEEEELFPESERPEMLSEQEHMSISGSSARHMVMQKLLRKQESTVMVLRNMVDPKDIDDDLEGEVTEECGKFGAVNRVIIYQEKQGEEEDAEIIVKIFVEFSIASETHKAIQALNGRWFAGRKVVAEVYDQERFDNSDLSA

SEQ ID NO: 61818 - protein, 50 aa, Homo sapiens
MMQNVHLAPETDEDDLYSGYNDYNPIYDIEELENDAAFQQAVRTSHGRRP

SEQ ID NO: 61819 - protein, 128 aa, Homo sapiens
MLAMLEEDLLALKSPSKENIASVLENYHTESKIDRDKSFILEEHMDKINSCFSANTVEEIIENLQQDGSSFALEQLKVINKMSPTSLKITLRQLMEGSSKTLQEVLTMEYRLSQACMRGHDFHEGVRA

SEQ ID NO: 61820 - protein, 56 aa, Homo sapiens
MTDGKLSTSTNGVAFMGILDGRPGNPLQNLQHVNLKAPRLLSAPEYGPKLKLRALE

SEQ ID NO: 61821 - protein, 164 aa, Homo sapiens
MQNGFSRTLKSGDGITFGVFGSKFRIEYEPLVACSSCLDVSGKTALNQAILQLGGFTVNNWTEECTHLVMVSVKVTIKTICALICGRPIVKPEYFTEFLKAVESKKQPPQIESFYPPLDEPSIGSKNVDLSGRQERKQIFKGKTFIFLNAKQHKKLSSAVVFGG

SEQ ID NO: 61822 - protein, 160 aa, Homo sapiens
  MOD_RES (1)..(1): Any amino acid
XPSELKAHEVKHESGRCHVCVECGLDFSTLTQLKRHLASHQGPTLYQCLECDKSFHYRSQLQNHMLKHQNVRPFVCTECGMEFSQIHHLKQHSLTHKGVKEFKCEVCGREFTLQANMKRLAKAETSLGWAQVWKGGTLEGHDDNNDGIFMSSSKDLNEIT

SEQ ID NO: 61823 - protein, 253 aa, Homo sapiens
MLGITSCSDQQAKEGEGLEGSSTGSSSGNHGGSGGGNGHKPGCEKPGNEARGSGESGIQGFRGQGVSSNMREISKEGNRLLGGSGDNYRGQGSSWGSGGGDAVGGVNTVNSETSPGMFNFDTFWKNFKSKLGFINWDAINKNQVPPPSTRALLYFSRLWEDFKQNTPFLNWKAIIEGADASSLQKRAGRDDQPGAGWQEVAAVTSKNYNYNQHAYPTAYGGKYSVKTPAKGGVSPSSSASRVQPGLLQWVKFW

SEQ ID NO: 61824 - protein, 92 aa, Homo sapiens
MLSVQPDTKPKGCAGCNRKIKDRYLLKALDKYWHEDCLKCACCDCRLGEVGSTLYTKANLILCRRDYLSISSGFMLPFQIRSLYSPGNVKVF

SEQ ID NO: 61825 - protein, 195 aa, Homo sapiens
MDSELMHSIVGSYHKPPERVFVPSFTQNEPSQNCHPANLEVTSPKILHSPNSQALILALKTLQEKIHRLELERTQAEDNLNILSREAAQYKKALENETNERNLAHQELIKQKKDISIQLSSAQSRCTLLEKQLEYTKRMVLNVEREKNMILEQQAQLQREKEQDQMKLYAKLEKLDVLEKECFRLTTTQKTAEDK

SEQ ID NO: 61826 - protein, 126 aa, Homo sapiens
MTKSNGEEPKMGGRMERFQQGVRKRTLLAKKKVQNITKEDVKSYLFRNAFVLLTVTAVIVDIEETEQAISNFSFKYNPWIYPPTIQNELPGSQVLLLSWGTSDEDVTDAGLTTYHLQSCHRNGGAR

SEQ ID NO: 61827 - protein, 97 aa, Homo sapiens
  MOD_RES (1)..(1): Any amino acid
XPNPSPTSPLSPSWPMFSAPSSPMPTSSTSSDSSPVSTPFRKAKALYACKAEHDSELSFTAGTVFDTECPSASTAIFTATPKLRAPPPLTWALPLAA

SEQ ID NO: 61828 - protein, 401 aa, Homo sapiens
EHTIVFLVRLLPETPREAFALWQMTAEDFQPLLGVLLDAGKKSLTYFHRDPRAALQEATFDPQEVRKIFFGSFHKVHVAVGRSKVRLYVDCRKVAERPLGEMGSPPAAGFVTLGRLAKARGPRSSSAAFQLQMLQIVCSDTWADEDRCCELPASRDGETCPAFVSACSCSSETPGPPGPQGPPGLPGRNGTPGEQGFPGPRGEPGPPGQMGPEGPGGQQGSPGTQGRAVQGPVGPPGVKGEKGDHGLPGLQGHPGHQGIPGRVGLQGPKGMRGLEGTAGLPGPPGPRGFQGMAGARGTSGERGPPGTVGPTGLPGPKGERGEKGEPQSLATLYQLVSQACESAIQTHVSKFDSFHENTRPPMPILEQKLEPGTEPLGSPGTRSKALVPGEWGRGGRHLEGR

SEQ ID NO: 61829 - protein, 535 aa, Homo sapiens
MGCLWGLALPLFFCWEVGVSGSSAGPSTRRADTAMTTDDTEVPAMTLAPGHAALETQTLSAETSSRASTPAGPIPEAETRGAKRISPARETRSFTKTSPNFMVLIATSVETSAASGSPEGAGMTTVQTITGSDPEEAIFDTLCTDDISEEAKTLTMDILTLAHTSTEAKGLSSESSASSDGPHPVITPSRASESSASSDGPHPVITPSRASESSASSDGPHPVITPSWSPGSDVTLLAEALVTVTNIEVINCSITETTTSSIPGASDIDLIPTEGVKASSTSDPPALPDSTEAKPHITEVTASAETLSTAGTTESAAPHATVGTPLPTNSATEREVTAPGATTLSGALVTVSRNPLEETSALSVETPSYVKVSGAAPVSIEAGSAVGKTTSFAGSSASSYSPSEAALKNFTPSETPTMDIATKGPFPTSRDPLPSVPPTTTNSSRGTNSTLAKITTSAKTTMKPPTATPTTARTRPTTDVSAGENGGFLLLWLSVASPEDLTDPRVAERLMQQLHRELHAHAPHFQVSLLRVRRG

SEQ ID NO: 61830 - protein, 128 aa, Homo sapiens
  MOD_RES (1)..(1): Any amino acid
XTQESLAEKELQLLVMIHQLSTLRDQLLTAHSEQKNMAAMLFEKQQQQMELARQQQEQIAKQQQQLIQQQHKINLLQQQIQQVNMPYVMIPAFPPSHQPLPVTPDSQLALPIQPIPCKPGLFSLLPFP

SEQ ID NO: 61831 - protein, 151 aa, Homo sapiens
MAGKRSGWSRAALLQLLLGVNLVVMPPTRARSLRFVTLLYRHGDRSPVKTYPKDPYQEEEWPQGFGQLTKEGMLQHWELGQALRQRYHGFLNTSYHRQEVYVRSTDFDRTLMSAEANLAGLFPPNGMQRFNPNISWQPIPVHTVPITEDRD

SEQ ID NO: 61832 - protein, 112 aa, Homo sapiens
MRPADLLQLVLLLDLPRDLGGMGCSSPPCECHQEEDFRVTCKDIQRIPSLPPSTQTLKLIETHLRTIPSHAFSNLPNISRIYVSIDVTLQQLESHSFYNLSKVTHITDTDAL

SEQ ID NO: 61833 - protein, 409 aa, Homo sapiens
MASTEGANNMPKQVEVRMHDSHLGSEEPKHRHLGLRLCDKLGKNLLLTLTVFGVILGAVCGGLLRLASPIHPDVVMLIAFPGDILMRMLKMLILPLIISSLITGLSGLDAKASGRLGTRAMVYYMSTTIIAAVLGVILVLAIHPGNPKLKKQLGPGKKNDEVSSLDAFLDLIRNLFPENLVQACFQQIQTVTKKVLVAPPPDEEANATSAVVSLLNETVTEVPEETKMVIKKGLEFKDGMNVLGLIGFFIAFGIAMGKMGDQAKLMVDFFNILNEIVMKLVIMIMWYSPLGIACLICGKIIAIKDLEVVARQLGMYMVTVIIGLIIHGGIFLPLIYFVVTRKNPFSFFAGIFQAWITALGTASSAGTLPVTFRCLEENLGIDKRVTRFVLPVGATINMDGTALYEAVAA

SEQ ID NO: 61834 - protein, 396 aa, Homo sapiens
  MOD_RES (1)..(1): Any amino acid
XASLLKNDETKALTPASLQKELNNLLKFNPDFAEAHYLSYLNNLRVQDVFSSTHSLLHYFDRLILTGAESKSNGEEGYGRSLRYAALNLAALHCRFGHYQQAELALQEAIRIAQESNDHVCLQHCLSWLYVLGQKRSDSYVLLEHSVKKAVHFGLPYLASLGIQSLVQQRAFAGKTANKLMDALKDSDLLHWKHSLSELIDISIAQKTAIWRLYGRSTMALQQAQMLLSMNSLEAVNAGVQQNNTESFAVALCHLAELHAEQGCFAAASEVLKHLKERFPPNSQHAQLWMLCDQKIQFDRAMNDGKYHLADSLVTGITALNSIEGVYRKAVVLQAQNQMSEAHKLLQKLLVHCQKLKNTEMVIRAVLAIFLPYHRAAHAPAGSGPLQGVPVTVLGL

SEQ ID NO: 61835 - protein, 255 aa, Homo sapiens
MKTRQAFYLHTTKLTRIARRLCREILRPWHAARHPYLPINSAAIKAECTARLPEASQSPLVLKQAVRKPLEAVLRYLETHPRPPKPDPVKSVSSVLSSLTPAKVAPVINNGSPTILGKRSYEQHNGVDGNMKKRLLMPSRGTYLGLANHGQARHMGPSRNLLLNGKSYPTKVRLIRGGSLPPVKRRRMNWIDAPDDVFYMATEETRKIRKLLSSSETKRAARRPYKPIALRQSQALPPRPPPPAPVNDEPIVIED

SEQ ID NO: 61836 - protein, 187 aa, Homo sapiens
PFPEEDPGPDGEGLLKQGLPPAQLEGLKNFLHQLLETVPQNNENPSVDLLPPKSGPLTVPSWEEAPQVPRIPPPVHKTKVPLAMASSLFRVPEPPSSHSQGSGPSSGSPERGGDGLTFPRQLMEVSQLLRLYQARGWGALPAEDLLLYLKRLEHSGTDGRGDNVPRRNTDSRLDSLPGCPSPPCYSP

SEQ ID NO: 61837 - protein, 121 aa, Homo sapiens
MMAQSKANGSHYALTAIGLGMLVLGVIMAMWNLVPGFSAAEKPTAQGSNKTEVGGGILKSKTFSVAYVLVGAGVMLLLLSICLSIRDKRKQRQGEDLAHVQHPTGAGPHAQEEDSQEEEEE

SEQ ID NO: 61838 - protein, 124 aa, Homo sapiens
  MOD_RES (1)..(1): Any amino acid
XKDMIILEKSEFSALRAENEKIKLELHQLKQQVMDEVIKVRTDTKLDFNLEKSRVKELYSLNEKKLLELRTEIVALHAQQDRALTQTDRKIETEVAGLKTMLESHKLDNIKYLAERSPQKRQHT

SEQ ID NO: 61839 - protein, 1364 aa, Homo sapiens
MERPEDSLSLWSLNLSPQFPCLNALRHPLSPGSRVGPEDAMPRIVEQPPDLLVSRGEPATLPCRAEGRPRPNIEWYKNGARVATVREDPRAHRLLLPSGALFFPRIVHGRRARPDEGVYTCVARNYLGAAASRNASLEVAVLRDDFRQSPGNVVVAVGEPAVLECVPPRGHPEPSVSWRKDGARLKEEEGRITIRGGKLMMSHTLKSDAGMYVCVASNMAGERESAAAEVMVLERPSFLRRPVNQVVLADAPVTFLCEVKGDPPPRLRWRKEDGELPTGRYEIRSDHSLWIGHVSAEDEGTYTCVAENSVGRAEASGSLSVHVPPQLVTQPQDQMAAPGESVAFQCETKGNPPPAIFWQKEGSQVLLFPSQSLQPTGRFSVSPRGQLNITAVQRGDAGYYVCQAVSVAGSILAKALLEIKGASLDGLPPVILQGPANQTLVLGSSVWLPCRVTGNPQPSVRWKKDGQWLQGDDLQFKTMANGTLYIANVQEMDMGFYSCVAKSSTGEATWSGWLKMREDWGVSPDPPTEPSSPPGAPSQPVVTEITKNSITLTWKPNPQTGAAVTSYVIEAFSPAAGNTWRTVADGVQLETHTVSGLQPNTIYLFLVRAVGAWGLSEPSPVSEPVRTQDSSPSRPVEDPWRGQQGLAEVAVRLQEPIVLGPRTLQVSWTVDGPVQLVQGFRVSWRVAGPEGGSWTMLDLQSPSQQSTVLRGLPPGTQIQIKVQAQGQEGLGAESLSVTRSIPEEAPSGPPQGVAVALGGDGNSSITVSWEPPLPSQQNGVITEYQIWCLGNESRFHLNRSAAGWARSAMLRGLVPGLLYRTLVAAATSAGVGVPSAPVLVQLPSPPDLEPGLEVGAGLAVRLARVLREPAFLAGSGAACGALLLGLCAALYWRRKQRKELSHYTASFAYTPAVSFPHSEGLSGASSRPPMGLGPAPYSWLADSWPHPSRSPSAQEPRGSCCPSNPDPDDRYYNEAGISLYLAQTARGTAAPGEGPVYSTIDPAGEELQTFHGGFPQHPSGDLGPWSQYAPPEWSQGDSGAKGGKVKLLGKPVQMPSLNWPEALPPPPPSCELSCLEGPEEELEGSSEPEEWCPPMPERSHLTEPSSSGGCLVTPSRRETPSPTPSYGQQSTATLTPSPPDPPQPPTDMPHLHQMPRRVPLGPSSPLSVSQPMLGIREARPAGLGAGPAASPHLSPSPAPSTASSAPGRTWQGNGEMTPPLQGPRARFRKKPKALPYRRENSPGDLPPPPLPPPEEEASWALELRAAGSMSSLERERSGERKAVQAVPLAAQRVLHPDEEAWLPYSRPSFLSRGQGTSTCSTAGSNSSRGSSSSRGSRGPGRSRSRSQSRSQSQRPGQKRREEPR

SEQ ID NO: 61840 - protein, 359 aa, Homo sapiens
  MOD_RES (1)..(1): Any amino acid
XATAMTSAWLAQGTGEGVNDVRKGACASHVSTMASFLKGAHVTINARAEEDVEPECIMEKVAKASGANYSFHKESGRFQDVGPQAPVGSVYQKTNAVSEIKRVGKDSFWAKAEKEEENRRLEEKRRAEEAQRQLEQERRERELREAARREQRYQEQGGEASPQRTWEQQQEVVSRNRNEQESAVHPREIFKQKERAMSTTSISSPQPGKLRSPFLQKQLTQPETHFGREPAAAISRPRADLPAEEPAPSTPPCLVQAEEEAVYEEPPEQETFYEQPPLVQQQGAGSEHIDHHIQGQGLSGQGLCARALYDYQAADDTEISFDPENLITGIEVIDEGWWRGYGPDGHFGMFPANYVELIE

SEQ ID NO: 61841 - protein, 103 aa, Homo sapiens
MLKKQSAGLVLWGAILFVAWNALLLLFFWTRPAPGRPPSVSALDGDPASLTREVIRLAQDAEVELERQRGLLQQIGDALSSQRGRVPTAAPPAQPRVPVTPAP

SEQ ID NO: 61842 - protein, 123 aa, Homo sapiens
MAAVELEWIPETLYNTAISAVVDNYIRSRRDIRSLPENIQFDVYYKLYQQGRLCQLGSEFCELEVFAKVLRALDKRHLLHHCFQALMDHGVKVASVLAYSFSRRCSYIAESDAAVKEKAIQVG

SEQ ID NO: 61843 - protein, 1370 aa, Homo sapiens
MSETLGDELEILRGKMMQRRPRSAEVKYFYFFKILLRLRLAILKYLFIDDKGILFVSSRKHLPTLPTLLSRLKLFLVKDPLLDFKGQIFTEANFSRECFSLQETLEAFVKEDFCMDKVNFCQEKLEDTICLNEPSSFLIEYEFLIPPSLKPEIDIPSLSELKELLNPVPEIINYVDEKEKLFERDLTNKHGIEDIGDIKFSSTEILTIQSQSEPEECSKPGELEMPLTPLFLTCQHSSVNSLRTELQTFPLSPVCKINLLTAEESANEYYMMWQLERCRSPLNPFLLTVPRIQEPHSQYSVTDLKKIFSVKEESLVINLEKAEWWKQAGLNLKMMETLEHLNTYLCHDNLSSNDTKIEIFLPTKVLQLESCLEHKSHSSPIALIDEKSTNAHLSLPQKSPSLAKEVPDLCFSDDYFSDKGAAKEEKPKNDQEPVNRIIQKKENNDHFELDCTGPSIKSPSSSIIKKASFEHGKKQENDLDLLSDFIMLRNKYKTCTSKTEVTNSDEKHDKEACSLTLQEESPIVHINKTLEEINQERGTDSVIEIQASDSQCQAFCLLEAAASPILKNLVSLCTLPTANWKFATVIFDQTRFLLKEQEKVVSDAVRQGYLSKAKDIYNSILGPYLGDIWRQLEIVQFIRGKKPETNYKIQELQCQILSWMQSQQQIKVLIIIRMDSDGEKHFLIKILNKIEGLTLTVLHSNERKDFLESEGVLRGTSSCVVVHNQYIGADFPWSNFSFVVEYNYVEDSCWTKHCKELNIPYMAFKVILPDTVLERSTLLDRFGGFLLEIQIPYVFFASEGLLNTPDILQLLESNYNISLVERGCSESLKLFGSSECYVVVTIDEHTAIILQDLEELNYEKASDNIIMRLMALSLQYRYCWIILYTKETLNSEYLLTEKTLHHLALIYAALVSFGLNSEELDVKLIIAPGVEATALIIRQIADHSLMTSKRDPHEWLDKSWLKVSPSEEEMYLLDFPCINPLVAQLMLNKGPSLHWILLATLCQLQELLPEVPEKVLKHFCSITSLFKIGSSSITKSPQISSPQENRNQISTLSSQSSASDLDSVIQEHNEYYQYLGLGETVQEDKTTILNDNSSIMELKEISSFLPPVTSYNQTSYWKDSSCKSNIGQNTPFLINIESRRPAYNSFLNHSDSESDVFSLGLTQMNCETIKSPTDTQKRVSVVPRFINSQKRRTHEAKGFINKDVSDPIFSLEGTQSPLHWNFKKNIWEQENHPFNLQYGAQQTACNKLYSQKGNLFTDQQKCLSDESEGLTCESSKDETFWRELPSVPSLDLFRASDSNANQKEFNSLYFYQRAGKSLGQKRHHESSFNSGDKESLTGFMCSQLPQFKKRRLAYEKVPGRVDGQTRLRFF

SEQ ID NO: 61844 - protein, 544 aa, Homo sapiens
MPVRGAAVQAKIYNSPLENHLVDSTFVPKPAVMREESGMPPPWDASLLENEFFQVLDDLDSKLAQEQSASSVNTRTPLNYGSRTQFGHFYSSGNRHGNITERHKKHYNETSNMSIYDILRPGTPREGFKTFSPRTSTIYDMYRTREPRVFKEDYVQKNTFGSTSLCFDSRQRSALPATGHFTARSLHFPATTQSKSGFIPPRHQQSPKRTPLSSIIWNRSDSSRDRENQEEFLRAPSPMEIDPADKYVYPRGFQENKRYESYHSQNVYQRVSLNAPMENAMSPDTFENSENMPFYHQSNTFTRSFFSNTFGRSGEQRRFGQGPFWGQEKGHSFWSDFHRSRKSFSSSDRDFEMISMEANSVSAIHGHNVSSEHWESFSSGYGTDVSRGQEEPHPWQFDFQRSTLDSMVVSHGNETQLTPHFGTPNVCSMTGSSYHVKSSELVSQQDSSPVEVHINKEASSFGIAQTLASSFKTSFSQISDDRRNPQSPNLQNPTVTLQKIFPNKPASHPMRSHTEVTVTSSNSVDSLPLAKSQPNILVTEVNNE

SEQ ID NO: 61845 - protein, 184 aa, Homo sapiens
MATVGEWSCVRCTFLNPAGQRQCSICEAPRHKPDLNHILRLSVEEQKWPCARCTFRNFLGKEACEVCGFTPEPAPGAAFLPVLNGVLPKPPAILGEPKGSCQEEAGPVRTAGLVATEPARGQCEDKDEEEKEEQEEEEGAAEPRGGWACPRCTLHNTPVASSCSVCGGPRRLSLPRIPPEALVV

SEQ ID NO: 61846 - protein, 65 aa, Homo sapiens
MALPPSPLAMEYVNDFDLMKFEVKREPSEGRPGPPTASLGSTPYSSVPPSPTFSEPGMVGATEGT

SEQ ID NO: 61847 - protein, 406 aa, Homo sapiens
MALTAHPSCLLALLVAGLAQGIRGPLRAQDLGPQPLELKEAFKLFQIQFNRSYLSPEEHAHRLDIFAHNLAQAQRLQEEDLGTAEFGVTPFSDLTGNYGTNSWSGRGRTGRRGQNGDLSGPVCSPEEEFGQLYGYRRAAGGVPSMGREIRSEEPEESVPFSCDWRKVASAISPIKDQKNCNCCWAMAAAGNIETLWRISFWDFVDVSVQELLDCGRCGDGCHGGFVWDAFITVLNNSGLASEKDYPFQGKVRAHRCHPKKYQKVAWIQDFIMLQNNEHRIAQYLATYGPITVTINMKPLQLYRKGVIKATPTTCDPQLVDHSVLLVGFGSVKSEEGIWAETVSSQSQPQPPHPTPYWILKNSWGAQWGEKGYFRLHRGSNTCGITKFPLTARVQKPDMKPRVSCPP

SEQ ID NO: 61848 - protein, 190 aa, Homo sapiens
  MOD_RES (1)..(1): Any amino acid
XQSLYTNRELFPKLELFTNRFKDRIVSMTLDKEYDVAVEAIRLVTLILQLFSRHDPQAEEALAKRRGRNSPNGNLIRMLVLFFLESELHEHAAYLVDSLWESSQELLKDWECMTELLLEEPVQGEEAMSDRQESALIELMVCTIRQAAEAHPPVGRGTGKRVLTAKERKTQIDDRNKLTEHFIITLPMLL

SEQ ID NO: 61849 - protein, 101 aa, Homo sapiens
MMSASRLAGTLIPAMAFLSCVRPESWEPCVEVVPNITYQCMELNFYKIPDNLPFSTKNLDLSFNPLRHLGSYSFFSFPELQVLDLSRCHCYSFTCSFCKSL

SEQ ID NO: 61850 - protein, 1797 aa, Homo sapiens
MTTMLQKSDSNASFLRAARAGNLDKVVEYLKGGIDINTCNQNGLNALHLAAKEGHVGLVQELLGRGSSVDSATKKGNTALHIASLAGQAEVVKVLVKEGANINAQSQNGFTPLYMAAQENHIDVVKYLLENGANQSTATEDGFTPLAVALQQGHNQAVAILLENDTKGKVRLPALHIAARKDDTKSAALLLQNDHNADVQSKMMVNRTTESGFTPLHIAAHYGNVNVATLLLNRGAAVDFTARNGITPLHVASKRGNTNMVKLLLDRGGQIDAKTRDGLTPLHCAARSGHDQVVELLLERGAPLLARTKNGLSPLHMAAQGDHVECVKHLLQHKAPVDDVTLDYLTALHVAAHCGHYRVTKLLLDKRANPNARALNGFTPLHIACKKNRIKVMELLVKYGASIQAITESGLTPIHVAAFMGHLNIVLLLLQNGASPDVTNIRGETALHMAARAGQVEVVRCLLRNGALVDARAREEQTPLHIASRLGKTEIVQLLLQHMAHPDAATTNGYTPLHISAREGQVDVASVLLEAGAAHSLATKKGFTPLHVAAKYGSLDVAKLLLQRRAAADSAGKNGYTPLHIAAKKNQMQIASTLLNYGAETNIVTKQGVTPLHLASQEGHTDMVTLLLDKGANIHMSTKSGLTSLHLAAQEDKVNVADILTKHGADQDAHTKLGYTPLIVACHYGNVKMVNFLLKQGANVNAKTKNGYTPLHQAAQQGHTHIINVLLQHGAKPNATTANGNTALAIAKRLGYISVVDTLKVVTEEVTTTTTTITEKHKLNVPETMTEVLDVSDEEGDDTMTGDGGEYLRPEDLKELGDDSLPSSQFLDGMNYLRYSLEGGRSDSLRSFSSDRSHTLSHASYLRDSAVMDDSVVIPSHQVSTLAKEAERNSYRLSWGTENLDNVALSSSPIHSGRASPCLERDNSSFLVSFMVDARGGAMRGCRHNGLRIIIPPRKCTAPTRVTCRLVKRHRLATMPPMVEGEGLASRLIEVGPSGAQFLGPVIVEIPHFAALRGKERELVVLRSENGDSWKEHFCDYTEDELNEILNGMDEVLDSPEDLEKKRICRIITRDFPQYFAVVSRIKQDSNLIGPEGGVLSSTVVPQVQAVFPEGALTKRIRVGLQAQPMHSELVKKILGNKATFSPIVTLEPRRRKFHKPITMTIPVPKASSDVMLNGFGGDAPTLRLLCSITGGTTPAQWEDITGTTPLTFVNECVSFTTNVSARFWLIDCRQIQESVTFASQVYREIICVPYMAKFVVFAKSHDPIEARLRCFCMTDDKVDKTLEQQENFAEVARSRDVEVLEGKPIYVDCFGNLVPLTKSGQHHIFSFFAFKENRLPLFVKVRDTTQEPCGRLSFMKEPKSTRGLVHQAICNLNITLPIYTKESESDQEQEEEIDMTSEKNPQDEQERIEERLAYIADHLGFSWTELARELDFTEEQIHQIRIENPNSLQDQSHALLKYWLERDGKHATDTNLVECLTKINRMDIVHLMETNTEPLQERISHSYAEIEQTITLDHSEGFSVLQEELCTAQHKQKEEQAVSKESETCDHPPIVSEEDISVGYSTFQDGVPKTEGDSSATALFPQTHKEQVQQDFSGKMQDLPEESSLEYQQEYFVTTPGTETSETQKAMIVPSSPSKTPEEVSTPAEEEKLYLQTPTSSERGGSPIIQEPEEPSEHREESSPRKTSLVIVESADNQPETCERLDEDAAFEKGDDMPEIPPETVTEEEYIDEHGHTVVKKVTRKIIRRYVSSEGTEKEEIMVQGMPQEPVNIEEGDGYSKVIKRVVLKSDTEQSEDNNE

SEQ ID NO: 61851 - protein, 456 aa, Homo sapiens
MAAAAECDVVMAATEPELLDDQEAKREAETFKEQGNAYYAKKDYNEAYNYYTKAIDMCPKNASYYGNRAATLMMLGRFREALGDAQQSVRLDDSFVRFKNANAVMEYEKIAETDFEKRDFRKVVFCMDRALEFAPACHRFKILKAECLAMLGRYPEAQSVASDILRMDSTNADALYVRGLCLYYEDCIEKAVQFFVQALRMAPDHEKACIACRNAKALKAKKEDGNKAFKEGNYKLAYELYTEALGIDPNNIKTNAKLYCNRGTVNSKLRKLDDAIEDCTNAVKLDDTYIKAYLRRAQCYMDTEQYEEAVRDYEKVYQTEKTKEHKQLLKNAQLELKKSKRKDYYKILGVDKNASEDEIKKAYRKRALMHHPDRHSGASAEVQKEEEKKFKEVGEAFTILSDPKKKTRYDSGQDLDEEGMNMGDFDPNNIFKAFFGGPGGFSFEASGPGNFFFQFG

SEQ ID NO: 61852 - protein, 279 aa, Homo sapiens
MVLASLELLREQWIRAKYERQEFIYPEKQEPYSAGYREGFLWKRGRDNGQFLSRKFVLTEREGALKYFNRNDAKEPKAVMKIEHLNATFQPAKIGHPHGLQVTYLKDNSTRNIFIYHEDGKEIVDWFNALRAARFHYLQVAFPGAGDADLVPKLSRNYLKEGYMEKTGPKQTEGFRKRWFTMDDRRLMYFKDPLDAFARGEVFIGSKESGYTVLHGFPPSTQGHHWPHGITIVTPDRKFLFACETESDQREWVAAFQKAVDRPMLPQEYAVEAHFKHKP

SEQ ID NO: 61853 - protein, 250 aa, Homo sapiens
MDRPDEGPPAKTRRLSSSESPQRDPPPPPPPPPLLRLPLPPPQQRPRLQEETEAAQIIKNDLWVNPLRYYLRERGSRIKRKKQEMKKRKTRGRCEVVIMEDAPDYYAVEDIFSEISDIDETIHDIKISDFMETTDYFETTDNEITDINENICDSENPDHNEVPNNETTDNNESADDHETTDNNESADDNNENPEDNNKNTDDNEENPNNNENTYGNNFFKGGFWGSHGNNQDSSDSDNEADEASDDEDND

SEQ ID NO: 61854 - protein, 608 aa, Homo sapiens
MVFQTRYPSWIILCYIWLLRFAHTGEAQAAKEVLLLDSKAQQTELEWISSPPNGWEEISGLDENYTPIRTYQVCQVMEPNQNNWLRTNWISKGNAQRIFVELKFTLRDCNSLPGVLGTCKETFNLYYYETDYDTGRNIRENLYVKIDTIAADESFTQGDLGERKMKLNTEVREIGPLSKKGFYLAFQDVGACIALVSVKVYYKKCWSIIENLAIFPDTVTGSEFSSLVEVRGTCVSSAEEEAENAPRMHCSAEGEWLVPIGKCICKAGYQQKGDTCEPCGRGFYKSSSQDLQCSRCPTHSFSDKEGSSRCECEDGYYRAPSDPPYVACTRPPSAPQNLIFNINQTTVSLEWSPPADNGGRNDVTYRILCKRCSWEQGECVPCGSNIGYMPQQTGLEDNYVTVMDLLAHANYTFEVEAVNGVSDLSRSQRLFAAVSITTGQAAPSQVSGVMKERVLQRSVELSWQEPEHPNGVITEYEIKYYEKDQRERTYSTVKTKSTSASINNLKPGTVYVFQIRAFTAAGYGNYSPRLDVATLEEATGKMFEAVSSEQNPVIIIAVVAVAGTIILVFMVFGFIIGRRHCGYSKADQEGDEELYFHSLVTNEHLSVL

SEQ ID NO: 61855 - protein, 92 aa, Homo sapiens
  MOD_RES (1)..(1): Any amino acid
XMAALDSKASGKMGMRAVVYYMTTTIIAVVIGIIIVIIIHPGKGTKENMHREGKIVRVTAADAFLDLISLKPTMRREALKCPSRPTKRLWVL

SEQ ID NO: 61856 - protein, 1577 aa, Homo sapiens
MPARTAPARVPTLAVPAISLPDDVRRRLKDLERDSLTEKECVKEKLNLLHEFLQTEIKNQLCDLETKLRKEELSEEGYLAKVKSLLNKDLSLENGAHAYNREVNGRLENGNQARSEARRVGMADANSPPKPLSKPRTPRRSKSDGEAKPEPSPSPRITRKSTRQTTITSHFAKGPAKRKPQEESERAKSDESIKEEDKDQDEKRRRVTSRERVARPLPAEEPERAKSGTRTEKEEERDEKEEKRLRSQTKEPTPKQKLKEEPDREARAGVQADEDEDGDEKDEKKHRSQPKDLAAKRRPEEKEPEKVNPQISDEKDEDEKEEKRRKTTPKEPTEKKMARAKTVMNSKTHPPKCIQCGQYLDDPDLKYGQHPPDAVDEPQMLTNEKLSIFDANESGFESYEALPQHKLTCFSVYCKHGHLCPIDTGLIEKNIELFFSGSAKPIYDDDPSLEGGVNGKNLGPINEWWITGFDGGEKALIGFSTSFAEYILMDPSPEYAPIFGLMQEKIYISKIVVEFLQSNSDSTYEDLINKIETTVPPSGLNLNRFTEDSLLRHAQFVVEQVESYDEAGDSDEQPIFLTPCMRDLIKLAGVTLGQRRAQARRQTIRHSTREKDRGPTKATTTKLVYQIFDTFFAEQIEKDDREDKENAFKRRRCGVCEVCQQPECGKCKACKDMVKFGGSGRSKQACQERRCPNMAMKEADDDEEVDDNIPEMPSPKKMHQGKKKKQNKNRISWVGEAVKTDGKKSYYKKVCIDAETLEVGDCVSVIPDDSSKPLYLARVTALWEDSSNGQMFHAHWFCAGTDTVLGATSDPLELFLVDECEDMQLSYIHSKVKVIYKAPSENWAMEGGMDPESLLEGDDGKTYFYQLWYDQDYARFESPPKTQPTEDNKFKFCVSCARLAEMRQKEIPRVLEQLEDLDSRVLYYSATKNGILYRVGDGVYLPPEAFTFNIKLSSPVKRPRKEPVDEDLYPEHYRKYSDYIKGSNLDAPEPYRIGRIKEIFCPKKSNGRPNETDIKIRVNKFYRPENTHKSTPASYHADINLLYWSDEEAVVDFKAVQGRCTVEYGEDLPECVQVYSMGGPNRFYFLEAYNAKSKSFEDPPNHARSPGNKGKGKGKGKGKPKSQACEPSEPEIEIKLPKLRTLDVFSGCGGLSEGFHQAGISDTLWAIEMWDPAAQAFRLNNPGSTVFTEDCNILLKLVMAGETTNSRGQRLPQKGDVEMLCGGPPCQGFSGMNRFNSRTYSKFKNSLVVSFLSYCDYYRPRFFLLENVRNFVSFKRSMVLKLTLRCLVRMGYQCTFGVLQAGQYGVAQTRRRAIILAAAPGEKLPLFPEPLHVFAPRACQLSVVVDDKKFVSNITRLSSGPFRTITVRDTMSDLPEVRNGASALEISYNGEPQSWFQRQLRGAQYQPILRDHICKDMSALVAARMRHIPLAPGSDWRDLPNIEVRLSDGTMARKLRYTHHDRKNGRSSSGALRGVCSCVEAGKACDPAARQFNTLIPWCLPHTGNRHNHWAGLYGRLEWDGFFSTTVTNPEPMGKQGRVLHPEQHRVVSVRECARSQGFPDTYRLFGNILDKHRQLK

SEQ ID NO: 61857 - protein, 781 aa, Homo sapiens
MSTRTPLPTVNERDTENHTSHGDGRQEVTSRTSRSGARCRNSIASCADEQPHIGNYRLLKTIGKGNFAKVKLARHILTGREVAIKIIDKTQLNPTSLQKLFREVRIMKILNHPNIVKLFEVIETEKTLYLIMEYASGGEVFDYLVAHGRMKEKEARSKFRQIVSAVQYCHQKRIVHRDLKAENLLLDADMNIKIADFGFSNEFTVGGKLDTFCGSPPYAAPELFQGKKYDGPEVDVWSLGVILYTLVSGSLPFDGQNLKELRERVLRGKYRIPFYMSTDCENLLKRFLVLNPIKRGTLEQIMKDRWINAGHEEDELKPFVEPELDISDQKRIDIMVGMGYSQEEIQESLSKMKYDEITATYLLLGRKSSELDASDSSSSSNLSLAKVRPSSDLNNSTGQSPHHKVQRSVSSSQKQRRYSDHAGPAIPSVVAYPKRSQTSTADSDLKEDGISSRKSSGSAVGGKGIAPASPMLGNASNPNKADIPERKKSSTVPSSNTASGGMTRRNTYVCSERTTADRHSVIQNGKENSLTEMFAYAASPASVCTSTCRLRHQKSMSMSASGHPKMMLPPIDSEGDNFKAITIPDQRTPVASTHSISSAATPDRIRFPRGTASRSTFHGQPRERRTATYNGPPASPSLSHEATPLSQTRSRGSTNLFSKLTSKLTRSRNVSAEQKDENKEAKPRSLRFTWSMKTTSSMDPGDMMREIRKVLDANNCDYEQRERFLLFCVHGDGHAENLVQWEMEVCKLPRLSLNGVRFKRISGTSIAFKNIASKIANELKL

SEQ ID NO: 61858 - protein, 132 aa, Homo sapiens
MTDSKYFTTNKKGEIFELKAELNNEKKEKRKEAVKKVIAAMTVGKDVSSLFPDVVNCMQTDNLELKKLVYLYLMNYAKSQPDMAIMAVNSFVKDCEDPNPLIRALAVRTMGCIRVDKITEYLCEPLRKCLKD

SEQ ID NO: 61859 - protein, 235 aa, Homo sapiens
MMPEFSPQQVWEKFLSSETPRINVFMAVPTIYTKLMEYYDRHFTQPHAQDFLRAVCEEKIRLMVSGSAALPLPVLEKWKNITGHTLLERYGMTEIGMALSGPLTTAVRLPGSVGTPLPGVQVRIVSENPQREACSYTIHAEGDERGTKVTPGFEEKEGELLVRGPSVFREYWNKPEETKSAFTLDGWFKTGDTVVFKDGQYWIRGRTSVDIIKTGGYKVSALEVEWHLLAHPSIT

SEQ ID NO: 61860 - protein, 191 aa, Homo sapiens
MSQWNQVQQLEIKFLEQVDQFYDDNFPMEIRHLLAQWIENQDWEAASNNETMATILLQNLLIQLDEQLGRVSKEKNLLLIHNLKRIRKVLQGKFHGNPMHVAVVISNCLREERRILAAANMPVQGPLEKSLQSSSVSERQRNVEHKVAAIKNSVQMTEQDTKYLEDLQDEFDYRYKTIQTMESSSTIQMLA

SEQ ID NO: 61861 - protein, 124 aa, Homo sapiens
MAGVSFSGHRLELLAAYEEVIREESAADWALYTYEDGSDDLKLAASGEGGLQELSGHFENQKVMYGFCSVKDSQAALPKYVLINWVGEDVPDARKCACASHVAKVAEFFQGVDVIVNASSVEDI

SEQ ID NO: 61862 - protein, 253 aa, Homo sapiens
MWQLLLPTALLLLVSAGMRTDLPKAVVFLEPQWYRVLEKDSVTLKCQGAYSPEDNSTQWFHNESLISSQASSYFIDAATVDDSGEYRCQTNLSTLSDPVQLEVHIGWLLLQAPRWVFKEEDPIHLRCHSWKNTALHKVTYLQNGKGRKYFHHNSDFYIPKATLKDSGSYFCRGLFGSKNVSSETVNITITQGLAVSTISSFFPPGYQVSFCLVMVLLFAVDTGLYFSVKTNIRSSTRDWKDHKFKWRKDPQDK

SEQ ID NO: 61863 - protein, 51 aa, Homo sapiens
MAPKAAKGAKPEPAPAPPPPGAKPEEDKKDALPFIDTYPSSCGPFLTSSTT

SEQ ID NO: 61864 - protein, 99 aa, Homo sapiens
  MOD_RES (1)..(1): Any amino acid
XPASGAALGMVADCGVREARAAVRAAYEAFCRWREVSAKERSSLLRKWYNLMIQNKDDLARIITAESVSSGFWLGALRNSPGIFTLNLGKPLTSLHCWL

SEQ ID NO: 61865 - protein, 98 aa, Homo sapiens
  MOD_RES (1)..(1): Any amino acid
XVTRAISVDKRPSTPRQCVGTRVAVVCEDSSVDHACGTAMGRMSDRHCWTRIGCVPPVVGSAIAATVGSVTAAVPQESSFIWPSFMVMTMLRNIWRGK

SEQ ID NO: 61866 - protein, 140 aa, Homo sapiens
LRVFKLAKSWPTLNMLIKIIGNSVGALGNLTLVLAIIVFIFAVVGMQLFGKSYKECVCKISNDCELPRWHMHDFFHSFLIVFRVLCGEWIETMWDCMEVAGQTMCLTVFMMVMVIGNLVFPDTMARDPSLVEDRCCRKRM

SEQ ID NO: 61867 - protein, 88 aa, Homo sapiens
VQTDYVPLLNSLAAYGWQLTCVLPTPVVKTTSEGSVSTKQIVFLQRPCLPQKIKKKESKFQWRFSREEMHNRQMRKSKVTYGNKSSMS

SEQ ID NO: 61868 - protein, 246 aa, Homo sapiens
QRRIRVTTIARNWADVQSQLRHIEAAFDQEAAAVLMARLGVFRAESEEGPDVLRWLDRQLIRLCQKFGQYNKEDPTSFRLSDSFSLYPQFMFHLRRSPFLQVFNNSPDESSYYRHHFARQDLTQSLIMIQPILYSYSFHGPPETIAQWRKAGYQDMPEYENFKHLLQAPLDDAQEILQARFPMPRYINTEHGGSQARFLLSKVNPSQTHNNLYAWGQETGAPILTDDVSLQVFMDHLKKLAVSSAC

SEQ ID NO: 61869 - protein, 149 aa, Homo sapiens
MNPFWSMSTSSVRKRSEGEEKTLTGDVKTSPPRTAPKKQLPSIPKNALPITKPTSPAPAAQSTNGTHASYGPFYLEYSLLAEFTLVVKQKLPGVYVQPSYRSALMWFGVIFIRHGLYQDGVFKFTVYIPDNYPDGDCPRLVFDIPVFHP

SEQ ID NO: 61870 - protein, 1041 aa, Homo sapiens
  MOD_RES (1)..(1): Any amino acid
XAAQVAKEKKKKKKKKKAENAEGQTPAIGPDGEPLDETSQMSDLPVKVIHVESGKILTGTDAPKAGQLEAWLEMNPGYEVAPRSDSEESGSEEEEEEEEEEQPQAAQPPTLPVEEKKKIPDPDSDDVSEVDARHIIENAKQDVDDEYGVSQALARGLQSYYAVAHAVTERVDKQSALMVNGVLKQYQIKGLEWLVSLYNNNLNGILADEMGLGKTIQTIALITYLMEHKRINGPFLIIVPLSTLSNWAYEFDKWAPSVVKVSYKGSPAARRAFVPQLRSGKFNVLLTTYEYIIKDKHILAKIRWKYMIVDEGHRMKNHHCKLTQVLNTHYVAPRRLLLTGTPLQNKLPELWALLNFLLPTIFKSCSTFEQWFNAPFAMTGEKVDLNEEETILIIRRLHKVLRPFLLRRLKKEVEAQLPEKVEYVIKCDMSALQRVLYRHMQAKGVLLTDGSEKDKKGKGGTKTLMNTIMQLRKICNHPYMFQHIEESFSEHLGFTGGIVQGLDLYRASGKFELLDRILPKLRATNHKVLLFCQMTSLMTIMEDYFAYRGFKYLRLDGTTKAEDRGMLLKTFNEPGSEYFIFLLSTRAGGLGLNLQSADTVIIFDSDWNPHQDLQAQDRAHRIGQQNEVRVLRLCTVNSVEEKILAAAKYKLNVDQKVIQAGMFDQKSSSHERRAFLQAILEHEEQDESRHCSTGSGSASFAHTAPPPAGVNPDLEEPPLKEEDEVPDDETVNQMIARHEEEFDLFMRMDLDRRREEARNPKRKPRLMEEDELPSWIIKDDAEVERLTCEEEEEKMFGRGSRHRKEVDYSDSLTEKQWLKAIEEGTLEEIEEEVRQKKSSRKRKRDSDAGSSTPTTSTRSRDKDDESKKQKKRGRPPAEKLSPNPPNLTKKMKKIVDAVIKYKDSSGRQLSEVFIQLPSRKELPEYYELIRKPVDFKKIKIYEDSIVLQSVFTSVRQKIEKEDDSEGEESEEEEEGEEEGSESESRSVKVKIKLGRKEKAQDRLKGGRRRPSRGSRAKPVVSDDDSEEEQEEDRSGSGSEED

SEQ ID NO: 61871 - protein, 230 aa, Homo sapiens
MNLEGLEMVAVLVVLALFVKVLEQFGLFEPVSLEDSVDDEFELSTVCHRPEGLEQLQEQTKFTRKELQVLYRGFKNECPSGIVNEENFKQIYSQFFPQGDSSTYATFLFNAFDTNHDGSVSFEDFVAGLSVILRGTVDDRLNWAFNLYDLNKDGCITKEEMLDIMKSIYDMMGKYTYPALREEAPREHVESFFQKMDRNKDGVVTIEEFIESCQKDENIMRSMQLFDNVI

SEQ ID NO: 61872 - protein, 1099 aa, Homo sapiens
MNLQAQPKAQNKRKRCLFGGQEPAPKEQPPPLQPPQQSIRVKEEQYLGHEGPGGAVSTSQPVELPPPSSLALLNSVVYGPERTSAAMLSQQVASVKWPNSVMAPGRGPERGGGGGVSDSSWQQQPGQPPPHSTWNCHSLSLYSATKGSPHPGVGVPTYYNHPEALKREKAGGPQLDRYVRPMMPQKVQLEVGRPQAPLNSFHAAKKPPNQSLPLQPFQLAFGHQVNRQVFRQGPPPPNPVAAFPPQKQQQQQQPQQQQQQQQAALPQMPLFENFYSMPQQPSQQPQDFGLQPAGPLGQSHLAHHSMAPYPFPPNPDMNPELRKALLQDSAPQPALPQVQIPFPRRSRRLSKEGILPPSALDGAGTQPGQEATGNLFLHHWPLQQPPPGSLGQPHPEALGFPLELRESQLLPDGERLAPNGREREAPAMGSEEGMRAVSTGDCGQVLRGGVIQSTRRRRRASQEANLLTLAQKAVELASLQNAKDGSGSEEKRKSVLASTTKCGVEFSEPSLATKRAREDSGMVPLIIPVSVPVRTVDPTEAAQAGGLDEDGKGPEQNPAEHKPSVIVTRRRSTRIPGTDAQAQAEDMNVKLEGEPSVRKPKQRPRPEPLIIPTKAGTFIAPPVYSNITPYQSHLRSPVRLADHPSERSFELPPYTPPPILSPVREGSGLYFNAIISTSTIPAPPPITPKSAHRTLLRTNSAEVTPPVLSVMGEATPVSIEPRINVGSRFQAEIPLMRDRALAAADPHKADLVWQPWEDLESSREKQRQVEDLLTAACSSIFPGAGTNQELALHCLHESRGDILETLNKLLLKKPLRPHNHPLATYHYTGSDQWKMAERKLFNKGIAIYKKDFFLVQKLIQTKTVAQCVEFYYTYKKQVKIGRNGTLTFGDVDTSDEKSAQEEVEVDIKTSQKFPRVPLPRRESPSEERLEPKREVKEPRKEGEEEVPEIQEKEEQEEGRERSRRAAAVKATQTLQANESASDILILRSHESNAPGSAGGQASEKPREGTGKSRRALPFSEKKKKTETFSKTQNQENTFPCKKCGRVFYKVKSRSAHMKSHAEQEKKAAALRLKEKEAAAAAAAAHQQALREESGAGDKG

SEQ ID NO: 61873 - protein, 108 aa, Homo sapiens
MPYEVNAGYDFTNMVRKKNPPLRNVASEGEGQILEPIGTESKVSGKNKEFSADQMSENTDQSDAAELNHKEEHSLHVQDPSSSSKKDLKSAVLSEKAGFNYESPSKGG

SEQ ID NO: 61874 - protein, 62 aa, Homo sapiens
MSEKKQPVDLGLLEEDDEFEEFPAEDWAGLDEDEDAHVWEDNWDDDNVEDDFSNQLRCEKKP

SEQ ID NO: 61875 - protein, 502 aa, Homo sapiens
MKCEHCTRKECSKKTKTDDQENVSADAPSPAQENGEKGEFHKLADAKIFLSDCLACDSCMTAEEGVQLSQQNAKDFFRVLNLNKKCDTSKHKVLVVSVCPQSLPYFAAKFNLSVTDASRRLCGFLKSLGVHYVFDTTIAADFSILESQKEFVRRYRQHSEEERTLPMLTSACPGWVRYAERVLGRPITAHLCTAKSPQQVMGSLVKDYFARQQVQEEMGSAFPVLPGGSTGWGALQMFGRTTPSPEGGSRQTWMECWCSNLSPEKIFHVIVAPCYDKKLEALQESLPPALHGSRGADCVLTSGEIAQIMEQGDLSVRDAAVDTLFGDLKEDKVTRHDGASSDGHLAHIFRHAAKELFNEDVEEVTYRALRNKDFQEVTLEKNGEVVLRFAAAYGFRNIQNMILKLKKGKFPFHFVEVLACAGGCLNGRGQAQTPDGHADKALLRQMEGIYADIPVRRPESSAHVQELYQEWLEGINSPKAREVLHTTYQSQERGTHSLDIKW

SEQ ID NO: 61876 - protein, 99 aa, Homo sapiens
ARREAEADKPRRLGRLKYQAPDIDVQLSSELTDSLRTLKPEGNILRDRFKSFQRRNMIEPRERAKFKRKYKVKLVEKRAFREIHCHQMPETRPSIKNLF

SEQ ID NO: 61877 - protein, 197 aa, Homo sapiens
MDPLFQQTHKQVHEIQSCMGRLETADKQSVHIVENEIQASIDQIFSRLERLEILSSKEPPNKRQNARLRVDQLKYDVQHLQTALRNFQHRRHAREQQERQREELLSRTFTTNGTQKKILDIANMLGLSNTVMRLIEKRAFQDKYFMIALLRCQGPSAGLLVIHKMDSETATARLSCPPGTQGSCQTAHFGGRSAGSS

SEQ ID NO: 61878 - protein, 141 aa, Homo sapiens
MATANGAVENGQPDRKPPALPRPIRNLEVKFTKIFINNEWHESKSGKKFATCNPSTREQICEVEEGDKPDVDKAVEAAQVAFQRGSPWRRLDALSRGRLLHQLADLVERDRATLAMTTSCASPGMSPLVSVGPSLHGTSPC

SEQ ID NO: 61879 - protein, 106 aa, Homo sapiens
  MOD_RES (1)..(1): Any amino acid
XSATYRILEVGCGVGNTVFPILQTNNDPGLFVYCCDFSSTAIELVQFTLSHCTDVISVHILKVCGNPASSKPTSAVSPPPYAHLVSVCHALVILRIFQTFLLLCML

SEQ ID NO: 61880 - protein, 172 aa, Homo sapiens
MPRVKAAQAGRQSSAKRHLAEQFAVGEIITDMAKKEWKVGLPIGQGGFGCIYLADMNSSESVGSDAPCVVKVEPSDNGPLFTELKFYQRAAKPEQIQKWIRTRKLKYLGVPKYWGSGLHDKNGKSYRFMIMDRFGSDLQKIYEANAKRFSRKTVLQLSLRIVSGYSGIYSRA

SEQ ID NO: 61881 - protein, 150 aa, Homo sapiens
MQKSEGSGGTQLKNRATGNYDQRTSSSTQLKHRNAVQGSKSSLSTSSPESARKLHPRPSDKLNPKTINPGLRETKHPYTFVSKEGFRELLLVKGAPEKAIPLLPRLIPVLKAALVHSDDEVFERGLNALVQLSVVVGPSLNDHLKHLLTS

SEQ ID NO: 61882 - protein, 1103 aa, Homo sapiens [sequence omitted]

SEQ ID NO: 61883 - protein, 215 aa, Homo sapiens
MSQTSSIGSAESLISLERKKEKNINRDITSRKDLPSRTSNVERKASQQQWGRGNFTEGKVPHIRIENGAAIEEIYTFGRILGKGSFGIVIEATDKETETKWAIKKVNKEKAGSSAVKLLEREVNILKSVKHEHIIHLEQVFETPKKMYLVMELCEDGELKEILDRKGHFSENETRWIIQSLASAIAYLHNNDIVHRDLKLENIMVKSSLIDDNNE

SEQ ID NO: 61884 - protein, 170 aa, Homo sapiens
MAHAMENSWTISKEYHIDEEVGFALPNPQENLPDFYNDWMFIAKHLPDLIESGQLRERVEKLNMLSIDHLTDHKSQRLARLVLGCITMAYVWGKGHGDVRKVLPRNIAVPYCQLSKKLELPPILVYADCVLANWKKKDPNKYVNRTWTFCSHFVMETAVKDSSWSLYWWK

SEQ ID NO: 61885 - protein, 207 aa, Homo sapiens
MQALRHVVCALSGGVDSAVAALLLRRRGYQVTGVFMKNWDSLDEHGVCTADKDCEDAYRVCQILDIPFHQVSYVKEYWNDVFSDFLNEYEKGRTPNPDIVCNKHIKFSCFFHYAVDNLGADAIATGHYARTSLEDEEVFEQKHVKKPEGLFRNRFEVRNERISLCQPGWSTVARSWLAAASTSWAQVILPPQPHQVAGTTARFPRMP

SEQ ID NO: 61886 - protein, 182 aa, Homo sapiens
MVRTDGHTLSEKRNYQVTNSMFGASRKKFVEGVDSDYHDENMYYSQSSMFPHRSEKDMLASPSTSGQLSQFGASLYGQQSALGLPMRGMSNNTPQLNRSLSQGTQLPSHVTPTTGVPTMSLHTPPSPSRGILPMNPRNMMNHSQVGQGIGIPSRTNSMSSSGLGSPNRSSPSIICMPKQQPS

SEQ ID NO: 61887 - protein, 100 aa, Homo sapiens
MKAPLPHPALARRMQIKDCWALIRRQLFEARNTLVDFQWKLGMAVSSDTCRSLKYPYVAVMLKVADHSGQVKTKCFEMTIPQFQNFYRQFKEIAAVIETV

SEQ ID NO: 61888 - protein, 195 aa, Homo sapiens
MADVINVSVNLEAFSQAISAIQALRSSVSRVFDCLKDGMRNKETLEGREKAFIAHFQDNLHSVNRDLNELERLSNLVGKPSENHPLHNSGLLSLDPVQDKTPLYSQLLQAYKWSNKLQYHAGLASGLLNQQSLKRSANQMGVSAKRRPKAQPTTLVLPPQYVDDVISRIDRMFPEMSIHLSRPNGTSAMLLVRSA

SEQ ID NO: 61889 - protein, 184 aa, Homo sapiens
MDEEIVSEKQAEESHRQDSANLLIFILLLTLTILTIWLFKHRRARFLHETGLAMIYGLLVGLVLRYGIHVPSDVNNVTLSCEVQSSPTTLLVNVSGKFYEYMLKGEISSHELNNVQDNEMLRKVTFDPEVFFNILLPPIIFYAGYSLKRRHFFRNLGSILAYAFLGTAISCFVIGSIMYGCVTL

SEQ ID NO: 61890 - protein, 825 aa, Homo sapiens
MPALACLRRLCRHVSPQAVLFLLFIFCLFSVFISAYYLYGWKRGLEPSADAPEPDCGDPPPVAPSRLLPLKPVQAATPSRTDPLVLVFVESLYSQLGQEVVAILESSRFKYRTEIAPGKGDMPTLTDKGRGRFALIIYENILKYVNLDAWNRELLDKYCVAYGVGIIGFFKANENSLLSAQLKGFPLFLHSNLGLKDCSINPKSPLLYVTRPSEVEKGVLPGEDWTVFQSNHSTYEPVLLAKTRSSESIPHLGADAGLHAALHATVVQDLGLHDGIQRVLFGNNLNFWLHKLVFVDAVAFLTGKRLSLPLDRYILVDIDDIFVGKEGTRMKVEDVKALFDTQNELRAHIPNFTFNLGYSGKFFHTGTNAEDAGDDLLLSYVKEFWWFPHMWSHMQPHLFHNQSVLAEQMALNKKFAVEHGIPTDMGYAVAPHHSGVYPVHVQLYEAWKQVWSIRVTSTEEYPHLKPARYRRGFIHNGIMVLPRQTCGLFTHTIFYNEYPGGSSELDKIINGGELFLTVLLNPISIFMTHLSNYGNDRLGLYTFKHLVRFLHSWTNLRLQTLPPVQLAQKYFQIFSEEKDPLWQDPCEDKRHKDIWSKEKTCDRFPKLLIIGPQKTGTTALYLFLGMHPDLSSNYPSSETFEEIQFFNGHNYHKGIDWYMEFFPIPSNTTSDFYFEKSANYFDSEVAPRRAAALLPKAKVLTILINPADRAYSWYQILVLDGKLLRTEPAKVMDMVQKFLGVTNTIDYHKTLAFDPKKGFWCQLLEGGKTKCLGKSKGRKYPEMDLDSRAFLKDYYRDHNIELSKLLYKMGQTLPTWLREDLQNTR

SEQ ID NO: 61891 - protein, 593 aa, Homo sapiens
MSSTQGNGEHWKSLESVGISRKELAMAEALQMEYDALSRLRHDKEENRAKQNADPSLISWDEPGVDFYSKPAGRRTDLKLLRGLSGSDPTLNYNSLSPQEGPPNHSTSQGPQPGSDPWPKGSLSGDYLYIFDGSDGGVSSSPGPGDIEGSCKKLSPPPLPPRASIWDTPPLPPRKGSPSSSKISQPSDINTFSLVEQLPGKLLEHRILEEEEVLGGGGQGRLLGSVDYDGINDAITRLNLKSTYDAEMLRDATRGWKEGRGPLDFSKDTSGKPVARSKTMPPQVPPRTYASRYGNRKNATPGKNRRISAAPVGSRPHTVANGHELFEVSEERDEEVAAFCHMLDILRSGSDIQDYFLTGYVWSAVTPSPEHLGDEVNLKVTVLCDRLQEALTFTCNCSSTVDLLIYQTLCYTHDDLRNVDVGDFVLKPCGLEEFLQNKHALGSHEYIQYCRKFDIDIRLQLMEQKVVRSDLARTVNDDQSPSTLNYLVHLQERPVKQTISRQALSLLFDTYHNEVDAFLLADVGNHQEVEGFTCREGQSPPHLDSCGVSSLKTMRVNICLKCHNAKENLTVIFKNNPLLSVMAHACNPNPLGN

SEQ ID NO: 61892 - protein, 114 aa, Homo sapiens
MSDSWVPNSASGQDPGGRRRAWAELLAGRVKREKYNPERAQKLKESAVRLLRSHQDLNALLLEVEGPLCKKLSLSKVIDCDSSEAYANHSSSFIGSSLKAGGSRGYSLSRDGCL

SEQ ID NO: 61893 - protein, 90 aa, Homo sapiens
  MOD_RES (1)..(1): Any amino acid
XIDINDQIPIFEKSDYGNLTLAEDTNIGSTILTIQATDADEPFTGSSKILYHIIKGDSEGRLGVDTDPHTNTGYVIIKKLFTEGRHKRLA

SEQ ID NO: 61894 - protein, 96 aa, Homo sapiens
  MOD_RES (1)..(1): Any amino acid
XRKRLREMEKVYSELKWQEKNTLEEIAELQEDIRHLEEDLRTKLLSLKLSHTRLEARTYRPNVELCRDQAQYGLTDEVHQLEATIAALKQKLAQAQ

SEQ ID NO: 61895 - protein, 47 aa, Homo sapiens
  MOD_RES (1)..(1): Any amino acid
XNSTAKSSPQKIDVLCGIGIKKVACGTQFSVALTKDGHVYTFGQGGE

SEQ ID NO: 61896 - protein, 41 aa, Homo sapiens
  MOD_RES (1)..(1): Any amino acid
XDVEIATYRRLLEGEECSLGGRQRCHVWRSWWRLGEHLWTR

SEQ ID NO: 61897 - protein, 52 aa, Homo sapiens
VEAGKGLEMRKLVLSGFLASEEIYINQLEALLLPMKPLKATATTSQPVLTIQ

SEQ ID NO: 61898 - protein, 38 aa, Homo sapiens
MHQTYSRHCRPEERLVSRISTSFFMDSNGGLIQRLIAF

SEQ ID NO: 61899 - protein, 130 aa, Homo sapiens
MSPAFRAMDVEPRAKGVLLEPFVHQVGGHSCVLRFNETTLCKPLVPREHQFYETLPAEMRKFTPQYKAVLIFVKFADEFGASGNIETKELGVVSVRFEEDEDRNLCLIAYPLKGDHGIVDIVDNSDCEPK

SEQ ID NO: 61900 - protein, 181 aa, Homo sapiens
MSLKLQASNVTNKNDPKSINSRVFIGNLNTALVKKSDVETIFSKYGRVAGCSVHKGYAFVQYSNERHARAAVLGENGRVLAGQTLDINMAGEPKPDRPKGLKRAASAIYSGYIFDYDYYRDDFYDRLFDYRGRLSPVPVPRAVPVKRPRVTVPLVRRVKTNVPVKLFARSTAVTTSSAKIK

SEQ ID NO: 61901 - protein, 118 aa, Homo sapiens
MEPLVTWVVPLLFLFLLSRQGAACRTSECCFQDPPYPDADSGSLPGSASGPRDLRCYRISSDRYECSWQYEGPTAGVSHFLRCCLSSGRCCYFAAGSATRLQFSDQAGVSVLYTVTLW

SEQ ID NO: 61902 - protein, 150 aa, Homo sapiens
  MOD_RES (1)..(1): Any amino acid
XVFPGNDSTASQDVANRFARKGALRQKNVHEVKDHKFIARFFKQPTFCSHCTDFIWGFGKQGFQCQVCCFVVHKRCHEFVTFSCPGADKGPDTDLFSPVLLVCLYLLRSYSLSEGPQEQAQVQNPHLRKPHLLRSLWVTALWTYPSRDEM

SEQ ID NO: 61903 - protein, 252 aa, Homo sapiens
MKMKLFQTICRQLRSSKFSVESAALVAFSTSSYSCGRKKKVNPYEEVDQEKYSNLVQSVLSSRGVAQTPGSVEEDALLCGPVSKHKLPNQGEDRRVPQNWFPIFNPERSDKPNASDPSVPLKIPLQRNVIPSVTRVLQQTMTKQQVFLLERWKQRMILELGEDGFKEYTSSSMWLNCGGLQRWITCPPTFHGCRALFPVLDQVASSTRRIYGKEKEPEYSETRIFRIGSKLLFGNIQHLLTVWEHILLFTPV

SEQ ID NO: 61904 - protein, 51 aa, Homo sapiens
QKAAAKAALIYTCTVCRLSFAQFFVRHKCQTLRPSSSTLRASILRLHFLQN

SEQ ID NO: 61905 - protein, 132 aa, Homo sapiens
MARTKQTARKSTGGKAPRKQLATKAARKSAPSTGGVKKPHRYRPGTVALREIRRYQKSTELLIRKLPFQRLVREIAQDFKTDLRFQSAAIGALQEASEAYLVGLFEDTNLCAIHAKRVTIMPKDIQLARRIR

SEQ ID NO: 61906 - protein, 99 aa, Homo sapiens
MAGSDAEWVTIANNLLFKCHIHLRIHELQDCDANVFIALYQSILGEKVPDLIVIPRSQEDDAHNVQAVIDSLALDYLQVSLSHITALYSVSRRKYSERR

SEQ ID NO: 61907 - protein, 724 aa, Homo sapiens
MSFESISSLPEVEPDPEAGSEQEVFSAVEGPSAEETPSDTESPEVLETQLDAHQGLLGMDPPGDMVDFVAAESTEDLKALSSEEEEEMGGAAQEPESLLPPSVLDQASVIAERFVSSFSRRSSVAQEDSKSSGFGSPRLVSRSSSVLSLEGSEKGLARHGSATDSLSCQLSPEVDISVGVATEDSPSVNGMEPPSPGCPVEPDRSSCKKKESALSTRDRLLLDKIKSYYENAEHHDAGFSVRRRESLSYIPKGLVRNSISRFNSLPRPDPEPVPPVGSKRQVGSRPTSWALFELPGPSQAVKGDPPPISDAEFRPSSEIVKIWEGMESSGGSPGKGPGQGQANGFDLHEPLFILEEHELGAITEESATASPESSSPTEGRSPAHLARELKELVKELSSSTQGELVAPLHPRIVQLSHVMDSHVSERVKNKVYQLARQYSLRIKSNKPVMARPPLQWEKVAPERDGKSPTVPCLQEEAGEPLGGKGKRKPVLSLFDYEQLMAQEHSPPKPSSAGEMSPQRFFFNPSAVSQRTTSPGGRPSARSPLSPTETFSWPDVRELCSKYASRDEARRAGGGRPRGPPVNRSHSVPENMVEPPLSGRVGRCRSLSTKRGRGGGEAAQSPGPLPQSKPDGGETLYVTADLTLEDNRRVIVMEKGPLPSPTAGLEESSGQGPSSPVALLGQVQDFQQSAECQPKEEGSRDPADPSQQGRVRNLREKFQALNSVG

SEQ ID NO: 61908 - protein, 138 aa, Homo sapiens
VKIQGQNKEMLAAACQMFLGKTEAEIAHIALETLEGHQRAIMAHMTVEEIYKDRQKFSEQVFKVASSDLVNMGISVVSYTLKDIHDDQDYLHSLGKARTAQVQKDARIGEAEAKRDAGIREAKAKQEKVSAQYLSEIE

SEQ ID NO: 61909 - protein, 183 aa, Homo sapiens
MAGLNSLEAVKRKIQALQQQADEAEDRAQGLQRELDGERERREKAEGDVAALNRRIQLVEEELDRAQERLATALQKLEEAEKAADESERGMKVIENRAMKDEEKMEIQEMQLKEAKHIAEEADRKYEEVARKLVILEGELERAEERAEVSELKCGDLEEELKNVTNNLKSLEAASEKRRGLTM

SEQ ID NO: 61910 - protein, 193 aa, Homo sapiens
MPFLPAIDLLYWRDIKQTGIVFGSFLLLLFSLTQFSVVSVVAYLALAALSATISFRIYKSVLQAVQKTDEGHPFKAYLELEITLSQEQIQKYTDCLQFYVNSTLKELRRLFLVQDLVDSLKFAVLMWLLTYVGALFNGLTLLLMAVVSMFTLPVVYVKHQAQIDQYLGLVRTHINAVVAKIQAKIPGAKRHAE

SEQ ID NO: 61911 - protein, 35 aa, Homo sapiens
MEAAAAVVAAEAEVENEDGDSSCGDVCFMDKGLQR

SEQ ID NO: 61912 - protein, 236 aa, Homo sapiens
MIRAAPPPLFLLLLLLLLLVSWASRGEAAPDQDEIQRLPGLAKQPSFRQYSGYLKGSGSKHLHYWFVESQKDPENSPVVLWLNGGPGCSSLDGLLTEHGPFLVQPDGVTLEYNPYSWNLIANVLYLESPAGVGFSYSDDKFYATNDTEVAQSNFEALQDFFRLFPEYKNNKLFLTGESYAGIYIPTLAVLVMQDPSMNLQVQGNSPVRLPALCFALSGLSYPPAYINHPGFQLPDC

SEQ ID NO: 61913 - protein, 117 aa, Homo sapiens
MAEIGEDLDKSDVSSLIFLMKDYMGRGKISKEKSFLDLVVELEKLNLVAPDQLDLLEKCLKNIHRIDLKTKIQKYKQSVQGAGTSYRNVLQAAIQKSLKDPSNNFRVSLEKTYGIPA

SEQ ID NO: 61914 - protein, 175 aa, Homo sapiens
KEYFSTFGEVLMVQVKKDLKTGHSKGFGFVRFTEYETQVKVMSQRHMIDGRWCDCKLPNSKQSQDEPLRSRKVFVGRCTEDMTEDELREFFSQYGDVMDVFIPKPFRAFAFVTFADDQIAQSLCGEDLIIKGISVHISNAEPKHNSNRQLERSGRFGVHLISNVYGRSTSLKVVL

SEQ ID NO: 61915 - protein, 140 aa, Homo sapiens
MTKFQEMVTFKDVAVVFTREELGLLDLAQRKLYQDVMLENFRNLLSVGYQPFKLDVILQLGKEDKLRMMETEIQGDGCSGENHGALSLCGVQPSPLLLTTSSATSLAQDPRIHRPGLLQQLAHDLPPSTSLQSILHIARS

SEQ ID NO: 61916 - protein, 872 aa, Homo sapiens
MRYRLAWLLHPALPSTFRSVLGARLPPPERLCGFQKKTYSKMNNPAIKRIGNHITKSPEDKREYRGLELANGIKVLLISDPTTDKSSAALDVHIGSLSDPPNIAGLSHFCEHMLFLGTKKYPKENEYSQFLSEHAGSSNAFTSGEHTNYYFDVSHEHLEGALDRFAQFFLCPLFDESCKDREVNAVDSEHEKNVMNDAWRLFQLEKATGNPKHPFSKFGTGNKYTLETRPNQEGIDVRQELLKFHSAYYSSNLMAVCVLGRESLDDLTNLVVKLFSEVENKNVPLPEFPEHPFQEEHLKQLYKIVPIKDIRNLYVTFPIPDLQKYYKSNPGHYLGHLIGHEGPGSLLSELKSKGWVNTLVGGQKEGARGFMFFIINVDLTEEGLLHVEDIILHMFQYIQKLRAEGPQEWVFQECKDLNAVAFRFKDKERPRGYTSKIAGILHYYPLEEVLTAEYLLEEFRPDLIEMVLDKLRPENVRVAIVSKSFEGKTDRTEEWYGTQYKQEAIPDEVIKKWQNADLNGKFKLPTKNEFIPTNFEILPLEKEATPYPALIKDTAMSKLWFKQDDKFFLPKACLNFEFFSPFAYVDPLHCNMAYLYLELLKDSLNEYAYAAELAGLSYDLQNTIYGMYLSVKGYNDKQPILLKKIIEKMATFEIDEKRFEIIKEAYMRSLNNFRAEQPHQHAMYYLRLLMTEVAWTKDELKEALDDVTLPRLKAFIPQLLSRLHIEALLHGNITKQAALGIMQMVEDTLIEHAHTKPLLPSQLVRYREVQLPDNNTEVAYLKTLTKEDIIKFYKEMLAVDAPRRHKVSVHVLAREMDSCPVVGEFPCQNDINLSQAPALPQPEVIQNMTEFKRGLPLFPLVKPHINFMAAKL

SEQ ID NO: 61917 - protein, 334 aa, Homo sapiens
MFFLLALLSATFAPIYVGIVFLGFTPDHRCRSPGVAELSLRCGWSPAEELNYTVPGPGPAGEASPRQCRRYEVDWNQSTFDCVDPLASLDTNRSRLPLGPCRDGWVYETPGSSIVTEFNLVCANSWMLDLFQSSVNVGFFIGSMSIGYIADRFGRKLCLLTTVLINAAAGVLMAISPTYTWMLIFRLIQGLVSKAGWLIGYILITEFVGRRYRRTVGIFYQVAYTVGLLVLAGVAYALPHWRWLQFTVSLPNFFFLLYYWCIPESPRWLISQNKNAEAMRIIKHIAKKNGKSLPASLQRLRLEEETGKKLNPSFLDLVRTPQIRKHTMILMYNW

SEQ ID NO: 61918 - protein, 122 aa, Homo sapiens
MKNYESKKYSDPSQPGNTVLHPGTRLIQKLHTSTCWLQEVPGKPQLEQATKHPQVTSPQATKETGMEIKEGKQSYRQKIMDELKYYYNGFYLLWIDAKVAARMVWRLLHGQVLTRRERRRCF

SEQ ID NO: 61919 - protein, 77 aa, Homo sapiens
MPSSVTALGQARSSGPGMAPSACCCSPAALQRRLPILAWLPSYSLQWLKMDFVAGLSVGLTAIPQALAYAEVAGLPP

SEQ ID NO: 61920 - protein, 127 aa, Homo sapiens
ISLFPAVLASEAAMSYPADDYESEAAYDPYAYPSDYDMHTGDPKQDLAYERQYEQQTYQVIPEVIKNFIQYFHKTVSDLIDQKVYELQASRVSSDVIDQKVYEIQDIYENRYGLLAERASFWVGLAW

SEQ ID NO: 61921 - protein, 49 aa, Homo sapiens
DMLNTYQQLVRTPSVRPGQDVRLQAPGTRTGLLKLLSTVSQDKQVREAQ

SEQ ID NO: 61922 - protein, 168 aa, Homo sapiens
  MOD_RES (1)..(1): Any amino acid
XTMAAPAESLRRRKTGYSDPEPESPPAPGRGPAGSPAHLHTGTFWLTRIVLLKALAFVYFVAFLVAFHQNKQLIGDRGLLPCRVFLKNFQQYFQDRTSWEVFSYMPTILWLMDWSDMNSNLDLLALLGLGISSFVLITGCANMLLMAALWGLYMSLVNVGHVWYSFGK

SEQ ID NO: 61923 - protein, 140 aa, Homo sapiens
MEPQVRALRCGCWNRDSKRASGGSIQVNPKKSVCGGVHTTNYYGEEDKEDMDRRRMALRPGSRRPTAFFFHSRWLVPNLLAFFLGLSGAGPIHLPMPWPNGRRHRVLDPHTQLSTHEAPGRWKPVAPRTMKACPQVLLEW

SEQ ID NO: 61924 - protein, 776 aa, Homo sapiens
MLPGCIFLMILLIPQVKEKFILGVEGQQLVRPKKLPLIQKRDTGHTHDDDILKTYEEELLYEIKLNRKTLVLHLLRSREFLGSNYSETFYSMKGEAFTRHPQIMDHCFYQGSIVHEYDSAASISTCNGLRGFFRINDQRYLIEPVKYSDEGEHLVFKYNLRVPYGANYSCTELNFTRKTVPGDNESEEDSKIKGIHDEKYVELFIVADDTVYRRNGHPHNKLRNRIWGMVNFVNMIYKTLNIHVTLVGIEIWTHEDKIELYSNIETTLLRFSFWQEKILKTRKDFDHVVLLSGKWLYSHVQGISYPGGMCLPYYSTSIIKDLLPDTNIIANRMAHQLGHNLGMQHDEFPCTCPSGKCVMDSDGSIPALKFSKCSQNQYHQYLKDYKPTCMLNIPFPYNFHDFQFCGNKKLDEGEECDCGPAQECTNPCCDAHTCVLKPGFTCAEGECCESCQIKKAGSICRPAKDECDFPEMCTGHSPACPKDQFRVNGFPCKNSEGYCFMGKCPTREDQCSELFDDEAIESHDICYKMNTKGNKFGYCKNKENRFLPCEEKDVRCGKIYCTGGELSSLLGEDKTYHLKDPQKNATVKCKTIFLYHDSTDIGLVASGTKCGEGMVCNNGECLNMEKVYISTNCPSQCNENPVDGHGLQCHCEEGQAPVACEETLHVTNITILVVVLVLVIVGIGVLILLVRYRKCIKLKQVQSPPTETLGVENKGYFGDEQQIRTEPILPEIHFLNQRTPESLESLPTSFSSPHYITLKPASKDSRGIADPNQSAK

SEQ ID NO: 61925 - protein, 131 aa, Homo sapiens
MEEIPAQEAAGSPRVQFQSLETQSECLSPEPQFVQDTDMEQGLTGAPPVPQVPALPREGSPGDQAAALLTARYQSSQDVLFQEFVTFEDVAVHLTREEWGYLDPVQRDLYREVMLENYGNVVSLGTVGSWD

SEQ ID NO: 61926 - protein, 400 aa, Homo sapiens
MCRTPYISSSESRLKGRLDYLSSLKVKGLVLGPIHKNQKDDVAQTDLLQIDPNFGSKEDFDSLLQSAKKKSIRVILDLTPNYRGENSWFSTQVDTVATKVKDALEFWLQAGVDGFQVRDIENLKDASSFLAEWQNITKGFSEDRLLIAGTNSSDLQQILSLLESNKDLLLTSSYLSDSGSTGEHTKSLVTQYLNATGNRWCSWSLSQARLLTSFLPAQLLRLYQLMLFTLPGTPVFSYGDEIGLDAAALPGQPMEAPVMLWDESSFPDIPGAVSANMTVKGQSEDPGSLLSLFRRLSDQRSKERSLLHGDFHAFSAGPGLFSYIRHWDQNERFLVVLNFGDVGLSAGLQASDLPASASLPAKADLLLSTQPGREEGSPLELERLKLEPHEGLLLRFPYAA

SEQ ID NO: 61927 - protein, 583 aa, Homo sapiens
MLRMRVPALLVLLFCFRGRAGWSRYWISGNAANGQHDLHIRPVELEDEASYECQATQAGLRSRPAQLHVLVPPEAPQVLGGPSVSLVAGVPANLTCRSRGDARPTPELLWFRDGVLLDGATFHQTLLKEGTPGSVESTLTLTPFSHDDGATFVCRARSQALPTGRDTAITLSLQYPPEVTLSASPHTVQEGEKVIFLCQATAQPPVTGYRWAKGGSPVLGARGPRLEVVADASFLTEPVSCEVSNAVGSANRSTALDVLFGPILQAKPEPVSVDVGEDASFSCAWRGNPLPRVTWTRRGGAQVLGSGATLRLPSVGPEDAGDYVCRAEAGLSGLRGGAAEARLTVNAPPVVTALHSAPAFLRGPARLQCLVFASPAPDAVVWSWDEGFLEAGSQGRFLVETFPAPESRGGLGPGLISVLHISGTQESDFSRSFNCSARNRLGEGGAQASLGRRDLLPTVRIVAGVAAATTTLLMVITGVALCCWRHSKASASFSEQKNLMRIPGSSDGSSSRGPEEEETGSREDRGPIVHTDHSDLVLEEEGTLETKDPTNGYYKVRGVSPPASPDSRVTSFQWKSPGISNLP

SEQ ID NO: 61928 - protein, 44 aa, Homo sapiens
MNYMPGTASLIEDIDKKHLVLLRDGRTLIGFLRSIDQFGTSCSC

SEQ ID NO: 61929 - protein, 72 aa, Homo sapiens
MIERCICLVCLDAPGGVELSDTHRALQLLHGGGYSKNGANRWYDKSLQSCQLFGCPPPWPGDFNIPPSIPEK

SEQ ID NO: 61930 - protein, 87 aa, Homo sapiens
MSAEASARPLRVGSRVEVIGKGHRGTVAYVGATLFATGKWVGVILDEAKGKNDGTVQGRKYFTCDEGHGIFVRQSQIQVFEDGADTT

SEQ ID NO: 61931 - protein, 36 aa, Homo sapiens
MKMANSLRGEVLKLYKNLLYLGRDYPKGADYFKKRL

SEQ ID NO: 61932 - protein, 247 aa, Homo sapiens
MEVTQDLVQDGVASPATPGTGKSKLETLPKEDLIKFAKKQMMLIQKAKSRCTELEKEIEELRSKPVTEGTGDIIKALTERLDALLLEKAETEQQCLSLKKENIKMKQEVEDSVTKMGDAHKELEQSHINYVKEIENLKNELMAVRSKYSEDKANLQKQLEEAMNTQLELSEQLKFQNNSEDNVKKLQEEIEKIRPGFEEQILYLQKQLDATTDEKKETVTQLQNIIEANSQHYQKNINSLQEELLQL

SEQ ID NO: 61933 - protein, 163 aa, Homo sapiens
MDICESILERKRHDSERSTCSILEQTDMEAVEALVCMSSWGQRSQKGDLLRIRPLTPVSDSGDVTTTVHMDAATPELPKDFHSLSTLCITPPQSPDLVEPSTRTPVSPQVTDSKACTATDVLQSSAVVARALSGGAERGLLGLEPVPSSPCRAKGTSVIRHTG

SEQ ID NO: 61934 - protein, 41 aa, Homo sapiens
MGAKSMRSWCLCQICSCGFLSSQPDHIPIPVQAAVLWDPPD

SEQ ID NO: 61935 - protein, 220 aa, Homo sapiens
MVAERTHKAAATGARGPGELGAPGTVALVAARAERGARLPSPGSCGLLTLALCSLALSLLAHFRTAELQARVLRLEAERGEQQMETAILGRVNQLLDEKWKLHSRRRREAPKTSPGCNCPPGPPGPTGRPGLPGVKGQPGEKLLPFGSSLSRSSSPYLPAPRSLSPFLSPRRGPPETLGCPSLVPAAPLVNQELEVSLDFRVPLGWTANRATQDQRATWV

SEQ ID NO: 61936 - protein, 97 aa, Homo sapiens
MSLEQRSPHCKPDEDLEAQGEDLGLMGAQEPTGEEEETTSSSDSKEEEVSAAGSSSPPQSPQGGASSSISVYYTLWSQFDEGSSSQEEEEPSSSVDP

SEQ ID NO: 61937 - protein, 164 aa, Homo sapiens
MEEEIAALVIDNGSGMCKAGFAGDDAPRAVFPSIVGRPRHQGVMVGMGQKDSYVGDEAQSKRGILTLKYPIEHGIVTNWDDMEKIWHHTFYNELRVAPEEHPVLLTEAPLNPKANREKMTQIMFETFNTPAMYVAIQAVLSLYASGRTTGIVMDSGDGVTHTVP

SEQ ID NO: 61938 - protein, 148 aa, Homo sapiens
MKPPSSIQTSEFDSSDEEPIEDEQTPIHISWLSLSRVNCSQFLGLCALPGCKFKDVRRNVQKDTEELKSCGIQDIFVFCTRGELSKYRVPNLLDLYQQCGIITHHHPIADGGTPDIASCCEIMEELTTCLKNYRKTLIHSCLSPTIPV

SEQ ID NO: 61939 - protein, 197 aa, Homo sapiens
MVHAEAFSRPLSRNEVVGLIFRLTIFGAVTYFTIKWMVDAIDPTRKQKVEAQKQAEKLMKQIGVKNVKLSEYEMSIAAHLVDPLNMHVTWSDIAGLDDVITDLKDTVILPIKKKHLFENSRLLQPPKGVLLYGPPGCGKTLIAKATAKEAGCRFINLQPSTLTDKWYGESQKLAAAVFSLAIKLQPSIIFIDEIDTD

SEQ ID NO: 61940 - protein, 945 aa, Homo sapiens
  MOD_RES (1)..(1): Any amino acid
XGRPGVPPRFLSQRRRQVPGPRSRLRDIHESPSVILGPPGEVPGFRCALWRHLRPHLVLGGALAPPAPIKFTEGPPATLKASVPYEVETLPQNLPAPPWSAAEIFSHVGDRCERNEFQCQDGKCISYKWVCDGSAECQDGSDESQETCLSVTCKSGDFSCGGRVNRCIPQFWRCDGQVDCDNGSDEQGCPPKTCSQDEFRCHDGKCISRQFVCDSDRDCLDGSDEASCPVLTCGPASFQCNSSTCIPQLWACDNDPDCEDGSDEWPQRCRGLYVFQGDSSPCSAFEFHCLSGECIHSSWRCDGGPDCKDKSDEENCAVATCRPDEFQCSDGNCIHGSRQCDREYDCKDMSDEVGCVNVTLCEGPNKFKCHSGECITLDKVCNMARDCRDWSDEPIKECGTNECLDNNGGCSHVCNDLKIGYECLCPDGFQLVAQRRCEDIDECQDPDTCSQLCVNLEGGYKCQCEEGFQLDPHTKACKAVGSIAYLFFTNRHEVRKMTLDRSEYTSLIPNLRNVVALDTEVASNRIYWSDLSQRMICSTQLDRAHGVSSYDTVISRDIQAPDGLAVDWIHSNIYWTDSVLGTVSVADTKGVKRKTLFRENGSKPRAIVVDPVHGFMYWTDWGTPAKIKKGGLNGVDIYSLVTENIQWPNGITLDLLSGRLYWVDSKLHSISSIDVNGGNRKTILEDEKRLAHPFSLAVFEDKVFWTDIINEAIFSANRLTGSDVNLLAENLLSPEDMVLFHNLTQPRGVNWCERTTLSNGGCQYLCLPAPQINPHSPKFTCACPDGMLLARDMRSCLTEAEAAVATQETSTVRLKVSSTAVRTQHTTTRPVPDTSRLPGATPGLTTVEIVTMSHQALGDVAGRGNEKKPSSVRALSIVLPIVLLVFLCLGVFLLWKNWRLKNINSINFDNPVYQKTTEDEVHICHNQDGYSYPSRQMVSLEDDVA

SEQ ID NO: 61941 - protein, 116 aa, Homo sapiens
MDGTYKFCFSNRMSTMTPKIVMFTIDIGEAPKGQDMETEAHQNKLEEMINELAVAMTAVKHEQEYMEVRERIHRAINDNTNSRVVLWSFFEALVLVAMTLGQIYYLKRFFEVRRVV

SEQ ID NO: 61942 - protein, 241 aa, Homo sapiens
  MOD_RES (1)..(1): Any amino acid
XDLFPVGREIAGIVLDVGSKVSFFQPDDEVVGILPLDSEDPGLCEVVRVHEHYLVHKPEKVTWTEAAGSIRDGVRAYTALHYLSHLSPGKSVLIMDGASAFGTIAIQLAHHRGAKVISTACSLEDKQCLERFRPPIARVIDVSNGKVHVAESCLEETGGLGVDIVLDAGVRLYSKDDEPAVKLQLLPHKHDIITLLGVGGHWVTTEENLQVKKQKHRDVDTDSRTQQVAEQESHSGSLSPF

SEQ ID NO: 61943 - protein, 784 aa, Homo sapiens
MSEQTPAEAGAAGAREDACRDYQSSLEDLTFNSKPHINMLTILAEENLPFAKEIVSLIEAQTAKAPSSEKLPVMYLMDSIVKNVGREYLTAFTKNLVATFICVFEKVDENTRKSLFKLRSTWDEIFPLKKLYALDVRVNSLDPAWPIKPLPPNVNTSSIHVNPKFLNKSPEEPSTPGTVVSSPSISTPPIVPDIQKNLTQEQLIRQQLLAKQKQLLELQQKKLELELEQAKAQLAVSLSVQQETSNLGPGSAPSKLHVSQIPPMAVKAPHQVPVQSEKSRPGPSLQIQDLKGTNRDPRLNRISQHSHGKDQSHRKEFLMNTLNQSDTKTSKTIPSEKLNSSKQEKSKSGEKITKKELDQLDSKSKSKSKSPSPLKNKLSHTKDLKNQESESMRLSDMNKRDPRLKKHLQDKTDGKDDDVKEKRKTAEKKDKDEHMKSSEHRLAGSRNKIINGIVQKQDTITEESEKQGTKPGRSSTRKRSRSRSPKSRSPIIHSPKRRDRRSPKRRQRSMSPTSTPKAGKIRQSGAKQSHMEEFTPPSREDRNAKRSTKQDIRDPRRMKKTEEERPQETTNQHSTKSGTEPKENVENWQSSKSAKRWKSGWEENKSLQQVDEHSKPPHLRHRESWSSTKGILSPRAPKQQQHRLSVDANLQIPKELTLASKRELLQKTSERLASGEITQDDFLVVVHQIRQLFQYQEGVREEQRSPFNDRFPLKRPRYEDSDKPFVDSPASRFAGLDTNQRLTALAEDRPLFDGPSRPSVARDGPTKMIFEGPNKLSPRIDGPP

SEQ ID NO: 61944 - protein, 49 aa, Homo sapiens
MKLEEGKYLILKDPNKQVIRVYSLPDGTFSSDEDEEEEEEEEEEEEAGD

SEQ ID NO: 61945 - protein, 103 aa, Homo sapiens
MRRFLRPGHDPVRERLKRDLFQFNKTVEHGFPHQPSALGYSPSLRILAIGTRSGAIKLYGAPGVEFMGLHQENNAVTQIHLLPGQCQLVTLLDDNSLHLWSLK

SEQ ID NO: 61946 - protein, 318 aa, Homo sapiens
MAAAALPPRPLLLLPLVLLLSGRPTRADSKVFGDLDQVRMTSEGSDCRCKCIMRPLSKDACSRVRSGRARVEDFYTVETVSSGTDCRCSCTAPPSSLNPCENEWKMEKLKKQAPELLKSIKANLSRENEVVKDSVRHLSEQLRHYENHSAIMLGIKKELSRLGLQLLQKDAAAAPATPATGTGSKAQDTARGKGKDISKYGSVQKSFADRGLPKPPKEKLLQVEKLRKESGKGSFLQPTAKPRALAQQQAVIRGFTYYKAGKQEVTEAVADNTLQGTSWLEQLPPKVEGRSNSAEPNSAEQDEAEPRSSERVDLASGT

SEQ ID NO: 61947 - protein, 195 aa, Homo sapiens
  MOD_RES (1)..(1): Any amino acid
XKQEQLAAIYAVLEHLPEANHNSLERLIFHLVKVALLEDVNRMSPGALAIIFAPCLLRCPDNSDPLTSMKDVLKITTCVEMLIKEQMRKYKVKMEEISQLEAAESIAFRRLSLLRQNANKSPKTRDIQEEELEVLLEEEAAGGDEDREKEILIERIQSIKEEKQDITYRLPELDPRGSDEENLDSETSASTESLL

SEQ ID NO: 61948 - protein, 171 aa, Homo sapiens
MNPASDGGTSESIFDLDYASWGIRSTLMVAGFVFYLGVFVVCHQLSSSLNATYRSLVAREKVFWDLAATRAVFGVQSTAAGLWALLGDPVLHADKARGQQNWCWFHITTATGFFCFENVAVHLSNLIFRTFDLFLVIHHLFAFLGFLGCLVNLQAGHYLAMTTLLLEMSTP

SEQ ID NO: 61949 - protein, 103 aa, Homo sapiens
  MOD_RES (1)..(1): Any amino acid
XFEKMLWRVCKGYTIVSYAELDESLEDPETGEVIKWYVFLISFWGEQIGHKVKKICDCYHCHVYPYPNTAEERREIQEGLNTRIQDLYTTGSRSVAQAWSAVA

SEQ ID NO: 61950 - protein, 302 aa, Homo sapiens
MELRSYQWEVIMPALEGKNIIIWLPTGAGKTRAAAYVAKRHLETVDGAKVVVLVNRVHLVTQHGEEFRRMLDGRWTVTTLSGDMGPRAGFGHLARCHDLLICTAELLQMALTSPEEEEHVELTVFSLIVVDECHHTHKDTVYNVIMSQYLELKLQRAQPLPQVLGLTASPGTGGASKLDGAINHVLQLCANLDTWCIMSPQNCCPQLQEHSQQPCKQYNLCHRRSQDPFGDLLKKLMDQIHDHLEMPELSRKFGTQMYEQQVVKLSEAAALAGLQEQRVYALHLRRYNDALLIHDTVRAVDA

SEQ ID NO: 61951 - protein, 76 aa, Homo sapiens
MSRINKNVVLALLTLTSSAFLLFQLYYYKHYLSTKNGAGLSKSKGSRIGFDSTQWVCRINKKFLNYNVHLVHSFTP

SEQ ID NO: 61952 - protein, 78 aa, Homo sapiens
  MOD_RES (1)..(1): Any amino acid
XGAVAIPSWGKFWLAVLNVYSWEGLNTLFPEMWLFPDWAPAHPSTLWCHCRQVYLPMSYCYAVRLSAAEDPLVQSLRQ

SEQ ID NO: 61953 - protein, 93 aa, Homo sapiens
MQPSSLLPLALCLLAAPASALVSFQVTGRSLVLAVATLRFPRGLQVDVQHWQRRPAGGRASLICPDPWLTGSRCTSSRPSAGPCRRLGALWRT

SEQ ID NO: 61954 - protein, 114 aa, Homo sapiens
  MOD_RES (1)..(1): Any amino acid
XANMDNGNATDINDNRYNSPHYPWVLWVGPEEMIKFPLCPTWRFLEPLGKGEGVRLILFITVLSRRSSHSPASVQNISPPPIPSVASPYSSDKVWTKTTWASDDWVSLLPLEAL

SEQ ID NO: 61955 - protein, 208 aa, Homo sapiens
MSPHLTALLGLVLCLAQTIHTQEGALPRPSISAEPGTVISPGSHVTFMCRGPVGVQTFRLEREDRAKYKDSYNVFRLGPSESEARFHIDSVSEGNAGLYRCLYYKPPGWSEHSDFLELLVKESSGGPDSPDTEPGSSAGTVPGTEASGFDAPRMRRNGLPSCELQWGEIIRMSNRNAQMPIHTYTNKKIRFAMENFRPIISIILNMFT

SEQ ID NO: 61956 - protein, 568 aa, Homo sapiens
MPRPPPASRTLGRPRVAFSLRAGGSADGGAPGGAGRPSCASHTVCFVCFSLPRSRFPLCGGRRDHKGLTHIFNPPPKRFESILEGLFGPALLKDLSLFKDCEPESISDWTFDENCLFCCLRRDKVKGHLVGLDEPASGAGQEALLKQEQAKIIRFERQAEEFLNAVFYRKDSPWVSDPNIPLVAREIMQRMIQQFAAEYTSKNSSTQDPSQPNSTKNQSLPKASPVTTSPTAATTQNPVLSKLLMADQDSPLDLTVRKSQSEPSEQDGVLDLSTKKSPCAGSTSLSHSPGCSSTQGNGRPGRPSQYRPDGLRSGDGVPPRSLQDGTREGFGHSTSLKVPLARSLQISEELLSRNQLSTAASLGPSGLQNHGQHLILSREASWAKPHYEFNLSRMKFRGNGALSNISDLPFLAENSAFPKMALQAKQDGKKDVSHSSPVDLKIPQVRGMDLSWESRTGDQYSYSSLVMGSQTESALSKKLRAILPKQSRKSMLDAGPDSWGSDAEQSTSGQPYPTSDQEGDPGSKQPRKKRGRYRQYNMDDNRAAEEWCAYPLMLQFKRTCIVSFQIVG

SEQ ID NO: 61957 - protein, 105 aa, Homo sapiens
MKTLLLLLLVLLELGEAQGSLHRWNTSALSPLAPHHRTSLSSSTLAPPTSGSPLCTALAQPARRTAGSSLPSPAHTASQVNLSPFSMEPGACPGSLEPTKSLWKD

SEQ ID NO: 61958 - protein, 25 aa, Homo sapiens
  MOD_RES (1)..(1): Any amino acid
XNMFPPNLVEACFKQSSSCHSSTSW

SEQ ID NO: 61959 - protein, 235 aa, Homo sapiens
  MOD_RES (1)..(1): Any amino acid
XNYLFQGRQECYAFNGTQRFLERYIYNREEFVRFDSDVGEFRAVTELGRPDEEYWNSQKDILEEKRAVPDRMCRHNYELGGPMTLQRRVQPRVNVSPSKKGPLQHHNLLVCHVTDFYPGSIQVRWFLNGQEETAGVVSTNLIRNGDWTFQILVMLEMTPQQGDVYTCQVEHTSMDSPVTVEWKAQSDSARSKTLTGAGGFVLGLIICGVGIFMHRRSKKGEKACRFNEDLHKQGS

SEQ ID NO: 61960 - protein, 175 aa, Homo sapiens; identical to SEQ ID NO: 45445

SEQ ID NO: 61961 - protein, 32 aa, Homo sapiens
LLESAFGWFDAHDPKYWRRSTRLPKGMLGTKQ

SEQ ID NO: 61962 - protein, 410 aa, Homo sapiens
  MOD_RES (1)..(1): Any amino acid
XFLLVFSCLVLSVFSTIKEYEKSSEGALYILEIVTIVVFGVEYFVRIWAAGCCCRYRGWRGRLKFARKPFCVIDIMVLIASIAVLAAGSQGNVFATSALRSLRFLQILRMIRMDRRGGTWKLLGSVVYAHSKELVTAWYIGFLCLILASFLVYLAEKGENDHFDTYADALWWGLITLTTIGYGDKYPQTWNGRLLAATFTLIGVSFFALPAGILGSGFALKVQEQHRQKHFEKRRNPAAGLIQSAWRFYATNLSRTDLHSTWQYYERTVTVPMYSSQTQTYGASRLIPPLNQLELLRNLKSKSGLAFRKDPPPEPSPSKGSPCRGPLCGCCPGRSSQKVSLKDRVFSSPRGVAAKGKGSPQAQTVRRSPSADQSLEDSPSKVPKSWSFGDRSRARQAFRIKGAASRQNSE

SEQ ID NO: 61963 - protein, 59 aa, Homo sapiens
MAETSLLEAGASAASTAAALENLQVEASCSVCLEYLKEPVIIECGHNFCKACITRWWED

SEQ ID NO: 61964 - protein, 584 aa, Homo sapiens
MVGLSGPVQYRTEKHSTMPDSPVDVKTQSRLTPPTMPPPPTTQGAPRTSSFTPTTLTNGTSHSPTALNGAPSPPNGFSNGPSSSSSSSLANQQLPPACGARQLSKLKRFLTTLQQFGNDISPEIGERVRTLVLGLVNSTLTIEEFHSKLQEATNFPLRPFVIPFLKANLPLLQRELLHCARLAKQNPAQYLAQHEQLLLDASTTSPVDSSELLLDVNENGKRRTPDRTKENGFDREPLHSEHPSKRPCTISPGQRYSPNNGLSYQPNGLPHPTPPPPQHYRLDDMAIAHHYRDSYRHPSHRDLRDRNRPMGLHGTRQEEMIDHRLTDREWAEEWKHLDHLLNCIMDMVEKTRRSLTVLRRCQEADREELNYWIRRYSDAEDLKKGGGSSSSHSRQQSPVNPDPVALDAHREFLHRPASGYVPEEIWKKAEEAVNEVKRQAMTELQKAVSEAERKAHDMITTERAKMERTVAEAKRQAAEDALAVINQQEDSSESCWNCGRKASETCSGCNTARYCGSFCQHKDWEKHHHICGQTLQAQQQGDTPAVSSSVTPNSGAGSPMDTPPAATPRSTTPGTPSTIETTPR

SEQ ID NO: 61965 - protein, 86 aa, Homo sapiens
MGSKAKKRVLLPTRPAPPTVEQILEDVRGAPAEDPVFTILAPEEMGVSLCCPGWSLTLGLKCSSRLGLPKCWITGVSHHTWLHPSC

SEQ ID NO: 61966 - protein, 777 aa, Homo sapiens
MEEPGATPQPYLGLVLEELRRVVAALPESMRPDENPYGFPSELVVCAAVIGFFVVLLFLWRSFRSVRSRLYVGREQKLGATLSGLIEEKCKLLEKFSLIQKEYEGYEVESSLEDASFEKAAAEEARSLEATCEKLNRSNSELEDEILCLEKDLKQEKSKHSQQDELMADISKSIQSLEDESKSLKSQIAEAKIICKTFKMSEERRAIAIKDALNENSQLQTSHKQLFQQEAEVWKGQVSELNKQKITFEDSKVHAEQVLNDKENHIKTLTGHLPMMKDQAAVLEEDTTDDDNLELEVNSQWENGANLDDPLKGALKKLIHAAKLNVSLKSLEGERNHIIIQLSEVDKTKEELTEHIKNLQTQQASLQSENIYFESENQKLQQKLKIMTEFYQENEMKLYRKLTVEENYRIEEEEKLSRVEEKISRATEGLETYRKLAKDLEEELERTVHFYQKQVISYEKRGHDNWLAARTAERNLSDLRKENAHNKQKLTETELKFELLEKDPNALDVSNTAFGREHSPCSPSPLGRPSSETRAFPSPQTLLEDPLRLSPVLPGGGGRGPSSPGNPLDHQITNERGEPSYDRLIDPHRAPSDTGSLSSPVEQDRRMMFPPPGQSYPDSTLPPQREDRFYSNSERLSGPAEPRSFKMTSLDKMDGSMPSEMESSRNDAKDDLGNLNVPDSSLPAENEATGPGFIPPPLAPVRGPLFPVDTRGPFMRRGPPFPPPPPGTMFGASRGYFPPRDFPGPPHAPFAMRNIYPPRGLPPYFHPRPGFYPNPAF

SEQ ID NO: 61967 - protein, 141 aa, Homo sapiens
MGVFCLGPWGLGRKLRTPGKGPLQLLSRLCGDHLQAIPAKKAPAGQEEPGTPPSSPLSAEQLDRIQRNKAAALLRLAARNVPVGFGESWKKHLSGEFGKPYFIKLMGFVAEERKHYTVYPPPHQVFTWTQMCDIKDFGEHL

SEQ ID NO: 61968 - protein, 534 aa, Homo sapiens
MSASTGGGGDSGGSGGSSSSSQASCGPESSGSELALATPVPQMLQGLLGSDDEEQEDPKDYCKGGYHPVKIGDVFNGRYHVVRKLGWGHFSTVWLCWDIQRKRFVALKVVKSAGHYTETAVDEIKLLKCVRDSDPSDPKRETIVQLIDDFRISGVNGVHVCMVLEVLGHQLLKWIIKSNYQGLPVPCVKSIVRQVLHGLDYLHTKCKIIHTDIKPENILLCVGDAYIRRLAAEATEWQQAGAPPPSRSIVSTAPQEVLTGKLSKNKRKKMRRKRKQQKRLLEERLRDLQRLEAMEAATQAEDSGLRLDGGSGSTSSSGCFSGSLFSPASCSILSGSSNQRETGGLLSPSTPFGASNLLVNPLEPQNADKIKIKIADLGNACWVHKHFTEDIQTRQYRAVEVLIGAEYGPPADIWSTACMAFELATGDYLFEPHSGEDYSRDEDHIAHIVELLGDIPPAFALSGRYSREFFNRRGELRHIHNLKHWGLYEVLMEKYEWPLEQATQFSAFLLPMMEYIPEKRASAADCLQHPWLNP

SEQ ID NO: 61969 - protein, 126 aa, Homo sapiens
MAAAAEERMAEEGGGGQGDGGSSLASGSTQRQPPPPAPQHPQPGSQALPAPALAPDQLPQNNTLVALPIVAIENILSFMSYDEISQLRLVCKRMDLVCQRMLNQGFLKVERYHNLCQKQVKAQLPR

SEQ ID NO: 61970 - protein, 620 aa, Homo sapiens
MPLAFCGSENHSAAYRVDQGVLNNGCFVDALNVVPHVFLLFITFPILFIGWGSQSSKVHIHHSTWLHFPGHNLRWILTFMLLFVLVCEIAEGILSDGVTESHHLHLYMPAGMAFMAAVTSVVYYHNIETSNFPKLLIALLVYWTLAFITKTIKFVKFLDHAIGFSQLRFCLTGLLVILYGMLLLVEVNVIRVRRYIFFKTPREVKPPEDLQDLGVRFLQPFVNLLSKGTYWWMNAFIKTAHKKPIDLRAIGKLPIAMRALTNYQRLCEAFDAQVRKDIQGTQGARAIWQALSHAFGRRLVLSSTFRILADLLGFAGPLCIFGIVDHLGKENDVFQPKTQFLGVYFVSSQEFLANAYVLAVLLFLALLLQRTFLQASYYVAIETGINLRGAIQTKIYNKIMHLSTSNLSMGEMTAGQICNLVAIDTNQLMWFFFLCPNLWAMPVQIIVGVILLYYILGVSALIGAAVIILLAPVQYFVATKLSQAQRSTLEYSNERLKQTNEMLRGIKLLKLYAWENIFRTRVETTRRKEMTSLRAFAIYTSISIFMNTAIPIAAVLITFVGHVSFFKEADFSPSVAFASLSLFHILVTPLFLLSSVVRSTVKALVRGEGCLCASRAACKS

SEQ ID NO: 61971 - protein, 107 aa, Homo sapiens
MASGGGGCSASERLPPPFPGLEPESEGAAGGSEPEAGDSDTEGEDIFTGAAVVSKHQSPKITTSLLPINNGSKENGIHEEQDQEPQDLFADKLTIVQKQTVCSKKKI

SEQ ID NO: 61972 - protein, 116 aa, Homo sapiens
MAKERGLISPSDFAQLQKYMEYSTKKVSDVLKLFEDGEMAKYVQGDAIGYEGFQQFLKIYLEVDNVPRHLSLALFQSFETGHCLNETNVTKDVVCLNDVSCYFSLLEGGRPEDKLE

SEQ ID NO: 61973 - protein, 113 aa, Homo sapiens
MKLQNQRGGRIFLQDIKKPDCDDWESGLNAMECALHLEKNVNQSLLELHKLATDKNDPHLCDFIETHYLNEQVKAIKELGDHVTNLRKMGAPESGLAEYLFDKHTLGDSDNES

SEQ ID NO: 61974 - protein, 224 aa, Homo sapiens
MWFLTTLLLWVPVDGQVDTTKAVITLQPPWVSVFQEETITLHCEVLHLPGSSSTQWFLNGTATQTSTPSYRITSASVNDSGEYRCQRGLSGRSDPIQLEIHRGWLLLQVSSRVFMEGEPLALRCHAWKDKLVYNVLYYRNGKAFKFFHWNSNLTILKTNISHNGTYHCSGMGKHRYTSAGISQYTVKELFPAPVLNASVTSPLLEGNLVTLSCETKLLLQRPGL

SEQ ID NO: 61975 - protein, 1407 aa, Homo sapiens
MEAEFYMVILTCLIFRNSEGFQIVHVQKQQCLFKNEKVVVGSCNRTIQNQQWMWTEDEKLLHVKSALCLAFIRNAAENYSQNSSERQHPNLHMTGITDTSWVLSTTQPFSSTTEETGLAEPERCNFTLAESKASSHSVSIQWRILGSPCNFSLIYSSDTLGAALCPTFRIDNTTYGCNLQDLQAGTIYNFRIISLDEERTVVLQTDPLPPARFGVSKEKTTSTSLHVWWTPSSGKVTSYEVQLFDENNQKIQGVQIQESTSWNEYTFFNLTAGSKYNIAITAVSGGKRSFSVYTNGSTVPSPVKDIGISTKANSLLISWSHGSGNVERYRLMLMDKGILVHGGVVDKHATSYAFHGLTPGYLYNLTVMTEAAGLQNYRWKLVRTAPMEVSNLKVTNDGSLTSLKVKWQRPPGNVDSYNITLSHKGTIKESRVLAPWITETHFKELVPGRLYQVTVSCVSGELSAQKMAVGRTFPDKVANLEANNNGRMRSLVVSWSPPAGDWEQYRILLFNDSVVLLNITVGKEETQYVMDDTGLVPGRQYEVEVIVESGNLKNSERCQGRTVPLAVLQLRVKHANETSLSIMWQTPVAEWEKYIISLADRDLLLIHKSLSKDAKEFTFTDLVPGRKYMATVTSISGDLKNSSSVKGRTVPAQVTDLHVANQGMTSSLFTNWTQAQGDVEFYQVLLIHENVVIKNESISSETSRYSFHSLKSGSLYSVVVTTVSGGISSRQVVVEGRTVPSSVSGVTVNNSGRNDYLSVSWLLAPGDVDNYEVTLSHDGKVVQSLVIAKSVRECSFSSLTPGRLYTVTITTRSGKYENHSFSQERTVPDKVQGVSVSNSARSDYLRVSWVHATGDFDHYEVTIKNKNNFIQTKSIPKSENECVFVQLVPGRLYSVTVTTKSGQYEANEQGNGRTIPEPVKDLTLRNRSTEDLHVTWSGANGDVDQYEIQLLFNDMKVFPPFHLVNTATEYRFTSLTPGRQYKILVLTISGDVQQSAFIEGFTVPSAVKNIHISPNGATDSLTVNWTPGGGDVDSYTVSAFRHSQKVDSQTIPKHVFEHTFHRLEAGEQYQIMIASVSGSLKNQINVVGRTVPASVQGVIADNAYSSYSLIVSWQKAAGVAERYDILLLTENGILLRNTSEPATTKQHKFEDLTPGKKYKIQILTVSGGLFSKEAQTEGRTVPAAVTDLRITENSTRHLSFRWTASEGELSWYNIFLYNPDGNLQERAQVDPLVQSFSFQNLLQGRMYKMVIVTHSGELSNESFIFGRTVPASVSHLRGSNRNTTDSLWFNWSPASGDFDFYELILYNPNGTKKENWKDKDLTEWRFQGLVPGRKYVLWVVTHSGDLSNKVTAESRTAPSPPSLMSFADIANTSLAITWKGPPDWTDYNDFELQWLPRDALTVFNPYN

SEQ ID NO: 61976 - protein, 444 aa, Homo sapiens
MLLMVVSMACVGFFLVQRAGPHVGGQDKPFLSAWPSAVVPRGGHVTLRCHYRHRFNNFMLYKEDRIHVPIFHGRLFQESFNMSPVTTAHAGNYTCRGSHPHSPTGWSAPSNPVVIMVTGNHRKPSLLAHPGPLVKSGERVILQCWSDIMFEHFFLHKEGISKDPSRLVGQIHDGVSKANFSIGPMMLALAGTYRCYGSVTHTPYQLSAPSDPLDIVVTGPYEKPSLSAQPGPKVQAGESVTLSCSSRSSYDMYHLSREGGAHERRLPAVRKVNRTFKADFPLGPATHGGTYRCFGSFRHSPYEWSDPSDPLLVSVTGNPSSSWPSPTEPSSKSGNPRHLHILIGTSVVIILFILLLFFLLHLWCSNKKNAAVMDQEPAGNRTANSEDSDEQDPEEVTYAQLDHCVFTQRKITRPSQRPKTPPTDTILYTELPNAKPRSKVVSCP

SEQ ID NO: 61977 - protein, 157 aa, Homo sapiens
MQMARLLGLCAWARKSVRMASSRMTRRDPLTNKVALVTASTDGIGFAIARRLAQDRAHVVVSSRKQQNVDQAVATLQGEGLSVTGTVCHVGKAEDRERLVAMGFSPYNVSKTALLGLNNTLAIELAPRNIRVNCLHLDLSRLASAGCSGWTRKKRKA

SEQ ID NO: 61978 - protein, 233 aa, Homo sapiens
MLTLEWESEGLQTVGIVVIICASLKLLHLLGLIDFSEDSVEDELEMATVRHRPEALELLEAQSKFTKKELQILYRGFKNECPSGVVNEETFKEIYSQFFPQGDSTTYAHFLFNAFDTDHNGAVSFEDFIKGLSILLRGTVQEKLNWAFNLYDINKDGYITKEEMLDIMKAIYDMMGKCTYPVLKEDAPRQHVETFFQKMDKNKDGVVTIDEFIESCQKDENIMRSMQLFENVI

SEQ ID NO: 61979 - protein, 199 aa, Homo sapiens
MTMRHNWTPDLSPLWVLLLCAHVVTLLVRATPVSQTTTAATASVRSTKDPCPSQPPVFPAAKQCPALEVTWPEVEVPLNGTLSLSCVACSRFPNFSILYWLGNGSFIEHLPGRLWEGSTSRERGSTGTQLCKALVLEQLTPALHSTNFSCVLVDPEQVVQRHVVLAQLWVRSPRRGLQEQEELCFHMWGGKGGLCQSSL

SEQ ID NO: 61980 - protein, 399 aa, Homo sapiens
MSMSPTVIILACLGFFLDQSVWAHVGGQDKPFCSAWPSAVVPQGGHVTLRCHYRRGFNIFTLYKKDGVPVPELYNRIFWNSFLISPVTPAHAGTYRCRGFHPHSPTEWSAPSNPLVIMVTGLYEKPSLTARPGPTVRAGENVTLSCSSQSSFDIYHLSREGEAHELRLPAVPSINGTFQADFPLGPATHGETYRCFGSFHGSPYEWSDPSDPLPVSVTGNPSSSWPSPTEPSFKTGIARHLHAVIRYSVAIILFTILPFFLLHRWCSKKKVSLTKQRPENSGPCAEAGWEHADAAVMNQEPAGHRTVNREDSDEQDPQEVTYAQLDHCIFTQRKITGPSQRSKRPSTDTSVCIELPNAEPRALSPAHEHHSQALMGSSRETTALSQTQLASSNVPAAGI

SEQ ID NO: 61981 - protein, 130 aa, Homo sapiens
MSRRKQGKPQHLSKREFSPEPLEAILTDDEPDHGPLGAPEGDHDLLTCGQCQMNFPLGDILIFIEHKRKQCNGSLCLEKAVDKPPSPSPIEMKKASNPVEVGIQVTPEDDDCLSTSSRGICPKQEHIAGK

SEQ ID NO: 61982 - protein, 63 aa, Homo sapiens
MALEWQLLSALSDSVKVDEDRAGFQCRKNFPFEYSKRELCTCASRTDCLAPTGMQQERSVFHA

SEQ ID NO: 61983 - protein, 77 aa, Homo sapiens
MEATRRRQHLGATGGPGAQLGASFLQARHGSVSADEAARTAPFHLDLWFYFTLQNWVLDFGRPIAMTEMESWISPLF

SEQ ID NO: 61984 - protein, 131 aa, Homo sapiens
MRVMAPRTLILLLSGALALTETWACSHSMRYFYTAVSRPGRGEPRFIAVGYVDDTQFVQFDSDAASPRGEPRAPWVEQEGPEYWDRETQKYKRQAQTDRVNLRKLRGYYNQSEAEDVWLRPGARRAPPPRV

SEQ ID NO: 61985 - protein, 747 aa, Homo sapiens
MSHFEPNEYIHYDLLEKNINIVRKRLNRPLTLSEKIVYGHLDDPASQEIERGKSYLRLRPDRVAMQDATAQMAMLQFISSGLSKVAVPSTIHCDHLIEAQVGGEKDLRRAKDINQEVYNFLATAGAKYGVGFWKPGSGIIHQIILENYAYPGVLLIGTDSHTPNGGGLGGICIGVGGADAVDVMAGIPWELKCPKVIGVKLTGSLSGWSSPKDVILKVAGILTVKGGTGAIVEYHGPGVDSISCTGMATICNMGAEIGATTSVFPYNHRMKKYLSKTGREDIANLADEFKDHLVPDPGCHYDQLIEINLSELKPHINGPFTPDLAHPVAEVGKVAEKEGWPLDIRVGLIGSCTNSSYEDMGRSAAVAKQALAHGLKCKSQFTITPGSEQIRATIERDGYAQILRDLGGIVLANACGPCIGQWDRKDIKKGEKNTIVTSYNRNFTGRNDANPETHAFVTSPEIVTALAIAGTLKFNPETDYLTGTDGKKFRLEAPDADELPKGEFDPGQDTYQHPPKDSSGQHVDVSPTSQRLQLLEPFDKWDGKDLEDLQILIKVKGKCTTDHISAAGPWLKFRGHLDNISNNLLIGAINIENGKANSVRNAVTQEFGPVPDTARYYKKHGIRWVVIGDENYGEGSSREHAALEPRHLGGRAIITKSFARIHETNLKKQGLLPLTFADPADYNKIHPVDKLTIQGLKDFTPGKPLKCIIKHPNGTQETILLNHTFNETQIEWFRAGSALNRMKELQQ

SEQ ID NO: 61986 - protein, 43 aa, Homo sapiens
MALFPAFAGLSEAPDGGSSRKVKEIMLQLILDIALFGLRTFRL

SEQ ID NO: 61987 - protein, 165 aa, Homo sapiens
MEDLFETFQDEMGFSNMEDDGPEEEERVAEPQANFNTPQALRFEELLANLLNEQHQIAKELFEQLKMKKPSAKQQKEVEKVKPQCKEVHQTLILDPAQRKRLQQQMQQHVQLLTQIHLLATCNPNLNPEASSTRICLSWEPLLKAPSPFTISTTPSFRPCSNPVT

SEQ ID NO: 61988 - protein, 166 aa, Homo sapiens
MLSQSCNLDPLTETYGIPFYLQYLAHWPEYFIVAEAPGGELMGYIMGKAEGSVAREEWHGHVTALSVAPEFRRLGLAAKLMELLEEISERKGGFFVDLFVRVSNQVAVNMYKQLGYSVYRTVIEYYSASNGEPDEDAYDMRKALSRDTEKKSIIPLPHPVRPEDIE

SEQ ID NO: 61989 - protein, 854 aa, Homo sapiens
MKVEACTWAGYSGLYEAIESWDFKKIEKLEEYRLLLKRLQPEFKTRIIPTDIISDLSECLINQECEEILQICSTKGMMAGAEKLVECLLRSDKENWPKTLKLALEKERNKFSELWIVEKGIKDVETEDLEDKMETSDIQIFYQEDPECQNLSENSCPPSEVSDTNLYSPFKPRNYQLELALPAMKGKNTIICAPTGCGKTFVSLLICEHHLKKFPQGQKGKVVFFANQIPVYEQQKSVFSKYFERHGYRVTGISGATAENVPVEQIVENNDIIILTPQILVNNLKKGTIPSLSIFTLMIFDECHNTSKQHPYNMIMFNYLDQKLGGSSGPLPQVIGLTASVGVGDAKNTDEALDYICKLCASLDASVIATVKHNLEELEQVVYKPQKFFRKVESRISDKFKYIIAQLMRDTESLAKRICKDLENLSQIQNREFGTQKYEQWIVTVQKACMVFQMPDKDEESRICKALFLYTSHLRKYNDALIISEHARMKDALDYLKDFFSNVRAAGFDEIEQDLTQRFEEKLQELESVSRDPSNENPKLEDLCFILQEEYHLNPETITILFVKTRALVDALKNWIEGNPKLSFLKPGILTGRGKTNQNTGMTLPAQKCILDAFKASGDHNILIATSVADEGIDIAQCNLVILYEYVGNVIKMIQTRGRGRARGSKCFLLTSNAGVIEKEQINMYKEKMMNDSILRLQTWDEAVFREKILHIQTHEKFIRDSQEKPKPVPDKENKKLLCRKCKALACYTADVRVIEECHYTVLGDAFKECFVSRPHPKPKQFSSFEKRAKIFCARQNCSHDWGIHVKYKTFEIPVIKIESFVVEDIATGVQTLYSKWKDFHFEKIPFDPAEMSK

SEQ ID NO: 61990 - protein, 68 aa, Homo sapiens
MGHPPLEFSDCYLDSPDFRERLKCYEQELERTNKFIKDVIKDGNALISAMRRSLGQCGNRTQEFKFLT

SEQ ID NO: 61991 - protein, 40 aa, Homo sapiens
MTVRNIASICNMEEPPALGSPGWTLLAPPLVRAFGELRLE

SEQ ID NO: 61992 - protein, 344 aa, Homo sapiens
MHQRHPRARCPPLCVAGILACGFLLGCWGPSHFQQSCLQALEPQAVSSYLSPGAPLKGRPPSPGFQRQRQRQRRAAGGILHLELLVAVGPDVFQAHQEDTERYVLTNLNIGAELLRDPSLGAQFRVHLVKMVILTEPEGAPNITANLTSSLLSVCGWSQTINPEDDTDPGHADLVLYITRFDLELPDGNRQVRGVTQLGGACSPTWSCLITEDTGFDLGVTIAHEIGHSFGLEHDGAPGSGCGPSGHVMASDGAAPRAGLAWSPCSRRQLLSLLRPVPPSPLPLLATHLCAGRSLSLGPSQEPAPGGGRGPRTPVPTHKRPRFQTLPSSCPLLRPASSRCTPRD

SEQ ID NO: 61993 - protein, 740 aa, Homo sapiens
MFSLSSTVQPQVTVPLSHLINAFHTPKNTSVSLSGVSVSQNQHRDVVPEHEAPSSECMFSDFLTKLNIVSIGKGKIFEGYRSMFMEPAKRMKKSLDTTDNWHIRPEPFSLSIPPSLNLRDLGLSELKIGQIDQLVENLLPGFCKGKNISSHWHTSHVSAQSFFENKYGNLDIFSTLRSSCLYRHHSRALQSICSDLQYWPVFIQSRGFKTLKSRTRRLQSTSERLAETQNIAPSFVKGFLLRDRGSDVESLDKLMKTKNIPEAHQDAFKTGFAEGFLKAQALTQKTNDSLRRTRLILFVLLLFGIYGLLKNPFLSVRFRTTTGLDSAVDPVQMKNVTFEHVKGVEEAKQELQEVVEFLKNPQKFTILGGKLPKGILLVGPPGTGKTLLARAVAGEADVPFYYASGSEFDEMFVGVGASRIRNLFREAKANAPCVIFIDELDSVGGKRIESPMHPYSRQTINQLLAEMDGFKPNEGVIIIGATNFPEALDNALIRPGRFDMQVTVPRPDVKGRTEILKWYLNKIKFDQSVDPEIIARGTVGFSGAELENLVNQAALKAAVDGKEMVTMKELEFSKDKILMGPERRSVEIDNKNKTITAYHESGHAIIAYYTKDAMPINKATIMPRGPTLGHVSLLPENDRWNETRAQLLAQMDVSMGGRVAEELIFGTDHITTGASSDFDNATKIAKRMVTKFGMSEKLGVMTYSDTGKLSPETQSAIEQEIRILLRDSYERAKHILKTHS

SEQ ID NO: 61994 - protein, 197 aa, Homo sapiens
MDEDVLTTLKILIIGESGVGKSSLLLRFTDDTFDPELAATIGVDFKVKTISVDGNKAKLAIWDTAGQERFRTLTPSYYRGAQGVILVYDVTRRDTFVKLDNWLNELETYCTRNDIVNMLVGNKIDKRQVQKPVMVYNVPLKNLLKRSFRPLDCGKVRTRIKESNCHTGKKAKEEEPVVVIALCYKLWEIPSLAYLIR

SEQ ID NO: 61995 - protein, 56 aa, Homo sapiens
MSRINKNVVLALLTLTSSAFLLFQLYYYKHYLSTKNGAGLSKSKGSRIGFDSTQWK

SEQ ID NO: 61996 - protein, 283 aa, Homo sapiens
MARCGEGSAAPMVLLGSAGVCSKGLQRKGPCERRRLKATVSEQLSQDLLRLLREEFHTDVTFSVGCTLFKAHKAVLLARVPDFYFHTIGQTSNSLTNQEPIAVENVEALEFRTFLQIIYSSNRNIKNYEEEILRKKIMEIGISQKQLDISFPKCENSSDCSLQKHEIPEDISDRDDDFISNDNYDLEPASELGEDLLKLYVKPCCPDIDIFVDGKRFKAHRAILSARSSYFAAMLSGCWAESSQEYVTLQGISHVELNVMMHFIYGGTLDIPDKTNVGLFPEH

SEQ ID NO: 61997 - protein, 74 aa, Homo sapiens
MAPAADREGYWGPTTSTLDWCEENYSVTWYIAEFWNTVSNLIMIIPPMFGAVQSVRDGLEKRYIASYLALTAIG

SEQ ID NO: 61998 - protein, 264 aa, Homo sapiens
MTCWDNESILLAQSWMPRETVIFASDVRINFDKFRNCMTATVISKTIITTNPDIPEANILLNFIRENKETNVLDDEIDSYFKESINLSTIVDVYTVEQLKGKALKNEGKADPSYGILYAYISTLNIDDETTKVVRNRCSSCGYIVNEASNMCTTCNKNSLDFKSVFLSFHVLIDLTDHTGTLHSCSLTGSVAEETLGCTVHEFLAMTDEQKTALKWQFLLERSKIYLKFVLSHRARSGLKISVLSCKLADPTEASRNLSGQKHV

SEQ ID NO: 61999 - protein, 115 aa, Homo sapiens
MPFQKGMPFDLCFLVQSSDFKVMVNGILFVQYFHRVPFHRVDTISVNGSVQLSYISFQNPRTVPVQPAFSTVPFSQPVCFPPRPRGRRQKPPGVWPANPAPITQTVIHTVQSAPG

SEQ ID NO: 62000 - protein, 211 aa, Homo sapiens
MAKPEQAADGGVRGRGARPPAQEAQRRRRHPVVVARDLAPGVPGSLHSTQKNMAQETNQTPGPMLCSTGCGFYGNPRTNGMCSVCYKEHLQRQQNSGRMSPMGTASGSNSPTSDSASVQRADTSLNNCEGAAGSTSEKSRNVPVAALPVTQQMTEMSISREDKITTPKTEVSEPVVTQPSPSVSQPSTSQSEEKAPELPKPKKNRCFMCRK

SEQ ID NO: 62001 - protein, 736 aa, Homo sapiens
MTTYLEFIQQNEERDGVRFSWNVWPSSRLEATRMVVPVAALFTPLKERPDLPPIQYEPVLCSRTTCRAVLNPLCQVDYRAKLWACNFCYQRNQRGPQMPLIFLYVVDTCMEDEDLQALKESMQMSLSLLPPTALVGLITFGRMVQVHELGCEGISKSYVFRGTKDLSAKQLQEMLGLSKVPLTQATRGPQVQQPPPSNRFLQPVQKIDMNLTDLLGELQRDPWPVPQGKRPLRSSGVALSIAVGLLECTFPNTGARIMMFIGGPATQGPGMVVGDELKTPIRSWHDIDKDNAKYVKKGTKHFEALANRAATTGHVIDIYACALDQTGLLEMKCCPNLTGGYMVMGDSFNTSLFKQTFQRVFTKDMHGQFKMGFGGTLEIKTSREIKISGAIGPCVSLNSKGPCVSENEIGTGGTCQWKICGLSPTTTLAIYFEVVNQHNAPIPQGGRGAIQFVTQYQHSSGQRRIRVTTIARNWADAQTQIQNIAASFDQEAAAILMARLAIYRAETEEGPDVLRWLDRQLIRLCQKFGEYHKDDPSSFRFSETFSLYPQFMFHLRRSSFLQVFNNSPDESSYYRHHFMRQDLTQSLIMIQPILYAYSFSGPPEPVLLDSSSILADRILLMDTFFQILIYHGETIAQWRKSGYQDMPEYENFRHLLQAPVDDAQEILHSRFPMPRYIDTEHGGSQARFLLSKVNPSQTHNNMYAWGQESGAPILTDDVSLQVFMDHLKKLAVSSAA

SEQ ID NO: 62002 - protein, 81 aa, Homo sapiens
MAIKSIASRLRGSRRFLSGFVAGAVVGAAGAGLAALQFFRSQGAEGALTGKQPDGSAEKAVLEQFGFPLTGTEVDSSSLHS

SEQ ID NO: 62003 - protein, 45 aa, Homo sapiens
MGDRRFIDFQFQDSNSSLRPRLGNATANNTCIVDDSFKYNLNGAV

SEQ ID NO: 62004 - protein, 331 aa, Homo sapiens
  MOD_RES (1)..(1): Any amino acid
XIGKDLDYLKDVNGTTSGIGTGSSVEKYIIDESDYMSFINNPSLTVTVPIAVGESDFENLNTEDFSSESDLEESKEKLNESSSSSEGSTVDIGAPVEEQPVVEPEETLEPEACFTEGCVQRFKCCQINVEEGRGKQWWNLRRTCFRIVEHNWFETFIVFMILLSSGALAFEDIYIDQRKTIKTMLEYADKVFTYIFILEMLLKWVAYGYQTYFTNAWCWLDFLIVDVSLVSLTANALGYSELGAIKSLRTLRALRPLRALSRFEGMRDNLAPTWMGWSAGSSPEPFIMGGCECPFRSNSIHHECASGLSYILANFQHHGRKFVCWQILPLY

SEQ ID NO: 62005 - protein, 239 aa, Homo sapiens
MSTETELQVAVKTSAKKDSRKKGQDRSEATLIKRFKGEGVRYKAKLIGIDEVSAARGDKLCQDSMMKLKGVVAGARSKGEHKQKIFLTISFGGIKIFDEKTGVPTSQKKEGVYDVPKSQPVSNGYSFEDFEERFAAATPNRNLPTDFDEIFEATKAVTQLELFGDMSTPPDITSPPTPATPGDAFIPSSSQTLPASADVFSSVPFGTAAVPSGYVAMGAVLPSFWGQQPLVQQQMVMGA

SEQ ID NO: 62006 - protein, 157 aa, Homo sapiens
  MOD_RES (1)..(1): Any amino acid
XRCLLAGLFQCQKEGPIIIHTDEADSEVLYPNYQSCWSLRQRTRGRRQTASLQPGISEDLKKVKDRMGIDSSDKVDFFILLDNVAAEQAHNLPSCPMLKRFARMIEQRAVDTSLYILPKEDRESLQMAVGPFLHILESNLLKAMDSATAPDKIRTCR

SEQ ID NO: 62007 - protein, 250 aa, Homo sapiens
ERPLGEMGSPPAAGFVTLGRLAKARGPRSSSAAFQLQMLQIVCSDTWADEDRCCELPASRDGETCPAFVSACSCSSETPGPPGPQGPPGPPGVKGEKGDHGLPGLQGHPGHQGIPGRVGLQGPKGMRGLEGTAGLPGPPGPRGFQGMAGARGTSGERGPPGTVGPTGLPGPKGERGEKGEPQSLATLYQLVSQACESAIQTHVSKFDSFHENTRPPMPILEQKLEPGTEPLGSPGTRSKALVPGEWGRGG

SEQ ID NO: 62008 - protein, 87 aa, Homo sapiens
MIFWSFVAGVVTFYCSLGPDSLLPNIFFTIKYKPKQLGLQELFPQGHSCAVCGKVKCKRHRPSLLLENYQPWLDLKISSKVDASLSE

SEQ ID NO: 62009 - protein, 191 aa, Homo sapiens
  MOD_RES (1)..(1): Any amino acid
XVDECSEEDLCQSGICTNTDGSFECICPPGHRAGPDLASCLDVDECRERGPALCGSQRCENSPGSYRCVRDCDPGYHAGPEGTCDDVDECQEYGPEICGAQRCENTPGSYRCTPACDPGYQPTPGGGCQDVNECETLQGVCGAALCENVEGSFLCVCPNSPEEFDPMTGRCVPPRTSADVDECQLFRDQVC

SEQ ID NO: 62010 - protein, 537 aa, Homo sapiens
MMMVDLKVAAYLDPQIRALWETKGPARESSGQSKKSPQMDCLDPKSSCWHFRNFTYDEAGGPREAVSKLQELCHLWLKPEIHSKEQILELLVLEQFLTILPRETQTQMQKHHPQSIEEAVALVEHLQRESGQTWNGVAVHELGKEAVLLGETAEASSFGLKPTESQPVGVSQDEEFWNTYEGLQEQLSRNTHKETEPVYERAVPTQQILAFPEQTNTKDWTVTPEHVLPESQSLLTFEEVAMYFSQEEWELLDPTQKALYNDVMQENYETVISLALFVLPKPKVISCLEQGEEPWVQVSPEFKDSAGKSPTGLKLKNDTENHQPVSLSDLEIQASAGVISKKAKVKVPQKTAGKENHFDMHRVGKWHQDFPVKKRKKLSTWKQELLKLMDRHKKDCAREKPFKCQECGKTFRVSSDLIKHQRIHTEEKPYKCQQCDKRFRWSSDLNKHLTTHQGIKPYKCSWCGKSFSQNTNLHTHQRTHTGEKPFTCHECGKKFSQNSHLIKHRRTHTGEQPYTCSICRRNFSRRSSLLRHQKLHL

SEQ ID NO: 62011 - protein, 1473 aa, Homo sapiens
MGRRRRLCLQLYFLWLGCVVLWAQGTAGQPQPPPPKPPRPQPPPQQVRSATAGSEGGFLAPEYREEGAAVASRVRRRGQQDVLRGPNVCGSRFHSYCCPGWKTLPGGNQCIVLQQCSVRCMNGGTCADDHCQCQKGYIGTYCGQPVCENGCQNGGRCIGPNRCACVYGFTGPQCERDYRTGPCFTQVNNQMCQGQLTGIVCTKTLCCATIGRAWGHPCEMCPAQPQPCRRGFIPNIRTGACQDVDECQAIPGICQGGNCINTVGSFECRCPAGHKQSETTQKCEDIDECSIIPGICETGECSNTVGSYFCVCPRGYVTSTDGSRCIDQRTGMCFSGLVNGRCAQELPGRMTKMQCCCEPGRCWGIGTIPEACPVRGSEEYRRLCMDGLPMGGIPGSAGSRPGGTGGNGFAPSGNGNGYGPGGTGFIPIPGGNGFSPGVGGAGVGAGGQGPIITGLTILNQTIDICKHHANLCLNGRCIPTVSSYRCECNMGYKQDANGDCIDVDECTSNPCTNGDCVNTPGSYYCKCHAGFQRTPTKQACIDIDECIQNGVLCKNGRCVNTDGSFQCICNAGFELTTDGKNCVDHDECTTTNMCLNGMCINEDGSFKCICKPGFVLAPNGRYCTDVDECQTPGICMNGHCINSEGSFRCDCPPGLAVGMDGRVCVDTHMRSTCYGGIKKGVCVRPFPGAVTKSECCCANPDYGFGEPCQPCPAKNSAEFHGLCSSGVGITVDGRDINECALDPDICANGICENLRGSYRCNCNSGYEPDASGRNCIDIDECLVNRLLCDNGLCRNTPGSYSCTCPPGYVFRTETETCEDINECESNPCVNGACRNNLGSFNCECSPGSKLSSTGLICIDSLKGTCWLNIQDSRCEVNINGATLKSECCATLGAAWGSPCERCELDTACPRGLARIKGVTCEDVNECEVFPGVCPNGRCVNSKGSFHCECPEGLTLDGTGRVCLDIRMEQCYLKWDEDECIHPVPGKFRMDACCCAVGAAWGTECEECPKPGTKEYETLCPRGAGFANRGDVLTGRPFYKDINECKAFPGMCTYGKCRNTIGSFKCRCNSGFALDMEERNCTDIDECRISPDLCGSGICVNTPGSFECECFEGYESGFMMMKNCMDIDECERNPLLCRGGTCVNTEGSFQCDCPLGHELSPSREDCVDINECSLSDNLCRNGKCVNMIGTYQCSCNPGYQATPDRQGCTDIDECMIMNGGCDTQCTNSEGSYECSCSEGYALMPDGRSCADIDECENNPDICDGGQCTNIPGEYRCLCYDGFMASMDMKTCIDVNECDLNSNICMFGECENTKGSFICHCQLGYSVKKGTTGCTDVDECEIGAHNCDMHASCLNIPGSFKCSCREGWIGNGIKCIDLDECSNGTHQCSINAQCVNTPGSYRCACSEGFTGDGFTCSDVDECAENINLCENGQCLNVPGAYRCECEMGFTPASDSRSCQGGSPGFQLIFKLDQPQ

SEQ ID NO: 62012 - protein, 150 aa, Homo sapiens
MRNWMFLQIVIVGENVSFKSQMRTENLKSEEHLKSSNIRQAEVLKADMTDSKLGPAEVWTSRQALQDLYQKMLVTDLEYALDKKVEQDLWNHAFKNQITTLQGQAKNRANPNRSEVQANLSLFLEAASGFYTQLLQELCTVFNVDLPCRV

SEQ ID NO: 62013 - protein, 647 aa, Homo sapiens
ITQEKNRVKEALEEEQTRVQELEERLARQKEISESNIAYEKRKAKEAMEKEKKKVQDLENRLTKQKEELELKEQKEDVLNNKLSDALAMVEETQKTKATESLKAESLALKLNETLAELETTKTKMIMVEERLILQQKMVKALQDEQESQRHGFEEEIMEYKEQIKQHAQTIVSLEEKLQKVTQHHKKIEGEIATLKDNDPAPKEERPQDPLVAPMTESSAKDMAYEHLIDDLLAAQKEILSQQEVIMKLRKDLTEAHSRMSDLRGELNEKQKMELEQNVVLVQQQSKELSVLKEKMAQMSSLVEKKDRELKALEEALRASQEKHRLQLNTEKEQKPRKKTQTCDTSVQIEPVHTEAFSSSQEQQSFSDLGVRCKGSRHEEVIQRQKKALSELRARIKELEKARSPDHKDHQNESFLDLKNLRMENNVQKILLDAKPDLPTLSRIEILAPQNGLCNARFGSAMEKSGKMDVAEALELSEKLYLDMSKTLGSLMNIKNMSGHVSMKYLSRQEREKVNQLRQRDLDLVFDKITQLKNQLGRKEELLRGYEKDVEQLRRSKVSIEMYQSQVAKLEDDIYKEAEEKALLKEALERMEHQLCQEKRINRAIRQQKVGTRKASLKMDQEREMLRKETSSKSSQSLLHSKPSGKY

SEQ ID NO: 62014 - protein, 91 aa, Homo sapiens
MSNPSAPPPYEDRNPLYPGPPPPGGYGQPSVLPGGYPAYPGYPQPGYGHPAGYPQPMPPTHPMPMNYGPGHGYDGEERAVSDSFGPGEWDD

SEQ ID NO: 62015 - protein, 119 aa, Homo sapiens
MGSNSEVARLLASSDPLAQIAEDKPYAELWMGTHPRGDAKILDNRISQKTLSQWIAENQDSLGSKVKDTFNGNLPFLFKVLSVETPLSIQAHPNKELAEKLHLQAPQHYPDANHKPEMA

SEQ ID NO: 62016 - protein, 83 aa, Homo sapiens
MTRGFAPILPVEFHKMGSFRRPRPRFMSSPVLSDLPRFQAARQALQLSSSSAWNSVQTAVINVFKGGGLQSNELYALNENIRR

SEQ ID NO: 62017 - protein, 324 aa, Homo sapiens
MPATLLRAVARSHHILSKAHQCRRIGHLMLKPLKEFENTTCSTLTIRQSLDLFLPDKTASGLNKSQILEMNQKKSDTSMLSPLNAARCQDEKAHLPTMKSFGTHRRVTHKPNLLGSKWFIKILKRHFSSVSTETFVPKQDFPQVKRPLKASRTRQPSRTNLPVLSVNEDLMHCTAFATADEYHLGNLSQDLASHGYVEVTSLPRDAANILVMGVENSAKEGDPGTIFFFREGAAVFWNVKDKTMKHVMKVLEKHEIQPYEIALVHWENEELNYIKIEGQSKLHRGEIKLNSELDLDDAILEKFAFSNALCLSGFKSWEESETIS

SEQ ID NO: 62018 - protein, 193 aa, Homo sapiens
MIGETNALTDVKKRLERALMETEAPLQVARECLFHREKRMGIDLVHDEVEAQLLTEVDTILCCQERMKLHLDKAIAQLAANRASQHELEKDLSDKQTAYRIDDKCHHLRNTSDGVGYFRGVERVDATVSVPESWAKFTDDNILRSQSERAASAKLRDDIENLLVVTANEMWNQFNKVNLSFTNRIAETADAKN

SEQ ID NO: 62019 - protein, 50 aa, Homo sapiens
  MOD_RES (1)..(1): Any amino acid
XLDEELHLLIISCRKLFYFKIWAFLDVSFVERILKSQKERQCALRVFKGS

SEQ ID NO: 62020 - protein, 965 aa, Homo sapiens
MWRLRRAAVACEVCQSLVKHSSGIKGSLPLQKLHLVSRSIYHSHHPTLKLQRPQLRTSFQQFSSLTNLPLRKLKFSPIKYGYQPRRNFWPARLATRLLKLRYLILGSAVGGGYTAKKTFDQWKDMIPDLSEYKWIVPDIVWEIDEYIDFEKIRKALPSSEDLVKLAPDFDKIVESLSLLKDFFTSGSPEETAFRATDRGSESDKHFRKVSDKEKIDQLQEELLHTQSKIWKLKYQRILERLEKENKELRKLVLQKDDKGIHHRKLKKSLIDMYSEVLDVLSDYDASYNTQDHLPRVVVVGDQSAGKTSVLEMIAQARIFPRGSGEMMTRSPVKVTLSEGPHHVALFKDSSREFDLTKEEDLAALRHEIELRMRKNVKEGCTVSPETISLNVKGPGLQRMVLVDLPGVINTVTSGMAPDTKETIFSISKAYMQNPNAIILCIQDGSVDAERSIVTDLVSQMDPHGRRTIFVLTKVDLAEKNVASPSRIQQIIEGKLFPMKALGYFAVVTGKGNSSESIEAIREYEEEFFQNSKLLKTSMLKAHQVTTRNLSLAVSDCFWKMVRESVEQQADSFKATRFNLETEWKNNYPRLRELDRNELFEKAKNEILDEVISLSQVTPKHWEEILQQSLWERVSTHVIENIYLPAAQTMNSGTFNTTVDIKLKQWTDKQLPNKAVEVAWETLQEEFSRFMTEPKGKEHDDIFDKLKEAVKEESIKRHKWNDFAEDSLRVIQHNALEDRSISDKQQWDAAIYFMEEALQARLKDTENAIENMVGPDWKKRWLYWKNRTQEQCVHNETKNELEKMLKCNEEHPAYLASDEITTVRKNLESRGVEVDPSLIKDTWHQVYRRHFLKTALNHCNLCRRGFYYYQRHFVDSELECNDVVLFWRIQRMLAITANTLRQQLTNTEVRRLEKNVKEVLEDFAEDGEKKIKLLTGKRVQLAEDLKKVREIQEKLDAFIEALHQEK

SEQ ID NO: 62021 - protein, 291 aa, Homo sapiens
GLRKAHSGAQGLLAAQKARGLFKDFFPETGTKIELPELFDRGTASFPQTIYCGFDPTADSLHVGHLLALLGLFHLQRAGHNVIALVGGATARLGDPSGRTKEREALETERVRANARALRLGLEALAANHQQLFTDGRSWGSFTVLDNSAWYQKQHLVDFLAAVGGHFRMGTLLSRQSVQLRLKSPEGMSLAEFFYQVLQAYDFYYLFQRYGCRVQLGGSDQLGNIMSGYEFINKLTGEDVFGITVPLITSTTGAKLGKSAGNAVWLNRDKTSPFELYQFFVRQPDDSVERD

SEQ ID NO: 62022 - protein, 66 aa, Homo sapiens
MLLILMLSLSFNEQASHPAPGPHLPAPPALPHPGACGIAGENAAMEPGRTQIKLDPRYTADLLEVL

SEQ ID NO: 62023 - protein, 620 aa, Homo sapiens
MIEESGNKRKTMAEKRQLFIEMRAQNFDVIRLSTYRTACKLRFVQKRCNLHLVDIWNMIEAFRDNGLNTLDHTTEISVSRLETVISSIYYQLNKRLPSTHQISVEQSISLLLNFMIAAYDSEGRGKLTVFSVKAMLATMCGGKMLDKLRYVFSQMSDSNGLMIFSKFDQFLKEVLKLPTAVFEGPSFGYTEHSVRTCFPQQRKIMLNMFLDTMMADPPPQCLVWLPLMHRLAHVENVFHPVECSYCRCESMMGFRYRCQQCHNYQLCQNCFWRGHAGGPHSNQHQMKEHSSWKSPAKKLSHAISKSLGCVPTREPPHPVFPEQPEKPLDLAHIVPPRPLTNMNDTMVSHMSSGVPTPTKRLQYSQDIPSHLADEHALIASYVARLQHCARVLDSPSRLDEEHRLIARYAARLAAEAGNVTRPPTDLSFNFDANKQQRQLIAELENKNREILQEIQRLRLEHEQASQPTPEKAQQNPTLLAELRLLRQRKDELEQRMSALQESRRELMVQLEELMKLLKAQATGSPHTSPTHGGGRPMPMPVRSTSAGSTPTHCPQDSLSGVGGDVQEAFAQGTRRNLRNDLLVAADSITNTMSSLVKELHSAEEGAEEEEEKMQNGKDRG

SEQ ID NO: 62024 - protein, 999 aa, Homo sapiens
  MOD_RES (1)..(1): Any amino acid
XELDEDPAAEPAEAGVGTTVAPLPPAPAPSSQPVPAGMTVPPPPAAAPPLPRALAKPAVFIPVNRSPEMQEERLKLPILSEEQVIMEAVAEHPIVIVCGETGSGKTTQVPQFLYEAGFSSEDSIIGVTEPRRVAAVAMSQRVAKEMNLSQRVVSYQIRYEGNVTEETRIKFMTDGVLLKEIQKDFLLLRYKVVIIDEAHERSVYTDILIGLLSRIVTLRAKRNLPLKLLIMSATLRVEDFTQNPRLFAKPPPVIKVESRQFPVTVHFNKRTPLEDYSGECFRKVCKIHRMLPAGGILVFLTGQAEVHALCRRLRKAFPPSRARPQEKDDDQKDSVEEMRKFKKSRARAKKARAEVLPQINLDHYSVLPAGEGDEDREAEVDEEEGALDSDLDLDLGDGGQDGGEQPDASLPLHVLPLYSLLAPEKQAQVFKPPPEGTRLCVVATNVAETSLTIPGIKYVVDCGKVKKRYYDRVTGVSSFRVTWVSQASADQRAGRAGRTEPGHCYRLYSSAVFGDFEQFPPPEITRRPVEDLILQMKALNVEKVINFPFPTPPSVEALLAAEELLIALGALQPPQKAERVKQLQENRLSCPITALGRTMATFPVAPRYAKMLALSRQHGCLPYAITIVASMTVRELFEELDRPAASDEELTRLKSKRARVAQMKRTWAGQGASLKLGDLMVLLGAVGACEYASCTPQFCEANGLRYKAMMEIRRLRGQLTTAVNAVCPEAELFVDPKMQPPTESQVTYLRQIVTAGLGDHLARRVQSEEMLEDKWRNAYKTPLLDDPVFIHPSSVLFKELPEFVVYQEIVETTKMYMKGVSSVEVQWIPALLPSYCQFDKPLEEPAPTYCPERGRVLCHRASVFYRVGWPLPAIEVDFPEGIDRYKHFARFLLEGQVFRKLASYRSCLLSSPGTMLKTWARLQPRTESLLRALVAEKADCHEALLAAWKKNPKCEFDQGQGVGVDRMGSLRQGLCALCTVSPGLAEGSGPTAAGQLFAT

SEQ ID NO: 62025 - protein, 542 aa, Homo sapiens
MDLGWDRSRGPRRSTSSVRVRELSWQGLHNPCPQSKGPGSQRDRLGEQLVEEYLSPARLQALARVDDLRLVRTLEMCVDTREGSLGNFGVHLPNLDQLKLNGSHLGSLRDLGTSLGHLQVLWLARCGLADLDGIASLPALKELYASYNNISDLSPLCLLEQLEVLDLEGNSVEDLGQVRYLQLCPRLAMLTLEGNLVCLQPAPGPTNKVPRGYNYRAEVRKLIPQLQVLDEVPAAHTGPPAPPRLSQDWLAVKEAIKKGNGLPPLDCPRGAPIRRLDPELSLPETQSRASRPWPFSLLVHGGPLPEGLLSEDLAPEDNTSSLTHGAGQVLCGNPTKGLRERRHQCQAREPPEQLPQHRPGDPAASTSTPEPDPADSSDFLALAGLRAWREHGVRPLPYRHPESQQEGAVAPWGPRRVPEEQVHQAEPKTPSSPPSLASEPSGTSSQHLVPSPPKHPRPRDSGSSSPRWSTDLQSRGRRLRVLGSWGPGLGDGVAAVPVLRALEVASGLSPRAQGCPGPKPAPHAAARPPRAAELSHPSPVPT

SEQ ID NO: 62026 - protein, 245 aa, Homo sapiens
MWNPHIRRANCNLSLSLLQEQLFDVKEDRNLAIKFHPKLPLNWSEREAMQKSEGSGGTQLKNRATGNYDQRTSSSTQLKHRNAVQGSKSSLSTSSPESARKLHPRPSDKLNPKTINPFGEQSRVPSAFAAIYSKGGIPCRLVHGSVKHRLQWECPPESLSFDPLLITLAEGLRETKHPYTFVSKEGFRELLLVKGAPEKAIPLLPRLIPVLKAALVHSDDEVFERGLNALVQLSVVVGPSLNDHL

SEQ ID NO: 62027 - protein, 176 aa, Homo sapiens
VICDKDESGGRALEQELPGAVFILCDVTQEDDVKTLVSETIRRFGRLDCVVNNAGHHPPPQRPEETSAQGFRQLLELNLLGTYTLTKLALPYLRKSQGNVINISSLVGAIGQAQAVPYVATKGAVTAMTKALALDESPYGVRVNCHWAAWASPLRSGLRQCSWPPKPTSARALNCS

SEQ ID NO: 62028 - protein, 89 aa, Homo sapiens
  MOD_RES (1)..(1): Any amino acid
XWPTGHGDIISGHGPLVSTTAAFAAAISMVVAMAVYTSERWDQPPHPQIQTFFSWSFYLGWVSAILLLCTGALSLGAHCGGPRPGYETL

SEQ ID NO: 62029 - protein, 355 aa, Homo sapiens
  MOD_RES (1)..(1): Any amino acid
XNLCDRSGAWGIVLEAVAGAGIVTTFVLTIILVASLPFVQDTKKRSLLGTQVFFLLGTLGLFCLVFACVVKPDFSTCASRRFLFGVLFAICFSCLAAHVFALNFLARKNHGPRGWVIFTVALLLTLVEVIINTEWLIITLVRGSGEGGPQGNSSAGWAVASPCAIANMDFVMALIYVMLLLLGAFLGAWPALCGRYKRWRKHGVFVLLTTATSVAIWVVWIVMYTYGNKQHNSPTWDDPTLAIALAANAWAFVLFYVIPEVSQDDDQSSSLERCPVVSPTALWCYPRPQQPVPLSLAYFSRAKLGEQSLQSRIAALTVAPDLSVLPVEVHEQNVISLQWKGSRELCGPHAALGLA

SEQ ID NO: 62030 - protein, 246 aa, Homo sapiens
VAIKKVREQNETDIKHLRKLKHPNIIAFNVLVTHTDAVKISDFGTSKELSDKSTKMSFAGTVAWMAPEVIRNEPVSEKVDIWSFGVVLWELLTGEIPYKDVDSSAIIWGVGSNSLHLPVPSTCPDGFKILMKQTWQSKPRNRPSFRQTLMHLDIASADVLATPQETYFKSQAEWREEVKKHFEKIKSEGTCIHRLDEELIRRRREELRHALDIREHYERKLERANNLYMELSAIMLQLEMREKELI

SEQ ID NO: 62031 - protein, 137 aa, Homo sapiens
MAAAAECDVVMAATEPELLDDQEAKREAETFKEQGNAYYAKKDYNEAYNYYTKAIDMCPKNASYYGNRAATLMMLGRFREALGDAQQSVRLDDSFVRGHLREGKCHLSLGNAMAACRSFQRALELDHKNAQAQQELH

SEQ ID NO: 62032 - protein, 231 aa, Homo sapiens
  MOD_RES (1)..(1): Any amino acid
XDSSDDWEIPDGQITVGQRIGSGSFGTVYKGKWHGDVAVKMLNVTAPTPQQLQAFKNEVGVLRKTRHVNILLFMGYSTKPQLAIVTQWCEGSSLYHHLHIIETKFEMIKLIDIARQTAQGMDYLHAKSIIHRDLKSNNIFLHEDLTVKIGDFGLATVKSRWSGSHQFEQLSGSILWMAPEVIRMQDKNPYSFQSDVYAFGIVLYELMTGQLPYSNINNRDQVLCPPWEYNK

SEQ ID NO: 62033 - protein, 177 aa, Homo sapiens
MKDKAGQKCKPIDVFDFPDNSDVSSIGRLGENEKDEETYETFDPPLHSTAIYADEEEFSKHCGLSLSSTPPGKEAKRSSDTSGNEASEIESVKISAKKPGRKLRPISDDSESIEESDTRRKVKSAEKISTQRHEVIRTTASSELSEKPAESVTSKKTGPLSAQPSVEKENLAIESQS

SEQ ID NO: 62034 - protein, 84 aa, Homo sapiens
  MOD_RES (1)..(1): Any amino acid
XLDSDGADLLTKLLQFEGRNRISAEDAMKHPFFLSLGERIHKLPDTTSIFALKEIQLQKEASLRSSSMPDSVAGGQHGRASLPH

SEQ ID NO: 62035 - protein, 160 aa, Homo sapiens
MFEAIGFLAIKLGVIPSDFSYAGLKDKKAITYQAMVVRKVTPERLKNIEKEIEKKRMNVFNIRSVDDSLRLGQLKGNHFDIVIRNLKKQINDSANLRERIMEAIENVKKKGFVNYYGPQRFGKGRKVHTDQIGLALLKNEMMKAIKLFLTPEDLDDPVNR

SEQ ID NO: 62036 - protein, 55 aa, Homo sapiens
MEAARPPPTAGKFVVVGGGIAGVTCAEQLATHFPSEDILLVTASPVIKAVTNFKQ

SEQ ID NO: 62037 - protein, 239 aa, Homo sapiens
MLSAVWGAGGPGAGGAARGQPSRKELLLRHHLWSGPRCLSFPLGSLPASLLGLPGATSHRSCLSPNLASGLAARGTQTQSVLFGEVRLPLDGGVRGARKRMNFDHFQILRAIGKGSFGKVSPRVPRRPQASCRTALCPPGVHCAEAGHGEDVRHEVHEQAAVHRARRGPQRLPGAGDPAGDRARLPGEPLVLLPGRGGHVHGRGPATGRGPALPPAAERAVLRGHGEAVHLRDGTGSGL

SEQ ID NO: 62038 - protein, 153 aa, Homo sapiens
MGVIGIQLVVTMVMASVMQKIIPHYSLARWLLCNGSLRWYQHPTEEELRILAGKQQKGKTKKDRKYNGHIESKPLTIPKDIDLHLETKSVTEVDTLALHYFPEYQWLVDFTVAATVVYLVTEVYYNFMKPTQEMNISLVWCLLVLSFAIRRWW

SEQ ID NO: 62039 - protein, 194 aa, Homo sapiens
MGKQNSKLRPEVMQDLLESTDFTEHEIQEWYKGFLRDCPSGHLSMEEFKKIYGNFFPYGDASKFAEHVFRTFDANGDGTIDFREFIIALSVTSRGKLEQKLKWAFSMYDLDGNGYISKAEMLEIVQAIYKMVSSVMKMPEDESTPEKRTEKIFRQMDTNRDASFVVDASWECPEPQCACGEHGQTSWCSLFDDF

SEQ ID NO: 62040 - protein, 130 aa, Homo sapiens
  MOD_RES (1)..(1): Any amino acid
XTPNRRRKKQLNAAFLPQDELTALNVKQGFNNQPAVSGDEHGSAKNVSFNPAKISSNFSSIIAEKLRCNTLPDTGRRKPQVNQKDNFWLVTARSQSAINTWFTDLAGTKPLTQLAKKVPIFSKKEEVFGY

SEQ ID NO: 62041 - protein, 99 aa, Homo sapiens
MTEEACRTRSQKRALERDPTEDDVESKKIKMERGLLASDLNTDGDMRVTPEPGAGPTQGLLRATEATAMAMGRGEGLVGDGPVDMRTSHRKAVLKNEKG

SEQ ID NO: 62042 - protein, 75 aa, Homo sapiens
MAENGKNCDQRRVAMNKEHHNGNFTDPSSVNEKKRREREERQNIVLWRQPLITLQYFSLEILVILKEWTSNMCNV

SEQ ID NO: 62043 - protein, 209 aa, Homo sapiens
MSWIKEGELSLWERFCANIIKAGPMPKHIAFIMDGNRRYAKKCQVERQEGHSQGFNKLAETLRWCLNLGILEVTVYAFSIENFKRSKSEVDGLMDLARQKFSRLMEEKEKLQKHGVCIRVLGDLHLLPLDLQELIAQAVQATKNYNKCFLNVCFAYTSRHEISNAVREMAWGVEQGLLDPRYPELFCMVIVKENRPGPAWQLTPVILAH

SEQ ID NO: 62044 - protein, 103 aa, Homo sapiens
MCDFTEDQTAEMNVKVLDFEHFLPMLQTVAKNKDQGTYEDYVEGLRVFDKEGNGTVMGAEIRHVLVTLGEKMTEEEVEMLVAGHEDSNGCINYEELVRMVLNG

SEQ ID NO: 62045 - protein, 62 aa, Homo sapiens
MLRCLYHWHRPVLNRRWSRLCLPKQYLFTMKLQSPEFQSLFTEGLKSLTELFVKENHELRIA

SEQ ID NO: 62046 - protein, 276 aa, Homo sapiens
MVRTDGHTLSEKRNYQVTNSMFGASRKKFVEGVDSDYHDENMYYSQSSMFPHRSEKDMLASPSTSGQLSQFGASLYGQQNGSENVTGLDLSDFPALADRNRREGSGNPTPLINPLAGRAPYVGMVTKPANEQSQDFSIHNEDFPALPGSSYKDPTSSNDDSKSNLNTSGKTTSSTDGPKFPGDKSSTTQNNNQQKKGIQVLPDGRVTNIPQGMVTDQFGMIGLLTFIRAAETDPGMVHLALGSDLTTLGLNLNSPENLYPKFASPWASSPCRPQDI

SEQ ID NO: 62047 - protein, 60 aa, Homo sapiens
MPASWTSPQKSSALAPEDHGSSYESFALVAQAGVQWHNLGSPQPLPPGFKRFSCLSLPSS

SEQ ID NO: 62048 - protein, 75 aa, Homo sapiens
MPCQRIPEATTTLATTPGAYSSDPQCQNYCNMSDTRVHMSLRRYCQQDHVLRAQVLASEAAGPAWQRLAVRVLAV

SEQ ID NO: 62049 - protein, 161 aa, Homo sapiens
MSSESSKKRKPKVIRSDGAPAEGKRNRSDTEQEGKYYSEEAEVDLRDPGRDYELYKYTCQELQRLMAEIQDLKSRGGKDVAIEIEERRIQSCVHFMTLKKLNRLAHIRLKKGRDQTHEAKQKVDAYHLQLQNLLYEVMHLQKEITKCLEFKSKHEEIDLVS

SEQ ID NO: 62050 - protein, 19 aa, Homo sapiens
MHFRSTVLCVSKMEADLSG

SEQ ID NO: 62051 - protein, 433 aa, Homo sapiens
MERPASPQMASSSPDSPCSCDCFVSVPPASAIPAVIFAKNSDRPRDEVQEVVFVPAGTHTPGSRLQCTYIEVEQVSKTHAVILSRPSWLWGAEMGANEHGVCIGNEAVWTKEPVGEGEALLGMDLLRLALERSSSAQEALHVITGLLEHYGQGGNCLEDAAPFSYHSTFLLADRTEAWVLETAGRLWAAQRIQEGARNISNQLSIGTDISAQHPELRTHAQAKGWWDGQGAFDFAQIFSLTQQPVRMEAAKARFQAGRELLRQRQGGITAEVMMGILRDKESGICMDSGGFRTTASMVSVLPQDPTQPCVHFLTATPDPSRSVFKPFIFGMGVAQAPQVLSPTFGAQDPVRTLPRFQTQVDRRHTLYRGHQAALGLMERDQDRGQQLQQKQQDLEQEGLEATQGLLAGEWAPPLWELGSLFQAFVKRESQAYA

SEQ ID NO: 62052 - protein, 374 aa, Homo sapiens
MPVRAADKLAPAQYIRYTPSQQGVAFNSGAKQRVIRMVEMQKDPMEPPRFKINKKIPRGPPSPPAPVMHSPSRKMTVKEQQEWKIPPCISNWKNAKGYTIPLDKRLAADGRGLQTVHINENFAKLAEALYIADRKAREAVEMRAQVERKMAQKEKEKHEEKLREMAQKARERRAGIKTHVEKEDGEARERDEIRHDRRKERQHDRNLSRAAPDKRSKLQRNENRDISEVIALGVPNPRTSNEVQYDQRLFNQSKGMDSGFAGGEDEIYNVYDQAWRGGKDMAQSIYRPSKNLDKDMYGDDLEARIKTNRFVPDKEFSGSDRRQRGREGPVQFEEDPFGLDKFLEEAKQHGGSKRPSDSSRPKEHEHEGKKRRKE

SEQ ID NO: 62053 - protein, 229 aa, Homo sapiens
KQAWRGSATRLGPQNSGRQECYAFNGTQRFLERYIYNREEFARFDSDVGEFRAVTELGRPAAEYWNSQKDILEEKRAVPDRMCRHNYELGGPMTLQRRVQPRVNVSPSKKGPLQHHNLLVCHVTDFYPGSIQVRWFLNGQEETAGVVSTNLIRNGDWTFQILVMLEMTPQQGDVYTCQVEHTSLDSPVTVEWKAQSDSARSKTLTGAGGFVLGLIICGVGIFMHRRSKK

SEQ ID NO: 62054 - protein, 213 aa, Homo sapiens
MATTGALGNYYVDSFLLGADAADELSVGRYAPGTLGQPPRQAATLAEHPDFSPCSFQSKATVFGASWNPVHAAGANAVPAAVYHHHHHHPYVHPQAPVAAAAPDVDREKQPSEGAFSENNAENESGGDKPPIDPNNPAANWLHARSTRKKRCPYTKHQTLELEKEFLFNMYLTRDRRYEVARLLNLTERQVKIWFQNRRMKMKKINKDRAKDE

SEQ ID NO: 62055 - protein, 30 aa, Homo sapiens
MFTLAEVASLNDIQPTYRILKPWWDVFMDY

SEQ ID NO: 62056 - protein, 236 aa, Homo sapiens
MRTVSLCHPDWSALASSWLTAASTSWAQYGNFIDKLRLFTRGGSGGMGYPRLGGEGGKGGDVWVVAQNRMTLKQLKDRYPRKRFVAGVGANSKISALKGSKGKDCEIPVPVGISVTDENGKIIGELNKENDRILVAQGGLGGKLLTNFLPLKGQKRIIHLDLKLIADVGLVGFPNAGKSSLLSCVSHAKPAIADYAFTTLKPELGKIMYSDFKQISVADLPGLIEGAHMNKGMGHK

SEQ ID NO: 62057 - protein, 598 aa, Homo sapiens
MPDRLDTSVSCFVVKIWGGKENIYQLLIEWKVCLDGLKYLGQQIHARNQNEIIFGLNDGYYGAPFEHKGYSNAQKTILLQVDQNCVRNSYDVFSLLRLHRAQCAIKQTQVTVQKIGKEIEEKLRLTSTSNELKKKSECLQLKILVLQNELERQKKALGREVALLHKQQIALQDKGSAFSAEHLKLQLQKESLNELRKECTAKRELFLKTNAQLTIRCRQLLSELSYIYPIDLNEHKDYFVCGVKLPNSEDFQAKDDGSIAVALGYTAHLVSMISFFLQVPLRYPIIHKGSRSTIKDNINDKLTEKEREFPLYPKGGEKLQFDYGVYLLNKNIAQLRYQHGLGTPDLRQTLPNLKNFMEHGLMVRCDRHHTSSAIPVPKRQSSIFGGADVGFSGGIPSPDKGHRKRASSENERLQYKTPPPSYNSALAQPVTTVPSMGETERKITSLSSSLDTSLDFSKENKKKGEDLVGSLNGGHANVHPSQEQGEALSGHRATVNGTLLPSEQAGSASVQLPGEFHPVSEAELCCTVEQAEEIIGLEATGFASGDQLEAFNCIPVDSAVAVECDEQVLGEFEEFSRRIYALNENVSSFRRPRRSSDK

SEQ ID NO: 62058 - protein, 128 aa, Homo sapiens
MDPGSRWRNLPSGPSLKHLTDPSYGIPREQQKAALQELTRAHVESFNYAVHEGLGLAVQAIPPFEFAFKDERISFTILDAVISPPTVPKGTICKEANVYPAECRGRRSTYRGKLTADINWAVNGISKG

SEQ ID NO: 62059 - protein, 385 aa, Homo sapiens
MSSPNIWSTGSSVYSTPVFSQKMTVWILLLLSLYPGFTSQKSDDDYEDYASNKTWVLTPKVPEGDVTVILNNLLEGYDNKLRPDIGVKPTLIHTDMYVNSIGPVNAINMEYTIDIFFAQTWYDRRLKFNSTIKVLRLNSNMVGKIWIPDTFFRNSKKADAHWITTPNRMLRIWNDGRVLYTLRLTIDAECQLQLHNFPMDEHSCPLEFSSYGYPREEIVYQWKRSSVEVGDTRSWRLYQFSFVGLRNTTEVVKTTSGDYVVMSVYFDLSRRMGYFTIQTYIPCTLIVVLSWVSFWINKDAVPARTSLGITTVLTMTTLSTIARKSLPKVSYVTAMDLFVSVCFIFVFSALVEYGTLHYFVSNRKPSKDKDKKKKNPLLRMFSFKV

SEQ ID NO: 62060 - protein, 82 aa, Homo sapiens
MAAPALALVSFEDVVVTFTGEEWGHLDLAQRTLYQEVMLETCRLLVSLGHPVPKPELIYLLEHGQELWTVKRGLSQSTCAGW

SEQ ID NO: 62061 - protein, 371 aa, Homo sapiens
MSDSKEPRVQQLGLLGCLGHGALVLQLLSFMLLAGVLVAILVQVSKVPSSLSQEQSEQDAIYQNLTQLKAAVGELSEKSKLQEIYQELTQLKAAVGELPEKSKLQEIYQELTRLKAAVGELPEKSKLQEIYQELTRLKAAVGELPEKSKLQEIYQELTRLKAAVGELPEKSKLQEIYQELTELKAAVGELPEKSKLQEIYQELTQLKAAVGELPDQSKQQQIYQELTDLKTAFERLCRHCPKDWTFFQGNCYFMSNSQRNWHDSVTACQEVRAQLVVIKTAEEQNFLQLQTSRSNRFSWMGLSDLNQEGTWQWVDGSPLSPSFQRYWNSGEPNNSGNEDCAEFSGSGWNDNRCDVDNYWICKKPAACFRDE

SEQ ID NO: 62062 - protein, 73 aa, Homo sapiens
MEQSNDSLRVNHNDGEESKTSAQVFEHLICMDSRDSSFGQNDSPTVLPITTREANNSLISQNIPGPLTQTQTL

SEQ ID NO: 62063 - protein, 145 aa, Homo sapiens
MHHCKRYRSPEPDPYLSYRWKRRRSYSREHEGRLRYPSRREPPPRRSRSRSHDRLPYQRRYRERRDSDTYRCEERSPSFGEDYYGPSRSRHRRRSRERGPYRTRKHAHHCHKRRTRSCSSASSMRLWGTWVKAPLARWWSAWTMP

SEQ ID NO: 62064 - protein, 150 aa, Homo sapiens
MAFASWWYKTHVSEKTSESPSKPGEKKGSDEKKAASLGSSQSSRTYAGGTASATKVSASSGATSKSSSMNPTETKAVKTEPEKKSQSTKPKSLPKQASDTGSNDAHNKKAVSRSAEQQPSEKSTEPKTKPQDMISAGGESVAGITAISGK

SEQ ID NO: 62065 - protein, 336 aa, Homo sapiens
MAMDSSLQARLFPGLAIKIQRSNGLIHSANVRTVNLEKSCVSVEWAEGGATKGKEIDFDDVAAINPELLQLLPLHPKDNLPLQENVTIQKQKRRSVNSKIPAPKESLRSRSTRMSTVSELRITAQENDMEVELPAAANSRKQFSVPLRRKSCLVKEVEKMKNKREEKKAQNSEMRMKRAQEYDSSFPNWEFARMIKEFRATLECHPLTMTDPIEEHRICVCVRKRPLNKQELAKKEIDVISIPSKCLLLVHEPKLKVDLTKYLENQAFCFDFAFDETASNEVVYRFTARPLVQTIFEGGKATCFAYGQTGSGKTHTMGGDLSGKAQNASKGIYAMA

SEQ ID NO: 62066 - protein, 156 aa, Homo sapiens
MASGAGGSWGRSPPQSAVPTPLSWAVPPAPPQPGRVKEDLLELMMLQNAQMHQLLLSRLVAGALQPRPASPCPQVYLEVPQEEPEEEEEEMDVREKGPLVFHHHYLPYLMPSPGALLPWPAPFFPTPACQPYLQDVPRIQHCPASRERETTMMPRA

SEQ ID NO: 62067 - protein, 202 aa, Homo sapiens
MTRPDCSSDFNSRHFPLGQAQRPLGQRQPRRSFFESFIRTLIITCVALAVVLSSVSICDGHWLLAEDRLFGLWHFCTTTNQTICFRDLGQAHVPGLAVGMGLVRSVGALAVVAAIFGLEFLMVSQLCEDKHSQCKWVMGSILLLVSFVLSSGGLLGFVILLRNQVTLIGFTLMFWCEFTASFLLFLNAISGLHINSITHPWE

SEQ ID NO: 62068 - protein, 166 aa, Homo sapiens
MTHYLREGEPYLNTAYGHMICYWDGSAHYLMYLVMVAAIAWEETYRTIGLYWVGSIIMSVVVFVPGNIVGKYGTRICPAFFLSIPYTCLPVWAGFRIYNQPSENYNYPSKVIQEAQAKDLLRRPFDLMLVVCLLLATGFCLFRGLIALDCPSELCRLYTQFQEPYL

SEQ ID NO: 62069 - protein, 90 aa, Homo sapiens
  MOD_RES (1)..(1): Any amino acid
XAAPLIPLSQQIPTGNSLYESYYKQVDPAYTGRVGASEAALFLKKSGLSDIILGKIWDLADPEGKGFLDKQVYTHVHRANGGAGQSPQAG

SEQ ID NO: 62070 - protein, 68 aa, Homo sapiens
MPSEKTFKQRRTFGECRREGGGCGGAGVRAVEGGRAWDAVRGRGRAGRPSGAGGCRPAGPRDAGPGAP

SEQ ID NO: 62071 - protein, 155 aa, Homo sapiens
MTHNNFWLKKIEISVSEAEKRTGRNAMNMQETYTAYLIETRSVEHTDGQSVLTDSLWRRYSEFELLRSYLLVYYPHIVVPPLPEKRAEFVWHKLSADNMDPDFVERRRIGLENFLLRIASHPILCRDKIFYLFLTQEGNWKETVNETGFQLKEIY

SEQ ID NO: 62072 - protein, 162 aa, Homo sapiens
MLPPCLELSGKRPRHSWADALSTIRLPHVKYICPHAPRIPVTLNMKMVMPSWFDLMGLSPDAPEDEAGIKKAAENIKALIEHEMKNGIPANRIVLGGFSQGGALSLYTALTCPHPLAGIVALSCWLPLHRAFPQAANGSAKDLAILQCHGELDPMVPVRFGA

SEQ ID NO: 62073 - protein, 705 aa, Homo sapiens
MDVSLCPAKCSFWRIFLLGSVWLDYVGSVLACPANCVCSKTEINCRRPDDGNLFPLLEGQDSGNSNGNASINITDISRNITSIHIENWRSLHTLNAVDMELYTGLQKLTIKNSGLRSIQPRAFAKNPHLRYINLSSNRLTTLSWQLFQTLSLRELQLEQNFFNCSCDIRWMQLWQEQGEAKLNSQNLYCINADGSQLPLFRMNISQCDLPEISVSHVNLTVREGDNAVITCNGSGSPLPDVDWIVTGLQSINTHQTNLNWTNVHAINLTLVNVTSEDNGFTLTCIAENVVGMSNASVALTVYYPPRVVSLEEPELRLEHCIEFVVRGNPPPTLHWLHNGQPLRESKIIHVEYYQEGEISEGCLLFNKPTHYNNGNYTLIAKNPLGTANQTINGHFLKEPFPVDEVSPTPPITVTHKPEEDTFGVSIAVGLAAFACVLLVVLFVMINKYGRRSKFGMKGPVAVISGEEDSASPLHHINHGITTPSSLDAGPDTVVIGMTRIPVIENPQYFRQGHNCHKPDTYVQHIKRRDIVLKRELGEGAFGKVFLAECYNLSPTKDKMLVAVKALKDPTLAARKDFQREAELLTNLQHEHIVKFYGVCGDGDPLIMVFEYMKHGDLNKFLRAHGPDAMILVDGQPRQAKGELGLSQMLHIASQIASGMVYLASQHFVHRDLATRNCLVGANLLVKIGDFGMSRDVYSTDYYRVK

SEQ ID NO: 62074 - protein, 226 aa, Homo sapiens
MNRHLCVWLFRHPSLNGYLQCHIQLHSHQFRQIHLDTRLQVFRQNRNCILHLLSKNWSRRYCHQDTKMLWKHKALQKYMENLSKEYQTLEQCLQHIPVNEENRRSLNRRHAELAPLAAIYQEIQETEQAIEELESMCKSLNKQDEKQLQELALEERQTIDQKINMLYNELFQSLVPKEKYDKNDVILEVTAGRTTGGDICQQFTREIFDMYQNYSCYKHWQFELLN

SEQ ID NO: 62075 - protein, 41 aa, Homo sapiens
MDTLEEVTWANGSTALPPPLAPNISVPHRCLLLLYEDIGTS

SEQ ID NO: 62076 - protein, 66 aa, Homo sapiens
MVARTQTWTRPAGPRGLWAKGSPAGPSLNPSSGPSSSRVWPWLWSCPRSPFVMGTGSWLRTASSGS

SEQ ID NO: 62077 - protein, 205 aa, Homo sapiens
QRQAAALGSQSPSPAGLRAGAVPPARACLQEAEIPREVIERLARSQIHSIRDLQRLLEIDSVGSEDSLDTSLRAHGVHATKHVPEKRPLPIRRKRSIEEAVPAVCKTRTVIYEIPRSQVDPTSANFLIWPPCVEVKRCTGCCNTSSVKCQPSRVHHRSVKVAKVEYVRKKPKLKEVQVRLEEHLECACATTSLNPDYREEDTDVR

SEQ ID NO: 62078 - protein, 207 aa, Homo sapiens
  MOD_RES (1)..(1): Any amino acid
XFVSGALNKFKPNRTPSITPQEERIAQLSESPVILTPNAKRTLPVDSSHGFSIHIDTSSEGSSQSSLSPVLIGGNHLITAGVPRRSKRIAGKKVCRVESGKAGCFSPKISHKEKVRRSLRLKFNLGKNGREVNGCSGVNRYESVGWRLANQQSLKNRIESVKTGLLFSPDVDEKLPKKGSEKISKSEETLLTPERLVGTNYRMSWTG

SEQ ID NO: 62079 - protein, 179 aa, Homo sapiens
MPLYEGLGSGGEKTAVVIDLGEAFTKCGFAGETGPRCIIPSVIKRAGMPKPVRVVQYNINTEELYSYLKEFIHILYFRHLLVNPRDRRVVIIESVLCPSHFRETLTRVLFKYFEVPSVLLAPSHLMALLTLGINSAMVLDCGYRESLVNPSSKLLGSTTPRRKSSSQRVGNSTIGTMYC

SEQ ID NO: 62080 - protein, 1365 aa, Homo sapiens
MDQYSLGDEGALPSEMHLPSFSESQGLNCSDTLNRDLGPNTRGFLYAGLSGLDPDPSLPTPDMSSEVLEDNLDTLSLYSGKDSDSVKLLEEYADSESQASLQDLGLGVLKAKEADEGGRATSGSARKGKRQHSSPQNPLLDCSLCGKVFSSASSLSKHYLTHSQERKHVCKICSKAFKRQDHLTGHMLTHQKTKPFVCIEQGCSKSYCDYRSLRRHYEVHHGLCILKEAPPEEEACGDSPHAHESAGQPPPSSLRSLVPPEARSPGSLLPHRDLLRRIVSSIVHQKTPSPGPAPAGASDSEGRNTACPCPASSGSSSCTPAGPHAAPAALDTELPEEPCLPQKEPATDVFTAPNSRAAENGAPDPPEPEPDTALLQARSTAECWPEGGSVPACLPLFRGQTVPASSQPSSHSFQWLRNLPGCPKSKGNNVFVVHKPSAVPSREGSESGPGPSSGSPSEESPPGPGGGLEDALPFPAALLRVPAEAPSDPRSASGEDDPCAPKKVKVDCDSFLCQNPGEPGLQEAQKAGGLPADASPLFRQLFLKSQEPLVSHEQMQVFQMITKSQRIFSHAQVAAVSSQLPAPEGKPAALRPLQGPWPQQPPPLAPAVDSLHAGPGNPEAEGSPARRRKTTPGVPREASPGSTRRDAKGGLKVAAVPTPLAAPSLDPSRNPDISSLAKQLRSSKGTLDLEDIFPSTGQRQTQLGGEEPPGASLPGKQAPAENGAASRITKGEKGPACSRGGGYRLLGNPRAPRFSGFRKEKAKMDMCCAASPSQVAMASFSSAGPPADPSKSKLTIFSRIQGGNIYRLPHPVKEENVAGRGNQQNGSPTDWTKPRSTFVCKNCSQMFYTEKGLSSHMCFHSDQWPSPRGKQEPQVFGTEFCKPLRQVLRPEGDRHSPPGTKKPLDPTAAAPLVVPQSIPVVPVTRHIGSMAMMEWCSRWLQATTCGSKLLQGQEKDGEERDSKESSQQRKRKKRPPPSTAGEPGPAGCHQSRLRSPMFLVDCLLKGLFQCSPYTPPPMLSPIREGSGVYFNTLCSTSTQASPDQLISSMLDQVDGSFGICVVKDDTKISIEPHINIGSRFQAEIPELQERSLAGTDEHVASLVWKPWGDMMISSETQDRVTELCNVACSSVMPGGGTNLELALHCLHEAQGNVQVALETLLLRGPHKPRTHLLADYRYTGSDVWTPIEKRLFKKAFYAHKKDFYLIHKMIQTKTVAQCVEYYYIWKKMIKFDCGRAPGLEKRVKREPEEVERTEEKVPCSPRERPSHHPTPKLKTKSYRRESILSSSPNAGSKRTPELLGSAESQGIFPCRECERVFDKIKSRNAHMKRHRLQDHVEPIIRVKWPVKPFQLKEEELGADIGPLQW

SEQ ID NO: 62081 - protein, 354 aa, Homo sapiens
MVRLVLPNPGLDARIPSLAELETIEQEEASSRPKWDNKAQYMLTCLGFCVGLGNVWRFPYLCQSHGGGAFMIPFLILLVLEGIPLLYLEFAIGQRLRRGSLGVWSSIHPALKGLGASALERLPAQREPDRVCGRVRQELPCGLLLVPRDAQHLHVHQRLGLHPVVDAAVPGLRMERPVHVHHPRHRDHREGRVHHLHAALCRPDHLPHPRPDAEGRHQWHRLPLHAQRHGAGPAGHLAGRGRTGLLLLLPGLRGPHLLLQLQLCAQQLREGLGDCVHHQRLHIGVCGHRGLLRHWVPRHTALRRLLQHVSGCPTILVPWAAPPGSLPASLAPGGRQPQSDPQEHPDPHQRVRPA

SEQ ID NO: 62082 - protein, 216 aa, Homo sapiens
MSDEDDLEDSEPDQDDSEKEEDEKETEEGEDYRKEGEEFPEEWLPTPLTEDMMKEGLSLLCKTGNGLAHAYVKLEVKERDLTDIYLLRSYIHLRYVDISENHLTDLSPLNYLTHLLWLKADGNRLRSAQMNELPYLQIASFAYNQITDTEGISHPRLETLNLKGNSIHMVTGLDPEKLISLHTVELRGNQLESTLGINLPKLKNLYLEIKDAGLQT

SEQ ID NO: 62083 - protein, 18 aa, Homo sapiens
MALTVDVAGPAPWGFRIT

SEQ ID NO: 62084 - protein, 115 aa, Homo sapiens
MALRSHDRSTRPLYISVGHRMSLEAAVRLTCCCCRFRIPEPVRQADICSREHIRKSLGLPGPPTPRSPKAQRPVACPKGDSGESSGEGQPPQDHSPGPRTAPRPGSQEQAGKDWQ

SEQ ID NO: 62085 - protein, 678 aa, Homo sapiens
  MOD_RES (1)..(1): Any amino acid
XAKALPKVMIPLSSIPTYNAAMDSNSFLKNSFHKFPYPTKAELCYLTVVTKYPEEQLKIWFTAQRLKQGISWSPEEIEDARKKMFNTVIQSVPQPTITVLNTPLVASAGNVQHLIQAALPGHVVGQPEGTGGGLLVTQPLMANGLQATSSPLPLTVTSVPKQPGVAPINTVCSNTTSAVKVVNAAQSLLTACPSITSQAFLDASIYKNKKSHEQLSALKGSFCRNQFPGQSEVEHLTKVTGLSTREVRKWFSDRRYHCRNLKGSRAMIPGDHSSIIIDSVPEVSFSPSSKVPEVTCIPTTATLATHPSAKRQSWHQTPDFTPTKYKERAPEQLRALESSFAQNPLPLDEELDRLRSETKMTRREIDSWFSERRKKVNAEETKKAEENASQEEEEAAEDEGGEEDLASELRVSGENGSLEMPSSHILAERKVSPIKINLKNLRVTEANGRNEIPGLGACDPEDDESNKLAEQLPGKVSCKKTAQQRHLLRQLFVQTQWPSNQDYDSIMAQTGLPRPEVVRWFGDSRYALKNGQLKWYEDYKRGNFPPGLLVIAPGNRELLQDYYMTHKMLYEEDLQNLCDKTQMSSQQVKQWFAEKMGEETRAVADTGSEDQGPGTGELTAVHKGMGDTYSEVSENSESWEPRVPEASSEPFDTSSPQAGRQLGSWSLSSQPLPSLLTL

SEQ ID NO: 62086 - protein, 115 aa, Homo sapiens
VKIQGQNKEMLAAACQMFLGKTEAEIAHIALETLEGHQRAIMAHMTVEEIYKDRQKFSEQVFKVASSDLVNMGISVVSYTLKDIHDDQDYLHSLGKARTAQVQKDARIGEAEAKR

SEQ ID NO: 62087 - protein, 230 aa, Homo sapiens
NLGRIFKPWKWRKKKSEKFKHTSAALERKISMRQSREELIKRGVLKEIYDKDGELSISNEEDSLENGQSLSSSQLSLPALSEMEPVPMPRDPCSYEVLQPSDIMDGPVSEESPSASESGVLLSQDPSAKPVLLLPPKKPAAFPGDHEETPVKQLPLLKQPPALPPKPTTRIANHLTDWHQAHQVGQRHPLPPWQWAFSSPGSSKRIQSRPGAVAYACNPSTLGGRGRWIT

SEQ ID NO: 62088 - protein, 162 aa, Homo sapiens
MAVLFLYDLKTTGKTPEKKQSESSRGRKRKAENQNESSQGFPNLPVFQSLAYWEMGRTAGGKSIGGRGHKISDYFEYQGGNGSSPVRGIPPAIRSPQNSHSHSTPSSSVRPNSPSPTALAFGDHPIVQPKQLSFKIIQTDLTMLKLAALESNKIQDLEKKEG

SEQ ID NO: 62089 - protein, 704 aa, Homo sapiens
MGDRDLRTDYNEPGTIPSAARGLDDTVSIASRSREVSGFRGGGGGPAYGPPPSLHAREGRYERRLDGASDNRERAYEHSAYGHHERGTGGFDRTRHYDQDYYRDPRERTLQHGLYYASRSRSPNRFDAHDPRYEPRAREQFTLPSVVHRDIYRDDITREVRGRRPERNYQHSRSRSPHSSQSRNQSPQRLASQASRPTRSPSGSGSRSRSSSSDSISSSSSTSSDSSDSSSSSSDDSPARSVQSAAVPAPTSQLLSSLEKDEPRKSFGIKVQNLPVRSTDTSLKDGLFHEFKKFGKVTSVQIHGTSEERYGLVFFRQQEDQEKALTASKGKLFFGMQIEVTAWIGPETESENEFRPLDERIDEFHPKATRTLFIGNLEKTTTYHDLRNIFQRFGEIVDIDIKKVNGVPQYAFLQYCDIASVCKAIKKMDGEYLGNNRLKLGFGKSMPTNCVWLDGLSSNVSDQYLTRHFCRYGPVVKVVFDRLKGMALVLYNEIEYAQAAVKETKGRKIGGNKIKVDFANRESQLAFYHCMEKSGQDIRDFYEMLAERREERRASYDYNQDRTYYESVRTPGTYPEDSRRDYPARGREFYSEWETYQGDYYESRYYDDPREYRDYRNDPYEQDIREYSYRQRERERERERFESDRDRDHERRPIERSQSPVHLRRPQSPGASPSQAERLPSDSERRLYSRSSDRSGSCSSLSPP

SEQ ID NO: 62090 - protein, 165 aa, Homo sapiens
MCASACKDTAAWCPEEAAEPQAMVPSRRTWNLGATPSLRGLWRVGRAPEPEPGMARPAPAPASPAARPFPHTGPGRLRTGRGKDTPVCGDEDSSARSAARPALAQCRALSVDWAGPGSPHGLYLTLQQALQDKGCKSQSQGTKEEKLWKRQAPAPRRAREAREAG

SEQ ID NO: 62091 - protein, 148 aa, Homo sapiens
MSRFFTTGSDSESESSLSGEELVTKPVGGNYGKQPLLLSEDEEDTKRVVRSAKDKRFEELTNLIRTIRNAMKIRDVTKCLEEFELLGKAYGKAKSIVDKEGVPRFYIRILADLEDYLNELWEDKEGKKKMNKNNAKALSTLRQKIRKY

SEQ ID NO: 62092 - protein, 205 aa, Homo sapiens
MWRSCLRLRDGGRRLLNRPAGGPSASMSPGPTIPSPARAYAPPTERKRFYQNVSITQGEGGFEINLDHRKLKTPQAKLFTVPSEALAIAVATEWDSQQDTIKYYTMHLTTLCNTSLDNPTQRNKDQLIRAAVKFLDTDTICYRVEEPETLVELQRNEWDPIIEWAEKRYGVEISSSTSIMGPSIPAKTREVLVSHLASYNTWALQ

SEQ ID NO: 62093 - protein, 286 aa, Homo sapiens
MQVVEFFYGMVTAAEVAYYAYIYSVVSPEHYQRVSGYCRSVTLAAYTAGSVLAQLLVSLANMSYFYLNVISLASVSVAFLFSLFLPMPKKSMFFHAKPSREIKKSSSVNPVLEETHEGEAPGCEEQKPTSEILSTSGKLNKGQLNSLKPSNVTVDVFVQWFQDLKECYSSKRLFYWSLWWAFATAGFNQVLNYVQILWDYKAPSQDSSIYNGAVEAIATFGGAVAAFAVGYVKVNWDLLGELALVVFSVVNAGSLFLMHYTANIWACYAGYLIFKSSYMLLITIAV

SEQ ID NO: 62094 - protein, 97 aa, Homo sapiens
MASASTQPAALSAEQAKVVLAEVIQAFSAPENAVRMDEARDNACNDMGVLKFARLVKSYEAQDPEIASLSGKLKALFLPPMTLPPHGPAAGGSVAAS

SEQ ID NO: 62095 - protein, 43 aa, Homo sapiens
MDALCGSGELGSKFWNPAHCLTHQGPHQTLSRPRVTLQGRGSL

SEQ ID NO: 62096 - protein, 232 aa, Homo sapiens [sequence omitted]

SEQ ID NO: 62097 - protein, 1700 aa, Homo sapiens
MTSAQCPALACVMSPLRFWGPWPLLMWQLLWLLVKEAQPLEWVKDPLQLTSNPLGPPEPWSSHSSHFPRESPHAPTLPADPWDFDHLGPSASSEMPAPPQESTENLVPFLDTWDSAGELPLEPEQFLASQQDLKDKLSPQERLPVSPKKLKKDPAQRWSLAEIIGIIRQLSTPQSQKQTLQNEYSSTDTPYPGSLPPELRVKSDEPPGPSEQVGPSQFHLEPETQNPETLEDIQSSSLQQEAPAQLPQLLEEEPSSMQQEAPALPPESSMESLTLPNHEVSVQPPGEDQAYYHLPNITVKPADVEVTITSEPTNETESSQAQQETPIQFPEEVEPSATQQEAPIEPPVPPMEHELSISEQQQPVQPSESPREVESSPTQQETPGQPPEHHEVTVSPPGHHQTHHLASPSVSVKPPDVQLTIAAEPSAEVGTSLVHQEATTRLSGSGNDVEPPAIQHGGPPLLPESSEEAGPLAVQQETSFQSPEPINNENPSPTQQEAAAEHPQTAEEGESSLTHQEAPAQTPEFPNVVVAQPPEHSHLTQATVQPLDLGFTITPESKTEVELSPTMKETPTQPPKKVVPQLRVYQGVTNPTPGQDQAQHPVSPSVTVQLLDLGLTITPEPTTEVGHSTPPKRTIVSPKHPEVTLPHPDQVQTQHSHLTRATVQPLDLGFTITPKSMTEVEPSTALMTTAPPPGHPEVTLPPSDKGQAQHSHLTQATVQPLDLELTITTKPTTEVKPSPTTEETSTQPPDLGLAIIPEPTTETGHSTALEKTTAPRPDRVQTLHRSLTEVTGPPTELEPAQDSLVQSESYTQNKALTAPEEHKASTSTNICELCTCGDEMLSCIDLNPEQRLRQVPVPEPNTHNGTFTILNFQGNYISYIDGNVWKAYSWTEKLILRENNLTELHKDSFEGLLSLQYLDLSCNKIQSIERHTFEPLPFLKFINLSCNVITELSFGTFQAWHGMQFLHKLILNHNPLTTVEDPYLFKLPALKYLDMGTTLVPLTTLKNILMMTVELEKLILPSHMACCLCQFKNSIEAVCKTVKLHCNSACLTNTTHCPEEASVGNPEGAFMKVLQARKNYTSTELIVEPEEPSDSSGINLSGFGSEQLDTNDESDFISTLRYILPYFSAVNLDVKSLLLPLIKLPTTGNSLAKIQTVGQNRQRVKRVLMGPRSIQKRHFKEVGRQSIRREQGAQASVENAAEEKRLGSPAPREVEQPHTQQGPEKLAGNAVYTKPSFTQEHKAAVSVLKPFSKGAPSTSSPAKALPQVRDRWKDLTHAISTLESAKARVTNTKTSKPIVHARKKYRFHKTRSHVTHRTPKVKKSPKVRKKSYLSRLMLANRLPFSAAKSLINSPSQGAFSSLGDLSPQENPFLEVSAPSEHFIEKNNTKHTTARNAFEENDFMENTNMPEGTISENTNYNHPPEADSAGTAFNLGPTVKQTETKWEYNNVGTDLSPEPKSFNYPLLSSPGDQFEIQLTQQLQSLIPNNNVRRLIAHVIRTLKMDCSGAHVQVTCAKLISRTGHLMKLLSGQQEVKASKIEWDTDQWKIENYINESTEAQSEQKEKSLELKKEVPGYGYTDKLILALIVTGILTILIILFCLIVICCHRRSLQEDEEGFSRGIFRFLPRRGCSSRRESQDGLSSFGQPLWFKDMYKPLSATRINNHAWKLHKKSSNEDKILNRDPGDSEAPTEEEESEALP

SEQ ID NO: 62098 - protein, 141 aa, Homo sapiens
MACQQSRYHSFSSASRLQPRPSGVTIDESFLTEDKSTQNRKLLQKRRTLTGQFSMGGHLSPWPTYTSGQTILQNRKPCSDDYRKRVGSCQQHPFRTAKPQYLEELENYLRKELLLLDLGTDSTQELRLQPTKGRRFGLWSP

SEQ ID NO: 62099 - protein, 90 aa, Homo sapiens
  MOD_RES (1)..(1): Any amino acid
XIPKIHEFEYEIQFESEAMKSKLESCVALYMIEKSYDIMAKRITFIFNLVFTPKKPLRNPEPFTAHFLPGSDLEFFVKPQAGELLPFNTN

SEQ ID NO: 62100 - protein, 298 aa, Homo sapiens
MKSVLIGEFLEKVRQKKKRDITVLDLGCGKGGDLLKWKKGRINKLVCTDIADVSVKQCQQRYEDMKNRRDSEYIFSAEFITADSSKELLIDKFRDPQMCFDICSCQFVCHYSFESYEQADMMLRNACERLSPGGYFIGTTPNSFELIRRLEASETESFGNEIYTVKFQKKGDYPLFGCKYDFNLEGVVDVPEFLVYFPLLNEMAKKYNMKLVYKKTFLEFYEEKIKNNENKMLLKRMQALEPYPANESSKLVSEKVDDYEHAAKYMKNSQVRLPLGTLSKSEWEATSIYLVFAFEKQQ

SEQ ID NO: 62101 - protein, 135 aa, Homo sapiens
  MOD_RES (1)..(1): Any amino acid
XLGEGHFGKVSLYCYDPTNDGTGEMVAVKALKADCGPQHRSGWKQEIDILRTLYHEHIIKYKGCCEDQGHGLSARAALHPPRPSRAQRAAGQRQAGQDRGLWPSQGRARRPRVLPRARGWGQPRVLVCPRVPEGV

SEQ ID NO: 62102 - protein, 408 aa, Homo sapiens
MATGGGPFEDGMNDQDLPNWSNENVDDRLNNMDWGAQQKKANRSSEKNKKKFGVESDKRVTNDISPESSPGVGRRRTKTPHTFPHSRYMSQMSVPEQAELEKLKQRINFSDLDQRSIGSDSQGRATAANNKRQLSENRKPFNFLPMQINTNKSKDASTNPPNRETIGSAQCKELFASALSNDLLQNCQVSEEDGRGEPAMESSQIVSRLVQIRDYITKASSMREDLVEKNERSANVERLTHLIDHLKEQEKSYMKFLKKILARDPQQEPMEEIENLKKQHDLLKRMLQQQEQLRALQGRQAALLALQHKAEQAIAVMDDSVVAETAGSLSGVSITSELNEELNDLIQRFHNQLRDSQPPAVPDNRRQAESLSLTREVSQSRKPSASERLPDEKVELFSKMRVLQEKKQ

SEQ ID NO: 62103 - protein, 762 aa, Homo sapiens
MDGKRRPGPGPGVPPKRARGGLWDDDDAPRPSQFEEDLALMEEMEAEHRLQEQEEEELQSVLEGVADGQVPPSAIDPRWLRPTPPALDPQTEPLIFQQLEIDHYVGPAQPVPGGPPPSRGSVPVLRAFGVTDEGFSVCCHIHGFAPYFYTPAPPGFGPEHMGDLQRELNLAISRDSRGGRELTGPAVLAVELCSRESMFGYHGHGPSPFLRITVALPRLVAPARRLLEQGIRVAGLGTPSFAPYEANVDFEIRFMVDTDIVGCNWLELPAGKYALRLKEKATQCQLEADVLWSDVVSHPPEGPWQRIAPLRVLSFDIECAGRKGIFPEPERDPVIQICSLGLRWGEPEPFLRLALTLRPCAPILGAKVQSYEKEEDLLQAWSTFIRIMDPDVITGYNIQNFDLPYLISRAQTLKVQTFPFLGRVAGLCSNIRDSSFQSKQTGRRDTKVVSMVGRVQMDMLQVLLREYKLRSYTLNAVSFHFLGEQKEDVQHSIITDLQNGNDQTRRRLAVYCLKDAYLPLRLLERLMVLVNAVEMARVTGVPLSYLLSRGQQVKVVSQLLRQAMHEGLLMPVVKSEGGEDYTGATVIEPLKGYYDVPIATLDFSSLYPSIMMAHNLCYTTLLRPGTAQKLGLTEDQFIRTPTGDEFVKTSVRKGLLPQILENLLSARKRAKAELAKETDPLRRQVLDGRQLALKVSANSVYGFTGAQVGKLPCLEISQSLTLSPRLERSGTIVAHCSLNLRDSERHGVRTSDDRENQAAGGV

SEQ ID NO: 62104 - protein, 390 aa, Homo sapiens
MATTATMATSGSARKRLLKEEDMTKVEFETSEEVDVTPTFDTMGLREDLLRGIYAYGFEKPSAIQQRAIKQIIKGRDVIAQSQSGTGKTATFSISVLQCLDIQGLLALGDYMNVQCHACIGGTNVGEDIRKLDYGQHVVAGTPGRVFDMIRRRSLRTRAIKMLVLDEADEMLNKGFKEQIYDVYRYLPPATQVVLISATLPHEILEMTNKFMTDPIRILVKRDELTLEGIKQFFVAVEREEWKFDTLCDLYDTLTITQAVIFCNTKRKVDWLTEKMREANFTVSSMHGDMPQKERESIMKEFRSGASRVLISTDVWARGLDVPQVSLIINYDLPNNRELYIHRIGRSGRYGRKGVAINFVKNDDIRILRDIEQYYSTQIDEMPMNVADLI

SEQ ID NO: 62105 - protein, 194 aa, Homo sapiens
MATHGQTCARPMCIPPSYADLGKAARDIFNKGFGFGLVKLDVKTKSCSGVEFSTSGSSNTDTGKVTGTLETKYKWCEYGLTFTEKWNTDNTLGTEIAIEDQICQGLKLTFDTTFSPNTGKKSGKIKSSYKRECINLGCDVDFDFAGPAIHGSAVFGYEGWLAGYQMTFDSAKSKLTRNNFAVGYRTGDFQLHTN

SEQ ID NO: 62106 - protein, 1792 aa, Homo sapiens
MARCGEGSAAPMVLLGSAGVCSKGLQRKGPCERRRLKATVSEQLSQDLLRLLREEFHTDVTFSVGCTLFKAHKAVLLARVPDFYFHTIGQTSNSLTNQEPIAVENVEALEFRTFLQIIYSSNRNIKNYEEEILRKKIMEIGISQKQLDISFPKCENSSDCSLQKHEIPEDISDRDDDFISNDNYDLEPASELGEDLLKLYVKPCCPDIDIFVDGKRFKAHRAILSARSSYFAAMLSGCWAESSQEYVTLQGISHVELNVMMHFIYGGTLDIPDKTNVGQILNMADMYGLEGLKEVAIYILRRDYCNFFQKPVPRTLTSILECLIIAHSVGVESLFADCMKWIVKHFARFWSERSFANIPPEIQKSCLNMLIQSLNDKNAAFLLMESDRLIISLPRVKWTEAALTMASQLQEKCIAFIVDNFSKIIQSENFALLLQSQAMSSTADLLDTILKAIEENITTENSCSLLMALDTLLNSDSTKEMGFTCKIQALRDKLWIFLVQSFYAVRHTESWKLMSTDDQQKIQAAAFDKGDDRRLGKKPIFSSSQQRKQVSDSGDIKIKSWRGNNKKECWSYLSTNKKMKSDGLGASGHSSSTNRNSINKTLKQDDVKEKDGTKIASKITKELKTGGKNVSGKPKTVTKSKTENGDKARLENMSPRQVVERSATAAAAATGQKNLLNGKGVRNQEGQISGARPKVLTGNLNVQAKAKPLKKATGKDSPCLSIAGPSSRSTDSSMEFSISTECLDEPKENGSTEEEKPSGHKLSFCDSPGQMMKNSVDSVKNSTVAIKSRPVSRVTNGTSNKKSIHEQDTNVNNSVLKKVSGKGCSEPVPQAILKKRGTSNGCTAAQQRTKSTPSNLTKTQGSQGESPNSVKSSVSSRQSDENVAKLDHNTTTEKQAPKRKMVKQVHTALPKVNAKIVAMPKNLNQSKKGETLNNKDSKQKMPPGQVISKTQPSSQRPLKHETSTVQKSMFHDVRDNNNKDSVSEQKPHKPLINLASEISDAEALQSSCRPDPQKPLNDQEKEKLALECQNISKLDKSLKHELESKQICLDKSETKFPNHKETDDCDAANICCHSVGSDNVNSKFYSTTALKYMVSNPNENSLNSNPVCDLDSTSAGQIHLISDRENQVGRKDTNKQSSIKCVEDVSLCNPERTNGTLNSAQEDKKSKVPVEGLTIPSKLSDESAMDEDKHATADSDVSSKCFSGQLSEKNSPKNMETSESPESHETPETPFVGHWNLSTGVLHQRESPESDTGSATTSSDDIKPRSEDYDAGGSQDDDGSNDRGISKCGTMLCHDFLGRSSSDTSTPEELKIYDSNLRIEVKMKKQSNNDLFQVNSTSDDEIPRKRPEIWSRSAIVHSRERENIPRGSVQFAQEIDQVSSSADETEDERSEAENVAENFSISNPAPQQFQGIINLAFEDATENECREFSATKKFKRSVLLSVDECEELGSDEGEVHTPFQASVDSFSPSDVFDGISHEHHGRTCYSRFSRESEDNILECKQNKGNSVCKNESTVLDLSSIDSSRKNKQSVSATEKKNTIDVLSSRSRQLLREDKKVNNGSNVENDIQQRSKFLDSDVKSQERPCHLDLHQREPNSDIPKNSSTKSLDSFRSQVLPQEGPVKESHSTTTEKANIALSAGDIDDCDTLAQTRMYDHRPSKTLSPIYEMDVIEAFEQKVESETHVTDMDFEDDQHFAKQDWTLLKQLLSEQDSNLDVTNSVPEDLSLAQYLINQTLLLARDSSKPQGITHIDTLNRWSELTSPLDSSASITMASFSSEDCSPQGEWTILELETQH

SEQ ID NO: 62107 - protein, 53 aa, Homo sapiens
MGSRASTLLRDEELEEIKKETGSGKISRGFQNLPSTHWGTGSSMPSFQRERTR

SEQ ID NO: 62108 - protein, 134 aa, Homo sapiens
MTEWETAAPAVAETPDIKLFGKWSTDDVQINDISLQNPLQVLVNAIINSGPREDSTRIGRAGTVRRQAVDVSPLRRVNQAIWLLCTGAREAAFRNIKTIAECLADELINAAKGSSNSYAIKKKDELERVAKSNR

SEQ ID NO: 62109 - protein, 84 aa, Homo sapiens
MDPDPQAGVQVGMRVVRGVDWKWGQQDGGEGGVGTVVELGRHGSPSTPDRTVVVQWDQGTRTNYRAGYQGAHDLLLRPAPQHHL

SEQ ID NO: 62110 - protein, 106 aa, Homo sapiens
MVLVLHHILIAVVQFLRRGQQVFLKPDEPPPPPQPCADSLQDALLSLGSVIDISGLQRAVKEALSAVLPRVETVYTYLLDGESQLVCEDPPHELPQEGKVRCTVAS

SEQ ID NO: 62111 - protein, 587 aa, Homo sapiens
MTKLEYEEIALDLTPVIEELTNAGFLQTESELQELSEVLELLSAPELKSLAKTFHLVNPNGQKQQLVDAFLKLAKQRSVCTWGKNKPGIGAVILKRAKALAGQSVRICKGPRAVFSRILLLFSLTDSMEDEDAACGGQGQLSTVLLVNLGRMEFPSYTINRKTHIFQDRDDLIRYAAATHMLSDISSAMANGNWEEAKELAQCAKRDWNRLKNHPSLRCHEDLPLFLRCFTVGWIYTRILSRFVEILQRLHMYEEAVRELESLLSQRIYCPDSRGRWWDRLALNLHQHLKRLEPTIKCITEGLADPEVRTGHRLSLYQRAVRLRESPSCKKFKHLFQQLPEMAVQDVKHVTITGRLCPQRGMCKSVFVMEAGEAADPTTVLCSVEELALAHYRRSGFDQGIHGEGSTFSTLYGLLLWDIIFMDGIPDVFRNACQAFPLDLCTDSFFTSRRPALEARLQLIHDAPEESLRAWVAATWHEQEGRVASLVSWDRFTSLQQAQDLVSCLGGPVLSGVCRHLAADFRHCRGGLPDLVVWNSQSRHFKLVEVKGPNDRLSHKQMIWLAELQKLGAEVEVCHVVAVGAKSQSLS

SEQ ID NO: 62112 - protein, 139 aa, Homo sapiens
MSQRDTLVHLFAGGCGGTVGAILTCPLEVVKTRLQSSSVTLYISEVQLNTMAGASVNRVVSPGPLHCLKVILEKEGPRSLFRGLGPNLVGVAPSRAIYFAAYSNCKEKLNDVFDPDSTQVHMISAAMAGIYCTFLPRKE

SEQ ID NO: 62113 - protein, 723 aa, Homo sapiens
DNEKLHNGTIQRKLKYEKRQFCPAWYLDPLLPRDATDTSSLIKEERREVDQNDHWDHPMLWSVSGPKTTSSASQERTHQQRDQSSVPEVFQDSENKYGHPEHAGHFEPKCFNLPKISFLNESNTDDAEDFQSQSENFSELMTHKDKHGLRVKSSWTLLQHTSQEVSINSGGKQARQGKVLCLVLSEGISHEERASCSAPQSVLASEFYSEQQGEEELDAKKMSSSESLVNIRTEGNNGLGYFYHKFSDLYKDTSSHLLQAGTKVISQARLVGNLCAPRGLPSQVTTFVRSLPFLKHLAPHMPLKTDMQSTESHSPEARVGSSESEAAGSLRPAEGAAPYRASVFAATGLPGSSPSSVFRLEYEDARKSSAFKQSLVQFPDQMLKLQECPLKDLLRHVTCSLPEPLGNMKEVKGIYWLAVAACTAPDPQPACLLLLQSTLYALVLSDNLGSMSIFHALPLSGLQEIQIGFGGQSVRFLSSAEGLLLTVFSYNKYLSQQLCRDLLCVLMPEPDAAACANHPLLQQDLVQLSLDWKTEIPDLVLPNGVQVSSKFQTTLVDMIYFLHGNMEVNVPSLAEVQLLLYTTVKVMGDSGHDQCQSLVLLNTHIALVKEDCVFYPRIRSRNIPPPGAQFDVIKCHALSEFRCVVVPEKKNVSTVELVFLQKLKPSVGSRNSPPEHLQEAPNVQLFTTPLYLQGSQNVAPEVWKLTFNSQDEALWLISHLTRL

SEQ ID NO: 62114 - protein, 37 aa, Homo sapiens
MPAGVPMSTYLKMFAASLLAMCAGAEVVHRYYRPDLV

SEQ ID NO: 62115 - protein, 508 aa, Homo sapiens
MSSSSSSPRETYEEDREYESQAKRLKTEEGEIDYSAEEGENRREATPRGGGDGGGGGRSFSQPEAGGSHHKVSVSPVVHVRGLCESVVEADLVEALEKFGTICYVMMMPFKRQALVEFENIDSAKECVTFAADEPVYIAGQQAFFNYSTSKRITRPGNTDDPSGGNKVLLLSIQNPLYPITVDVLYTVCNPVGKVQRIVIFKRNGIQAMPTRLNVIRNDNDSWDYTKPYLGRRDRGKGRQRQAILGEHPSSFRHDGYGSHGPLLPLPSRYRMGSRDTPELVAYPLPQASSSYMHGGNPSGSVVMVSGLHQLKMNCSRVFNLFCLYGNIEKVKFMKTIPGTALVEMGDEYAVERAVTHLNNVKLFGKRLNVCVSKQHSVVPSQIFELEDGTSSYKDFAMSKNNRFTSAGQASKNIIQPPSCVLHYYNVPLCVTEETFTKLCNDHEVLTFIKYKVFDAKPSAKTLSGLLEWECKTDAVEALTALNHYQIRVPNGSNPYTLKLCFSTSSHL

SEQ ID NO: 62116 - protein, 163 aa, Homo sapiens
MATDVDDRFETLEPEVSHEETEHSYHVEETVSQDCNQDMEEMMSEQENPDSSEPVVEDERLHHDTDDVTYQVYEEQAVYEPLENEGIEITEVTAPPEDNPVEDSQVIVEEVSIFPVEEQQEVPPETNRKTDDPEQKAKEDSFASGESQAACTMSWDFSHPFMC

SEQ ID NO: 62117 - protein, 180 aa, Homo sapiens
MATTVTCTRFTDEYQLYEDIGKGAFSVVRRCVKLCTGHEYAAKIINTKKLSARDHQKLEREARICRLLKHSNIVRLHDSISEEGFHYLVFDLVTGGELFEDIVAREYYSEADASHCIQQILEAVLHCHQMGVVHRDLKLHGELGASTHSRWQNHHVQWPVDWCSVDTDACAPAGWDPQGD

SEQ ID NO: 62118 - protein, 263 aa, Homo sapiens
MANNDAVLKRLEQKGAEADQIIEYLKQQVSLLKEKAILQATLREEKKLRVENAKLKKEIEELKQELIQAEIQNGVKQIPFPSGTPLHANSMVSENVIQSTAVTTVSSGTKEQIKGGTGDEKKAKEKIEKKGEKKEKKQQSIAGSADSKPIDVSRLDLRIGCIITARKHPDADSLYVEEVDVGEIAPRTVVSGLVNHVPLEQMQNRMVILLCNLKPAKMRGVLSQAMVMCASSPEKIEILAPPNGSVPGDRITFDAFPGSLTRS

SEQ ID NO: 62119 - protein, 552 aa, Homo sapiens [sequence omitted]

SEQ ID NO: 62120 - protein, 145 aa, Homo sapiens
  MOD_RES (1)..(1): Any amino acid
XECPQHSPLEDIKQRKVLDLRRWYCISRPQYKTSCGISSLISCWNFLYSTMGAGNLPPITQEEALHILGFQPPFEDIRFGPFTGNTTLMRWFRQINDHFHVKGCSYVLYKPHGKNKTAGETDYTCSKQKHRSNTRQMHINTKFYL

SEQ ID NO: 62121 - protein, 132 aa, Homo sapiens
MDIRKFFGVIPSGKKLVNSSRKEDDFKQKQPSKKKRIIYDSDSESEETLQVKNAKKPPEKLPVSSKPGKISRQDPVTYISETDEEDDFMCKKAASKSKENGRSTNSHLGTSNMKKNEENTKTKNKPLSPIKL

SEQ ID NO: 62122 - protein, 110 aa, Homo sapiens
MPTDHEEPCGPSHKSFCLNGGLCYVIPTIPSPFCRCVENYTGARCEEVFLPGSSIQTKSNLFEAFVALAVLVTLIIGAFYFLCRKGHFQRASSVQYDINLVETSSTSAHH

SEQ ID NO: 62123 - protein, 192 aa, Homo sapiens
MACAGLLTVCLLRPPAPQPQPQTPRHPQLAPDPGPAGHTLFQDVFRRADKNDDGKLSFEEFQNYFADGVLSLGELQELFSGIDGHLTDNLETEKLCDYFSEHLGVYRPVLAALESLNRAVLAAMDATKLEYERASKVDQFVTRFLLRETVSQLQALQSSLEGASDTLEAQAHGWRLIPSWGPSPRPCEPHFL

SEQ ID NO: 62124 - protein, 151 aa, Homo sapiens
MEGYPWWPCLVYNHPFDGTFIREKGKSVRVHVQFFDDSPTRGWVSKRLLKPYTGSKSKEAQKGGHFYSAKPEILRAMQRADEALNKDKIKRLELAVCDEPSEPEEEEEMEVGTTYVTDKSEEDNEIESEEEVQPKTQGSRRSSRQIKKRRV

SEQ ID NO: 62125 - protein, 72 aa, Homo sapiens
MGALTSRQHAGVEEVDIPSNSVYRYPPKSGSYFASHFIMGGEKFDSTHPEGYLFGENSDLNFLGNRPVVVWL

SEQ ID NO: 62126 - protein, 53 aa, Homo sapiens
  MOD_RES (1)..(1): Any amino acid
XLINPQGKAFRSKVELIAYFEKETVLPIKKRKTRETVSIEVKEVVKPLLVSTL

SEQ ID NO: 62127 - protein, 261 aa, Homo sapiens
MGLKAAQKTLFPLRSIDDVVRLFAAELGREEPDLVLLSLVLGFVEHFLAVNRVIPTNVPELTFQPSPAPDPPGGLTYFPVADLSIIAALYARFTAQIRGAVDLSLYPREGGVSSRELVKKVSDVIWNSLSRSYFKDRAHIQSLFSFITGTKLDSSGVAFAVVGACQALGLRDVHLALSEDHAWVVFGPNGEQTAEVTWHGKGNEDRRGQTVNAGVAERSWLYLKGSYMRCDRKMEVAFMVCAINPSIDLHTDSLELLQLQQ

SEQ ID NO: 62128 - protein, 36 aa, Homo sapiens
MDPIRSFCGKLRSLASTLDCETARLQRALDGEESGA

SEQ ID NO: 62129 - protein, 487 aa, Homo sapiens
MSDTLTADVIGRRVEVNGEHATVRFAGVVPPVAGPWLGVEWDNPERGKHDGSHEGTVYFKCSQLSKLQEVSLRNCAVSCAGEKGGVAEACPNIRKVDLSKNLLSSWDEVIHIADQLRHLEVLNVSENKLKFPSGSVLTGTLSVLKVLVLNQTGITWAEVLRCVAGCPGLEELYLESNNIFISERPTDVLQTVKLLDLSSNQLIDENQLYLIAHLPRLEQLILSDTGISSLHFPDAGIGCKTSMFPSLKYLVVNDNQISQWSFFNELEKLPSLRALSCLRNPLTKEDKEAETARLLIIASIGQLKTLNKCEILPEERRRAELDYRKAFGNEWKQAGGHKDPEKNRLSEEFLTAHPRYQFLCLSTCVYTGGLQVVDFQLEQSFFLEYGAPEDWELKTQQPLMLKNQLLTLKIKYPHQLDQKVLEKQLPGSMTIQKVKGLLSRLLKVPVSDLLLSYESPKKPGREIELENDLKSLQFYSVENGDCLLVRW

SEQ ID NO: 62130 - protein, 369 aa, Homo sapiens
MEAEAADAPPGGVESALSCFSFNQDCTSLATGTKAGYKLFSLSSVEQLDQVHGSNEIPDVYIVERLFSSSLVVVVSHTKPRQMNVYHFKKGTEICNYSYSSNILSIRLNRQRLLVCLEESIYIHNIKDMKLLKTLLDIPANPTGLCALSINHSNSYLAYPGSLTSGEIVLYDGNSLKTVCTIAAHEGTLAAITFNASGSKLASASEKGTVIRVFSVPDGQKLYEFRRGMKRYVTISSLVFSMDSQFLCASSNTETVHIFKLEQVTNRQSTRRAFDLEWLHGKDVYGCYQLPPYPGVRHDASGQGFCHCTLELLRTEEHLYPLNDPEVATAASCVIQWTPLYVQFGSSGWRRVCLNQNPQLAWLRNNRRE

SEQ ID NO: 62131 - protein, 192 aa, Homo sapiens
MTKKRIAVIGGGVSGLSSIKCCVEEGLEPVCFERTDDIGGLWRFQENPEEGRASIYKSVIINTSKEMMCFSDYPIPDHYPNFMHNAQVLEYFRMYAKEFDLLKYIRFKTTVCSVKKQPDFATSGQWEVVTESEGKKEMNVFDGVMVCTGHHTNAHLPLESFPGIEKFKGQYFHSRDYKNPEGFTGKRVIIIG

SEQ ID NO: 62132 - protein, 113 aa, Homo sapiens
MDAPGALAQTAAPGPGRKELKIVIVGDGGCGKTSLLMVYSQGSFPEHYAPSVFEKYTASVTVGSKEVTLNLYDTAGQEDYDRLRPLSYQNTHLVLICYDVMNPTSYDNVLIKV

SEQ ID NO: 62133 - protein, 128 aa, Homo sapiens
MAASSSEISEMKGVEESPKVPGEGPGHSEAETGPPQVLAGVPDQPEAPQPGPNTTAAPVDSGPKAGLAPETTETPAGASETAQATDLSLSPGGESKANCSPEDPCQETVSKPEVSKEATADQGSRLES

SEQ ID NO: 62134 - protein, 105 aa, Homo sapiens
MAALKSWLSRSVTSFFRYRQCLCVPVVANFKKRCFSELIRPWHKTVTIGFGVTLCAVPIAQAGVQWQDLGSLQPPPPGFRQFSCLSLPSSWDYRNQSLIPLVVKH

SEQ ID NO: 62135 - protein, 284 aa, Homo sapiens
  MOD_RES (1)..(1): Any amino acid
XLEIAGEEEEDGSLEPASAFAMACASVKRNVTDFLKRATLKNLRKQYRNVKKMTAKELVKVLFSFFWMLFVGLFQLLFTILGGIFQILWSTVFGGGLVEGAKNIRVTKILGDMPDPTQFGIHDDTMEAERAEVMEPGITTELVHFIKGEKGDTDIMSDLFGLHPKKEGSLKHGPEVGLGDLSEIIGKDEPPTLESTVQKKRKAQAAEMKAANEAEGKVESEKADMEDGEKEDKDKEEEQAEYLWTEVTKKKKRRCGQKVEKPEAFTANFFKGLEIYQTKLLPGH

SEQ ID NO: 62136 - protein, 103 aa, Homo sapiens
  MOD_RES (1)..(1): Any amino acid
XETVLTETPQDTIELNRLNLESSNSKYSLNTDSSVSYIDSAVISPDTVPLGTGTSILSKQVQNKPKTGRSLLGGPAALSPLTPRPSNLSILLLYICLDDFLTP

SEQ ID NO: 62137 - protein, 707 aa, Homo sapiens
MPSPAGEGPPLALSLAEKAVCKVVYGAPRPRPLLLPVGLELWLYVQKMRNLQRKRMEASCLELALEGERLCKAGDFKTGVAFFEAAVQVGTEDLKTLSAIYSQLGNAYFYLKEHGRALEYHKHDLLLARTIGDRMGEAKASGNLGNTLKVLGRFDEAAVCCQRHLSIAQEQGDKVGEARALYNIGNVYHAKGKQLSWNAANATQDPGHLPPDVRETLCKASEFYERNLSLVKELGDRAAQGRAYGNLGNTHYLLGNFTEATTFHKERLAIAKEFGDKAAERRAYSNLGNAHVFLGRFDVAAEYYKKTLQLSRQLRDQAVEAQACYSLGNTYTLLQDYERAAEYHLRHLLIAQELADRVGEGRACWSLGNAYVSMGRPAQALTFAKKHLQISQEIGDRHGELTARMNVAQLQLVLGRLTSPAASEKPDLAGYEAQGARPKRTQRLSAETWDLLRLPLEREQNGDSHHSGDWRGPSRDSLPLPVRSRKYQEGPDAERRPREGSHSPLDSADVRVHVPRTSIPRAPSSDEECFFDLLTKFQSSRMDDQRCPLDDGQAGAAEATAAPTLEDRIAQPSMTASPQTEEFFDLIASSQSRRLDDQRASVGSLPGLRITHSNAGHLRGHGEPQEPGDDFFNMLIKYQSSRIDDQRCPPPDVLPRGPTMPDEDFFSLIQRVQAKRMDEQRVDLAGGPEQGAGGPPEPQQQCQPGAS

SEQ ID NO: 62138 - protein, 113 aa, Homo sapiens
MENLTKHSIECSSFRGDWECKNQFERKQGSQEGHFSEMIFTPEDMPTFSIQHQRIHTDEKLLECKECGKDFSFVSVLVRHQRIHTGEKPYECKECGKAFGSGANLAYHQRIHT

SEQ ID NO: 62139 - protein, 131 aa, Homo sapiens [sequence omitted]

SEQ ID NO: 62140 - protein, 490 aa, Homo sapiens
MSFTAGSYSSYVQVRGSVPLYWSQDISTMMPKPPITLDQADPFAHVAALHFDQMFQRFGSPIIILNLVKEREKRKHERILSEELVAAVTYLNQFLPPEHTIVYIPWDMAKYTKSKLCNVLDRLNVIAESVVKKTGFFVNRPDSYCSILRPDEKWNELGGCVIPTGRLQTGILRTNCVDCLDRTNTAQFMVGKCALAYQLYSLGLIDKPNLQFDTDAVRLFEELYEDHGDTLSLQYGGSQLVHRVKTYRKIAPWTQHSKDIMQTLSRYYSNAFSDADRQDSINLFLGVFHPTEGKPHLWELPTDFYLHHKNTMRLLPTRRSYTYWWTPEVIKHLPLPYDEVICAVNLKKLIVKKFHKYEEEIDIHNEFFRPYELSSFDDTFCLAMTSSARDFMPKTVGIDPSPFTVRKPDETGKSVLGNKSNREEAVLQRKTAASAPPPPSEEAVSSSSEDDSGTDREEEGSVSQRSTPVKMTDAGDSAKVTENVVQPMKE

SEQ ID NO: 62141 - protein, 164 aa, Homo sapiens
MEGDFSVCRNCKRHVVSANFTLHEAYCLRFLVLCPECEEPVPKETMEEHCKLEHQQVGCTMCQQSMQKSSLEFHKANECQERPVECKFCKLDMQLSKLELHESYCGSRTELCQGCGQFIMHRMLAQHRDVCRSEQAQLGKETSPDPGKCLSITVAAALSAHLWP

SEQ ID NO: 62142 - protein, 95 aa, Homo sapiens
  MOD_RES (1)..(1): Any amino acid
XPPSTPPLGKQNPSLPAPQTLAGGNPETAQPHAGTLPRPRPVPKPRNRPSVPPPPQPPGVHSAGDSSLTNTAPTASKIVTDALPSALTGGEGFQD

SEQ ID NO: 62143 - protein, 115 aa, Homo sapiens
MEESPLSRAPSRGGVNFLNVARTYIPNTKVECHYTLPPGTMPSASDWIGIFKVEAACVRDYHTFVWSSVPESTTDGSPIHTSVQFQASYLPKPGAQLYQFRYVNRQGQVCGQSPP

SEQ ID NO: 62144 - protein, 402 aa, Homo sapiens
MNRKDFVVLPWGKPGNSVKLKYRNAQELRMEKVQLEFENQEMEKKLQEFRSTRNKEKEDRESSEYYWKSGKVGKLVNQSYMMSQNKGNVVKFSAGKVKLKLLKEQIQEPVKPTVNYKMANSSECEKPKINGKVCGQCENKAALLVCLECGEDYCSGCFAKVHQKGALKLHRTTLLQAKSQILFNVLDVAHQFIKDVNPDEPKEENNSTKETSKIQHKPKSVLLQRSSSEVEITTMKRAQRTKPRKSLLCEGSFDEEASAQSFQEVLSQWRTGNHDDNKKQNLHAAVKDSLEECEVQTNLKIWREPLNIELKEDILSYMEKLWLKKHRRTPQEQLFKMLPDTFPHPHETTGDAQCSQNENDEDSDGEETKVQHTALLLPVETLNIERPEPSLKIVELDDLCFS

SEQ ID NO: 62145 - protein, 218 aa, Homo sapiens
  MOD_RES (1)..(1): Any amino acid
XPWLGIRISESPEPGQRTFTTLSSVNCPFISTLSTEGCSSNLEIGNDDYVSEPQQEPCPYACVISLGDDSETDTEGDSESCSAREQECEVKLPFNAQRIISLSRNDFQSLLKMHKLTPEQLDCIHDIRRRSKNRIAAQRCRKRKLDCIQNLESEIEKLNHGLWSLNQQPWFANIPCTIVETGWMPCALSGHVRPTEGQIRVKRKPEDGRDIFEGTSCQ

SEQ ID NO: 62146 - protein, 888 aa, Homo sapiens
MNSMNPMKPALPPAPHGDGSFAYESVPWQQSATQPAGSLSVVTTVWGVGNATQSQCLGQQAFAEGGANKGYVQQGVYSRGGYPGAPGFTTGYAGGPGGLGLPSHAARPSTDFTQAAAAAAVAAAAATATATATATVAALQEKQSQELSQYGAMGAGQSFNSQFLQHGGPRGPSVPAGMNPTGIGGVMGPSGLSPLAMNPTRAAGMTPLYAGQRLPQHGYPGPPQAQPLPRQGVKRTYSEVYPGQQYLQGGQYAPSTAQFAPSPGQPPAPSPSYPGHRLPLQQGMTQSLSVPGPTGLHYKPTEQFNGQGASFNGGSVSYSQPGLSGPTRSIPGYPSSPLPGNPTPPMTPSSSVPYMSPNQEVKSPFLPDLKPNLNSLHSSPSGSGPCDELRLTFPVRDGVVLEPFRLQHNLAVSNHVFQLRDSVYKTLIMRPDLELQFKCYHHEDRQMNTNWPASVQVSVNATPLTIERGDNKTSHKPLYLKHVCQPGRNTIQITVTACCCSHLFVLQLVHRPSVRSVLQGLLKKRLLPAEHCITKIKRNFSSGTIPGTPGPNGEDGVEQTAIKVSLKCPITFRRIQLPARGHDCRHIQCFDLESYLQLNCERGTWRCPVCNKTALLEGLEVDQYMLGILIYIQNSDYEEITIDPTCSWKPVPVKPDMHIKEEPDGPALKRCRTVSPAHVLMPSVMEMIAALGPGAAPFAPLQPPSVPAPSDYPGQGSSFLGPGTFPESFPPTTPSTPTLAEFTPGPPPISYQSDIPSSLLTSEKSTACLPSQMAPAGHLDPTHNPGTPGLHTSNLGAPPGPQLHHSNPPPASRQSLGQASLGPTGELAFSPATGVMGPPSMSGAGEAPEPALDLLPELTNPDELLSYLGPPDLPTNNNDDLLSLFENN

SEQ ID NO: 62147 - protein, 112 aa, Homo sapiens
MVFLLGLMFEITAKASIIFVTLQYNVTLPATEEQATESVSLYYYGIKDLATVFFYMLVAIIIHAVIQEYMLDKINRRMHFSKTKHSKFNESGQLSAFYLFACVWGTFILISV

SEQ ID NO: 62148 - protein, 361 aa, Homo sapiens
MALSAASPFYRGYVSDIDCRWGVISASVDDRTREERGLEPLKNNNYRISKSRYDSIDSYLSKCGEKYNDIDLTIDKEIYEQLLQEGIDHLLAQHVAHLFIRDPLTLFEEKIHLDDANESDHFENIQSTNWQTMRFKPPPPNSDIGWRVEFRPMEVQLTDFENSAYVVFVVLLTRVILSYKLDFLIPLSKVDENMKVAQKRDAVLQGMFYFRKDICKGGNAVVDGCGKAQNSTELAAEEYTLMSIDTIINGKEGVFPGLIPILNSYLENMEVDVDTRCSILNYLKLIKKRASGELMTVARWMREFIANHPDYKQDSVITDEMNYSLILKCNQIANELCECPELLGSAFRKVKYSGSKTDSSN

SEQ ID NO: 62149 - protein, 641 aa, Homo sapiens
MSHVAVENALGLDQQFAGLDLNSSDNQSGGSTASKGRYIPPHLRNREATKGFYDKDSSGWSSSKDKDAYSSFGSRSDSRGKSSFFSDRGSGSRGRFDDRGRSDYDGIGSRGDRSGFGKFERGGNSRWCDKSDEDDWSKPLPPSERLEQELFSGGNTGINFEKYDDIPVEATGNNCPPHIESFSDVEMGEIIMGNIELTRYTRPTPVQKHAIPIIKEKRDLMACAQTGSGKTAAFLLPILSQIYSDGPGEALRAMKENGRYGRRKQYPISLVLAPTRELAVQIYEEARKFSYRSRVRPCVVYGGADIGQQIRDLERGCHLLVATPGRLVDMMERGKIGLDFCKYLVLDEADRMLDMGFEPQIRRIVEQDTMPPKGVRHTMMFSATFPKEIQMLARDFLDEYIFLAVGRVGSTSENITQKVVWVEESDKRSFLLDLLNATGKDSLTLVFVETKKGADSLEDFLYHEGYACTSIHGDRSQRDREEALHQFRSGKSPILVATAVAARGLDISNVKHVINFDLPSDIEEYVHRIGRTGRVGNLGLATSFFNERNINITKDLLDLLVEAKQEVPSWLENMAYEHHYKGSSRGRSKSSRFSGGFGARDYRQSSGASSSSFSSSRASSSRSGGGGHGSSRGFGGGSVNL

SEQ ID NO: 62150 - protein, 67 aa, Homo sapiens
MSTIAAFYGGKSILITGATGFLGKVLMEKLFRTSPDLKVIYILVRPKAGQTLQQRVFQILDSKFESY

SEQ ID NO: 62151 - protein, 188 aa, Homo sapiens
  MOD_RES (1)..(1): Any amino acid
XFHGSLSSTHFTCKIGYYKALSTDATCAKCPPHSYSVWEGATSCTCDRGFFRADNDAASMPCTRPPSAPLNLISNVNETSVNLEWSSPQNTGGRQDISYNVVCKKCGAGDPSKCRPCGSGVHYTPQQNGLKTTKVSITDLLAHTNYTFEIWAVNGVSKYNPNPDQSVSVTVTTNQAAPSSIALVQAKE

SEQ ID NO: 62152 - protein, 45 aa, Homo sapiens
MLENYRNLVSLEFWSVIPAKVQWCHLRSLQPPLPRFKQFSCLSLP

SEQ ID NO: 62153 - protein, 104 aa, Homo sapiens
MVLGMQLSQVSDLLTQEQANLTHQKKKLEGQISARQQAEEASQESENELKEMIETLARKLNEKSKEQMELHHQNLNLQETLKRVANCSAPCPQDWIWHGENCYL

SEQ ID NO: 62154 - protein, 220 aa, Homo sapiens
MEKLLRLCCWYSWLLLFYYNFQVRGVYSRSQDHPGFQVLASASHYWPLENVDGIHELQDTTGDIVEGKVNKGIYLKEEKGVTLLYYGRYNSSCISKPEQCGPEGPYWTHVLFTWKSKEGLKVYVNGTLSTSDPSGKVSRDYGESNVNLVIGSEQDQAKCYENGAFDEFIIWERALTPDEIAMYFTAAIGKHALLSSTLPSLFMTSTASPVMPTDAYHPII

SEQ ID NO: 62155 - protein, 146 aa, Homo sapiens
MALLTAAARLLGTKNASCLVLAARHASASSTNLKDILADLIPKEQARIKTFRQQHGKTVVGQITVDMVSWLSKEWAKRAALPSHVVTMLDNFPTNLHPMSQLSAAVTALNSESNFARAYAQGISRTKYWELIYEDSMDLIAKLPCV

SEQ ID NO: 62156 - protein, 51 aa, Homo sapiens
MSASPDDLSTGGRLQNMTVDECFQSRNTVLQGQPFGGVPTVLCLNIALWVL

SEQ ID NO: 62157 - protein, 26 aa, Homo sapiens
MEIYKTNEDQSDQLVWRTEVVKNNLN

SEQ ID NO: 62158 - protein, 56 aa, Homo sapiens
MNQTDKNQQEIPSYLNDEPPEESYSVNPGWSAMARSWPTATSASWVQAVLLPQPPK

SEQ ID NO: 62159 - protein, 121 aa, Homo sapiens
MEKFVDPGNHNSGIDLLRTYLWRCQFLLPFVSLGLMCFGALIGLCACICRSLYPTIATGILHLLAGLCTLGSVSCYVAGIELLHQKLELPDNVSGEFGWSFCLACVSAPLQFMASALFIWA

SEQ ID NO: 62160 - protein, 257 aa, Homo sapiens
HIPLQTLLKFMVDIALGMEYLSNRNFLHRDLAARNCITHLAILARSPASCSYCRLRDDMTVCVADFGLSKKIYSGDYYRQGRIAKMPVKWIAIESLADRVYTSKSDVWAFGVTMWEIATRGMTPYPGVQNHEMYDYLLHGHRLKQPEDCLDELYEIMYSCWRTDPLDRPTFSVLRLQLEKLLESLPDVRNQADVIYVNTQLLESSEGLAQGSTLAPLDLNIDPDSIIASCTPRAAISVVTAEVHDSKPHEGRYILNG

SEQ ID NO: 62161 - protein, 184 aa, Homo sapiens
VKLRCRKGIPSSLRAKAWQYLSNSKELLEQNPGKFEELERAPGDPKWLDVIEKDLHRQFPFHEMFAARGGHGQQDLYRILKAYTIYRPDEGYCQAQAPVAAVLLMHMPAEQAFWCLVQICDKYLPGYYSAGLALRSSSGWPWSCCATRWAQWRSCAPAKACMRPWSSCVTCPSSACRKTSWCMR

SEQ ID NO: 62162 - protein, 940 aa, Homo sapiens
  MOD_RES (1)..(1): Any amino acid
XLNCNNNNGMGAAPKPFPGGTGPPIKAEPKAPYAPGLPTHPSKKRKHSESPPSTLNAQMLNGMIKQEPGTVTALPLHPTRAPSPPWPPQGPLSPGPGSLPLSIARVQTPPWHPPGAPSPGLLQDSDSLSGSYLDPNYQSIKWQPHQQNKWATLYDANYKELPMLTYRVDADKGFNFSVGDDAFVCQKKNHFQVTVYIGMLGEPKYVKTPEGLKPLDCFYLKLHGVKLEALNQSINIEQSQSDRSKRPFNPVTVNLPPEQVTKVTVGRLHFSETTANNMRKKGKPNPDQRYFMLVVALQAHAQNQNYTLAAQISERIIVRASNPGQFESDSDVLWQRAQVPDTVFHHGRVGINTDRPDEALVVHGNVKVMGSLMHPSDLRAKEHVQEVDTTEQLKRISRMRLVHYRYKPEFAASAGIEATAPETGVIAQEVKEILPEAVKDTGDMVFANGKTIENFLVVNKERIFMENVGAVKELCKLTDNLETRIDELERWSHKLAKLRRLDSLKSTGSSGAFSHAGSQFSRAGSVPHKKRPPKVASKSSSVVPDQACISQRFLQGTIIALVVVMAFSVVSMSTLYVLSLRTEEDLVDTDGSFAVSTSCLLALLRPQPPGGSEALCPWSSQSFGTTQLRQSPLTTGLPGIQPSLLLVTTSLTSSAPGSAVRTLDMCSSHPCPVICCSSPTTNPTTGPSLGPSFNPGHVLSPSPSPSTNRSGPSQMALLPVTNIRAKSWGLSVNGIGHSKHHKSLEPLASPAVPFPGGQGKAKNSPSLGFHGRARRGALQSSVGPAEPTWAQGQSASLLAEPVPSLTSIQVLENSMSITSQYCAPGDACRPGNFTYHIPVSSGTPLHLSLTLQMNSSSPVSVVLCSLRSKEEPCEEGSLPQSLHTHQDTQGTSHRWPITILSFREFTYHFRVALLGQANCSSEALAQPATDYHFHFYRLCD

SEQ ID NO: 62163 - protein, 101 aa, Homo sapiens
EVQLVESGGGLVQPGGSLRLSCAASGFTFSDHYMDWVRQAPGKGLEWVGRTRNKANSYTTEYAASVKGRFTISRDDSKNSLYLQMNSLKTEDTAVYYCARD

SEQ ID NO: 62164 - protein, 203 aa, Homo sapiens
MATSRYEPVAEIGVGAYGTVYKARDPHSGHFVALKSVRVPNGGGGGGGLPISTVREVALLRRLEAFEHPNVVRLMDVCATSRTDREIKVTLVFEHVDQDLRTYLDKAPPPGLPAETIKDLMRQFLRGLDFLHANCIVHRDLKPENILVTSGGTVKLADFGLARIYSYQMALTPVVVTLWYRAPEVLLQSTYATPVDMWSVGCI

SEQ ID NO: 62165 - protein, 72 aa, Homo sapiens
MAFANLRKVLISDSLDPCCRKILQDGGLQVVEKQNLSKEELIAELQDCEGLIVRSATKVTADVINAAEKLQV

SEQ ID NO: 62166 - protein, 88 aa, Homo sapiens
MADNFSLHDALSGSGNPNPQGWPGAWGNQPAGAGGYPGASYPGAYPGQAPPGAYPGQAPPGAYPGAPGAYPGAPAPGVYPGPPSGPGA

SEQ ID NO: 62167 - protein, 131 aa, Homo sapiens
MIDQAHQEERPIRQILYLGDLLETCHFQAFWQALDENMDLLEGITGFEDSVRKFICHVVGITYQHIDRWLLAEMLGDLSDSQLKVWMSKYGWSADESGQIFICSQEESIKPKNIVEKIDFDSVSSIMASSQ

SEQ ID NO: 62168 - protein, 138 aa, Homo sapiens
MGKKQNKKKVEEVLEEEEEEYVVEKVLDRRVVKGKVEYLLKWKGFSDEDNTWEPEENLDCPDLIAEFLQSQKTAHETDKSEGGKRKADSDSEDKGEESKPKKKKEESEKPRGFARGLEPERIIGATDSSGELMFLMKW

SEQ ID NO: 62169 - protein, 171 aa, Homo sapiens
MALWRAYQRALAAHPWKVQVLTAGSLMGLGDIISQQLVERRGLQEHQRGRTLTMVSLGCGFVGPVVGGWYKVLDRFIPGTTKVDALKKMLLDQGGFAPCFLGCFLPLVGALNGLSAQDNWAKLQRDYPDALITNYYLWPAVQLANFYLVPLHYREDPASTTLVSIPPELRL

SEQ ID NO: 62170 - protein, 190 aa, Homo sapiens
  MOD_RES (1)..(1): Any amino acid
XMADYLISGGTGYVPEDGLTAQQLFASADGLTYNDFLILPGFIDFIADEVDLTSALTRKITLKTPLISSPMDTVTEADMAIAMALMGGIGFIHHNCTPEFQANEVRKVKFEQGFITDPVVLSPSHTVGDVLEAKMRHGFSGIPITETGTMGSKLVGIVTSRDIDFLAEKDHTTLLSEANVPGPTGDDAKD

SEQ ID NO: 62171 - protein, 119 aa, Homo sapiens
MDMLCSMLLLLTVPSWVLSQVTLKESGPALVKPTQTLTLTCTFSGFSLSTTGMRVSWIRRPPGKALEWLARIDWDDDKYCSTSLKTRLTISKDTSKNQVVLTMTNMDPVDTATYYCARI

SEQ ID NO: 62172 - protein, 336 aa, Homo sapiens
  MOD_RES (1)..(1): Any amino acid
XSQSAVSETPQKRSDAVQKRAQSDELEKIEKHGRSSKDKENAKSLDKPEQFLYELSLIPNFSERVFCILFQSTFSESICSIRRKLELLQKLCETLKNGPGVMQVLGLVLAFGNYMNGGNKTRGQADGFGLDILPKLKDVKSSDNSRSLLSYIVSYYLRNFDEDAGKEQCLFPLPEPQDLFQASQMKFEDFQKDLRKLKKDLKACEVEAGKVYQVSSKEHMQPFKENMEQFIIQAKIDQEAEENSLTETHKCFLETTAYFFMKPKLGEKEVSPNAFFSIWHEFSSDFKDFWKKENKLLLQERVKEAEEVCRQKKGKSLYKIKPRHDSGIKAKISMKT

SEQ ID NO: 62173 - protein, 410 aa, Homo sapiens
MGITLHLLLHSDRDPIPDVPAVYFVMPTEENIDRMCQDLRNQLYESYYLNFISAISRSKLEDIANAALAASAVTQVAKVFDQYLNFITLEDDMFVLCNQNKELVSYRAINRPDITDTEMETVMDTIVDSLFCFFVTLGAVPIIRCSRGTAAEMVAVKLDKKLRENLRDARNSLFTGDTLGAGQFSFQRPLLVLVDRNIDLATPLHHTWTYQALVHDVLDFHLNRVNLEESSGVENSPAGARPKRKNKKSYDLTPVDKFWQKHKGSPFPEVAESVQQELESYRAQEDEVKRLKSIMGLEGEDEGAISMLSDNTAKLTSAVSSLPELLEKKRLIDLHTNVATAVLEHIKARKLDVYFEYEEKIMSKTTLDKSLLDIISDPDAGTPEDKMRLFLIYYISTQQAPSELSQLGQK

SEQ ID NO: 62174 - protein, 134 aa, Homo sapiens
  MOD_RES (1)..(1): Any amino acid
XSAPPSHTSDTPAEKALPKSKRKRKCDNEDDYREIKKSQGEKDSSSRLATSTSNTLSANHCNMNINSVAIPINKNEKMLRSPISPLSDASKHKYTSEDLTSSSRPNGNSLFTSASSSKKPKADSQLQPHGGDLT

SEQ ID NO: 62175 - protein, 49 aa, Homo sapiens
  MOD_RES (1)..(1): Any amino acid
XKSKTAAAASEKNRGPRKGGRVIAPKKARVVQQQKLKKRQVSLCCSGWS

SEQ ID NO: 62176 - protein, 146 aa, Homo sapiens
MSAEAADREAATSSRPCTPPQTCWFEFLLEESLLEKHLRKPCPDPAPVQLIVQFLEQASKPSVNEQNQVQPPPDNKRNRILKLLALKVAAHLKWDLDILEKRAIRTIVQSSFPVKQAKPGPPQLSVMNQMQQEKELTENILKVLKE

SEQ ID NO: 62177 - protein, 205 aa, Homo sapiens
  MOD_RES (1)..(1): Any amino acid
XLETIILGKQYSLNIILSVFAIILGAFIAAGSDLAFNLEGYIFVFLNDIFTAANGVYTKQKMDPKELGKYGVLFYNACFMIIPTLIISVSTGDLQQATEFNQWKNVVFILQFLLSCFLGFLLMYSTVLCSYYNSALTTAVVGAIKNVSVAYIGILIGGDYIFSLLNFVGLNICMAGGLRYSFLTLSSQLKPKPVGEENICLDLKS

SEQ ID NO: 62178 - protein, 483 aa, Homo sapiens
MAPWLQLLSLLGLLPGAVAAPAQPRAASFQAWGPPSPELLAPTRFALEMFNRGRAAGTRAVLGLVRGRVRRAGQGSLYSLEATLEEPPCNDPMVCRLPVSKKTLLCSFQVLDELGRHVLLRKDCGPVDTKVPGAGEPKSAFTQGSAMISSLSQNHPDNRNETFSSVISLLNEDPLSQDLPVKMASIFKNFVITYNRTYESKEEARWRLSVFVNNMVRAQKIQALDRGTAQYGVTKFSDLTEEEFRTIYLNTLLRKEPGNKMKQAKSVGDLAPPEWDWRSKGAVTKVKDQGMCGSCWAFSVTGNVEGQWFLNQGTLLSLSEQELLDCDKMDKACMGGLPSNAYSAIKNLGLETEDDYSYQGHMQSCNFSAEKAKVYINDSVELSQNEQKLAAWLAKRGPISVAINAFGMQFYRHGISRPLRPLCSPWLIDHAVLLVGYGNRSDVPFWAIKNSWGTDWGEKGYYYLHRGSGACGVNTMASSAVVD

SEQ ID NO: 62179 - protein, 97 aa, Homo sapiens
  MOD_RES (1)..(1): Any amino acid
XCNVGYYDVAKILIAAGADVNTQGLDDDTPLHDSASSGHRDIVKLLLRHGGNPFQANKHGERPVDVAETEELELLLKREVPLSDDDESYTEYLFSTW

SEQ ID NO: 62180 - protein, 814 aa, Homo sapiens
MWDQGGQPWQQWPLNQQQWMQSFQHQQDPSQIDWAALAQAWIAQREASGQQSMVEQPPGMMPNGQDMSTMESGPNNHGNFQGDSNFNRMWQPEWGMHQQPPHPPPDQPWMPPTPGPMDIVPPSEDSNSQDSGEFAPDNRHIFNQNNHNFGGPPDNFAVGPVNQFDYQHGAAFGPPQGGFHPPYWQPGPPGPPAPPQNRRERPSSFRDRQRSPIALPVKQEPPQIDAVKRRTLPAWIREGLEKMEREKQKKLEKERMEQQRSQLSKKEKKATEDAEGGDGPRLPQRSKFDSDEEEEDTENVEAASSGKVTRSPSPVPQEEHSDPEMTEEEKEYQMMLLTKMLLTEILLDVTDEEIYYVAKDAHRKATKAPAKQLAQSSALASLTGLGGLGGYGSGDSEDERSDRGSESSDTDDEELRHRIRQKQEAFWRKEKEQQLLHDKQMEEEKQQTERVTKEMNEFIHKEQNSLSLLEAREADGDVVNEKKRTPNETTSVLEPKKEHKEKEKQGRSRSGSSSSGSSSSNSRTSSTSSTVSSSSYSSSSGSSRTSSRSSSPKRKKRHSRSRSPTIKARRSRSRSYSRRIKIESNRARVKIRDRRRSNRNSIERERRRNRSPSRERRRSRSRSRDRRTNRASRSRSRDRRKIDDQRGNLSGNSHKHKGEAKEQERKKERSRSIDKDRKKKDKEREREQDKRKEKQKREEKDFKFSSQDDRLKRKRESERTFSRSGSISVKIIRHDSRQDSKKSTTKDSKKHSGSDSSGRSSSESPGSSKEKKAKKPKHSRSRSVEKSQRSGKKASRKHKSKSRSRSTTPPRRKR

SEQ ID NO: 62181 - protein, 52 aa, Homo sapiens
MLEKLEFEDEARCQGALIVCACHHALGGNPESYPQSRPFNHRLVPLSAPVKI

SEQ ID NO: 62182 - protein, 63 aa, Homo sapiens
MRPAVLGSPDRAPPEDEGPVMVKLEDSEEEGEAALWDPGPEAARLRFRCFRYEEATGPQEALA

SEQ ID NO: 62183 - protein, 82 aa, Homo sapiens
MDEQSQGMQGPPVPQFQPQKALRPDMGYNTLANFRIEKKIGRGQFSEVYRAACLLDGVPVALKKVQIFDLMDAKARADCIKE

SEQ ID NO: 62184 - protein, 395 aa, Homo sapiens
MYRALYAFRSAEPNALAFAAGETFLVLERSSAHWWLAARARSGETGYVPPAYLRRLQGLEQDVLQAIDRAIEAVHNTAMRDGGKYSLEQRGVLQKLIHHRKETLSRRGPSASSVAVMTSSTSDHHLDAAAARQPNGVCRAGFERQHSLPSSEHLGADGGLYQIPLPSSQIPPQPRRAAPTTPPPPVKRRDREALMASGSGGHNTMPSGGNSVSSGSSVSSTSLDTLYTSSSPSEPGSSCSPTPPPVPRRGTHTTVSQVQPPPSKASAPEPPAEEEVATGTTSASDDLEALGTLSLGTTEEKAAAEAAVPRTIGAELMELVRRNTGLSHELCRVAIGIIVGHIQASVPASSPVMEQVLLSLVEGKVRVGGTAGPPCYPPCSHRHTLVQPVHYRYFS

SEQ ID NO: 62185 - protein, 228 aa, Homo sapiens
MITGVFSMRLWTPVGVLTSLAYCLHQRRVALAELQEADGQCPVDRSLLKLKMVQVVFRHGARSPLKPLPLEEQGGMFAGQLTKVGMQQMFALGERLRKNYVEDIPFLSPTFNPQEVFIRSTNIFRNLESTRCLLAGLFQCQKEGPIIIHTDEADSEVLYPNYQSCWSLRQRTRGRRQTASLQPGISEDLKKVKDRMGIDSSDKVDFFILLDNVAAEQEKMGSCRFHGS

SEQ ID NO: 62186 - protein, 71 aa, Homo sapiens
MKKQFNRMKQLANQTVGRAEKTEVLSEDLLQIERRLDTVRSICHHSHKRLVACFQGQHGTDAERRHVFNLL

SEQ ID NO: 62187 - protein, 1054 aa, Homo sapiens
MSVSLQNYSPMMAQKSQGSDNLQEGQEKSKREILKCTKSAWAPLDEWLPPDPEEESQSLTIPMLEDSKQESIQQWLDSGFFVSANENFQQVIDRTVSLYEQGMVQMTVKDYMRSLHQFSETPILSRGTSFNSCYSTASVPQSIPEWLEFWEIDPVEILLDLGFGADEPDICMQIPARFLGCGSAARGINIRVFLEAQKQRMDIENPNLYGRFRQLEILDHVTNAFSSLLSDVSILPNRAEEKAGGESVQRTSVSAAKEHRRRMGKLLRRASKQNIRRDCNPEVSESFKVKDEVFVPFTKPWDCGAELAATSINHKQNHLSLSVEHQSLQACDDLLPYPPHGLLSKQWPCSSMPAKQAPPSCVSEGSVKGRTQKENLFQTNKLKSLSHLAGKGPDSFEMEEVQSFEEETGNPLDMTSGTVGARVDRANSCQSDSSGFLEEPLEPLPLQMPSLPNSQSPAENGGRKPRDQSHSLVSSQDCQLESDGPDSKSRASMSFSSQEANALEQRASVSVMEEEFLLEAMEGPPELYIPDMACAKTTTRGECPRKDSHLWQLLPMPHAEYEVTRPTATSKYDHPLGFMVTHVTEMQDSFVRPEGAGKVQSHHNESQRSPGNDHTQDKFLHVDSEAPREEESSGFCPHTNHSLLVPESSSQCIPKHSEITPYATDLAQTSEKLIPHLHKLPGDPAQVKSRSGTLGQILPGTEAEMENLPLNTGSSRSVMTQMSSSLVSAAQRAVALGTGPRGTSLECTVCDPVTATETRLGTKARQLNDASIQTSALSNKTLTHGPQPLTKSVSLDSGFSSICPMGTCHAIPAHCCICCHHHPHCHGERQSPGPEPSVCRHCLCSLTGHQEAQFMTTLKALQDTTVRELCSCTVHEMEAMKTICQSFREYLEEIEQHLMGQQALFSRDMSEEEREEAEQLQTLREALRQQVAELEFQLGDRAQQIREGILLQLEVLTAEPPEHYSNLHQYNWIEESNGQTSCSKIHPGMAPRTVFPPDDGQEAPCSGGTQLAAFTPPTLENSTRMSPSSSAWAKLGPTPLSNCPVGEKDADVFL

SEQ ID NO: 62188 - protein, 161 aa, Homo sapiens
MKSLLLLVLISICWADHLSDNYTLDHDRAIHIQAENGPHLLVEAEQAKVFSHRGGNVTLPCKFYRDPTAFGSGIHKIRIKWTKLTSDYLKEVDVFVSMGYHKKTYGGYQGRVFLKGGSDSDASLVITDLTLEDYGRYKCEVIEGLEDDTVVVALDLQGMYL

SEQ ID NO: 62189 - protein, 51 aa, Homo sapiens
MDAPKAGYAFEYLIETLNDSSHKKFFDVSKLGTKCSALLNTGLVGSCCTKL

SEQ ID NO: 62190 - protein, 43 aa, Homo sapiens
  MOD_RES (1)..(1): Any amino acid
XKNCQHANAERPTVARISSVQFHPGAQIVMVAGLDNAVSLFQV

SEQ ID NO: 62191 - protein, 147 aa, Homo sapiens
MGSQHSAAARPSSCRRKQEDDRDGLLASGLVVFFLFPHSVLVDDDGIKVVKVTFNKQDSLVILTIMATLKIRNSNFYTVAVTSLSSQIQYMNTVVNFTGKAEMGGPFSYVYFFCTVPEILVHNIVIFMRTSVKISYIGLMTQSSLET

SEQ ID NO: 62192 - protein, 76 aa, Homo sapiens
MRDDTIYEDEDVKEAIRRLPENLYNDRMFRIKRALDLNLKHQILPKEQWTKYEEKKTTLSLTCEMILLKLLSKSLI

SEQ ID NO: 62193 - protein, 88 aa, Homo sapiens
MSEPGGGGGEDGSAGLEVSAVQNVADVSVLQKHLRKLVPLLLEDGGEAPAALEAALEEKSALEQMRKFLSDPQVHTVLVERSTLKGRR

SEQ ID NO: 62194 - protein, 35 aa, Homo sapiens
MALHSPQYIFGDFSPDEFNQFFVTPRSSVESCWRM

SEQ ID NO: 62195 - protein, 757 aa, Homo sapiens
  MOD_RES (1)..(1): Any amino acid
XLLLRKNGLNDRDKMNRTALHLACANGHPEVVTLLVDRKCQLNVCDNENRTALMKAVQCQEEKCATILLEHGADPNLADVHGNTALHYAVYNEDISVATKLLLYDANIEAKNKDDLTPLLLAVSGKKQQMVEFLIKKKANVNAVDKLESSHQLISEYKEERIPKHSSQNSNSVDESSEDSLSRLSGKPGVDDSWPTSDDEDLNFDTKNVPKPSLAKLMTASQQSRKNLEATYGTVRTGNRTLFEDRDSDSQDEVVVESLPTTSIKVQCFSHPTYQSPDLLPKPSHKSLANPGLMKEEPTKPGIAKKENGIDIIESAPLEQTNNDNLTYVDEVHKNNRSDMMSALGLGQEEDIESPWDSESISENFPQKYVDPLAGAADGKEKNIGNEQAEESPERYLHLKPTIEMKDSVPNKAGGMKDVQTSKAAEHDLEVASEEEQEREGSENNQPQVEEERKKHRNNEMEVSANIHDGATDDAEDDDDDDGLIQKRKSGETDHQQFPRKENKEYASSGPALQMKEVKSTEKEKRTSKESVNSPVFGKASLLTGGLLQVDDDSSLSEIDEDEGRPTKKTSNEKNKVKNQIQSMDDVDDLTQSSETASEDCELPHSSYKNFMLLIEQLGMECKDSVSLLKIQDAALSCERLLELKKNHCELLTVKIKKMEDKVNVLQRELSETKEIKSQLEHQKVEWERELCSLRFSLNQEEEKRRNADTLYEKIREQLRRKEEQYRKEVEVKQQLELSLQTLEMELRTVKSNLNQV

SEQ ID NO: 62196 - protein, 57 aa, Homo sapiens
MTERIHSINLHNFSNSVLETLNEQRNRGHFCDVTVRIHGSMLRAHRCVLAAGSPFFQ

SEQ ID NO: 62197 - protein, 336 aa, Homo sapiens
  MOD_RES (1)..(1): Any amino acid
XRRRRLLFWDKETQISPEKFQEQLQTRAHCWECPMVQPPERTIRGPAELFRTPTLSGWLPPELLGLWTHCAQPPPKALRRELPEEAAAEEERRKIEVPSEIEVPREALEPSVPLMVSLEISLEAAEEEKSRISLIPPEERWAWPEVEAPEAPALPVVPELPEVPMEMPLVLPPELELLSLEAVHRAVALELQANREPDFSSLVSPLSPRRMAARVFYLLLGECMHVCVCMWGRDTETRGPYRDSPDLPSPRLLTSALSATDSSRETRKAIWSPPDPAGAQIPLRLESIYKAARKPATSSKPRRASLGPAYLISECAFPAFLLSELLFKQKTSCFYY

SEQ ID NO: 62198 - protein, 288 aa, Homo sapiens
MAAIPALDPEAEPSMDVILVGSSELSSSVSPGTGRDICICCGSLQVHTQHPLFEGGICAPCKDKFLDALFLYDDDGYQSYCSICCSGETLLICGNPDCTRCYCFECVDSLVGPGTSGKVHAMSNWVCYLCLPSSRSGLLQRRRKWRSQLKAFYDRESENPLEMFETVPVWRRQPVRVLSLFEDIKKELTSLGFLESGSDPGQLKHVVDVTDTVRKDVEEWGPFDLVYGATPPLGHTCDRPPSWYLFQFHRLLQYARPKPGSPRPFFWMFVDNLVLNKEDLDVASRFLE

SEQ ID NO: 62199 - protein, 161 aa, Homo sapiens
MKMRRYKLFLMFCMAGLCLISFLHFFKTLSYVTFPRELASLSPNLVSSFFWNNAPVTPQASPEPGGPDLLRTPLYSHSPLLQPLPPSKAAEELHRVDLVLPEDTTEYFVRTKAGGVCFKPGTKMLERPPPGRPEEKPEGANGSSARRPPRYLLSARERTGG

SEQ ID NO: 62200 - protein, 72 aa, Homo sapiens
MNLPHLMSLASHLASHGFFCLRFTCKGLNIVHRIKAYKSVLNYLKTSGEYKLAGVFLGELVGESGTENASSP

SEQ ID NO: 62201 - protein, 64 aa, Homo sapiens
MKRGIRRDPFRKRKLGGRAKKVREPTAVNSFYREASLPSVWASLRRREMVRSGARPGQVQKQHI

SEQ ID NO: 62202 - protein, 42 aa, Homo sapiens
VSSEFPVRLSVYLEEEDITEEAALSKKRATKAKNTGQRGLKM

SEQ ID NO: 62203 - protein, 169 aa, Homo sapiens
MWATLPLLCAGAWLLGVPVCGAAELCVNSLEKFHFKSWMSKHRKTYSTEEYHHRLQTFASNWRKINAHNNGNHTFKMALNQFSDMSFAEIKHKYLWSEPQNCSATKSNYLRGTGPYPPSVDWRKKGNFVSPVKNQGACGSCWTFSTTGALESAIAIATGKMLSLPQLSS

SEQ ID NO: 62204 - protein, 100 aa, Homo sapiens
MKWGGSSFQDIQRMPSRGSMVFQPLQINNYQYAILGSDYSFTQVYNWDAEKAKFVKFQELNVQAPRSFTHVSINKRNFLFASSFKGNTQIYKHVIVDLSA

SEQ ID NO: 62205 - protein, 160 aa, Homo sapiens
MKDLGAEHLAGHEGVQLLGLLNVYLEQEERFQPREKGLSLIEATPENDNTLCPGLRNAKVEDLRSLANFFGSCTETFVLAVNILDRFLALMKVKPKHLSCIGVCSFLLAARIVEEDCNIPSTHDVIRISQCKCTASDIKRMEKIISEKLHYELEATTALN

SEQ ID NO: 62206 - protein, 146 aa, Homo sapiens
MITFYVRFFLTYVPLLGLKAFLGLFFIVRFLESNWFVWVTQMNHIPMHIDHDRNMDWVSTQLQATCNVHKSAFNDWFSGHLNFQIEHHLFPTMPRHNYHKVAPLVQSLCAKHGIEYQSKPLLSAFADIIHSLKESGQLWLDAYLHQ

SEQ ID NO: 62207 - protein, 310 aa, Homo sapiens
MWRSLGLALALCLLPSGGTESQDQSSLCKQPPAWSIRDQDPMLNSNGSVTVVALLQASCYLCILQASKLEDLRVKLKKEGYSNISYIVVNHQGISSRLKYTHLKNKVSEHIPVYQQEENQTDVWTLLNGSKDDFLIYDRCGRLVYHLGLPFSFLTFPYVEEAIKIAYCEKKCGNCSLTTLKDEDFCKRVSLATVDKTVETPSPHYHHEHHHNHGHQHLGSSELSENQQPGAPNAPTHPAPPGLHHHHKHKGQHRQGHPENRDMPASEDLQDLQKKLCRKRCINQLLCKLPTDSELAPRSCCCHCRHLIFE

SEQ ID NO: 62208 - protein, 104 aa, Homo sapiens
DLQDFVSGDLADRSTWDEYKGNLKRQKGERLRLPPWLKTEIPMGKNYNKLKNTLRNLNLHTVCEEARCPNIGECWGGGEYATATATIMICLMGELNTLQRPYHI

SEQ ID NO: 62209 - protein, 36 aa, Homo sapiens
MFSLKTLPFLLLLHVQISKAFPVSSKEKNTKTVQNK

SEQ ID NO: 62210 - protein, 58 aa, Homo sapiens
MRGAAPGKKTSGLQQKNVEVKTKKNKQKTPGNGDGGSTSETPQPPRKKRARVDPTVEN

SEQ ID NO: 62211 - protein, 363 aa, Homo sapiens
MWAVLRLALRPCARASPAGPRAYHGDSVASLGTQPDLGSALYQENYKQMKALVNQLHERVEHIKLGGGEKARALHISRGKLLPRERIDNLIDPGSPFLELSQFAGYQLYDNEEVPGGGIITGIGRVSGVECMIIANDATVKGGAYYPVTVKKQLRAQEIAMQNRLPCIYLVDSGGAYLPRQADVFPDRDHFGRTFYNQAIMSSKNIAQIAVVMGSCTAGGAYVPAMADENIIVRKQGTIFLAGPPLVKAATGEEVSAEDLGGADLHCRKSGVSDHWALDDHHALHLTRKVVRNLNYQKKLDVTIEPSEEPLFPADELYGIVGANLKRSFDVREVIARIVDGSRFTEFKAFYGDTLVTGIKVKN

SEQ ID NO: 62212 - protein, 1181 aa, Homo sapiens
MANGGGGGGGSSGGGGGGGGSSLRMSSNIHANHLSLDASSSSSSSSSSSSSSSSSSSSSSVHEPKMDALIIPVTMEVPCDSRGQRMWWAFLASSMVTFFGGLFIILLWRTLKYLWTVCCHCGGKTKEAQKINNGSSQADGTLKPVDEKEEAVAAEVGWMTSVKDWAGVMISAQTLTGRVLVVLVFALSIGALVIYFIDSSNPIESCQNFYKDFTLQIDMAFNVFFLLYFGLRFIAANDKLWFWLEVNSVVDFFTVPPVFVSVYLNRSWLGLRFLRALRLIQFSEILQFLNILKTSNSIKLVNLLSIFISTWLTAAGFIHLVENSGDPWENFQNNQALTYWECVYLLMVTMSTVGYGDVYAKTTLGRLFMVFFILGGLAMFASYVPEIIELIGNRKKYGGSYSAVSGRKHIVVCGHITLESVSNFLKDFLHKDRDDVNVEIVFLHNISPNLELEALFKRHFTQVEFYQGSVLNPHDLARVKIESADACLILANKYCADPDAEDASNIMRVISIKNYHPKIRIITQMLQYHNKAHLLNIPSWNWKEGDDAICLAELKLGFIAQSCLAQGLSTMLANLFSMRSFIKIEEDTWQKYYLEGVSNEMYTEYLSSAFVGLSFPTVCELCFVKLKLLMIAIEYKSANRESRILINPGNHLKIQEGTLGFFIASDAKEVKRAFFYCKACHDDITDPKRIKKCGCKRLIYFEDEQPSTLSPKKKQRNGGMRNSPNTSPKLMRHDPLLIPGNDQIDNMDSNVKKYDSTGMFHWCAPKEIEKVILTRSEAAMTVLSGHVVVCIFGDVSSALIGLRNLVMPLRASNFHYHELKHIVFVGSIEYLKREWETLHNFPKVSILPGTPLSRADLRAVNINLCDMCVILSANQNNIDDTSLQDKECILASLNIKSMQFDDSIGVLQANSQGFTPPGMDRSSPDNSPVHGMLRQPSITTGVNIPIITELVNDTNVQFLDQDDDDDPDTELYLTQPFACGTAFAVSVLDSLMSATYFNDNILTLIRTLVTGGATPELEALIAEENALRGGYSTPQTLANRDRCRVAQLALLDGPFADLGDGGCYGDLFCKALKTYNMLCFGIYRLRDAHLSTPSQCTKRYVITNPPYEFELVPTDLIFCLMQFDHNAGQSRASLSHSSHSSQSSSKKSSSVHSIPSTANRQNRPKSRESRDKQNRKEMVYR

SEQ ID NO: 62213 - protein, 68 aa, Homo sapiens
MALIVLQLTFGIGYVTLLQIHSIYSQLIILDLLVPVIGLITELPLHIRETLLFTSSLILTLNTVFVLA

SEQ ID NO: 62214 - protein, 294 aa, Homo sapiens
KRKEAELRSGIIRNNSLWDRLIFHKVQSSLGGRVRLMVTGAAPVSATVLTFLRAALGCQFYEGYGQTECTAGCCLTMPGDWTAGHVGAPMPCNLIKLVDVEEMNYMAAEGEGEGYLKDPAKTAEALDKDGWLHTGDIGKWLPNGTLKIIDRKKHIFKLAQGEYIAPEKIENIYMRSEPVAQVFVHGESLQAFLIAIVVPDVETLCSWAQKRGFEGSFEELCRNKDVKKAILEDMVRLGKDSGLKPFEQVKGITLHPELFSIDNGLLTPTMKAKRPELRNYFRSQIDDLYSTIKV

SEQ ID NO: 62215 - protein, 90 aa, Homo sapiens
SLTGSSDLYKRTSSSLTPIGHSFYNGLSFSSSPGPVGMPLPSQGPGHSQTPPPSLSSHGSSSSLNLGAGFWKIFETTGTPIYNCGRLLDI

SEQ ID NO: 62216 - protein, 214 aa, Homo sapiens
  MOD_RES (1)..(1): Any amino acid
XIHELHFMDELVKVEAHDAEVLCLEYSKPETGLTLLASASRDRLIHVLNVEKNYNLEQTLDDHSSSITAIKFAGNRDIQMISCGADKSIYFRSAQQGSDGLHFVRTHHVAEKTTLYDMDIDITQKYVAVACQDRNVRVYNTVNGKQKKCYKGSQGDEGSLLKVHVDPSGTFLATSCSDKSISVIDFYSGECIAKMFGHSAACSSGTWARRSPTA

SEQ ID NO: 62217 - protein, 69 aa, Homo sapiens
  MOD_RES (1)..(1): Any amino acid
XTMQGMEQTTPGAGPDVPQLGNIDVIHSYLCKGLQEKFFKRKPKVLGVLCGHKFSTHSGCADSDCLDEP

SEQ ID NO: 62218 - protein, 109 aa, Homo sapiens
MTPDSAYQGGVFFLTVHFPTDYPFKPPKIAFTTKIYHPNINSNGSICLDILRSQWSPALTVSKVLLSICSLLCDPNPDDPLVPDIAQIYKSDKEKYNRHAREWTQKYAM

SEQ ID NO: 62219 - protein, 56 aa, Homo sapiens
MELLSFEDVAMYFTREEWGHLNWGQKDLYRDVMLENYRNMVLLGRTRLEDWALSVF

SEQ ID NO: 62220 - protein, 49 aa, Homo sapiens
MQPAIQVWFGEDLPLSPRSPLTPRHGPGLANVCQYDEWIAVRHEATLLP

SEQ ID NO: 62221 - protein, 173 aa, Homo sapiens
  MOD_RES (1)..(1): Any amino acid
XVVIAIPIFSGVYGDLSPAELSTLVSKNAFVCIYLISCFTQLIDLSTTLSDVAGYTHRIGQLRETLLDMSLKSQDCEILGESEWGLDTPPGWPAAEPADTAFLLERVSISAPSSDKPLIKDLSLKISEGQSLLITGNTGTGKTSLLRVLGGLWTSTRGDISPEGGLPRLRFCR

SEQ ID NO: 62222 - protein, 78 aa, Homo sapiens
MMEEEELEFVEELEAVLQLTPEVQLAIEQVFPSQDPLDRADFNAVEYINTLFPTEQEKPGHTESGDQKTTVRTSVMPG

SEQ ID NO: 62223 - protein, 75 aa, Homo sapiens
MTNQEKWAHLSPSEFSQLQKYAEYSTKKLKDVLEEFHGNGVLAKYNPEGKQDILNQTIDFEGFKLFMKTFLEAEL

SEQ ID NO: 62224 - protein, 669 aa, Homo sapiens
MGEPAGVAGTMESPFSPGLFHRLDEDWDSALFAELGYFTDTDELQLEAANETYENNFDNLDFDLDLMPWESDIWDINNQICTVKDIKAEPQPLSPASSSYSVSSPRSVDSYSSTQHVPEELDLSSSSQMSPLSLYGENSNSLSSAEPLKEDKPVTGPRNKTENGLTPKKKIQVNSKPSIQPKPLLLPAAPKTQTNSSVPAKTIIIQTVPTLMPLAKQQPIISLQPAPTKGQTVLLSQPTVVQLQAPGVLPSAQPVLAVAGGVTQLPNHVVNVVPAPSANSPVNGKLSVTKPVLQSTMRNVGSDIAVLRRQQRMIKNRESACQSRKKKKEYMLGLEARLKAALSENEQLKKENGTLKRQLDEVVSENQRLKVPSPKRRVVCVMIVLAFIILNYGPMSMLEQDSRRMNPSVSPANQRRHLLGFSAKEAQDTSDGIIQKNSYRYDHSVSNDKALMVLTEEPLLYIPPPPCQPLINTTESLRLNHELRGWVHRHEVERTKSRRMTNNQQKTRILQGALEQGSNSQLMAVQYTETTSSIRNSGSELQVYYASPRSYQDFFEAIRRRGDTFYVVSFRRDHLLLPATTHNKTTRPKMSIVLPAININENVINGQDYEVMMQIDCQVMDTRILHIKSSSVPPYLRDQQRNQTNTFFGSPPAATEATHVVSTIPESLQ

SEQ ID NO: 62225 - protein, 869 aa, Homo sapiens
MKIATVSVLLPLALCLIQDAASKNEDQDKKFFQSLDGIMFINKCATCKMILEKEAKSQKRARHLARAPKATAPTELNCDDFKKGERDGDFICPDYYEAVCGTDGKTYDNRCALCAENAKTGSQIGVKSEGECKSSNPEQDVCSAFRPFVRDGRLGCTRENDPVLGPDGKTHGNKCAMCAELFLKEAENAKREGETRIRRNAEKDFCKEYEKQVRNGRLFCTRESDPVRGPDGRMHGNKCALCAEIFKQRFSEENSKTDQNLGKAEEKTKVKREIVKLCSQYQNQAKNGILFCTRENDPIRGPDGKMHGNLCSMCQAYFQAENEEKKKAEARARNKRESGKATSYAELCSEYRKLVRNGKLACTRENDPIQGPDGKVHGNTCSMCEVFFQAEEEEKKKKEGKSRNKRQSKSTASFEELCSEYRKSRKNGRLFCTRENDPIQGPDGKMHGNTCSMCEAFFQQEERARAKAKREAAKEICSEFRDQVRNGTLICTREHNPVRGPDGKMHGNKCAMCASVFKLEEEEKKNDKEEKGKVEAEKVKREAVQELCSEYRHYVRNGRLPCTRENDPIEGLDGKIHGNTCSMCEAFFQQEAKEKERAEPRAKVKREAEKETCDEFRRLLQNGKLFCTRENDPVRGPDGKTHGNKCAMCKAVFQKENEERKRKEEEDQRNAAGHGSSGGGGGNTQDECAEYREQMKNGRLSCTRESDPVRDADGKSYNNQCTMCKAKLEREAERKNEYSRSRSNGTGSESGKDTCDEFRSQMKNGKLICTRESDPVRGPDGKTHGNKCTMCKEKLEREAAEKKKKEDEDRSNTGERSNTGERSNDKEDLCREFRSMQRNGKLICTRENNPVRGPYGKMHINKCAMCQSI

SEQ ID NO: 62226 - protein, 73 aa, Homo sapiens
MVPLVAVVSGPRAQLFACLLRLGTQQVGPLQLHTGASHAARNHYEVLVLGGGSGGITMAARMKRKVGAENVAI

SEQ ID NO: 62227 - protein, 376 aa, Homo sapiens
MSLHFLYYCSEPTLDVKIAFCQGFDKQVDVSYIAKHYNMSKSKVDNQFYSVEVGDSTFTVLKRYQNLKPIGSGAQGIVCAAYDAVLDRNVAIKKLSRPFQNQTHAKRAYRELVLMKCVNHKNIISLLNVFTPQKTLEEFQDVYLVMELMDANLCQVIQMELDHERMSYLLYQMLCGIKHLHSAGIIHRDLKPSNIVVKSDCTLKILDFGLARTAGTSFMMTPYVVTRYYRAPEVILGMGYKENVDIWSVGCIMGEMVRHKILFPGRDYIDQWNKVIEQLGTPCPEFMKKLQPTVRNYVENRPKYAGLTFPKLFPDSLFPADSEHNKLKASQARDLLSKMLVIDPAKRISVDDALQHPYINVWYDPAEVEAKTCDAL

SEQ ID NO: 62228 - protein, 195 aa, Homo sapiens
  MOD_RES (1)..(1): Any amino acid
XKLGVEPEEEGGGDDDEEDAEAWAMELADVGAAASSQGVQQKYLVVTCNYEARKLGVKKLMNVRDAKEKCPQLVLVNGEDLTRYREMSYKVTELLEEFSPVVERLGFDENFVDLTEMVEKRLQQLQSDELSAVTVSGHVYNNQSINLLDVLHIRLLVGSQIAAEMREAMYNQLGLTGCAGVASNKLLAKLVSGVF

SEQ ID NO: 62229 - protein, 122 aa, Homo sapiens
MLYQTINSLKTKNPKLKILLSIGGYLFGSKGFHPMVDSSTSRLEFINSIILFLRNHNFDGLDVSWIYPDQKENTHFTVLIHELAEAFQKDFTKSTKERLLLTAGVSAGRQMIDNSYQVEKLA

SEQ ID NO: 62230 - protein, 138 aa, Homo sapiens
MEPSAQQLQLAASLPANLSNFCQGSEMPTTSRPALDVKGGTSPAKEDANQEMSSVAYSNLAVKDRKAVAILHYPGVASNGTKASGAPTSSSGSPIGSPTTTPPTKPPSFNLHPAPHLLASMHLQKLNSQYQGMAAATP

SEQ ID NO: 62231 - protein, 851 aa, Homo sapiens
MKQKHYVRGRALRSRLLRKQAWKQKWRKKGECFGGGGATVTTKESCFLNEQFDHWAAQCPRPASEEDTDAVGPEPLVPSPQPVPEVPSLDPTVLPLYSLGPSGQLAETPAEVFQALEQLGHQAFRPGQERAVMRILSGISTLLVLPTGAGKSLCYQLPALLYSRRSPCLTLVVSPLLSLMDDQVSGLPPCLKAACIHSGMTRKQRESVLQKIRAAQVHVLMLTPEALVGAGGLPPAAQLPPVAFACIDEAHCLSQWSHNFRPCYLRVCKVLRERMGVHCFLGLTATATRRTASDVAQHLAVAEEPDLHGPAPVPTNLHLSVSMDRDTDQALLTLLQGKRFQNLDSIIIYCNRREDTERIAALLRTCLHAAWVPGSGGRAPKTTAEAYHAGMCSRERRRVQRAFMQGQLRVVVATVAFGMGLDRPDVRAVLHLGLPPSFESYVQAVGRAGRDGQPAHCHLFLQPQGEDLRELRRHVHADSTDFLAVKRLVQRVFPACTCTCTRPPSEQEGAVGGERPVPKYPPQEAEQLSHQAAPGPRRVCMGHERALPIQLTVQALDMPEEAIETLLCYLELHPHHWLELLATTYTHCRLNCPGGPAQLQALAHRCPPLAVCLAQQLPEDPGQGSSSVEFDMVKLVDSMGWELASVRRALCQLQWDHEPRTGVRRGTGVLVEFSELAFHLRSPGDLTAEEKDQICDFLYGRVQARERQALARLRRTFQAFHSVAFPSCGPCLEQQDEERSTRLKDLLGRYFEEEEGQEPGGMEDAQGPEPGQARLQDWEDQVRCDIRQFLSLRPEEKFSSRAVARIFHGIGSPCYPAQVYGQDRRFWRKYLHLSFHALVGLATEELLQVAR

SEQ ID NO: 62232 - protein, 210 aa, Homo sapiens
MQAEGRGTGGSTGDADGPGGPGIPDGPGGNAGGPGEAGATGGRGPRGAGAARASGPGGGAPRGPHGGAASGLNGCCRCGARGPESRLLEFYLAMPFATPMEAELARRSLAQDAPPLPVPGVLLKEFTVSGNILTMSVQDQDRDGAGWRSVAGWGLGSAYPHGQAARNLGTPQHRVSEQRPGTPGPPPPEGAQGDGCRGVAFNVMFSAPHI

SEQ ID NO: 62233 - protein, 81 aa, Homo sapiens
ICQRRHFLSGSKQQLSRDSLLSGCHPGFGPLGVELRKNLAAEWWTSVVVFREQVFPVDALHHKPGPLLPGDSAFRCLGTLC

SEQ ID NO: 62234 - protein, 99 aa, Homo sapiens
MAALLRRLLQRERPSAASGRPVGRREANLGTDAGVAVRVRFAPSPTESHSTAAQAGVQRRDHGSLQPQRPQAQASCTWVASALPCTTTSLLRSTRGASS

SEQ ID NO: 62235 - protein, 29 aa, Homo sapiens
MELKVWVDGVQRIVCGVTEVTTCQEVVIA

SEQ ID NO: 62236 - protein, 684 aa, Homo sapiens
MDSKKRSSTEAEGSKERGLVHIWQAGSFPITPERLPGWGGKTVLQAALGVKHGVLLTEDGEVYSFGTLPWRSGPVEICPSSPILENALVGQYVITVATGSFHSGAVTDNGVAYMWGENSAGQCAVANQQYVPEPNPVSIADSEASPLLAVRILQLACGEEHTLALSISREIWAWGTGCQLGLITTAFPVTKPQKVEHLAGRVVLQVACGAFHSLALVQCLPSQDLKPVPERCNQCSQLLITMTDKEDHVIISDSHCCPLGVTLTESQAENHASTALSPSTETLDRQEEVFENTLVANDQSVATELNAVSAQITSSDAMSSQQNVMGTTEISSARNIPSYPDTQAVNEYLRKLSDHSVREDSEHGEKPVPSQPLLEEAIPNLHSPPTTSTSALNSLVVSCASAVGVRVAATYEAGALSLKKVMNFYSTTPCETGAQAGSSAIGPEGLKDSREEQVKQESMQGKKSSSLVDIREEETEGGSRRLSLPGLLSQVSPRLLRKAARVKTRTVVLTPTYSGEADALLPSLRTEVWTWGKGKEGQLGHGDVLPRLQPLCVKCLDGKEVIHLEAGGYHSLALTAKSQVYSWGSNTFGQLGHSDFPTTVPRLAKISSENGVWSIAAGRDYSLFLVDTEDFQPGLYYSGRQDPTEGDNLPENHSGSKTPVLLSCSKVLHIYYKFPGYGRIPASC

SEQ ID NO: 62237 - protein, 163 aa, Homo sapiens
MSCPTPGCDGSGHVSGSFLTHRSLSGCPRATSAMKKAKLSGEQMLTIKQRASNGIENDEEIKQLDEEIKELNESNSQMEADMIKLRTQITTMESNLKTIEEENKVIEQQNESLLHELANLSQSLIHSLANIQLPHMDPINEQNFDAYVTTLTEMYTNQDRYQS

SEQ ID NO: 62238 - protein, 118 aa, Homo sapiens
MRFKSHTVELRSTLSQPLFSCSRRRPCSDMEGAALLRVSVLCIWMSALFLGVGVRAEEAGARVQQNVPSGTDTGDPQSKPLGDWAAGTMDPESSIFIEDAIKYFKEKVSTQNLLLLLT

SEQ ID NO: 62239 - protein, 149 aa, Homo sapiens
  MOD_RES (1)..(1): Any amino acid
XGLSAPLTVLPTITCGHTIEILREKGFDQAPVVDEAGVILGMVTLGNMLSSLLAGKVQPSDQVGKVIYKQFKQIRLTDTLGRLSHILEMDHFALVVHEQIQSQDQAWAGVVGGPADHSTGKSSQRQMVFGVVTAIDLLNFVAAQERDQK

SEQ ID NO: 62240 - protein, 79 aa, Homo sapiens
  MOD_RES (1)..(1): Any amino acid
XRCAALRMLLADQGQSWKEEVVTVETWQEGSLKASCLYGQLPKFQDGDLTLYQSNTILRHLGRTLGWGSQTAPWLAHPQ

SEQ ID NO: 62241 - protein, 198 aa, Homo sapiens
KPAGSIDSYLKSANSWLAEKKDIAERLLKNTSARTENVKGFFGGLETKLKGPLARRNEEDENKPQEKRPRAVTAYSPEDEKKGEKIYLYTHLKQQPIWHTLRFWNAAFFDAVHCERTKRSPTTREKWCHMTQEERDDSLRFNENITFGQLGTFTHNMLAFGLNKKLCNDFLKKQAVIGNLDEEQYKLLSDHIEQMATE

SEQ ID NO: 62242 - protein, 524 aa, Homo sapiens
MKNIMAGLQQTNSEKILLSWVRQSTRNYPQVNVINFTTSWSDGLALNALIHSHRPDLFDWNSVVCQQSATQRLEHAFNIARYQLGIEKLLDPEDVDTTYPDKKSILMYITSLFQVLPQQVSIEAIQEVEMLPRPPKVTKEEHFQLHHQMHYSQQITVSLAQGYERTSSPKPRFKSYAYTQAAYVTTSDPTRSPFPSQHLEAPEDKSFGSSLMESEVNLDRYQTALEEVLSWLLSAEDTLQAQGEISNDVEVVKDQFHTHEGYMMDLTAHQGRVGNILQLGSKLIGTGKLSEDEETEVQEQMNLLNSRWECLRVASMEKQSNLHRVLMDLQNQKLKELNDWLTKTEERTRKMEEEPLGPDLEDLKRQVQQHKVLQEDLEQEQVRVNSLTHMVVVVDESSGDHATAALEEQLKVLGDRWANICRWTEDRWVLLQDILLKWQRLTEEQCLFSAWLSEKEDAVNKIHTTGFKDQNEMLSSLQKLAVLKADLEKKKQSMGKLYSLKQDLLSTLKNKSVTQKTEAWLDNF

SEQ ID NO: 62243 - protein, 11 aa, Homo sapiens
MSTERDSETTF

SEQ ID NO: 62244 - protein, 193 aa, Homo sapiens
MSGELPPNINIKEPRWDQSTFIGRANHFFTVTDPRNILLTNEQLESARKIVHDYRQGIVPPGLTENELWRAKYIYDSAFHPDTGEKMILIGRMSAQVPMNMTITGCMMTFYRTTPAVLFWQWINQSFNAVVNYTNRSGDAPLTVNELGTAYVSATTGAVATALGLNALTKHVSPLIGRFVPFAAVAAANCINI

SEQ ID NO: 62245 - protein, 164 aa, Homo sapiens
MQPYGSWAGSRDTAAADATTTAPGADRPWEGVAAGWGPDGMPEADGTPLCPPPRAPHQALGNKQLAFQQQLLQMQQLQQQHLLNLQRQGLVSLQPNQASGPLQTLPQAVCPTDLPQLWKGEGAPGQPAEDSVKQEGLDLTGTAATATSFAAPPKVSPPLSHHTL

SEQ ID NO: 62246 - protein, 96 aa, Homo sapiens
MSISSDEVNFLVYRYLQESGFSHSAFTFGIESHISQSNINGALVPPAALISIIQKGLQYVEAEVSINEDGTLFDGRPIESLSLIDAVMPDVVQTRQ

SEQ ID NO: 62247 - protein, 86 aa, Homo sapiens
  MOD_RES (1)..(1): Any amino acid
XDGSEPKLSKNELKRRLKAEKKVAEKEAKQKELSEKQLSQATAAATNHTTDNGVGPEEESVDPNVGSMPKELLGESSSSMIFEERG

SEQ ID NO: 62248 - protein, 283 aa, Homo sapiens
MAGLTLFVGRLPPSARSEQLEELFSQVGPVKQCFVVTEKGSKACRGFGYVTFSMLEDVQRALKEITTFEGCKINVTVAKKKLRNKTKEKGKNENSECPKKEPKAKKAKVADKKARLIIRNLSFKCSEDDLKTVFAQFGAVLEVNIPRKPGRTVAVDWAVAKDKYKDTQSVSAIGEEKSHESKHQESVKKKGREEEDMEEEENDDDDDDDDEEDGVFDDEDEEEENIESKVTKPVQIQKRAVKRPAPAKSSDHSEEDSDLEESDSIDDGEELAQSDTSTEEQED

SEQ ID NO: 62249 - protein, 185 aa, Homo sapiens
MVNSCCGSVCSDQGCGQDLCQETCCCPSCCQTTCCRTTCYRPSYSVSCCCRPQCCQSVCCQPTCCRPSCCVSSCCKPQCCQSVCCQPTCCHPSCCISSCCRPSCCVSSCCKPQCCQSVCCQPTCCHPSCSISSCCRPSCCESSCCRPCCCVRPVCGRVSCHTTCYRPTCVISTCPRPVCCASSCC

SEQ ID NO: 62250 - protein, 123 aa, Homo sapiens
MAFANLRKVLISDSLDPCCRKILQDGGLQVVEKQNLSKEELIAELQDCEGLIVRSATKVTADVINAAEKLQVVGRAGTGVDNVDLEAATRKGILVMNTPNGNSLSAAELTCGMIMCLARTSFV

SEQ ID NO: 62251 - protein, 45 aa, Homo sapiens
  MOD_RES (1)..(1): Any amino acid
XDMQDMNNPLSHYWISSSHNTGLLGRARWEAGHLPWLDADYQDQV

SEQ ID NO: 62252 - protein, 52 aa, Homo sapiens
MEGGLADGEPDRTSLLGDSKDVLGPSTNSDESQLLTPGKMSQRQGKEAYPTP

SEQ ID NO: 62253 - protein, 1041 aa, Homo sapiens
MAAMAPALTDAAAEAHHIRFKLAPPSSTLSPGSAENNGNANILIAANGTKRKAIAAEDPSLDFRNNPTKEDLGKLQPLVASYLCSDVTSVPSKESLKLQGVFSKQTVLKSHPLLSQSYELRAELLGRQPVLEFSLENLRTMNTSGQTALPQAPVNGLAKKLTKSSTHSDHDNSTSLNGGKRALTSSALHGGEMGGSESGDLKGGMTNCTLPHRSLDVEHTTLYSNNSTANKSSVNSMEQPALQGSSRLSPGTDSSSNLGGVKLEGKKSPLSSILFSALDSDTRITALLRRQADIESRARRLQKRLQVVQAKQVERHIQHQLGGFLEKTLSKLPNLESLRPRSQLMLTRKAEAALRKAASETTTSEGLSNFLKSNSISEELERFTASGIANLRCSEQAFDSDVTDSSSGGESDIEEEELTRADPEQRHVPLRRRSEWKWAADRAAIVSRWNWLQAHVSDLEYRIRQQTDIYKQIRANKGLIVLGEVPPPEHTTDLFLPLSSEVKTDHGTDKLIESVSQPLENHGAPIIGHISESLSTKSCGALRPVNGVINTLQPVLADHIPGDSSDAEEQLHKKQRLNLVSSSSDGTCVAARTRPVLSCKKRRLVRPNSIVPLSKKVHRNSTIRPGCDVNPSCALCGSGSINTMPPEIHYEAPLLERLSQLDSCVHPVLAFPDDVPTSLHFQSMLKSQWQNKPFDKIKPPKKLSLKHRAPMPGSLPDPARKDRHKLVSSFLTTAMLKHHTDMSSSSYLAATHHPPHSPLVRQLSTSSDSPAPASSSSQVTASTSQPVRRRRGESSFDINNIVIPMSVAATTRVEKLQYKEILTPSWREVDLQSLKGSPDEENEEIEDLSDAAFAALHAKCEEMERARWLWTTSVPPQRRGSRSYRSSDGRTTPQLGSANPSTPQPASPDVSSSHSLSEYSHGQSPRSPISPELHSAPLTPVARDTPRHLASEDTRCSTPELGLDEQSVQPWERRTFPLAHSPQAECEDQLDAQERAARCTRRTSGSKTGRETEAAPTSPPTVPLKSRHLVAAATAQRPTHR

SEQ ID NO: 62254 - protein, 499 aa, Homo sapiens
MNGKRPAEPGPARVGKKGKKEVMAEFSDAVTEETLKKQVAEAWSRRTPFSHEVIVMDMDPFLHCVIPNFIQSQDFLEGLQKELMNLDFHEKYNDLYKFQQSDDLKKRREPHISTLRKILFEDFRSWLSDISKIDLESTIDMSCAKYEFTDALLCHDDELEGRRIAFILYLVPPWDRSMGGTLDLYSIDEHFQPKQIVKSLIPSWNKLVFFEVSPVSFHQHEILYDWINPTYLDMDYQVQIQEEFEESSEILLKEFLKPEKFTKVCEALEHGHVEWSSRGPPNKRFYEKAEESKLPEILKECMKLFRSEALFLLLSNFTGLKLHFLAPSEEDEMNDKKEAETTDITEEGTSHSPPEPENNQMAISNNSQQSNEQTDPEPEENETKKESSVPMCQGELRHWKTGHYTLIHDHSKAEFALDLILYCGCEGWEPEYGGFTSYIAKGEDEELLTVNPESNSLALVYRDRETLKFVKHINHRSLEQKKTFPNRTGFWDFSFIYYE

SEQ ID NO: 62255 - protein, 125 aa, Homo sapiens
MTPQSLLQTTLFLLSLLFLVQAHPASRSFPDPRGLYHFCLYWNRHAGRLHLLYGKRDFLLSDKASSLLCFQHQEESLAQGPPLLATSVTSWWSPQNISLPSAASFTFSFHSPPHTAAHNASVDMC

SEQ ID NO: 62256 - protein, 68 aa, Homo sapiens
KEAQVAARVWREFEMKRMDPGFLDKQRDAWGCRSLAFLGISQLFLLQLPLPGVAFSWIANASSVWTQL

SEQ ID NO: 62257 - protein, 260 aa, Homo sapiens
MVGEEKMSLRNRLSKSRENPEEDEDQRNPAKESLETPSNGRIDIKQLIAKKIKLTAEAEELKPFFMKEVGSHFDDFVTNLIEKSASLDNGGCALTTFSVLEGEKNNHRAKDLRAPPEQGKIFIARRSLLDELLEVDHIRTIYHMFIALLILFILSTLVVDYIDEGRLVLEFSLLSYAFGKFPTVVWTWWIMFLSTFSVPYFLFQHWATGYSKSSHPLIRSLFHGFLFMIFQIGVLGFGPTYVVLAYTLPPASRFIIIFEQ

SEQ ID NO: 62258 - protein, 602 aa, Homo sapiens
MEAVCLGTCPEPEASMSTAIPGLKKGNNALQSIILQTLLEKENGQRKYGGPPPGWDAAPPERGCEIFIGKLPRDLFEDELIPLCEKIGKIYEMRMMMDFNGNNRGYAFVTFSNKVEAKNAIKQLNNYEIRNGRLLGVCASVDNCRLFVGGIPKTKKREEILSEMKKVTEGVVDVIVYPSAADKTKNRGFAFVEYESHRAAAMARRKLLPGRIQLWGHGIAVDWAEPEVEVDEDTMSSVKILYVRNLMLSTSEEMIEKEFNNIKPGAVERVKKIRDYAFVHFSNREDAVEAMKALNGKVLDGSPIEVTLAKPVDKDSYVRYTRGTGGRGTMLQGEYTYSLGQVYDPTTTYLGAPVFYAPQTYAAIPSLHFPATKGHLSNRAIIRAPSVREIYMNVPVGAAGVRGLGGRGYLAYTGLGRGYQVKGDKREDKLYDILPGMELTPMNPVTLKPQGIKLAPQILEEICQKNNWGQPVYQLHSAIGQDQRQLFLYKITIPALASQNPAIHPFTPPKLSAFVDEAKTYAAEYTLQTLGIPTDGGDGTMATAAAAATAFPGYAVPNATAPVSAAQLKQAVTLGQDLAAYTTYEVYPTFAVTARGDGYGTF

SEQ ID NO: 62259 - protein, 73 aa, Homo sapiens
MSSLGGGSQDAGGSSSSSTNGSGGSGSSGPKAGAADKSAVVAAAAPASVADDTPPPERRNKSGIISEPLNKSL

SEQ ID NO: 62260 - protein, 481 aa, Homo sapiens
MDQADDVSCPLLNSCLSESPVVLQCTHVTPQRDKSVVCGSLFHTPKFVKGRQTPKHISESLGAEVDPDMSWSSSLATPPTLSSTVLIVRNEEASETVFPHDTTANVKSYFSNHDESLKKNDRFIASVTDSENTNQREAASHGFGKTSGNSFKVNSCKDHIGKSMPNVLEDEVYETVVDTSEEDSFSLCFSKCRTKNLQKVRTSKTRKKIFHEANADECEKSKNQVKEKYSFVSEVEPNDTDPLDSNVANQKPFESGSDKISKEVVPSLACEWSQLTLSGLNGAQMEKIPLLHISSCDQNISEKDLLDTENKRKKDFLTSENSLPRISSLPKSEKPLNEETVVNKRDEEQHLESHTDCILAVKQAISGTSPVASSFQGIKKSIFRIRESPKETFNASFSGHMTDPNFKKETEASESGLEIHTVCSQKEDSLCPNLIDNGSWPATTTQNSVALKNAGLISTLKKKTNKFIYAIHDETSYKGKK

SEQ ID NO: 62261 - protein, 373 aa, Homo sapiens
MGMLVFIISGLVILAYCSQASNERTYQEVVWAVCGKLTGVLCEVAIAVYTFGTCIAFLIIIGDQQDKIIAVMAKEPEGASGPWYTDRKFTISLTAFLFILPLSIPREIGFQKYASFLSVVGTWYVTAIVIIKYIWPDKEMTPGNILTRPASWMAVFNAMPTICFGFQCHVSSVPVFNSMQQPEVKTWGGVVTAAMVIALAVYMGTGICGFLTFGAAVDPDVLLSYPSEDMAVAVARAFIILSVLTSYPILHFCGRAVVEGLWLRYQGVPVEEDVGRERRRRVLQTLVWFLLTLLLALFIPDIGKVISVIGGLAACFIFVFPGLCLIQAKLSEMEEVKPASWWVLVSYGVLLVTLGAFIFGQTTANAIFVDLLA

SEQ ID NO: 62262 - protein, 157 aa, Homo sapiens
MGPRGAAGAERGYKRPRAPRARPPRSGRALGKAWTDAAQRPGTFRAWTSRARAMLRVRCLRGGSRGAEAVHYIGSRLGRTLTGWVQRTFQSTQAATASSRNSCAADDKATEPLPKDCPVSSYNEWDPLEEVIVGRAENACVPPFTIEVKVKEGYSHV

SEQ ID NO: 62263 - protein, 156 aa, Homo sapiens
FTALFTWEVERMGYTITLWDLETQGMQCFSLGTKCIPVDSSGDQQLCFVLTENGLSLILFGLTQEEFLNRLMIHGSASTVDTLCHLNGWGRCSIPIHALEAGIENRQLDTVNFFLKSKENLFNPSSKSSVSDQFDHLSSHLYLRSKWNKDFYICIY

SEQ ID NO: 62264 - protein, 4340 aa, Homo sapiens
MSLLCVRVKRAKFQGSPDKFNTYVTLKVQNVKSTTVAVRGDQPSWEQDFMFEISRLDLGLSVEVWNKGLIWDTMVGTVWIALKTIRQSDEEGPGEWSTLEAETLMKDDEICGTRNPTPHKILLDTRFELPFDIPEEEARYWTYKWEQINALGADNEYSSQEESQRKPLPTAAAQCSFEDPDSAVDDRDSDYRSETSNSFPPPYHTASQPNASVHQFPVPVRSPQQLLLQGSSRDSCNDSMQSYDLDYPERRAIRYAQKYDTLDRRRKKKSLYNHFEDSERRQYGERSETKTNYKSTYSNTENCTLCHTEKKQNMGYPVLYPYKNGFVVKSGMQRIKLESHDYDLSSCLRHCEKSSGSNQHVTNFTSLDILEDSTSSTSDELLGSPISDKQENLQSPTWHSSNVHHIGDFPEEYYVANSALPLQRMNCDAKTLGDLSECSIEEITPSSIEEPKEDRIDTMDELQCLVETVSEYLAEKEEEINRFGSLSKTKKSHKQNSTLDAEQRTPGDQIPPLTIVKNDKDTAISFPELTGVQCAVGSLFSSLTEKVGSGTKHLTNSVEKLVSLVPEKTETLNQIEAINLGSKPRAMAVLGKDLSMQSPLSSQKDDNVNIDRHRKTSENEHMGNKTGSLYFQNTTESIAKDLAPQSQSSVIKSVFSRLNPLKIFSEKEETKKDDDQSKPPRKESFVECGLELNKREGTLDNYSSSIIALNGSDEETTGWFQMPTSENLLSSQVTSEPSNLVSSASKNDESLLEEKLCIDLSLLPDQQKICAKDTPGHPCIAGSRTANKEVFSKPLEEDKVTGNDDFLEPLRKSFSQFLLTSPETCSKESLSEPVKIRQVEEDGLERGSKKDGHSFSFSGKLNLPFFRSLGHSEKQQELKEKGSIFPLFKFSFTDSKVTVNDQSLRGSAVTTDEESKKNCHEDTKHSSIKSSSVPNIHSDLGKFDSTEEFKKNDQINCPEDAKLNSIKSSSVPNIHDDLEKFDSIKEFNKNDQVNCPEDAKLSSIKSGSAPNTQDNLGKFDSTEEFNQNDQINSPEDAKFNIIKSDSVTNINNDLGKFGNIEELNPSDHTAGQNFERDGLAIPGVVPKEHITSDPLGEDKNLIQAASSVASDSSLECISTTSKSTLVNEINEDEVIDKTSKKNTQGSFLSGLFNRFSSAENLSSQELNLKNDDSHHKNNTPGLISGIFNLLSNSGMIDHKPEEAKFMSLGNMKSLNGDNHLSLDEVPATSCVTSENPKNHVEKHETSSFIEASLLPKENIPLSDAGDDNHYCSPTEKNQQSEKHHPSSENIVLHCAPSAQLGFLEKSMAKRQMPNHVLEAKLHENSNKLNSPVLNTNILNKSNNYQAFEEMNSPFCFEWDSDIKDLSKNSRKLQPVYYMLNQNRFLSADACLWLDSENSVINFCQKDQNANILEWRTNPNSVIWCDLPYESFNQLAFNEDYLLRGDVWAANSLYGNSGPLPINEANNSLEELPIDLSSSSDHEKTTCPVVDQESLRMDENFVFSSFGYEYQEWLSCLEHGVWWPSEDGDYGYYMFHDGQYIYSLLTDSTGQYAYLFIPDSYQEYLDCDLQTNGLSSITLDDSIISACSFKVLDKEDEIFWYVEEEPIDDPLDLSLALPRSEEPLYLNLETFSQVLKESSCDQSDQPLDFSGYNRQKFKGDFRSFKERPCGSEDAECTLDLRNQPQTISNHVSSRDQIIERDKNQPLAEDSSVHLSSFHWLQSSVEEVTTLVHPENMTKGSQQAEETSLVNKVASVFSVLGASVGSTLKFDKSESLEALAMQKVNQQSDLAELTNDGFQSLIMSKQLEGNSPNVEKSLLKDSERQIVSNVQHPELIKNIRQEFSLNKNNHVKKQSLLKSGFQVSQTTPQAKSGVKDDEIITTDSISVSPAPQHSGDERENYELPQGQSSKESDKTLFKSSLKLFSQEESSVSMTANEKQSSGFLNLFKTQVNKEGSPNLEKIGDTNVKIPPQEKKESSGVSNFWGTLGDFFKANVSPIQTTENTSVSSMTIKDEVRSSPTPMELASQGAGNFPAAPISSKGKARVRRLNKQTTIDDSRLEESTRGIQGNDLTEKEVPFRDHLIQQSPNSSFSTSSLKESSRESSVETSGVTTVTEVSKSNEISFDTLSKRNSNEQDHFSDKDWSFSMAATSSSQPELSTKKSIFSFLTGSEKSENRASATLPRAKSQAEGLFTLPSFFSTASSSIKKDASHSSSTFSFFSLSFLDQKKETSGEKQSISTVVPVTSQPCKKTNVFVESGSTMTRESSSGHRDSIAQEVVHEQQMAPCISINNTIEVTSLADELSVDKDCQEKLSSNIVPGTSVDFQMNELQKDIIPPSPEFQAQAETFLTGPENLGIAPHEEEAFNHKAFPSDSLSNSFSHAKQLIEKFNDLDTCTNCHQNEKFTTDPVNLPLEKAPDEVLPQILEPASSSPEPGCAGNLQNQDADKEEDKFALGSSVDMLSGFVTKVKSFSGSLIEPPKTLSGLFSSPKSPKKNSFFSLASDVSSQPLKGELFGIFKSPKPEPYKQESSLPATSWLQNGCSRDAVGSVPPERREAAFTALSSESTLSDCRMTVVSAKPESDILTDDPKLTTKMEDNNTPENILEPQRSETINTSSFSGDDTGQGVLSLSDEGDMGILQATDTEASLEAENFALPAQLHPDPTCIAEELPPPIQPPLPLEPEPAIQTASTNQDLLELHPASSLETDTMLFNDASVSQSTTLETEGHFSHPLLEDPVLAARESCEIIHAQKDPPVVPQETEQSRPRFEIPNVTTWPKLRLPSSATNHGKPLSSFFSSPLPSGNRAAETGLMSSFKKLSTLFEGSSEGKGSVLASDSKLGFGKVDLSFPWPKENKGVPEQMPTESSPPVLVTSSDQDLNSSEANKALKSSQISGASAQPGKVYTQPSGTSEQLVASPEVCAQGLSGSGEGGNQQEISASGEHWDTKANLSSPACPSGKHEEEPSTVSEIFHQLEKQEEEAVPASTDSDLNVQQPVTLNDIKEPMTNKSPTSSSRYGSSCNVSQGSSQLSELDQYHEQDDDHRETDSIHSCHSSHSLSRDGQAGFGEQEKPLEVTGQAEKEAACEPKEMKEDATTHPPPDLVLQKDHFLGPQESFPEENASSPFTQARAHWIRAVTKVRLQLQEIPDDGDPSLPQWLPEGPAGGLYGIDSMPDLRRKKPLPLVSDLSLVQSRKAGITSAMATRTSLKDEELKSHVYKKTLQALIYPISCTTPHNFEVWTATTPTYCYECEGLLWGIARQGMRCSECGVKCHEKCQDLLNADCLQRAAEKSCKHGAEDRTQNIIMAMKDRMKIRERNKPEIFEVIRDVFTVNKAAHVQQMKTVKQSVLDGTSKWSAKITITVVCAQGLQAKDKTGSSDPYVTVQVSKTKKRTKTIFGNLNPVWEEKFHFECHNSSDRIKVRVWDEDDDIKSRVKQRLKRESDDFLGQTIIEVRTLSGEMDVWYNLEKRTDKSAVSGAIRLQISVEIKGEEKVAPYHVQYTCLHENLFHYLTDIQGSGGVRIPEARGDDAWKVYFDETAQEIVDEFAMRYGIESIYQAMTHFACLSSKYMCPGVPAVMSTLLANINAYYAHTTASTNVSASDRFAASNFGKERFVKLLDQLHNSLRIDLSTYRNNFPAGSPERLQDLKSTVDLLTSITFFRMKVQELQSPPRASQVVKDCVKACLNSTYEYIFNNCHDLYSRQYQLKQELPPEEQGPSIRNLDFWPKLITLIVSIIEEDKNSYTPVLNQFPQELNVGKVSAEVMWHLFAQDMKYALEEHEKDHLCKSADYMNLHFKVKWLHNEYVRDLPVLQGQVPEYPAWFEQFVLQWLDENEDVSLEFLRGALERDKKDGFQQTSEHALFSCSVVDVFTQLNQSFEIIRKLECPDPSILAHYMRRFAKTIGKVLMQYADILSKDFPAYCTKEKLPCILMNNVQQLRVQLEKMFEAMGGKELDLEAADSLKELQVKLNTVLDELSMVFGNSFQVRIDECVRQMADILGQVRGTGNASPDARASAAQDADSVLRPLMDFLDGNLTLFATVCEKTVLKRVLKELWRVVMNTMERMIVLPPLTDQTGTQLIFTAAKELSHLSKLKDHMVREETRNLTPKQCAVLDLALDTIKQYFHAGGNGLKKTFLEKSPDLQSLRYALSLYTQTTDTLIKTFVRSQTTQGSGVDDPVGEVSIQVDLFTHPGTGEHKVTVKVVAANDLKWQTAGMFRPFVEVTMVGPHQSDKKRKFTTKSKSNNWAPKYNETFHFLLGNEEGPESYELQICVKDYCFAREDRVLGLAVMPLRDVTAKGSCACWCPLGRKIHMDETGLTILRILSQRSNDEVAREFVKLKSESRSTEEGS

SEQ ID NO: 62265 - protein, 132 aa, Homo sapiens
MQRLGATLLCLLLAAAVPTAPAPAPTATSAPVKPGPALSYPQEEATLNEMFREVEELMEDTQHKLRSAVEEMEAEEAAAKASSEVNLANLPPSYHNETNTDTKVGNNTIHVHREIHKECIIDEDCGPSMYCQ

SEQ ID NO: 62266 - protein, 191 aa, Homo sapiens
PWMLLFKPLVLRRQYLRRKHLEGQPVEAPVSPNPSQQGLEAAAAATGTLNFGGIRVGNGPTEEDAEIIQHDQLSTHSEDADEPSEDEVFDFGDTMVHQAIHTIEYCLGCISNTASYLRLWALSLAHAQLSEVLWTMVIHIGLSVKSLAGGLVLFFFFTAFATLTVAILLIMEGLSAFLHALRLHWVEFQNK

SEQ ID NO: 62267 - protein, 1237 aa, Homo sapiens
MPEGAQGLSLSKPSPSLGCGRRGEVCDCGTVCETRTGSARPSRLERVAREIVETERAYVRDLRSIVEDYLGPLLDGGVLGLSVEQVGTLFANIEDIYEFSSELLEDLENSSSAGGIAECFVQRSEDFDIYTLYCMNYPSSLALLRELSLSPPAALWLQERQAQLRHSLPLQSFLLKPVQRILKYHLLLQELGKHWAEGPGTGGREMVEEAIVSMTAVAWYINDMKRKQEHAARLQEVQRRLGGWTGPELSAFGELVLEGAFRGGGGGGPRLRGGERLLFLFSRMLLVAKRRGLEYTYKGHIFCCNLSVSESPRDPLGFKVSDLTIPKHRHLLQAKNQEEKRLWIHCLQRLFFENHPASIPAKAKQVLLENSLHCAPKSKPVLEPLTPPLGSPRPRDARSFTPGRRNTAPSPGPSVIRRGRRQSEPVKDPYVMFPQNAKPGFKHAGSEGELYPPESQPPVSGSAPPEDLEDAGPPTLDPSGTSITEEILELLNQRGLRDPGPSTHDIPKFPGDSQVPGDSETLTFQALPSRDSSEEEEEEEEGLEMDERGPSPLHVLEGLESSIAAEMPSIPCLTKIPDVPNLPEIPSRCEIPEGSRLPSLSDISDVFEMPCLPAIPSVPNTPSLSSTPTLSCDSWLQGPLQEPAEAPATRRELFSGSNPGKLGEPPSGGKAGPEEDEEGVSFTDFQPQDVTQHQGFPDELAFRSCSEIRSAWQALEQGQLARPGFPEPLLILEDSDLGGDSGSGKAGAPSSERTASRVRELARLYSERIQQMQRAETRASANAPRRRPRVLAQPQPSPCLPQEQAEPGLLPAFGHVLVCELAFPLTCAQESVPLGPAVWVQAAIPLSKQGGSPDGQGLHVSNLPKQDLPGIHVSAATLLPEQGGSRHVQAPAATPLPKQEGPLHLQVPALTTFSDQGHPEIQVPATTPLPEHRSHMVIPAPSTAFCPEQGHCADIHVPTTPALPKEICSDFTVSVTTPVPKQEGHLDSESPTNIPLTKQGGSRDVQGPDPVCSQPIQPLSWHGSSLDPQGPGDTLPPLPCHLPDLQIPGTSPLPAHGSHLDHRIPANAPLSLSQELPDTQVPATTPLPLPQVLTDIWVQALPTSPKQGSLPDIQGPAAAPPLPEPSLTDTQVQKLTPSLEQKSLIDAHVPAATPLPERGGSLDIQGLSPTPVQTTMVLSKPGGSLASHVARNLWAFTGPRGLLMPPSTCEPGHEASLKQGFQPDAIDPQNLTWKSRH

SEQ ID NO: 62268 - protein, 229 aa, Homo sapiens
MLRLYVLVMGVSAFTLQPAAHTGAARSCRFRGRHYKREFRLEGEPVALRCPQVPYWLWASVSPRINLTWHKNDSARTVPGEEETRMWAQDGALWLLPALQEDSGTYVCTTRNASYCDKMSIELRVFENTDAFLPFISYPQILTLSTSGVLVCPDLSEFTRDKTDVKIQWYKDSLLLDKDNEKFLSVRGTTHLLVHDVALEDAGYYRCVLTFAHEGQQYNITRSIELRIK

SEQ ID NO: 62269 - protein, 318 aa, Homo sapiens
MFANLKYVSLGILVFQTTSLVLTMRYSRTLKEEGPRYLSSTAVVVAELLKIMACILLVYKDSKCSLRALNRVLHDEILNKPMETLKLAIPSGIYTLQNNLLYVALSNLDAATYQVTYQLKILTTALFSVSMLSKKLGVYQWLSLVILMTGVAFVQWPSDSQLDSKELSAGSQFVGLMAVLTACFSSGFAGVYFEKILKETKQSVWIRNIQLGFFGSIFGLMGVYIYDGELVSKNGFFQGYNRLTWIVVVLQALGGLVIAAVIKYADNILKGFATSLSIILSTLISYFWLQDFVPTSPYSSMKYWVGQVQWLIPVIPTL

SEQ ID NO: 62270 - protein, 396 aa, Homo sapiens
MAGYEYVSPEQLAGFDKYKYSAVDTNPLSLYVMHPFWNTIVKVFPTWLAPNLITFSGFLLVVFNFLLMAYFDPDFYASAPGHKHVPDWVWIVVGILNFVAYTLDGVDGKQARRTNSSTPLGELFDHGLDSWSCVYFVVTVYSIFGRGSTGVSVFVLYLLLWVVLFSFILSHWEKYNTGILFLPWGYDISQVTISFVYIVTAVVGVEAWYEPFLFNFLYRDLFTAMIIGCALCVTLPMSLLNFFRSYKNNTLKLNSVYEAMVPLFSPCLLFILSTAWILWSPSDILELHPRVFYFMVGTAFANSTCQLIVCQMSSTRCPTLNWLLVPLFLVVLVVNLGVASYVESILLYTLTTAFTLAHIHYGVRVVKQLSSHFQIYPFSLRKPNSDLGMEEKNIGL

SEQ ID NO: 62271 - protein, 738 aa, Homo sapiens
MLLFFTLGLLIHFVFFASIFDIYFTSPLVHGMTPQFTPLPPPARRLVLFVADGLRADALYELDENGNSRAPFIRNIIMHEGSWGISHTRVPTESRPGHVALIAGFYEDVSAVAKGWKENPVEFDSLFNESKYTWSWGSPDILPMFAKGASGDHVYTYSYDAKREDFGAQDATKLDTWVFDNVKDFFHHARNNQSLFSKINEEKIVFFLHLLGIDTNGHAHRPSSRDYKHNIKKVDDGVKEIVSMFNHFYGNDGKTTFIFTSDHGMTDWGSHGAGHPSETLTPLVTWGAGIKYPQRVSAQQFDDAFLKEWRLENWKRLDVNQADIAPLMTSLIGVPFPLNSVGILPVDYLNNTDLFKAESMFTNAVQILEQFKVKMTQKKEVTLPFLFTPFKLLSDSKQFNILRKARSYIKHRKFDEVVSLCKELIHLALKGLSYYHTYDRFFLGVNVVIGFVGWISYASLLIIKSHSNLIKGVSKEVKKPSHLLPCSFVAIGILVAFFLLIQACPWTYYVYGLLPLPIWYAVLREFQVIQDLVVSVLTYPLSHFVGYLLAFTLGIEVLVLSFFYRYMLTAGLTAFAAWPFLTRLWTRAKMTSLSWTFFSLLLAVFPLMPVVGRKPDISLVMGAGLLVLLLSLCVVTSLMKRKDSFIKEELLVHLLQVLSTVLSMYVVYSTQSSLLRKQGLPLMNQIISWATLASSLVVPLLSSPVLFQRLFSILLSLMSTYLLLSTGSPVSSSLIILI

SEQ ID NO: 62272 - protein, 177 aa, Homo sapiens
MSYNGLHQRVFKELKLLTLCSISSQIGPPEVALTTDEKSISVVLTAPEKWKRNPEDLPVSMQQIYSNLKYNVSVLNTKSNRTWSQCVTNHTLVLTWLEPNTLYCVHVESFVPGPPRRAQPSEKQCARTLKDQSSEFKAKIIFWYVLPVSITVFLFSVMGYSIYRYIHVGKEKHPANL

SEQ ID NO: 62273 - protein, 197 aa, Homo sapiens
MAMAYLAWRLARRSCPSSLQVTSFPVVQLHMNRTAMRASQKDFENSMNQVKLLKKDPGNEVKLKLYALYKQATEGPCNMPKPGVFDLINKAKWDAWNALGSLPKEAARQNYVDLVSSLSPSLESSSQVEPGTDRKSTGFETLVVTSEDGITKIMFNRPKKKNAINTEMYHEIMRALKAASKDDSIITVLTGNISYTI

SEQ ID NO: 62274 - protein, 1181 aa, Homo sapiens
MANGGGGGGGSSGGGGGGGGSSLRMSSNIHANHLSLDASSSSSSSSSSSSSSSSSSSSSSVHEPKMDALIIPVTMEVPCDSRGQRMWWAFLASSMVTFFGGLFIILLWRTLKYLWTVCCHCGGKTKEAQKINNGSSQADGTLKPVDEKEEAVAAEVGWMTSVKDWAGVMISAQTLTGRVLVVLVFALSIGALVIYFIDSSNPIESCQNFYKDFTLQIDMAFNVFFLLYFGLRFIAANDKLWFWLEVNSVVDFFTVPPVFVSVYLNRSWLGLRFLRALRLIQFSEILQFLNILKTSNSIKLVNLLSIFISTWLTAAGFIHLVENSGDPWENFQNNQALTYWECVYLLMVTMSTVGYGDVYAKTTLGRLFMVFFILGGLAMFASYVPEIIELIGNRKKYGGSYSAVSGRKHIVVCGHITLESVSNFLKDFLHKDRDDVNVEIVFLHNISPNLELEALFKRHFTQVEFYQGSVLNPHDLARVKIESADACLILANKYCADPDAEDASNIMRVISIKNYHPKIRIITQMLQYHNKAHLLNIPSWNWKEGDDAICLAELKLGFIAQSCLAQGLSTMLANLFSMRSFIKIEEDTWQKYYLEGVSNEMYTEYLSSAFVGLSFPTVCELCFVKLKLLMIAIEYKSANRESRSRKRILINPGNHLKIQEGTLGFFIASDAKEVKRAFFYCKACHDDITDPKRIKKCGCKRLEDEQPSTLSPKKKQRNGGMRNSPNTSPKLMRHDPLLIPGNDQIDNMDSNVKKYDSTGMFHWCAPKEIEKVILTRSEAAMTVLSGHVVVCIFGDVSSALIGLRNLVMPLRASNFHYHELKHIVFVGSIEYLKREWETLHNFPKVSILPGTPLSRADLRAVNINLCDMCVILSANQNNIDDTSLQDKECILASLNIKSMQFDDSIGVLQANSQGFTPPGMDRSSPDNSPVHGMLRQPSITTGVNIPIITELVNDTNVQFLDQDDDDDPDTELYLTQPFACGTAFAVSVLDSLMSATYFNDNILTLIRTLVTGGATPELEALIAEENALRGGYSTPQTLANRDRCRVAQLALLDGPFADLGDGGCYGDLFCKALKTYNMLCFGIYRLRDAHLSTPSQCTKRYVITNPPYEFELVPTDLIFCLMQFDHNAGQSRASLSHSSHSSQSSSKKSSSVHSIPSTANRQNRPKSRESRDKQKKEMVYR

SEQ ID NO: 62275 - protein, 325 aa, Homo sapiens
MREPEELMPDSGAVFTFGKSKFAENNPGKFWFKNDVPVHLSCGDEHSAVVTGNNKLYMFGSNNWGQLGLGSKSAISKPTCVKALKPEKVKLAACGRNHTLVSTEGGNVYATGGNNEGQLGLGDTEERNTFHVISFFTSEHKIKQLSAGSNTSAALTEDGRLFMWGDNSEGQIGLKNVSNVCVPQQVTIGKPVSWISCGYYHSAFVTTDGELYVFGEPENGKLGLPNQLLGNHRTPQLVSEIPEKVIQVACGGEHTVVLTENAVYTFGLGQFGQLGLGTFLFETSEPKVIENIRDQTISYISCGENHTALITATAMKKLLKKLLLI

SEQ ID NO: 62276 - protein, 114 aa, Homo sapiens
MGPGLLCWELLYLLGAGPVEAGVTQSPTHLIKTRGQQVTLRCSPISGHSSVSWYQQAPGQGPQFIFEYANELRRSEGNFPNRFSGRQFHDCCSEMNVSALELGDSALYLCARSL

SEQ ID NO: 62277 - protein, 50 aa, Homo sapiens
  MOD_RES (1)..(1): Any amino acid
XEIGGDAGGRIGCKELVLMEEQDARVPALEPFRVEQVVRTQGTTCNLLCP

SEQ ID NO: 62278 - protein, 162 aa, Homo sapiens
  MOD_RES (1)..(1): Any amino acid
XSGRAGAPEAQGPAAPGTTAPEGGDRCRGYYDVMGQWDPPFNCSSGAYSFCCGTCGYRFCCHDGPRRLDQSRCSNYDTPAWVQTGRPPARARDTAAPRDPGRERSHTAVYAVCGVAALLVLAGIGARLGLERAHSPRARRTVTRALTELLKQPGPQEPLPPT

SEQ ID NO: 62279 - protein, 380 aa, Homo sapiens
MASVAWAVLKVLLLLPTQTWSPVGAGNPPDCDSPLASALPRSSFSSSSELSSSHGPGFSRLNRRDGAGGWTPLVSNKYQWLQIDLGERMEVTAVATQGGYGSSDWVTSYLLMFSDGGRNWKQYRREESIWGFPGNTNADSVVHYRLQPPFEARFLRFLPLAWNPRGRIGMRIEVYGCAYKSEVVYFDGQSALLYTLDKKPLKPIRDVISLKFKAMQSNGILLHREGQHGNHITLELIKGKLVFFLNSGNAKLPSTIAPVTLTLGSLLDDQHWHSVLIELLDTQVNFTVDKHTHHFQAKGDSSNLDLNFEISFGGILSPGRSRAFTRKSFHGCLENLYYNGVDVTELAKKHKPQILMMELAHGLQDQNLKISLTVCHQTTQ

SEQ ID NO: 62280 - protein, 163 aa, Homo sapiens
  MOD_RES (1)..(1): Any amino acid
XAIPHPRGHAHLAALVNHESYNFSHRIDHLSFGELVPAIINPLDGTEKIAIDHNQMFQYFITVVPTKLHTYKISADTHQFSVTERERIINHAAGSHGVSGIFMKYDLSSLMVTVTEEHMPFWQFFVRLCGIVGGIFSTTDLDPINLSILFLLRMATQTTTYLF

SEQ ID NO: 62281 - protein, 150 aa, Homo sapiens
MEALLEGIQNRGHGGGFLTSCEAELQELMKQIDIMVAHKKSEWEGRTHALETCLKIREQELKSLRSQLDVTHKEVGMLHQQVEEHEKIKQEMTMEYKQELKKLHEELCILKRSYEKLQKKQMREFRGNTKNHREDRSEIERLTAKIEVCS

SEQ ID NO: 62282 - protein, 256 aa, Homo sapiens
  MOD_RES (1)..(1): Any amino acid
XCMAERLKEEILNREKMVDILAGPDAYRDLPRLLAVAESGQQAANVLLSLDETYADVMPVQTSASATSAFVYSREAYVELVHHIRESIPGVSLSSDFIAGFCGETEEDHVQTVSLLREVQYNMGFLFAYSMRQKTRAYHRLKDDVPEEVKLRRLEELITIFREEATKANQTSVGCTQLVLVEGLSKRSATDLCGRNDGNLKVIFPDAEMEDVNNPGLRVRAQPGDYVLVKITSASSQTLRGHVLCRTTLRDSSAYC

SEQ ID NO: 62283 - protein, 34 aa, Homo sapiens
  MOD_RES (1)..(1): Any amino acid
XGPEGPQLGKHGLVCQEAWSSERLVGQRLGAGRP

SEQ ID NO: 62284 - protein, 36 aa, Homo sapiens
MPECDWRQPSGGDGGWDLSLLTGERDSDGRRDFARE

SEQ ID NO: 62285 - protein, 1145 aa, Homo sapiens
MSLNNSSNVFLDSVPSNTNRFQVSVINENHESSAAADDNTDPPHYEETSFGDEAQKRLRISFRPGNQECYDNFLQSGETAKTDASFHAYDSHTNTYYLQTFGHNTMDAVPKIEYYRNTGSISGPKVNRPSLLEIHEQLAKGLTLSPRLECSGTTVVHCSLDLPSSSNPPTSASQVDGTRGACHHTQNVAVTPSSADRVANGDGIPGDEQAENKEDDQAGVVKFGWVKGVLVRCMLNIWGVMLFIRLSWIVGEAGIGLGVLIILLSTMVTSITGLSTSAIATNGFVRGGGAYYLISRSLGPEFGGSIGLIFAFANAVAVAMYVVGFAETVVDLLKESDSMMVDPTNDIRIIGSITVVILLGISVAGMEWEAKAQVILLVILLIAIANFFIGTVIPSNNEKKSRGFFNYQASIFAENFGPRFTKGEGFFSVFAIFFPAATGILAGANISGDLEDPQDAIPRGTMLAIFITTVAYLGVAICVGACVVRDATGNMNDTIISGMNCNGSAACGLGYDFSRCRHEPCQYGLMNNFQVMSMVSGFGPLITAGIFSATLSSALASLVSAPKVFQALCKDNIYKALQFFAKGYGKNNEPLRGYILTFLIAMAFILIAELNTIAPIISNFFLASYALINFSCFHASYAKSPGWRPAYGIYNMWVSLFGAVLCCAVMFVINWWAAVITYVIEFFLYVYVTCKKPDVNWGSSTQALSYVSALDNALELTTVEDHVKNFRPQCIVLTGGPMTRPALLDITHAFTKNSGLCICCEVFVGPRKLCVKEMNSGMAKKQAWLIKNKIKAFYAAVAADCFRDGVRSLLQASGLGRMKPNTLVIGYKKNWRKAPLTEIENYVGIIHDAFDFEIGVVIVRISQGFDISQVLQVQEELERLEQERLALEATIKDNECEEESGGIRGLFKKAGKLNITKTTPKKDGSINTSQSMHVGEFNQKLVEASTQFKKKQEKGTIDVWWLFDDGGLTLLIPYILTLRKKWKDCKLRIYVGGKINRIEEEKIVMASLLSKFRIKFADIHIIGDINIRPNKESWKVFEEMIEPYRLHESCKDLTTAEKLKRETPWKITDAELEAVKEKSYRQVRLNELLQEHSRAANLIVLSLPVARKGSISDLLYMAWLEILTKNLPPVLLVRGNHKNVLTFYS

SEQ ID NO: 62286 - protein, 112 aa, Homo sapiens
  MOD_RES (1)..(1): Any amino acid
XSPEPQPMGVRVICGHCKNTFLWTEFTDRTLARCPHCRKVSSIGRRYPRKRCICCFLLGLLLAVTATGLAFGTWKHARRYGGIYAAWAFVILLAVLCLGRALYWACMKGCCV

SEQ ID NO: 62287 - protein, 106 aa, Homo sapiens
MASTEEQYDLKIVKVEEDPIWDQETHLRGNNFSGQEASRQLFRQFCYQETPGPREALSRLRELCHQWLRPEIHTKEQILELLVLEQFLTILPEELQAWVREHHPES

SEQ ID NO: 62288 - protein, 108 aa, Homo sapiens
MGERAYHGAQVCSGTNPRKCQDLGDSILLLLGSFILLNVWINVVTLLWKHLKSSLRILFRHFFPKAQSDRTAWLPQSGGVPPGGARRPRPQLGRSRTSTSAPGRSCRN

SEQ ID NO: 62289 - protein, 180 aa, Homo sapiens
MERAEEPVVYQKLLPWEPSLESEEEVEEEETSEALVLNPRRHQDSSRNKAGGLPGTWARVVAALLLLAVGCSLAVRQLQNQGRSTGSLGSVAPPPGGHSHGPGVYHHGAIISPAGRELLVAGGNVVDAGVGAALCLAVVHPHATGLDCCEPREQCPGRRGQQRLCAPSHLLAQLLLWLCT

SEQ ID NO: 62290 - protein, 2061 aa, Homo sapiens
MDSEYVLCSWKGRLWPAKVLCTRGTSPKTKPEKAISLEVQILAVDEKIKVKSTDVKTPTKFEMEDIAASAAAQTKLGAPLREKMGYRGTLRVALEILKERTNLGGGRKPHELESTTPSQLSQKVPEKPASSVPREDDWRCKGDLRRSLGKRENPSSPTVPSESKRALRDDRSQEPTAIAPTPGALPGDRSGAPRAIAPTPGAMLSGRSRARRAIAPTPSALRGYRSWAHRAIAPTPGCLYSDRSRAHRAIAPARGTKHGGRSWACRSIAPKPGSLCGDRSQASRAIDPTLGARRGGRSRAHRAIAPTPGSLCGNRSRACGAIALTPGVLCGVRSRVPKDITPTPGALRGYKSWVCRAIAPTPGALRGDRSAARTAVVRTPGALGRDRSRARSAIASTPGTLQGNRSSVSKAIAPTPGALRGDRSAARTAFVPTPGALHRDRSRARSAIASTPGTLRGNTSSACKAIAPTPGALRGYKSWARRAIAPNPGAWRGYRSTTGTAIAPNLGALGGNRSAARTDIAPTPGALRGYRSWTRRAIAPTPGTLSSYRSRSRRTIASTPATLRGEKSRAHTSLAPTPGALRGDGSRARRAIVPTTCPLCEIWSRVGIGIAPIADALRRDRSPVRRAIAPTPGTLSGYRSRARTAIAPTPGTLRGYRPRSRRAIASTPATLRGEKSRAHTSLAPAPGALRGDGSRARRAIVPTTCPLCEIWSRVGIGIAPIADALRRDRPPVRRAIAPTPGALRCDRSRELTAIDPTPGALCSDRSGASRAIAPTPGTLCSERSRVRRAIAPTPCALCGKGSQVGMGVAPTPGALRRDRSQAGRAIAPTPSALFRVGSRVGTGIALPAGALHRDRSPVRRAVAPTPGTLHCDGSRKCTATGSTPGALPGDRSGVSKATAPAPGALCSERSRARRSIAPTPCLLCGDRSWVGMGIAPTPGALLGGKSRKCRAIAITPGALRGGRSQKRRVVAPTPEALHGDGSWTYMAIAPTPGALHGDSSPAHTSIIPSPGALHGDGPPAHMAFPSTPGTLHGDASHAHMAIAPTPGTMRGDSSTARTATAPSPGALRGDRSWKRKAIASTPGALHGNRSDRSRKCKAIASTPGTLHVERSPALRAIVPTPGTLGRDSSPGRTSIIPSPGALHGDRSPAHLDIASTPGALHGDSSQAHTAIAPTPGTMRGDSSTARMAIAPSAGALRGDRSWKRKAIASTPGALRGNRSDRSRKRKAIASTPGALLGNRSDRSRKHKAIAPTPGAPRIDRSPACRAIAPTPGALGDDSSTAIAPTPGTPRGDSSPANTAIASTPGALHGDTSQTHKAIAPTPGDLGGGSSSAHKAITPSPGALHGDRSPAHTAIASTPGALHGDSSQVHTTIAPTPGALRDDKSWKRKAIAPTPGTLHCDSSRTCTAFAPTPGALHADRSPAHQDITLTSGALHCDSSRESRAVAPILGALHRVGSQAHKAIASTPGPLRGDSSPFHTAIAPMPGALHGTRSWKREAISQTPFVTLCGDSSGERMAIAPTPGALHSDRSQTHTAIDPTPSVLRSDSSPACMAIDPTPGALGRDRSQALMAIAPTPVGMQAHVLQSPRACQDSLTLSRHVCEKKGKKRANASTLMSLPPTVTEEGASLPPGLTSPAPPALKEETQDSRPKKALAASPESSPFSGNIQDPGEGAWKPGWAGMAASSGSRQHRLPSSLRLANRKRKRPGPDFQRRPQGPQTPGDAKLANPVTTIQRAGGKQDGQPPSLAFPQEPHPIERGTMVWFKFQDHPFWPAVVKSVSNTDKTARVLLLEANLHHGKRGIQVPLRRLKHLDCKEKEKLLKRAQKAYKQSVNWCFSLISHYREGLVRGSFRGSFLDYYAADISYPIRRAIQEGDLQIDFPKVNYGDLEDWEEETSLGGKRPCKKILPDRMRASWDRDNQKLVDFIVRRKGADPHLLDILQGRKQSRWLTAFLKPHRDLHCIETYLEDDDQLEVVAKHLQEIYKQIDKARLTLIRDDKVNFVLEVLLPEAMICTIAALDGLDYKAAEEKYLRGPPVHYREKELFDRNILKKARREPATTHTAN

SEQ ID NO: 62291 - protein, 139 aa, Homo sapiens
MMFNNDLMADVHFVVGPPGGTQRLPGHKYVLAVGSSVFHAMFYGELAEDKDEIRIPDVEPAAFLAMLKYIYCDEIDLAADTVLATLYAAKKYIVPHLARACVNFLETSLSAKNACVLLSQSCLFEEPDLTQRCWEVIDA

SEQ ID NO: 62292 - protein, 165 aa, Homo sapiens
MGFSSDEYLSLVARLIIHFRDIHNKKSQASVSDPMNALQSLTGGPAAGAAGIGMPPRGPGQSLGGMGSLGAMGQPMSLSGQPPPGTSGMAPHSMAVVSTATPQTQLQLQQVALQQQQQQQQFQQQQQAALQQQQQQQQQQQFQAQQSAMQQQFQAVVQQQQQLQQ

SEQ ID NO: 62293 - protein, 345 aa, Homo sapiens
MWATLPLLCAGAWLLGVPVCGAAELCVNSLEKFHFKSWMSKHRKTYSTEEYHHRLQTFASNWRKINAHNNGNHTFKMALNQFSDMSFAEIKHKYLWSEPQNCSATKSNYLRGTGPYPPSVDWRKKGNFVSPVKNQGACGSCWTFSTTGALESAIAIATGKMLSLAEQQLVDCAQDFNNHGCQGGLPSQAFEYILYNKGIMGEDTYPYQGKDGYCKFQPGKAIGFVKDVANITIYDEEAMVEAVALYNPVSFAFEVTQDFMMYRTGIYSRASKGQLCMLPGSRHLALARAYGPLTHQLNSHLTTAVCSLEFLGISLWRLVHFCKQKKLYFCHRYKVIFNKCSGNKA

SEQ ID NO: 62294 - protein, 258 aa, Homo sapiens
TTRTAWSPRCTTASTAPRGSWPTPSSPRTAASTSTTASTGSWAPRATAGRKVTVQAGLLEASPLQHSGLPRSGFGADGRRDLPGWWLPLESSRRVAHGPGARGGPRDRPRAGPDALTTRPGAHAPERHAARLEGVVPGRAVGAAPALRMPRQAVRVRVLGAEGLLRRSPAAHEEALPQQLRLLLRIPLPHGGHHPTAPQDQNQAGARGQERDLPLRPEDPPQERESVLVQGPGAPGVLLPRLPGPGRGAPEHHRQRRQ

SEQ ID NO: 62295 - protein, 545 aa, Homo sapiens
MDQKLSKLVEELTTSGEPRLNPEKMKELKKICKSSEEQLSRAYRLLIAQLTQEHAEIRLSAFQIVEELFVRSHQFRMLVVSNFQEFLELTLGTDPAQPLPPPREAAQRLRQATTRAVEGWNEKFGEAYKKLALGYHFLRHNKKVDFQDTNARSLAERKREEEKQKHLDKIYQERASQAEREMQEMSGEIESCLTEVESCFRLLVPFDFDPNPETESLGMASGMSDALRSSCAGQVGPCRSGTPDPRDGEQPCCSRDLPASAGHPRAGGGAQPSQTATGDPSDEDEDSDLEEFVRSHGLGSHKYTLDVELCSEGLKVQENEDNLALIHAARDTLKLIRNKFLPAVCSWIQRFTRVGTHGGCLKRAIDLKAELELVLRKYKELDIEPEGGERRRGWRQHQRKTQLCGACGRGRGWTRRCRTPPLRLLSCGSSGTTCLHPHLPAPPERCQSHRRPRSWQQSGPGRLWCPTAWTCTTGARSSPQPGRLSSLTPSTASGSPARWRRKWSMPTSPRCSGAATSLLPGSLSLCSTGAVPRGQTAGSVSAKTG

SEQ ID NO: 62296 - protein, 102 aa, Homo sapiens
MTKFGFLRLSYEKQDTLLKLLILSMAAVLSFSTRLFAVLRFESVIHEFDPYFNYRTTRFLAEEGFYKFHNWFDDRAWYPLGRIIGGTIYPGLMITSAAIYHV

SEQ ID NO: 62297 - protein, 479 aa, Homo sapiens
MFKGVGLAAAVLSFWLNIYYIVIISWAIYYLYNSFTTTLPWKQCDNPWNTDRCFSNYSMVNTTNMTSAVVEFWERNMHQMTDGLDKPGQIRWPLAITLAIAWILVYFCIWKGVGWTGKVVYFSATYPYIMLIILFFRGVTLPGAKEGILFYITPNFRKLSDSEVWLDAATQIFFSYGLGLGSLIALGSYNSFHNNVYRDSIIVCCINSCTSMFAGFVIFSIVGFMAHVTKRSIADVAASGPGLAFLAYPEAVTQLPISPLWAILFFSMLLMLGIDSQFCTVEGFITALVDEYPRLLRNRRELFIAAVCIISYLIGLSNITQGGIYVFKLFDYYSASGMSLLFLVFFECVSISWFYGVNRFYDNIQEMVGSRPCIWWKLCWSFFTPIIVAGVFIFSAVQMTPLTMGNYVFPKWGQGVGWLMALSSMVLIPGYMAYMFLTLKGSLKQRIQVMVQPSEDIVRPENGPEQPQAGSSTSKEAYI

SEQ ID NO: 62298 - protein, 312 aa, Homo sapiens
MHQGNQTTITEFILLGFFKQDEHQNLLFVLFLGMYLVTVIGNGLIIVAISLDTYLHTPMYLFLANLSFADISSISNSVPKMLVNIQTKSQSISYESCITQMYFSIVFVVIDNLLLGTMAYDHFVAICHPLNYTILMRPRFGILLTVISWFLSNIIALTHTLLLIQLLFCNHNTLPHFFCDLAPLLKLSCSDTLINELVLFIVGLSVIIFPFTLSFFSYVCIIRAVLRVSSTQGKWKAFSTCGSHLTVVLLFYGTIVGVYFFPSSTHPEDTDKIGAVLFTVVTPMINPFIYSLRNKDMKGALRKLINRKISSL

SEQ ID NO: 62299 - protein, 324 aa, Homo sapiens
MKNGLMFVKLVNPCSGEGAIYLFNMCLQQLFEVKVFKEKHHSWFINQSVQSGGLLHFATPVDPLFLLLHYLIKADKEGKFQPLDQVVVDNVFPNCILLLKLPGLEKLLHHVTEEKGNPEIDNKKYYKYSKEKTLKWLEKKVNQTVAALKTNNVNVSSRVQSTAFFSGDQASTDKEEDYIRYAHGLISDYIPKELSDDLSKYLKLPEPSASLPNPPSKKIKLSDEPVEAKEDYTKFNTKDLKTEKKNSKMTAAQKALAKVDKSGMKNGVSLLLPRLEYNGVISAHHNLRLQGSSDSPASASRVAEITGLPTGHFVMAAQRQKRGK

SEQ ID NO: 62300 - protein, 1429 aa, Homo sapiens
MTLSTLARKRKAPLACTCSLGGPDMIPYFSANAVISQNAINQLISESFLTVKGAALFLPRGNGSSTPRISHRRNKHAGDLQQHLQAMFILLRPEDNIRLAVRLESTYQNRTRYMVVVSTNGRQDTEESIVLGMDFSSNDSTCTMGLVLPLWSDTLIHLDGDGGFSVSTDNRVHIFKPVSVQAMWSALQSLHKACEVARAHNYYPGSLFLTWVSYYESHINSDQSSVNEWNAMQDVQSHRPDSPALFTDIPTERERTERLIKTKLREIMMQKDLENITSKEIRTELEMQMVCNLREFKEFIDNEMIVILGQMDSPTQIFEHVFLGSEWNASNLEDLQNRGVRYILNVTREIDNFFPGVFEYHNIRVYDEEATDLLAYWNDTYKFISKAKKHGSKCLVHCKMGVSRSASTVIAYAMKEYGWNLDRAYDYVKERRTVTKPNPSFMRQLEEYQGILLASKQRHNKLWRSHSDSDLSDHHEPICKPGLELNKKDITTSADQIAEVKTMESHPPIPPVFVEHMVPQDANQKGLCTKERMICLEFTSREFHAGQIEDELNLNDINGCSSGCCLNESKFPLDNCHASKALIQPGHVPEMANKFPDLTVEDLETDALKADMNVHLLPMEELTSPLKDPPMSPDPESPSPQPSCQTEISDFSTDRIDFFSALEKFVELSQETRSRSFSHSRMEELGGGRNESCRLSVVEVAPSKVTADDQRSSSLSNTPHASEESSMDEEQSKAISELVSPDIFMQSHSENAISVKEIVTEIESISQGVGQIQLKGDILPNPCHTPKKNSIHELLLERAQTPENKPGHMEQDEDSCTAQPELAKDSGMCNPEGCLTTHSSIADLEEGEPAEGEQELQGSGMHPGAKWYPGSVRRATLEFEERLRQEQEHHGAAPTCTSLSTRKNSKNDSSVADLAPKGKSDEAPPEHSFVLKEPEMSKGKGKYSGSEAGSLSHSEQNATVPAPRVLEFDHLPDPQEGPGSDTGTQQEGVLKDLRTVIPYQESETQAVPLPLPKRVEIIEYTHIVTSPNHTGPGSEIATSEKSGEQGLRKVNMEKSVTVLCTLDENLNRTLDPNQVSLHPQVLPLPHSSSPEHNRPTDHPTSILSSPEDRGSSLSTALETAAPFVSHTTHLLSASLDYLHPQTMVHLEGFTEQSSTTDEPSAEQVSWEESQESPLSSGSEVPYKDSQLSSADLSLISKLGDNTGELQEKMDPLPVACRLPHSSSSENIKSLSHSPGVVKERAKEIESRVVFQAGLTKPSQMRRSASLAKLGYLDLCKDCLPEREPASCESPHLKLLQPFLRTDSGMHAMEDQESLENPGAPHNPEPTKSFVEQLTTTECIVQSKPVERPLVQYAKEFGSSQQYLLPRAGLELTSSEGGLPVLQTQGLQCACPAPGLAVAPRQQHGRTHPLRRLKKANDKKRTTNPFYNTM

SEQ ID NO: 62301 - protein, 1203 aa, Homo sapiens
MEESKTLKSENHEPKKNVICEESKAVQVIGNQTLKARNDKSVKEIENSSPNRNSSKKNKQNDICIEKTEVKSCKVNAANLPGPKDLGLVLRDQSHCKAKKFPNSPVKAEKATISQAKSEKATSLQAKAEKSPKSPNSVKAEKASSYQMKSEKVPSSPAEAEKGPSLLLKDMRQKTELQQIGKKIPSSFTSVDKVNIEAVGGEKCALQNSPRSQKQQTCTDNTGDSDDSASGIEDVSDDLSKMKNDESNKENSSEMDYLENATVIDESALTPEQRLGLKQAEERLERDHIFRLEKRSPEYTNCRYLCKLCLIHIENIQGAHKHIKEKRHKKNILEKQEESELRSLPPPSPAHLAALSVAVIELAKEHGITDDDLRVRQEIVEEMSKVITTFLPECSLRLYGSSLTRFALKSSDVNIDIKFPPKMNHPDLLIKVLGILKKNVLYVDVESDFHAKVPVVVCRDRKSGLLCRVSAGNDMACLTTDLLTALGKIEPVFIPLVLAFRYWAKLCYIDSQTDGGIPSYCFALMVMFFLQQRKPPLLPCLLGSWSPLALETPNRVSLGQLWLELLKFYTLDFALEEYVICVRIQDILTRENKNWPKRRIAIEDPFSVKRNVARSLNSQLVYEYVVERFRAAYRYFACPQTKGGNKSTVDFKKREKGKISNKKPVKSNNMATNGCILLGETTEKINAEREQPVQCDEMDCTSQRCIIDNNNLLVNELDFADHGQDSSSLSTSKSSEIEPKLDKKQDDLAPSETCLKKELSQCNCIDLSKSPDPDKSTGTDCRSNLETESSHQSVCTDTSATSCNCKATEDASDLNDDDNLPTQELYYVFDKFILTSGKPPTIVCSICKKDGHSKNDCPEDFRKIDLKPLPPMTNRFREILDLVCKRCFDELSPPCSEQHNREQILIGLEKFIQKEYDEKARLCLFGSSKNGFGFRDSDLDICMTLEGHENAEKLNCKEIIENLAKILKRHPGLRNILPITTAKVPIVKFEHRRSGLEGDISLYNTLAQHNTRMLATYAAIDPRVQYLGYTMKVFAKRCDIGDASRGSLSSYAYILMVLYFLQQRKPPVIPVLQEIFDGKQIPQRMVDGWNAFFFDKTEELKKRLPSLGKNTESLGELWLGLLRFYTEEFDFKEYVISIRQKKLLTTFEKQWTSKCIAIEDPFDLNHNLGAGVSRKMTNFIMKAFINGRKLFGTPFYPLIGREA

SEQ ID NO: 62302 - protein, 360 aa, Homo sapiens
MHDVIKKVKKKGEWKVLVVDQLSMRMLSSCCKMTDIMTEGITIVEDINKRREPLPSLEAVYLITPSEKSVHSLISDFKDPPTAKYRAAHVFFTDSCPDALFNELVKSRAAKVIKTLTEINIAFLPYESQVYSLDSADSFQSFYSPHKAQMKNPILERLAEQIATLCATLKEYPAVRYRGEYKDNALLAQLIQDKLDAYKADDPTMGEGPDKARSQLLILDRGFDPSSPVLHELTFQAMSYDLLPIENDVYKYETSGIGEARVKEVLLDEDDDLWIALRHKHIAEVSQEVTRSLKDFSSSKRMNTGEKTTMRDLSQMLKKMPQYQKELSKYSTHLHLAEDCMKHYQGTVDKLCRVEQNHRK

SEQ ID NO: 62303 - protein, 279 aa, Homo sapiens
MASMSIVKATSNTISQCGWSASANWTPSISPSMDRGERSPSALSPTQVAIRRRCRPSPYVVNFLVPSGILIAIDALSFYLPLESGNCAPFKMTVLLGYSVFLLMMNDLLPATSTSSHASLVRPHPSRDQKRGVYFALCLSLMVGSLLETIFITHLLHVATTQPLPLPRWLHSLLLHCTGQGRCCPTAPQKGNKGPGLTPTHLPGVKEPEVSAGQMPGPGEAELTGGSEWTRAQREHEAQKQHSVELWVQFSHAMDALLFRLYLLFMASSIITVICLWNT

SEQ ID NO: 62304 - protein, 68 aa, Homo sapiens
MNNFGNEEFDCHFLDEGFTAKDILDQKINEVSSSDDKDAFYVADLGDILKKHLRWLKALPRVTPFYAV

SEQ ID NO: 62305 - protein, 488 aa, Homo sapiens
MFSAGAESLLHQAREIQDEELKKFCSRICKLLQAEDLGPDTLDSLQRLFLIISATKYSRRLEKTCVDLLQATLGLPACPEQLQVLCAAILREMSPSDSLSLAWDHTQNSRQLSLVASVLLAQGDRNEEVRAVGQGVLRALESRQPEGPSLRHLLPVMAKVVVLSPGTLQEDQATLLSKRLVDWLRYASLQQGLPHSGGFFSTPRARQPGPVTEVDGAVATDFFTVLSSGHRFTDDQWLNVQAFSMLRAWLLHSGPEGPGTLDTDDRSEQEGSTLSVISATSSAGRLLPPRERLREVAFEYCQRLIEQSNRRALRKGDSDLQKACLVEAVLVLDVLCRQDPSFLYRSLSCLKALHGRVRGDPASVRVLLPLAHFFLSHGEAAAVDSEAVYQHLFTRIPVEQFHSPMLAFEFIQFCRDNLHLFSGHLSTLRLSFPNLFKLRAVSEPLCCAHSSWPGTAHPSPPSLWRSSRPWWTLAQPWRCCTRCWTCPA

SEQ ID NO: 62306 - protein, 63 aa, Homo sapiens
MYFLNDTLAAEDSPSFSLLQSAHPGEHLAQGASRLQVLQAQLTWVRVSHEHLLQRVDNFTQNP

SEQ ID NO: 62307 - protein, 42 aa, Homo sapiens
  MOD_RES (1)..(1): Any amino acid
XENSSLLDSIFWMAAPKNRRTIEVNRCRRRNPQKLIKVKSSC

SEQ ID NO: 62308 - protein, 731 aa, Homo sapiens
MAPYSLLVTRLQKALGVRQYHVASVLCQRAKVAMSHFEPNEYIHYDLLEKNINIVRKRLNRPLTLSEKIVYGHLDDPASQEIERGKSYLRLRPDRVAMQDATAQMAMLQFISSGLSKVAVPSTIHCDHLIEAQVGGEKDLRRAKDINQEVYNFLATAGAKYGVGFWKPGSGIIHQIILENYAYPGVLLIGTDSHTPNGGGLGGICIGVGGADAVDVMAGIPWELKCPKVIGVKLTGSLSGWSSPKDVILKVAGILTVKGGTGAIVEYHGPGVDSISCTGMATICNMGAEIGATTSVFPYNHRMKKYLSKTGREDIANLADEFKDHLVPDPGCHYDQLIEINLSELKPHINGPFTPDLAHPVAEVGKVAEKEGWPLDIRVGLIGSCTNSSYEDMGRSAAVAKQALAHGLKCKSQFTITPGSEQIRATIERDGYAQILRDLGGIVLANACGPCIGQWDRKDIKKGEKNTIVTSYNRNFTGRNDANPETHAFVTSPEIVTALAIAGTLKFNPETDYLTGTDGKKFRLEAPDADELPKGEFDPGQDTYQHPPKDSSGQHVDVSPTSQRLQLLEPFDKWDGKDLEDLQILIKVKGKCTTDHISAAGPWLKFRGHLDNISNNLLIGAINIENGKANSVRNAVTQEFGPVPDTARYYKAAGEEGPLQPLYREPQDAQAPETWHQVGGDRRRELRRGLEPGACSSGASPPWGPGHHHQELCQDPRDQPEETGPAASDLR

SEQ ID NO: 62309 - protein, 676 aa, Homo sapiens
MGHHRPWLHASVLWAGVASLLLPPAMTQQLRGDGLGFRNRNNSTGVAGLSEEASAELRHHLHSPRDHPDENKDVSTENGHHFWSHPDREKEDEDVSKEYGHLLPGHRSQDHKVGDEGVSGEEVFAEHGGQARGHRGHGSEDTEDSAEHRHHLPSHRSHSHQDEDEDEVVSSEHHHHILRHGHRGHDGEDDEGEEEEEEEEEEEEASTEYGHQAHRHRGHGSEEDEDVSDGHHHHGPSHRHQGHEEDDDDDDDDDDDDDDDDVSIEYRHQAHRHQGHGIEEDEDVSDGHHHRDPSHRHRSHEEDDNDDDDVSTEYGHQAHRHQDHRKEEVEAVSGEHHHHVPDHRHQGHRDEEEDEDVSTERWHQGPQHVHHGLVDEEEEEEEITVQFGHYVASHQPRGHKSDEEDFQDEYKTEVPHHHHHRVPREEDEEVSAELGHQAPSHRQSHQDEETGHGQRGSIKEMSHHPPGHTVVKDRSHLRKDDSEEEKEKEEDPGSHEEDDESSEQGEKGTHHGSRDQEDEEDEEEGHGLSLNQEEEEEEDKEEEEEEEDEERREERAEVGAPLSPDHSEEEEEEEEGLEEDEPRFTIIPNPLDRREEAGGASSEEESGEDTGPQDAQEYGNYQPGSLCGYCSFCNHCQFCYLCPLVCETVCAPGSYVDYFSSSLYQALADMLETPEP

SEQ ID NO: 62310 - protein, 107 aa, Homo sapiens
MAPGVARGPTPYWRLRLGGAALLLLLIPVAAAQEPPGAACSQNTNKTCEECLKNVSCLWCNTNKACLDYPVTSVLPPASLCKLSSARWGVCWGLFKEENPYARFENN

SEQ ID NO: 62311 - protein, 42 aa, Homo sapiens
MDGSRRVRATSVLPRYGPPCLFKGHLSTKSNGVLEIREFWSL

SEQ ID NO: 62312 - protein, 45 aa, Homo sapiens
  MOD_RES (1)..(1): Any amino acid
XGNDGERGERQASTTHSFLQMCVEYLLWVKHCVRSEDVDMDKDAS

SEQ ID NO: 62313 - protein, 273 aa, Homo sapiens
MVMVKGVNKLALPPGSVISYPLENAVPFSLDSVANSIHSLFSEETPVVLQLAPSEERVYMVGKANSVFEDLSVTLRQLRNRLFQENSVLSSLPLNSLSRNNEVDLLFLSELQVLHDISSLLSRHKHLAKDHSPDLYSLELAGLDEIGKRYGEDSEQFRDASKILVDALQKFADDMYSLYGGNAVVELVTVKSFDTSLIRKTRTILEAKQANPASPYNLAYKYNFEYSVVFNMVLWIMIALALAVIITSYNIWNMDPGYDSIIYRMTNQKIRMD

SEQ ID NO: 62314 - protein, 101 aa, Homo sapiens
MAAATLRDPAQGYVTFEDVAVYFSQEEWRLLDDAQRLLYRNVMLENFTLLASLGLASSKTHEITQLESWEEPFMPAWEVVTSAILRVPNRQPQVAPEQGRE

SEQ ID NO: 62315 - protein, 56 aa, Homo sapiens
SSTGEYTVMTAHFHLKRKIGYFVIQTYLPCIMTVILSQVSFWLNRESVPARTVFGE

SEQ ID NO: 62316 - protein, 151 aa, Homo sapiens
MTLTLSVLICLGLSVGPRTCVQAGTLPKPTLWAEPASVIARGKPVTLWCQGPLETEEYRLDKEGLPWARKRQNPLEPGAKAKFHIPSTVYDSAGRYRCYYETPAGWSEPSDPLELVATGFYAEPTLLALPSPVVASGGNVTLQCDTLDGLL

SEQ ID NO: 62317 - protein, 44 aa, Homo sapiens
MGSSEPLPIADGDRRRKKKRRGRATDSLPGKFEDHRETSRAQSE

SEQ ID NO: 62318 - protein, 305 aa, Homo sapiens
YNTPSASYLEVTPDSENDFGNYNCTAVNRIGQESLEFILVQADTPSSPSIDQVEPYSSTAQVQFDEPEATGGVPILKYKAEWRAVGEEVWHSKWYDAKEASMEGIVTIVGLKPETTYAVRLAALNGKGLGEISAASEFKTQPVHSPPPPASASSSTPVPLSPPDTTWPLPALATTEPAREPSAPKLEGQMGEDGNSIKVNLIKQDDGGSPIRHYLVRYRALSSEWKPEIRLPSGSDHVMLKSLDWNAEYEVYVVAENQQGKSKAAHFVFRTSAQPTAIPATLGGNSASYTFVSLLFSAVTLLLLC

SEQ ID NO: 62319 - protein, 410 aa, Homo sapiens
MKWNGWGYNDSKFIFNKKGQIELTGKRYPLSGMGLPTFKEWIQNTLGVNVEHKTTSKASLNPSDTPPSVVNEDFLHDLKETNISYSQEADDRVFRAHGHCLHEIFLLREGMFERIPDIVLWPTCHDDVVKIVNLACKYNLCIIPIGGGTSVSYGLMCPADETRTIISLDTSQMNRILWVDENNLTAHVEAGITGQELERQLKESGYCTGHEPDSLEFSTVGGWVSTRASGMKKNIYGNIEDLVVHIKMVTPRGIIEKSCQGPRMSTGPDIHHFIMGSEGTLGVITEATIKIRPVPEYQKYGSVAFPNFEQGVACLREIAKQRCAPASIRLMDNKQFQFGHALKPQVSSIFTSFLDGLKKFYITKFKGFDPNQLSVATLLFEGDREKVLQHEKQVYDIAAKFGTWLWNTMY

SEQ ID NO: 62320 - protein, 208 aa, Homo sapiens
MAASQQQASAASSAAGVSGPSSAGGPGPQQQPQPPAQLVGPAQSGLLQQQQQDFDPVQRYKMLIPQLKESLQTLMKVAAQNLIQNTNIDNGQKSSDGPIQRFDKCLEEFYALCDQLELCLVRSLLDTGAWRMSACHRVVTVPSTLQRWCPQPPSPTQCSLTASPTHSTWRSSKPRFPVPRTFTPPCWTVPTRSRARHPHHLLALGALC

SEQ ID NO: 62321 - protein, 547 aa, Homo sapiens
MVFRNVGRPPEEEDVEAAPEPGPSELLCPRHRCALDPKALPPGLALERTWGPAAGLEAQLAALGLGQPAGPGVKTVGGGCCPCPCPPQPPPPQPQPPAAAPQAGEDPTETSDALLVLEGLESEAESLETNSCSEEELSSPGRGGGGGGRLLLQPPGPELPPVPFPLQDLVPLGRLSRGEQQQQQQQQPPPPPPPPGPLRPLAGPSRKGSFKIRLSRLFRTKSCNGGSGGGDGTGKRPSGELAASAASLTDMGGSAGRELDAGRKPKLTRTQSAFSPVSFSPLFTGETVSLVDVDISQRGLTSPHPPTPPPPPRRSLSLLDAFPRIAPIRAAESLHSQPPQHLQCPLYRPDSSSFAASLRELEKCGWYWGPMNWEDAEMKLKGKPDGSFLVRDSSDPRYILSLSFRSQGITHHTRMEHYRGTFSLWCHPKFEDRCQSVVEFIKRAIMHSKNGKFLYFLRSRVPGLPPTPVQLLYPVSRFSNVKSLQHLCRFRIRQLVRIDHIPDLPLPKPLISYIRKFYYYDPQEEVYLSLKEAQLISKQKQEVEPST

SEQ ID NO: 62322 - protein, 104 aa, Homo sapiens
MSRQSTLYSFFPKSPALSDANKASARASREGGRAAAAPGASPSPGGDAAWSEAGPGPRPLARSASPPKAKNLNGGLRRSVAPAAPTRFKIKGSPEGRSFLQCKA

SEQ ID NO: 62323 - protein, 87 aa, Homo sapiens
MADEEAEQERLSCGEGGCVAELQRLGERLQELELQLRESRVPAVEAATDYCQQLCQISEVDCKDALEMICNLESEGDEKSALVLCTA

SEQ ID NO: 62324 - protein, 205 aa, Homo sapiens
MTLKASEGESGGSMHTALSDLYLEHLLQKRSRPEMFMRAQFDYDPKKDNLIPCKEAGLKFATGDIIQIINKDDSNWWQGRVEGSSKESAGLIPSPELQEWRVASMAQSAPSEAPSCSPFGKKKKYKDKYLAKHSSIFDQLDVVSYEEVVRLPAFKRKTLVLIGASGVGRSHIKNALLSQNPEKFVYPVPYTTRPPRKSEEDGKEY

SEQ ID NO: 62325 - protein, 55 aa, Homo sapiens
MADEELEALRRQRLAELQAKHGDPGDAAQQEAKHSRNEKQYLSPSSGSVGPGQVK

SEQ ID NO: 62326 - protein, 191 aa, Homo sapiens
CIVVLWYGWLHFYAEPKYLIVVRPAPPPSQKKSCSGKTRSRKPLQLVVGTLTPSSVFLSWGFLINPHHDWTLPSHCPNDRFYTIRYREKDKEKKWIFQICPATETIVENLKPNTVYEFGVKDNVEGGIWSKIFNHKTVVGSKKVNGKIQSTYDQDHTVPAYVPRKLIPITIIKQVIQNVTHKDSAKSPEKA

SEQ ID NO: 62327 - protein, 221 aa, Homo sapiens
MAGPPRLLLLPLLLALARGLPGALAAQEVQQSPHCTTVPVGASVNITCSTSGGLRGIYLRQLGPQPQDIIYYEDGVVPTTDRRFRGRIDFSGSQDNLTITMHRLQLSDTGTYTCQAITEVNVYGSGTLVLVTEEQSQGWHRCSDAPPRASALPAPPTGSALPDPQTASALPDPPAASALPAALAVISFLLGLGLGVACVLARTQVSVSPSCHLHPKDCSLS

SEQ ID NO: 62328 - protein, 160 aa, Homo sapiens
MELSEKYKLDKESYPVFYLFRDGDFENPVPYTGAVKVGAIQRWLKGQGVYLGMPGCLPVYDALAGEFIRASGVEARQALLKQGQDNLSSVKETQKKWAEQYLKIMGKILDQGEDFPASEMTRIARLIEKNKMSDGKKEELQKSLNILTAFQKKGAEKEEL

SEQ ID NO: 62329 - protein, 167 aa, Homo sapiens
  MOD_RES (1)..(1): Any amino acid
XNNIDAAIENIENMLTSENKVIEPQYFGLAYLFRKVIEEQLEPAVEKISIMAERLANQFAIYKPVTDFFLQLVDAGKVDDARALLQRCGAIAEQTPILLLFLLRNSRKQGKRGCVFIRVIKKYKESEKHLSVHLWDCAKSLLPCPGDGTGNARQYVCLEHPTQDSLK

SEQ ID NO: 62330 - protein, 180 aa, Homo sapiens
MLTYGVYLGLLQMQLILHYDETYREVKYGNMGLPDIDSKMLMGINVTPIAALLYTPVLIRFFGTKWMMFLAVGIYALFVSTNYWERYYTLVPSAVALGMAIVPLWASMGNYITRMAQKYHEYSHYKEQDGQGMKQRPPRGSHAPYLLVFQAIFYSFFHLSFACAQLPMIYFLNHYLYDLN

SEQ ID NO: 62331 - protein, 69 aa, Homo sapiens
  MOD_RES (1)..(1): Any amino acid
XEIATYRKLLEGEENRITIPVQTFSNLQIRETSLDTKSVSEGHLKRNIVVKTVEMRDGEGTHPETSGII

SEQ ID NO: 62332 - protein, 95 aa, Homo sapiens
  MOD_RES (1)..(1): Any amino acid
XFQGCSGPRPCLQSTHPAFVLAWKQPGSPGPRRHPTTLAMSPPRPSDSRNLWAFTGPRGLLMPPSTCEPGHEASLKQGFQPDAIDPQNLTWKSRH

SEQ ID NO: 62333 - protein, 1253 aa, Homo sapiens
MMNVPGGGAAAVMMTGYNNGRCPRNSLYSDCIIEEKTVVLQKKDNEGFGFVLRGAKADTPIEEFTPTPAFPALQYLESVDEGGVAWQAGLRTGDFLIEVNNENVVKVGHRQVVNMIRQGGNHLVLKVVTVTRNLDPDDTARKKAPPPPKRAPTTALTLRSKSMTSELEELVDKDKPEEIVPASKPSRAAENMAVEPRVATIKQRPSSRCFPAGSDMNSVYERQGIAVMTPTVPGSPKAPFLGIPRGTMRRQKSIDSRIFLSGITEEERQFLAPPMLKFTRSLSMPDTSEDIPPPPQSVPPSPPPPSPTTYNCPKSPTPRVYGTIKPAFNQNSAAKVSPATRSDTVATMMREKGMYFRRELDRYSLDSEDLYSRNAGPQANFRNKRGQMPENPYSEVGKIASKAVYVPAKPARRKGMLVKQSNVEDSPEKTCSIPIPTIIVKEPSTSSSGKSSQGSSMEIDPQAPEPPSQLRPDESLTVSSPFAAAIAGAVRDREKRLEARRNSPAFLSTDLGDEDVGLGPPAPRTRPSMFPEEGDFADEDSAEQLSSPMPSATPREPENHFVGGAEASAPGEAGRPLNSTSKAQGPESSPAVPSASSGTAGPGNYVHPLTGRLLDPSSPLALALSARDRAMKESQQGPKGEAPKADLNKPLYIDTKMRPSLDAGFPTVTRQNTRGPLRRQETENKYETDLGRDRKGDDKKNMLIDIMDTSQQKSAGLLMVHTVDATKLDNALQEEDEKAEVEMKPDSSPSEVPEGVSETEGALQISAAPEPTTVPGRTIVAVGSMEEAVILPFRIPPPPLASVDLDEDFIFTEPLPPPLEFANSFDIPDDRAASVPALSDLVKQKKSDTPQSPSLNSSQPTNSADSKKPASLSNCLPASFLPPPESFDAVADSGIEEVDSRSSSDHHLETTSTISTVSSISTLSSEGGENVDTCTVYADGQAFMVDKPPVPPKPKMKPIIHKSNALYQDALVEEDVDSFVIPPPAPPPPPGSAQPGMAKVLQPRTSKLWGDVTEIKSPILSGPKANVISELNSILQQMNREKLAKPGEGLDSPMGAKSASLAPRSPEIMSTISGTRSTTVTFTVRPGTSQPITLQSRPPDYESRTSGTRRAPSPVVSPTEMNKETLPAPLSAATASPSPALSDVFSLPSQPPSGDLFGLNPAGRSRSPSPSILQQPISNKPFTTKPVHLWTKPDVADWLESLNLGEHKEAFMDNEIDGSHLPNLQKEDLIDLGVTRVGHRMNIERALKQLLDR

SEQ ID NO: 62334 - protein, 223 aa, Homo sapiens
IATGQVAGTTKEGKPLPPHVRIWDSVSLSTLHVLGLGVFDRAVCCVGFSKSCSNEAVLVATFHPTDPTVLITCGKSHIYFWTLEGGSLSKRQGLFEKHEKPKYVLCVTFLEGGDVVTGDSGGNLYVWGKGGNRITQAVLGAHDGGVFGLCALRDGTLVSGGGRDRRVVLWGSDYSKLQEVEVPEDFGPVRTVAEGHGDTLYVGTTRNSILQGSVHTGFSLLVQ

SEQ ID NO: 62335 - protein, 131 aa, Homo sapiens
MGFITGLGLAFNLQPALTIIGKYFYRKRPMANGLAMAGSPVFLSSLAPFNQYLFNTFGWKGSFLILGSLLLNACVAGSLMRPLGPNQTTSKSKNKTGKTEDDSSPKKIKTKKSTWEKVNKYLDFSLFKHRG

SEQ ID NO: 62336 - protein, 133 aa, Homo sapiens
MDAQCSAKVNARKRRKEAPGPNGATEEDGVPSKVQRCAVGLRQPAPFSDEIEVDFSKPYVRVTMEEASRGTPCERPVRVYADGIFDLFHSGHARALMQAKNLFPNTYLIVGVCSDELTHNFKGFTVMNENERY

SEQ ID NO: 62337 - protein, 84 aa, Homo sapiens
MELENIVANSLLLKARQVLCIPPQKHQLVQPFSGRPPQSSVQSSVSDLMSPLPASQESWRQSLGPQVPVLATVVLHTPSLLRNC

SEQ ID NO: 62338 - protein, 78 aa, Homo sapiens
MESIFHEKQEGSLCAQHCLNNLLQGEYFSPVELSSIAHQLDEEERMRMAEGGVTSEDYRTFLQPSGNMDDSGFFSIQK

SEQ ID NO: 62339 - protein, 410 aa, Homo sapiens
MGIKFLEVIKPFCAVLPEIQKPERKIQFREKVLWTAITLFIFLVCCQIPLFGIMSSDSADPFYWMRVILASNRGTLMELGISPIVTSGLIMQLLAGAKIIEVGDTPKDRALFNGAQKLFGMIITIGQAIVYVMTGMYGDPAEMGAGICLLIIIQLFVAGLIVLLLDELLQKGYGLGSGISLFIATNICETIVWKAFSPTTINTGRGTEFEGAVIALFHLLATRTDKVRALREAFYRQNLPNLMNLIATVFVFAVVIYFQDVSGGGPARSYPVGGLCYYLSPPESMGAIFEDPVHVVVYIIFMLGSCAFFSKTWIEVSGSSAKDVAKQLKEQQMVMRGHRDTSMVHELNRYIPTAAAFGGLCIGALSVLADFLGAIGSGTGILLAVTIIYQYFEIFVKEQAEVGGMGALFF

SEQ ID NO: 62340 - protein, 88 aa, Homo sapiens [sequence omitted]

SEQ ID NO: 62341 - protein, 96 aa, Homo sapiens
MNLPVPDPILLTNSHDGLDGPTYKKRRLDECEEAFQGTKVFVMPNGMLKSNQQLVDIIEKVKPEIRLLIEKCNTVKMWVQLLIPRIEDGNNFGVSI

SEQ ID NO: 62342 - protein, 103 aa, Homo sapiens
MPESKVGDTCVWDSKVENQQKKPVENRMKEDKSSIREAISKAKSTANIKTEQEGEASEKSLHLSPQHITHQTMPIGQRGSEQGKRVENINGTSYPSLQQKTNA

SEQ ID NO: 62343 - protein, 279 aa, Homo sapiens
MHCTAFATADEYHLGNLSQDLASHGYVEVTSLPRDAANILVMGVENSAKEGDPGTIFFFREGAAVFWNVKDKTMKHVMKVLEKHEIQPYEIALVHWENEELNYIKIEGQSKLHRGEIKLNSELDLDDAILEKFAFSNALCLSVKLAIWEASLDKFIESIQSIPEALKAGKKVKLSHEEVMQKIGELFALRHRINLSSDFLITPDFYWDRENLEGLYDKTCQFLSIGRRVKVMNEKLQHCMELTDLMRNHLNEKRALRLEWMIVILITIEVMFELGRVFF

SEQ ID NO: 62344 - protein, 77 aa, Homo sapiens
  MOD_RES (1)..(1): Any amino acid
XKEPKEQLQKAIRDRDEAIAKKNAVELELAKCRMDMMSLNSQLLDAIQQKLNLSQQLEAWQFASSGLFTIWLLWFLI

SEQ ID NO: 62345 - protein, 130 aa, Homo sapiens
MRTEDLPKAVVFLEPQWYSVLEKDSVTLKCQGAYSPEDNSTQWFHNENLISSQASSYFIDAATVNDSGEYRCQTNLSTLSDPVQLEVHIGLAVSTISSFSPPGYQVSFCLVMVLLFAVDTGLYFSVKTNI

SEQ ID NO: 62346 - protein, 862 aa, Homo sapiens
MAAQVTLEDALSNVDLLEELPLPDQQPCIEPPPSSLLYQPNFNTNFEDRNAFVTGIARYIEQATVHSSMNEMLEEGQEYAVMLYTWRSCSRAIPQVKCNEQPNRVEIYEKTVEVLEPEVTKLMNFMYFQRNAIERFCGEVRRLCHAERRKDFVSEAYLITLGKFINMFAVLDELKNMKCSVKNDHSAYKRAAQFLRKMADPQSIQESQNLSMFLANHNKITQSLQQQLEVISGYEELLADIVNLCVDYYENRMYLTPSEKHMLLKVMGFGLYLMDGSVSNIYKLDAKKRINLSKIDKYFKQLQVVPLFGDMQIELARYIKTSAHYEENKSRWTCTSSGSSPQYNICEQMIQIREDHMRFISELARYSNSEVVTGSGRQEAQKTDAEYRKLFDLALQGLQLLSQWSAHVMEVYSWKLVHPTDKYSNKDCPDSAEEYERATRYNYTSEEKFALVEVIAMIKGLQVLMGRMESVFNHAIRHTVYAALQDFSQVTLREPLRQAIKKKKNVIQSVLQAIRKTVCDWETGHEPFNDPALRGEKDPKSGFDIKVPRRAVGPSSTQLYMVRTMLESLIADKSGSKKTLRSSLEGPTILDIEKFHRESFFYTHLINFSETLQQCCDLSQLWFREFFLELTMGRRIQFPIEMSMPWILTDHILETKEASMMEYVLYSLDLYNDSAHYALTRFNKQFLYDEIEAEVNLCFDQFVYKLADQIFAYYKVMAGSLLLDKRLRSECKNQGATIHLPPSNRYETLLKQRHVQLLGRSIDLNRLITQRVSAAMYKSLELAIGRFESEDLTSIVELDGLLEINRMTHKLLSRYLTLDSFDAMFREANHNVSAPYGRITLHVFWELNYDFLPNYCYNGSTN

SEQ ID NO: 62347 - protein, 156 aa, Homo sapiens
MAQSINITELNLPQLEMLKNQLDQEVEFLSTSIAQLKVVQTKYVEAKDCLNVLNKSNEDGISLCRPGWSAMMYVPGKLHDVEHVLIDVGTGYYVEKTAEDAKDFFKRKIDFLTKQMEKIQPALQEKHAMKQAVMEMMSQKIQQLTALGAAQATAKA

SEQ ID NO: 62348 - protein, 189 aa, Homo sapiens
METQLSNGPTCNNTANGPTTINNNCSSPVDSGNTEDSKTNLIVNYLPQNMTQEELKSLFGSIGEIESCKLVRDKITGQSLGYGFVNYIDPKDAEKAINTLNGLRLQTKTIKVSYARPSSASIRDANLYVSGLPKTMTQKELEQLFSQYGRIITSRILVDQVTGISRGVGFIRFDKRIEAEEAIKGLNGQ

SEQ ID NO: 62349 - protein, 167 aa, Homo sapiens
MRELRIRKLCLNICVGESGDRLTRAAKVLEQLTGQTPVFSKARYTVRSFGIRRNEKIAVHCTVRGAKAEEILEKGLKVREYELRKNNFSDTGNFGFGIQEHIDLGIKYDPSIGIYGLDFYVVLGRPGFSIADKKRRTGCIGAKHRISKEEAMRWFQQKYDGIILPGK

SEQ ID NO: 62350 - protein, 104 aa, Homo sapiens
MAELQMLLEEEIPGGRRALFDSYTNLERVADYCENNYIQSADKQRALEETKAYTTQSLASVAYLINTLANNVLQMLDIQASQLRRMESSINHISQAILQFNPVW

SEQ ID NO: 62351 - protein, 92 aa, Homo sapiens
MIAAQLLAYYFTELKDDQVKKVSPRPRRRWSWPQPCVPASARRLRCLHPPAPGLLRASIELDCRAQGKPSPSILPALLTSISMPCGSPMKLS

SEQ ID NO: 62352 - protein, 41 aa, Homo sapiens
MPTTQQSPQDEQEKLLDEAIQAVKVQSFQMKRCLELLAFLS

SEQ ID NO: 62353 - protein, 198 aa, Homo sapiens
MAGGRCGPQLTALLAAWIAAVAATAGPEEAALPPEQSRVQPMTASNWTLVMEGEWMLKFYAPWCPSCQQTDSEWEAFAKNGEILQISVGKVDVIQEPGIFEDLQNYILEKKWQSVEPLTGWKSPASLTMSGMAGLFSISGKIWHLHNYFTVTLGIPAWCSYVFFVIATLVFGLFMGLVLVVISECFYVPLPRHLSERS

SEQ ID NO: 62354 - protein, 64 aa, Homo sapiens
MGGFFSSIFSSLFGTREMRILILGLDGAGKTTILYRLQVGEVVTTIPKLLAFKKYPEDGIDLAN

SEQ ID NO: 62355 - protein, 558 aa, Homo sapiens
MAQSVLVPPGPDSFRFFTRESLAAIEQRIAEEKAKRPKQERKDEDDENGPKPNSDLEAGKSLPFIYGDIPPEMVSVPLEDLDPYYINKKTFIVLNKGKAISRFSATPALYILTPFNPIRKLAIKILVHSLFNMLIMCTILTNCVFMTMSNPPDWTKNVEYVTEFVDLGNVSALRTFRVLRALKTISVIPGLKTIVGALIQSVKKLSDVMILTVFCLSVFALIGLQLFMGNLRNKCLQWPPDNSSFEINITSFFNNSLDGNGTTFNRTVSIFNWDEYIEDKSHFYFLEGQNDALLCGNSSDAGQCPEGYICVKAGRNPNYGYTSFDTFSWAFLSLFRLMTQDFWENLYQLTLRAAGKTYMIFFVLVIFLGSFYLINLILAVVAMAYEEQNQATLEEAEQKEAEFQQMLEQLKKQQEEAQAAAAAASAESRDFSGAGGIGVFSESSSVASKLSSKSEKELKNRRKKKKQKEQSGEEEKNDRVRKSESEDSIRRKGFRFSLEGSRLTYEKRFSSPHQVTLMQEVGSLGLQQLHPCHFAGYSFPPDYFHGLALNVCGFSSPY

SEQ ID NO: 62356 - protein, 207 aa, Homo sapiens
VMSAIKEWLSPLPDRSLPALKIREELLKILQELPSVSQETLKHSGIGRAVMYLYKHPKESRSNKDMAGKLINEWSRPIFGLTSNYKGMTREEREQRDLEQMPQRRRMNSTGGQTPRRDLEKVLTGEEKALRPGDPGFCARARVPMPSNKDYVVRPKWNVEMESSRPGILKKGLSRLEKHKRRFAEQKRLSKVHRAVKFSIEGNRMPL

SEQ ID NO: 62357 - protein, 1165 aa, Homo sapiens
MNPRQGYSLSGYYTHPFQGYEHRQLRYQQPGPGSSPSSFLLKQIEFLKGQLPEAPVIGKQTPSLPPSLPGLRPRFPVLLASSTRGRQVDIRGVPRGVHLRSQGLQRGFQHPSPRGRSLPQRGVDCLSSHFQELSIYQDQEQRILKFLEELGEGKATTAHDLSGKLGTPKKEINRVLYSLAKKGKLQKEAGTPPLWKIAVSTQAWNQHSGVVRPDGHSQGAPNSDPSLEPEDRNSTSVSEDLLEPFIAVSAQAWNQHSGVVRPDSHSQGSPNSDPGLEPEDSNSTSALEDPLEFLDMAEIKEKICDYLFNVSDSSALNLAKNIGLTKARDINAVLIDMERQGDVYRQGTTPPIWHLTDKKRERMQIKRNTNSVPETAPAAIPETKRNAEFLTCNIPTSNASNNMVTTEKVENGQEPVIKLENRQEARPEPARLKPPVHYNGPSKAGYVDFENGQWATDDIPDDLNSIRAAPGEFRAIMEMPSFYSHGLPRCSPYKKLTECQLKNPISGLLEYAQFASQTCEFNMIEQSGPPHEPRFKFQVVINGREFPPAEAGSKKVAKQDAAMKAMTILLEEAKAKDSGKSEESSHYSTEKESEKTAESQTPTPSATSFFSGKSPVTTLLECMHKLGNSCEFRLLSKEGPAHEPKFQYCVAVGAQTFPSVSAPSKKVAKQMAAEEAMKALHGEATNSMASDNQPEGMISESLDNLESMMPNKVRKIGELVRYLNTNPVGGLLEYARSHGFAAEFKLVDQSGPPHEPKFVYQAKVGGRWFPAVCAHSKKQGKQEAADAALRVLIGENEKAERMGFTEVTPVTGASLRRTMLLLSRSPEAQPKTLPLTGSTFHDQIAMLSHRCFNTLTNSFQPSLLGRKILAAIIMKKDSEDMGVVVSLGTGNRCVKGDSLSLKGETVNDCHAEIISRRGFIRFLYSELMKYNSQTAKDSIFEPAKGGEKLQIKKTVSFHLYISTAPCGDGALFDKSCSDRAMESTESRHYPVFENPKQGKLRTKVENGYLFSQGHLTRAICCRVTRDGSAFEDGLRHPFIVNHPKVGRVSIYDSKRQSGKTKETSVNWCLADGYDLEILDGTRGTVDGPRNELSRVSKKNIFLLFKKLCSFRYRRDLLRLSYGEAKKAARDYETAKNYFKKGLKDMGYGNWISKPQEEKNFYLCPV

SEQ ID NO: 62358 - protein, 200 aa, Homo sapiens
MCQKEEFPCSRNGVCYPRSDRCNYQNHCPNGSDEKNCFFCQPGNFHCKNNRCVFESWVCDSQDDCGDGSDEENCPVIVPTRVITAAVIGSLICGLLLVIALGCTCKLYSLRMFERRSFETQLSRVEAELLRREAPPSYGQLIAQGLIPPVEDFPVCSPNQASVLENLRLAVRSQLGFTSVRLPMAGRSSNIWNRIFNFAR

SEQ ID NO: 62359 - protein, 131 aa, Homo sapiens
  MOD_RES (1)..(1): Any amino acid
XELSGGARINRIFHERFPFELVKMEFDEKELRREISYAIKNIHGIRTGLFTPDLAFEATVKKQVQKLKEPSIKCVDMVVSELTATIRKCSEKLAEHPGNVQRQPEWKKMLKGDRTSQRGGGCPAMGDTWKT

SEQ ID NO: 62360 - protein, 32 aa, Homo sapiens
MTTSSIRRQMKNIVNNYSEAEIKVREATSNDP

SEQ ID NO: 62361 - protein, 130 aa, Homo sapiens
MDFLRNLFSQTLSLGSQKERLLDELTLEGVARYMQSERCRRVICLVGAGISTSAGIPDFRSPSTGLYDNLEKYHLPYPEAIFEISYFKKHPEPFFALAKELYPGQFKPTICHYFMRLLKDKGLLLRCYTQ

SEQ ID NO: 62362 - protein, 254 aa, Homo sapiens
MGFWCRMSENQEQEEVITVRVQDPRVQNEGSWNSYVDYKIFLHTNSKAFTAKTSCVRRRYREFVWLRKQLQRNAGLVPVPELPGKSTFFGTSDEFIEKRRQGLQHFLEKVLQSVVLLSDSQLHLFLQSQLSVPEIEACVQGRSTMTVSDAILRYAMSNCGWAQEERQSSSHLAKGDQPKSCCFLPRSGRRSSPSPPPSEEKDHLEVWAPVVDSEVPSLESPTLPPLSSPLCCDFGRPKEGTSTLQSVRRAVGGD

SEQ ID NO: 62363 - protein, 614 aa, Homo sapiens
METSRPEEERVGPRRTPGLSHEEIWAVVSSSSRPLPVHCPALTSRTWQASLFHHEQASREDKTFRGARCMEPSPERPACSQQEPTLGMDAMASEHRDVLVLLPSREQLRLAVGVKATGRELFQQVCNVASIRDAQFFGLCVVRNNEYIFMDLEQKLSKYFSKDWKKERNEGNEKPRAPFVAFLRVQHYVENGRVISDHRARHLYYCHLKERVLRSQCAHREEAYFLLAACALQADLGEHRESAHAGRYFEPHSYFPQWIITKRGIDYILRHMPTLHRERQGLSPKEAMLCFIQEACRLEDVPVHFFRLHKDKKEGRPTVILGLALRGVHIYQEVDRAPQLLYDLPWPHVGKLAFLGKKLEIQLDGLPAAQKLVYYTGCTWRSRHLLHLLRASHQLHLRVRPTLQQLRQREEAEEKQHYRESYISDELELDLASRSFPGSGVSSQHCPHCLSRHSADSHGSSYTSGIKANSWLRESREMSVDVPLEVHGLHEKEPSSSPRTSRSHPSTRGDSQATRQEPCTQVRTRGQSAEAVHQIQEMTAGVSEEQHSHGLDDMQLHQLALHPAPTSLSHTFHRALDCRLAGPCETRATLPSKRSSNCLALDLFGEAPPQEFVV

SEQ ID NO: 62364 - protein, 155 aa, Homo sapiens
MASGSNWLSGVNVVLVMAYGSLDLKEEIDIRLSRVQDIKYEPQLLADDDARLLQLETQGNQSCYNYLYRMKALDAIRTSEIPFHSEGRHPRSLMGKNFRSYLLDLRNTSTPFKGVRKALIDTLLDGYETARYGTGVFGQNEYLRYQEALSELATA

SEQ ID NO: 62365 - protein, 110 aa, Homo sapiens
MSGRPRTTSFAESCKPVQQPSAFGSMKVSMTSSTEVLNSSESSRIGDKDGSKVTTVVATPGQGPDRPQEVSYTDTKVIGNGSFGVVYQAKLCDSGELVAIKKVLQDKRFK

SEQ ID NO: 62366 - protein, 150 aa, Homo sapiens
MPNSEPASLLELFNSIATQGELVRSLKAGNASKDEIDSAVKMLVSLKMSYKAAAGEDYKADCPPGNPAPTSNHGPDATEAEEDFVDPWTVQTSSAKGIDYDKLIVRFGSSKIDKELINRIERATGQRPHHFLRRGIFFSHRDMNQVLDAY

SEQ ID NO: 62367 - protein, 386 aa, Homo sapiens
MEEERGSALAAESALEKNVAELTVMDVYDIASLVGHEFERVIDQHGCEAIARLMPKVVRVLEILEVLVSRHHVAPELDELRLELDRLRLERMDRIEKERKHQKELELVEDVWRGEAQDLLSQIAQLQEENKQLMTNLSHKDVNFSEEEFQKHEGMSERERQVMKKLKEVVDKQRDEIRAKDRELGLKNEDVEALQQQQTRLMKINHDLRHRVTVVEAQGKALIEQKVELEADLQTKEQEMGSLRAELGKLRERLQGEHSQNGEEEPETEPVGEESISDAEKVAMDLKDPNRPRFTLQELRDVLHERNELKSKVFLLQEELAYYKSEEMEEENRIPQPPPIAHPRTSPQPESGIKRLIFTAIMPMVAAGLIIDDPTLQPVRRLVSLV

SEQ ID NO: 62368 - protein, 53 aa, Homo sapiens
MDKEENRRSVLLPTHRRRGSFSSENYWRKSYESSEDCSEAAGSPARKVKMRRH

SEQ ID NO: 62369 - protein, 382 aa, Homo sapiens
MTPTLAALLCLGLSLGPRTHVQAGPFPKPTLWAEPGSVISWGSPVTIWCQGSLEAQEYRLDKEGSPEPWDRNNPLEPKNKARFSIPSITEHHAGRYRCHYYSSAGWSEPSDPLELVMTGAYSKPTLSALPSPVVASGGNMTLQCGSQKGYHHFVLMKEGEHQLPRTLDSQQLHSGGFQALFPVGPVNPSHRWRFTCYYYYMNTPRVWSHPSDPLEILPSGQIYDTVSLSAQPGPTVASGENVTLLCQSWWQFDTFLLTKEGAAHPPLRLRSMYGAHKYQAEFPMSPVTSAHAGTYRCYGSYSSNPHLLSFPSEPLELMVSGHSGGSSLPPTGPPSTPASHAKDYTVENLIRMGMAGLVLLFLGILLFEAQHSQRNPQDAAGR

SEQ ID NO: 62370 - protein, 168 aa, Homo sapiens
MKELSMLSLICSCFYPEPRNINIYTYDDMEVKQINKRASGQAFELILKPPSPISEAPRTLASPKKKDLSLEEIQKKLEAAEERRKSQEAQVLKQLAEKREHEREVLQKALEENNNFSKMAEEKLILKMEQIKENREANLAAIIERLQEKERHAAEVRRNKELQVELSG

SEQ ID NO: 62371 - protein, 179 aa, Homo sapiens
MSGTKPDILWAPHHVDRFVVCDSELSLYHVESTVNSELKAGSLRLSEDSAATLLSINSDTPYMKCVAWYLNYDPECLLAVGQANGRVVLTSLGQDHNSKFKDLIGKEFVPKHARQCNTLAWNPLDSNWLAAGLDKHRADFSVLIWDICSKYTPDIVPMEKVKLSAGETETTLLVTKPLY

SEQ ID NO: 62372 - protein, 172 aa, Homo sapiens
MENWGLVTYSSFIAIYPAWRTFPNFISSSQVFTCLSPQHKHWVALVVGHELAHQWFGNLVTMEWWTHLWLNEGFASWIEYLCVDHCFPEYDIWTQFVSADYTRAQELDALDNSHPIEVSVGHPSEVDEIFDAISYSKGASVIRMLHDYIGDKDFKKGMNMYLTKFQQKNAAT

SEQ ID NO: 62373 - protein, 150 aa, Homo sapiens
MTTFKEAVTFKDVAVVFTEEELGLLDPAQRKLYRDVMLENFRNLLSVGHQPFHQDTCHFLREEKFWMMGTATQREGNSGGKIQTELESVPEAGAHEEWSCQQIWEQIAKDLTRSQDSIINNSQFFENGDVPSQVEAGLPTIHTGQKPSQG

SEQ ID NO: 62374 - protein, 95 aa, Homo sapiens
MYPESTTGSPARLSLRQTGSPGMIYRNLGKSGLRVSCLGLGTWVTFGGQITDEMAEQLMTLAYDNGINLFDTAEVYAAGKAEVVLGNIIKKKGWR

SEQ ID NO: 62375 - protein, 111 aa, Homo sapiens
  MOD_RES (1)..(1): Any amino acid
XITDTFKVKRKVDRFNGVSEAELLTKTLPDILTFNLDIVIIGINPGLMAAYKGHHYPGPGNHFWKCLFMSGLSEVQLNHMDDHTLPGKYGIGFTNMVERTTPGSKDLSRYL

SEQ ID NO: 62376 - protein, 92 aa, Homo sapiens
MEVEAAEARSPAPGYKRSGRRYKCLSCTKTFPNAPRAARHAATHGPADCSEEVAEVKPKPETEAKAEEASGEKVSGSAAKPRPYACPLCPKA

SEQ ID NO: 62377 - protein, 110 aa, Homo sapiens
SPEAASTPRDPIDVDLDVSNTTTAQKRKCSQTQCPRKVIKMESEEGKEARLARSSPEQPRPSTSKAVSPPHLDGPPSPRSPVIGSEVFLPNSNHVASGAGEAGRERNALW

SEQ ID NO: 62378 - protein, 93 aa, Homo sapiens
MLYYLWMLHSVTLFLNLLACLAWFSGNSSKGVDFGLSILWFLIFTPCAFLCWYRPIYKAFRSDNSFSFFVFFFVFFCQIGIYIIQLVGIPGLG

SEQ ID NO: 62379 - protein, 130 aa, Homo sapiens
MDLSTFDFRTGKMLMSKMNKSRQRVRYDSSNQVKGKPDLNTALPVRQTASIFKQPVTKITNHPSNKVKSDPQKAVDQPRQLFWEKKLSGLNAFDIAEELVKTMDLPKGLQGVGPGCTDETLLSAIASALH

SEQ ID NO: 62380 - protein, 65 aa, Homo sapiens
MDGEEKTYGGCEGPDAMYVKLISSDGHEFIVKREHALTSGTIKAMLSGPDMVSTMLPRLKCSGCS

SEQ ID NO: 62381 - protein, 120 aa, Homo sapiens
  MOD_RES (1)..(1): Any amino acid
XIKRYCPYQNIKPQHYPSIHITAYENDERVPLKGIVSYTEKLKEAIAEHAKDTGEGYQTPNIILDIQPGGNHVIEDSHKKVCYQGPLSGQIPELDTCCFHIFSGCSRFMTKPLHKCPIYG

SEQ ID NO: 62382 - protein, 47 aa, Homo sapiens
  MOD_RES (1)..(1): Any amino acid
XINRTYFPFSCSCLNQLLAVVSKWWSFGALMKSRILKQPSAWEPLAS

SEQ ID NO: 62383 - protein, 130 aa, Homo sapiens
LRIDSHREDAAELDDDSEDVSAWPWAHRRLAFVCLGAAASACIKCWSPTSPSGAGAARPGPSTSSPHRTGSASPARRSSHTRCLITWSSSSSSSTASPSPWRGLTLIPAAPSGSSSASPITSSRPSSWRR

SEQ ID NO: 62384 - protein, 724 aa, Homo sapiens
MEAPLRPAADILRRNPQQDYELVQRVGSGTYGDVYKARNVHTGELAAVKIIKLEPGDDFSLIQQEIFMVKECKHCNIVAYFGSYLSREKLWICMEYCGGGSLQDIYHVTGPLSELQIAYVCRETLQGLAYLHTKGKMHRDIKGANILLTDHGDVKLADFGVAAKITATIAKRKSFIGTPYWMAPEVAAVEKNGGYNQLCDIWAVGITAIELGELQPPMFDLHPMRALFLMSKSNFQPPKLKDKTKWSSTFHNFVKIALTKNPKKRPTAERLLTHTFVAQPGLSRALAVELLDKVNNPDNHAHYTEADDDDFEPHAIIRHTIRSTNRNARAERTASEINFDKLQFEPPLRKETEARDEMGLSSDPNFMLQWNPFVDGANTGKSTSKRAIPPPLPPKPRISSYPEDNFPDEEKASTIKHCPDSESRAPQILRRQSSPSCGPVAETSSIGNGDGISKLMSENTEGSAQAPQLPRKKDKRDFPKPAINGLPPTPKVLMGACFSKVFDGCPLKINCATSWIHPDTKDQYIIFGTEDGIYTLNLNELHEATMEQLFPRKCTWLYVINNTLMSLSEGKTFQLYSHNLIALFEHAKKPGLAAHIQTHRFPDRILPRKFALTTKIPDTKGCHKCCIVRNPYTGHKYLCGALQSGIVLLQWYEPMQKFMLIKHFDFPLPSPLNVFEMLVIPEQEYPMVCVAISKGTESNQVVQFETINLNSASSWFTEIGAASS

SEQ ID NO: 62385 - protein, 182 aa, Homo sapiens
MAVLSAPGLRGFRILGLRSSVGPAVQARGVHQSVATDGPSSTQPALPKARAVAPKPSSRGEYVVAKLDDLVNWARRSSLWPMTFGLACCAVEMMHMAAPRYDMDRFGVVFRASPRQSDVMIVAGTLTNKMAPALRKVYDQMPEPRYVVSMGSCANGGGYYHYSYSVVRGCDRIVPVDIYIPD

SEQ ID NO: 62386 - protein, 52 aa, Homo sapiens
MNAAVVRRTQEALGKVIRRPPLTEKLLSKPPFRYLHDIITEVGAGDRARPGD

SEQ ID NO: 62387 - protein, 136 aa, Homo sapiens
MAAEEMHWPVPMKAIGAQNLLTMPGGVAKAGYLHKKGGTQLQLLKWPLRFVIIHKRCVYYFKSSTSASPQGAFSLSGYNRVMRAAEETTSNNVFPFKIIHISKKHRTWFFSASSEEERKSWMALLRREIGHFHEKK

SEQ ID NO: 62388 - protein, 147 aa, Homo sapiens
GALSIVNLPSNLEKETTHRYCANAFKLHRLPIPRPGEVLGLVGTNGIGKSTALKILAGKQKPNLGKYDDPPDWQEILTYFRGSELQNYFTKILEDDLKAIIKPQYVDQIPKAAKGTVGSILDRKDETKTQAIVCQQLVSCLMSLLVT

SEQ ID NO: 62389 - protein, 264 aa, Homo sapiens
MGTPKPRILPWLVSQLDLGQLEGVAWVNKSRTRFRIPWKHGLRQDAQQEDFGIFQAWAEATGAYVPGRDKPDLPTWKRNFRSALNRKEGLRLAEDRSKDPHDPHKIYEFVNSGVGDFSQPDTSPDTNGGGSTSDTQEDILDELLGNMVLAPLPDPGPPSLAVAPEPCPQPLRSPSLDNPTPFPNLGPSENPLKRLLVPGEDLITFTEGSGRSPRYALWFCVGESWPQDQPWTKRLVMVKVVPTCLRALVEMARVGGASSLENTV

SEQ ID NO: 62390 - protein, 410 aa, Homo sapiens
MDDLMLSPDDIEQWFTEDPGPDEAPRMPEAAPPVAPAPAAPTPAAPAPAPSWPLSSSVPSQKTYQGSYGFRLGFLHSGTAKSVTCTYSPALNKMFCQLAKTCPVQLWVDSTPPPGTRVRAMAIYKQSQHMTEVVRRCPHHERCSDSDGLAPPQHLIRVEGNLRVEYLDDRNTFRHSVVVPYEPPEVGSDCTTIHYNYMCNSSCMGGMNRRPILTIITLEDSSGNLLGRNSFEVRVCACPGRDRRTEEENLRKKGEPHHELPPGSTKRALPNNTSSSPQPKKKPLDGEYFTLQIRGRERFEMFRELNEALELKDAQAGKEPGGSRAHSRECQTLSPGDPDPPLSETFNLNICPYPAGKLELLKLSPCPCLCRQVTLMSFLFFFLIFFYFRLYWGIIDPPKLHTFKVCSVMI

SEQ ID NO: 62391 - protein, 1454 aa, Homo sapiens
GKQLKRCHSSQPGMLLDSWSRMVKSLNVSSSVNQASRLIDGSEPCWQSSGSQGKHWIRLEIFPDVLVHRLKMIVDPADSSYMPSLVVVSGGNSLNNLIELKTININPSDTTVPLLNDCTEYHRYIEIAIKQCRSSGIDCKIHGLILLGRIRAEEEDLAAVPFLASDNEEEEDEKGNSGSLIRKKAAGLESAATIRTKVFVWGLNDKDQLGGLKGSKIKVPSFSETLSALNVVQVAGGSKSLFAVTVEGKVYACGEATNGRLGLGISSGTVPIPRQITALSSYVVKKVAVHSGGRHATALTVDGKVFSWGEGDDGKLGHFSRMNCDKPRLIEALKTKRIRDIACGSSHSAALTSSGELYTWGLGEYGRLGHGDNTTQLKPKMVKVLLGHRVIQVACGSRDAQTLALTDEGLVFSWGDGDFGKLGRGGSEGCNIPQNIERLNGQGVCQIECGAQFSLALTKSGVVWTWGKGDYFRLGHGSDVHVRKPQVVEGLRGKKIVHVAVGALHCLAVTDSGQVYAWGDNDHGQQGNGTTTVNRKPTLVQGLEGQKITRVACGSSHSVAWTTVDVATPSVHEPVLFQTARDPLGASYLGVPSDADSSAASNKISGASNSKPNRPSLAKILLSLDGNLAKQQALSHILTALQIMYARDAVVGALMPAAMIAPVECPSFSSAAPSDASAMASPMNGEECMLAVDIEDRLSPNPWQEKREIVSSEDAVTPSAVTPSAPSASARPFIPVTDDLGAASIIAETMTKTKEDVESQNKAAGPEPQALDEFTSLLIADDTRVVVDLLKLSVCSRAGDRGRDVLSAVLSGMGTAYPQVADMLLELCVTELEDVATDSQSGRLSSQPVVVESSHPYTDDTSTSGTVKIPGAEGLRVEFDRQCSTERRHDPLTVMDGVNRIVSVRSGREWSDWSSELRIPGDELKWKFISDGSVNGWGWRFTVYPIMPAAGPKELLSDRCVLSCPSMDLVTCLLDFRLNLASNRSIVPRLAASLAACAQLSALAASHRMWALQRLRKLLTTEFGQSININRLLGENDGETRALSFTGSALAALVKGLPEALQRQFEYEDPIVRGGKQLLHSPFFKVLVALACDLELDTLPCCAETHKWAWFRRYCMASRVAVALDKRTPLPRLFLDEVAKKIRELMADSENMDVLHESHDIFKREQDEQLVQWMNRRPDDWTLSAGGSGTIYGWGHNHRGQLGGIEGAKVKVPTPCEALATLRPVQLIGGEQTLFAVTADGKLYATGYGAGGRLGIGGTESVSTPTLLESIQHVFIKKVAVNSGGKHCLALSSEGEVYSWGEAEDGKLGHGNRSPCDRPRVIESLRGIEVVDVAAGGAHSACVTAAGDLYTWGKGRYGRLGHSDSEDQLKPKLVEALQGHRVVDIACGSGDAQTLCLTDDDTVWSWGDGDYGKLGRGGSDGCKVPMKVRFIHGATMMRDNWETEPPMPSRGLGW

SEQ ID NO: 62392 - protein, 407 aa, Homo sapiens
MADEDGEGIHPSAPHRNGGGGGGGGSGLHCAGNGGGGGGGPRVVRIVKSESGYGFNVRGQVYNVYMAGRQLCSKRYREFAILHQNLKREFANFTFPRLPGKWPFSLSEQQLDARRRGLEEYLEKVCSIRVIGESDIMQEFLSESDENYNGVSDVELRVALPDGTTVTVRVKKNSTTDQVYQAIAAKVGMDSTTVNYFALFEVISHSFVRKLAPNEFPHKLYIQNYTSAVPGTCLTIRKWLFTTEEEILLNDNDLAVTYFFHQAVDDVKKGYIKAEEKSYQLQKLYEQRKMVMYLNMLRTCEGYNEIIFPHCACDSRRKGHVITAISITHFKLHACTEEGQLENQVIAFEWDEMQRWDTDEEGMAFCFEYARGEKKPRWVKIFTPYFNYMHECFERVFCELKWRKEEY

SEQ ID NO: 62393 - protein, 198 aa, Homo sapiens
AASTMSVCSSSCSDSWQVDDCPESCCEPPCCAPSCCAPAPCLSLVCTPVSRVSSPCCPVTCEPSPCQSGCTSSCTPSCCQQSSCQPACCTSSPCQQACCVPVCCKPVCCKPVCCCVPVCCKPVSCVPVCSGASSSCCQQSSCQPACCTTSCCRPSSSVSLLCRPVCRPACCVPVPSCCAPTSSCQPSCCRPASCVSLL

SEQ ID NO: 62394 - protein, 238 aa, Homo sapiens
MSIVIPLGVDTAETSYLEMAAGSEPESVEASPVVVEKSNSYPHQLYTSSSHHSHSYIGLPYADHNYGARPPPTPPASPPPSVLISKNEVGIFTTPNFDETSSATTISTSEDGSYGTDVTRCICGFTHDDGYMICCDKCSVWQHIDCMGIDRQHIPDTYLCERCQPRQDLTLSNRLRVTTAHCSLSLLGSGIWIKRGQCYYNAGKGKICQMVIPVQLRVVMRFLWNYILHFSILQHQLL

SEQ ID NO: 62395 - protein, 290 aa, Homo sapiens
MSGLNWKPFVYGGLASIVAEFGTFPVDLTKTRLQVQGQSIDARFKEIKYRGMFHALFRICKEEGVLALYSGIAPALLRQASYGTIKIGIYQSLKRLFVERLEDETLLINMICGVVSGVISSTIANPTDVLKIRMQAQGSLFQGSMIGSFIDIYQQEGTRGLWRGVVPTAQRAAIVVGVELPVYDITKKHLILSGMMGDTILTHFVSSFTCGLAGALASNPVDVVRTRMMNQRAIVGHVDLYKGTVDGILKMWKHEGFFALYKGFWPNWLRLGPWNIIFFITYEQLKRLQI

SEQ ID NO: 62396 - protein, 229 aa, Homo sapiens [sequence omitted]

SEQ ID NO: 62397 - protein, 113 aa, Homo sapiens
MENLKSGVYPLKEASGCPGADRNLLVYSFYEKGPLTFRDVAIEFSLEEWQCLDTAQQDLYRKVMLENYRNLVFLAGIAVSKPDLITCLEQGKEPWNMKRHAMVDQPPGWSAMA

SEQ ID NO: 62398 - protein, 63 aa, Homo sapiens
EIARIKAQDEAFALQDVPLSSVVRSIIGSARSLGIRVVKERCSANVLRNGKISMKDPSGRSSV

SEQ ID NO: 62399 - protein, 536 aa, Homo sapiens
MRKLLTNLPAAAVLSAQVYSAVLQGLWEENVCGTPGRTRVCTALLYGQVCPFQDSTDGLRTITSILFNWPPENTSVYYQPPQRSSFRIKLAFRNLSWPGLGLEDHQEIVLGQLVLPEPNEAKPDDPAPRPGQHALTMPALEPAPPLLADLGPALEPESPAALGPPGYLHSAPGPAPAPGEGPPPGTVLEPQSAPESSCPCRGSVKNQPSEELPDMTTFPPRLLAEQLTLMDAELFKKVVLHECLGCIWGQGHLKGNEHMAPTVRATIAHFNRLTNCITTSCLGDHSMRARDRARVVEHWIKVARECLSLNNFSSVHVIVSALCSNPIGQLHKTWAGVSSKSMKELKELCKKDTAVKRDLLIKAGSFKVATQERNPQRVQMRLRRQKKGVVPFLGDFLTELQRLDSAIPDDLDGNTNKRSKEVRVLQEMQLLQVAAMNYRLRPLEKFVTYFTRMEQLSDKERWGFTMMSRIVSNSWPQAIHPPQPPKVLTLQLQAVLPAGARKPVGWQHPAVAGNPPGCWPEHRLCTIPHPDRRHQG

SEQ ID NO: 62400 - protein, 32 aa, Homo sapiens
PHLSGPSSGVTQGAVLGPFLCPQFHMSGPQPV

SEQ ID NO: 62401 - protein, 128 aa, Homo sapiens
MKFNPFVTSDRSKNRKRHFNAPSHVRRKIMSSPLSKELRQKYNVRSMPIRKDDEVQVVRGHYKGQQIGKVVQVYRKKYVIYIERVQREKANGTTVHVGIHPSKVVITRLKLDKDRKKILERKAKSRQV

SEQ ID NO: 62402 - protein, 130 aa, Homo sapiens
MAEPDYIEDDNPELIRPQKLINPVKTSRNHQDLHRELLMNQKRGLAPQNKPELQKVMEKRKRDQVIKQKEEEAQKKKSDLEIELLKRQQKLEQLELEKQKLQEEQENAPEFVKVKGNLRRTGQEVAQAQE

SEQ ID NO: 62403 - protein, 71 aa, Homo sapiens
MGSFQLEDFAAGWIGGAASVIVGHPLDTVKTRLQAGVGYGNTLSCIRVEAASNTFPWAVSPLFFLQLKSLT

SEQ ID NO: 62404 - protein, 150 aa, Homo sapiens
MGPGYLLLRSPNRTATGMGPPYLRKTEGWSTGVIYHALSQKEANDSDVQPSGAQRAEAFVRAFLKRSTPRMSPQAREDQLQRKAVVLEYFTRHKRKEKKKKAKGLSARQRRELRLFDIKPEQQRYSLFLPLHELWKQYIRDLCSGLKPDT

SEQ ID NO: 62405 - protein, 65 aa, Homo sapiens
MKVTGIFLLSALALLSLSGNTGADSLGREAKCYNELNGCTKIYDPVCGTDGNTYPNECVLCFENR

SEQ ID NO: 62406 - protein, 111 aa, Homo sapiens
MSPESKKLFNIIILGVAFMFMFTAFQTCGNVAQTVIRSLNRTDFHGSGYTSMAIIYGVFSASNLITPSVVAIVGPQLSMFASGLFYSLCFHWNCCCCALDSTRKLPDNQFG

SEQ ID NO: 62407 - protein, 417 aa, Homo sapiens
MDRETRALADSHFRGLGVDVPGVGQAPGRVAFVSEPGAFSYADFVRGFLLPNLPCVFSSAFTQGWGSRRRWVTPAGRPDFDHLLRTYGDVVVPVANCGVQEYNSNPKEHMTLRDYITYWKEYIQAGYSSPRGCLYLKDWHLCRDFPVEDVFTLPVYFSSDWLNEFWDALDVDDYRFVYAGPAGSWSPFHADIFRSFSWSVNVCGRKKWLLFPPGQEEALRDRHGNLPYDVTSPALCDTHLHPRNQLAGPPLEITQEAGEMVFVPSGWHHQVHNLDDTISINHNWVNGFNLANMWRFLQQELCAVQEEVSEWRDSMPDWHHHCQVIMRSCSGINFEEFYHFLKVIAEKRLLVLREAAAEDGAGLGFEQAAFDVGRITEVLASLVAHPDFQRVDTSAFSPQPKELLQQLREAVDAAAAP

SEQ ID NO: 62408 - protein, 184 aa, Homo sapiens
MSLQSAQYLRQAEVLKADMTDSKLGPAEVWTSRQALQDLYQKMLVTDLEYALDKKVEQDLWNHAFKNQITTLQGQAKNRANPNRSEVQANLSLFLEAASGFYTQLLQELCTVFNVDLPCRVKSSQLGIISNKQTHTSAIVKPQSSSCSYICQHCLVHLGDIVPYNSPLLVGRLQVTSIVHSGSW

SEQ ID NO: 62409 - protein, 240 aa, Homo sapiens
MDSQELKTLINYYCQERYFHHVLLVASEGIKRYGSDPVFRFYHAYGTLMEGKTQEALREFEAIKNKQDVSLCSLLALIYAHKMSPNPDREAILESDARVKEQRKGAGEKALYHAGLFLWHIGRHDKAREYIDRMIKISDGSKQGHVLKAWLDITRGKEPYTKKALKYFEEGLQDGNDTFALLGKAQCLEMRQNYSGALETVNQIIVNFPSFLPAFVKKMKLQLALQDWDQTVETAQSFIH

SEQ ID NO: 62410 - protein, 59 aa, Homo sapiens
MSYYQRPFSPSAYSLPASLNSSIVMQHGTSLDSTDTYPQHAQSLDGTTSSSIPLYRSSE

SEQ ID NO: 62411 - protein, 163 aa, Homo sapiens
MGYSVVAGAAGRLLFGYDSFGNMCGKKNSPVEGAPLSGQDMTLKKHVFFMNSCNLEVKGTQLNRMALCVSNCPEEQLDSLEEVQFFANTSGSFLCVYSLNSFNYTHSPKADSLCPRLPVPPSKSFPLFNRCVPQTPECYSLFASVLINDVDTLHRILSGIMSG

SEQ ID NO: 62412 - protein, 156 aa, Homo sapiens
  MOD_RES (1)..(1): Any amino acid
XVRHLYHCSRLLLKLGTFGPLRCQEAWALERLLREARVLEAVCEFSRRWEIPASSAQEVCVKFLEDALGQKLPRRPQPGPGEQLTVFQFWSFVETLDSPTMEAYVTETAEEVLLVRNLNSDDQAVVLKALRLAPEGRLRRDGLRALSSLLVHGNNK

SEQ ID NO: 62413 - protein, 343 aa, Homo sapiens
  MOD_RES (1)..(1): Any amino acid
XKAAATEEPEVIPDPAKQTDRVVKIAGISAGILVFILLLLVVILIVKKRRSYYSYSYYLKLAKKRKDAMGNTRQEMTHMVNAMDRSYADQSTLHAEDPLSITFMDQHNFSPRLPNDPLVPTAVLDENHSATAESSRLLDVPRYLCEGTESPYQTGQLHPAIRVADLLQHINLMKTSDSYGFKEEYESFFEGQSASWDVAKKDQNRAKNRYGNIIAYDHSRVILQPVEDDPSSDYINANYIDGYQRPSHYIATQGPVHETVYDFWRMIWQEQSACIVMVTNLVEVGRVKCYKYWPDDTEVYGDFKVTCVEMEPLAEYVVRTFTLERRGYNEIREVKQFHFTGWP

SEQ ID NO: 62414 - protein, 216 aa, Homo sapiens
MWLLVSVILISRISSVGGEEEGWSPTPKCLRLCFFPFVENGHSESSGQTHLEGDTVQIICNTGYRLQNNENNISCVERGWSTPPKCRSTISAEKCGPPPPIDNGDITSFLLSVYAPGSSVEYQCQNLYQLEGNNQITCRNGQWSEPPKCLDPCVISQEIMEKYNIKLKWTNQQKLYSRTGDIVEFVCKSGYHPTKSHSFRAMCQNGKLVYPSCEEK

SEQ ID NO: 62415 - protein, 296 aa, Homo sapiens
MFANLKYVSLGILVFQTTSLVLTMRYSRTLKEEGPRYLSSTAVVVAELLKIMACILLVYKDSKCSLRALNRVLHDEILNKPMETLKLAIPSGIYTLQNNLLYVALSNLDAATYQVTYQLKILTTALFSVSMLSKKLGVYQWLSLVILMTGVAFVQWPSDSQLDSKELSAGSQFVGLMAVLTACFSSGFAGVYFEKILKETKQSVWIRNIQLGFFGSIFGLMGVYIYDGELVSKNGFFQGYNRLTWIVVVLQALGGLVIAAVIKYADNILKGFATSLSIILSTLISYFWLQDFVPTR

SEQ ID NO: 62416 - protein, 107 aa, Homo sapiens
VKGGYYYYHNLETQEGGWDEPPNFVQNSMQLSREEIQSSISGVTAAYNREQLWLANEGLITRLQARCRGYLVRQEFRSRMNFLKKQIPAITCIQVFQNLSHRQQAGI

SEQ ID NO: 62417 - protein, 441 aa, Homo sapiens
  MOD_RES (1)..(1): Any amino acid
XPIKTEMAHQLYVLQVLTFNLLEERMMTKMDPNDQAQRDIIFELRRIAFDAESDPSNAPGSGTEKRKAMYTKDYKMLGFTNHINPAMDFTQTPPGMLALDNMLYLAKVHQDTYIRIVLENSSREDKHECPFGRSAIELTKMLCEILQVGELPNEGRNDYHPMFFTHDRAFEELFGICIQLLNKTWKEMRATAEDFNKVMQVVREQITRALPSKPNSLDQFKSKLRSLSYSEILRLRQSERMSQDDFQSPPIVELREKIQPEILELIKQQRLNRLCEGSSFRKIGNRRRQERFWYCRLALNHKVLHYGDLDDNPQGEVTFESLQEKIPVADIKAIVTGKDCPHMKEKSALKQNKVSREASLSSWPSDTWRVPLVVVFSRCILGIFPSLFLNVLLRILNIHKNRWNLCIHITQTQQPWPVLPIHLFLSFIALKKVPSITLFHL

SEQ ID NO: 62418 - protein, 113 aa, Homo sapiens
GKQVLQKTGTRFERLLMRIGHQSKNAPVELKIRCLDAISSLLYLPPEQQTDDLLRMTESWFSSLSRDPLELFRGISSQPFPELHCAALKVFTGRKHLHLEELVGGNQVKNTVE

SEQ ID NO: 62419 - protein, 711 aa, Homo sapiens
MIDSVKLRRDSAADFFSHYEYLCALQNSVPLPAVRACLREGVLDFNADRLRGVDWAPLLSTLKINKDLPLVSIKSFFQPWLGDTGSDMNKFCRSRVPAIRYKDVTFQLCKALKGCLSISSVLKNLELNGLILRERDLTILAKGLNKSASLVHLSLANCPIGDGGLEIICQGIKSSITLKTVNFTGCNLTWQGADHMAKILKYQTMRRHEETWAESLRYRRPDLDCMAGLRRITLNCNTLIGDLGACAFADSLSEDLWLRALDLQQCGLTNEGAKALLEALETNTTLVVLDIRKNPLIDHSMMKAVIKKVLQNGRSAKSEYQWITSPSVKEPSKTAKQKRRTIILGSGHKGKATIRIVIWRHRGLATKKPVSSGRKHSLGKEYYAPAPLPPGVSGFLPWRTAERAKRHRGFPLIKTRDICNQLQQPGFPVTVTVESPSSSEVEEVDDSSESVHEVPEKTSIEQEALQEKLEECLKQLKEERVIRLKVDKRVSELEHENAQLRNINFSLSEALHAQSLTNMILDDEGVLGSIENSFQKFHAFLDLLKDAGLGQLATMAGIDQSDFQLLGHPQMTSTVSNPPKEEKKALEDEKPEPKQNALGQMQNIQFQKITGDARIPLPLDSFPVPVSTPEGLGTSSNNLGVPATEQRQESFEGFIARMCSPSPDATSGTGSQRKEEELSRNSRSSSEKKTKTGEYTKKHSDKQHPGKDLHS

SEQ ID NO: 62420 - protein, 46 aa, Homo sapiens
MARKKFSGLEISLIVLFVIVTIIAIALIVVLATKTPAVDVFSSPRN

SEQ ID NO: 62421 - protein, 164 aa, Homo sapiens
  MOD_RES (1)..(1): Any amino acid
XDNVFPNCILLLKLPGLEKLLHHVTEEKGNPEIDNKKYYKYSKEKTLKWLEKKVNQTVAALKTNNVNVSSRVQSTAFFSGDQASTDKEEDYIRYAHGLISDYIPKELSDDLSKYLKLPEPSASLPNPPSKKNSKMTAAQKALAKVDKSGMKSIDTFFGVKNKKK

SEQ ID NO: 62422 - protein, 416 aa, Homo sapiens
MQVIVSNVPPTLVEKKIEDLTEILDRYVQEQIPGAKVVVESIGARRHGDAFSLEDYTKCDLTVYAIDPQTNRAIDRNELFKFLDGKLLDINKDFQPYYGEGGRILEIRTPEAVTSIKKRGESLGYTEGALLALAFIIILCCIPAILVVLVSYRQRGYGSEQQQLLRPSLLKPEELSMESGIDPGQEYGQDYYSYEHGYEMPQYGSRRRLLPPAGQEEYGEVVGEAEEEYEEEEWARKRMIKLVVDREYETSSTGEDSAPECQRNRLHHPSIHSNINGNIYIAQNGSVVRTRRACLTDNLKVASPVRLGGPFKKLDKLAVTHEENVPLNTLSKGPFSTEKMNARPTLVTFAPCPVGTDNTAVKPLRNRLKSTVEQESMIDSKNIKEALEFHSDHTQSDDEELWMGPWNNLHIPMTKL

SEQ ID NO: 62423 - protein, 797 aa, Homo sapiens
QIGNLEDYYHFYHSKTFKRSTLSSRGPHTFLRMDPQVKWLQQQEVKRRVKRQVRSDPQALYFNDPIWSNMWYLHCGDKNSRCRSEMNVQAAWKRGYTGKNVVVTILDDGIERNHPDLAPNYDSYASYDVNGNDYDPSPRYDASNENKHGTRCAGEVAASANNSYCIVGIAYNAKIGGIRMLDGDVTDVVEAKSLGIRPNYIDIYSASWGPDDDGKTVDGPGRLAKQAFEYGIKKGRQGLGSIFVWASGNGGREGDYCSCDGYTNSIYTISVSSATENGYKPWYLEECASTLATTYSSGAFYERKIVTTDLRQRCTDGHTGTSVSAPMVAGIIALALEAKSIPLVQVLRTTALTSACAEHSDQRVVYLEHVVVRTSISHPRRGDLQIYLVSPSGTKSQLLAKRLLDLSNEGFTNWEFMTVHCWGEKAEGQWTLEIQDLPSQVRNPEKQGKLKEWSLILYGTAEHPYHTFSAHQSRSRMLELSAPELEPPKAALSPSQVEVPEDEEDYTAQSTPGSANILQTSVCHPECGDKGCDGPNADQCLNCVHFSLGSVKTSRKCVSVCPLGYFGDTAARRCRRCHKGCETCSSRAATQCLSCRRGFYHHQEMNTCVTLCPAGFYADESQKNCLKCHPSCKKCVDEPEKCTVCKEGFSLARGSCIPDCEPGTYFDSELIRCGECHHTCGTCVGPGREECIHCAKNFHFHDWKCVPACGEGFYPEEMPGLPHKVCRRCDENCLSCAGSSRNCSRCKTGFTQLGTSCITNHTCSNADETFCEMVKSNRLCERKLFIQFCCRTCLLAG

SEQ ID NO: 62424 - protein, 271 aa, Homo sapiens
MDALEDYVWPRATSELILLPVTGLECVGDRLLAESGFGFPKCPDYRREPPHPAETKDFLRFKLQDCEGPDVLVYSLDFGGHLRMIKRVQNLLGHYLIHGFRVRPEPNGDLDLEAMVAVFGSKGLRVVKISWGQGHFWELWRSGLWNMSDWIWDARWLEGNIALALGHNSVVLYDPVVGCILQEVPCTDRCTLSSACLIGDAWKELTIVAGAVSNQLLVWYPATALADNKPVAPDRRISGHVGIIFSMSYLESKGLLATASEDRSVRIWKVG

SEQ ID NO: 62425 - protein, 103 aa, Homo sapiens
MDRLARGTQSIPNDSPARGEGTHSEEEGFAMDEEDSDGELNTWELSEGTNCPPKEQPGDLFNEDWDSELKADQGNPYDADDIQESISQELKPWVCCAPQGDMI

SEQ ID NO: 62426 - protein, 445 aa, Homo sapiens
MYDNLYLHGIEDSEAGSADSYTSRPSDSDVSLEEDREAIRQEREQQAAIQLERAKKYNNDWWIGRLVKEGCEIGFIPSPLRLENIRIQQEQKRGRFHGGKSSGNSSSSLGEMVSGTFRATPTSTAKQKQKVTEHIPPYDVVPSMRPVVLVGPSLKGYEVTDMMQKALFDFLKHRFDGRISITRVTADISLAKRSVLNNPSKRAIIERSNTRSSLAEVQSEIERIFELARSLQLVVLDADTINHPAQLIKTSLAPIIVHVKVSSPKVLQRLIKSRGKSQSKHLNVQLVAADKLAQCPPEMFDVILDENQLEDACEHLGEYLEAYWRATHTTSSTPMTPLLGRNLGSTALSPYPTAISGLQSQRMRHSNHSTENSPIERRSLMTSDENYHNERARKSRNRLSSSSQHSRDHYPLVEEDYPDSYQDTYKPHRNRGSPGGYSHDSRHRL

SEQ ID NO: 62427 - protein, 166 aa, Homo sapiens
MESGLAGNGTGAGLVMKVKQEKPERLLQTLAPQAMLVEKDKENIFQQHRGLPPRQTMGRPRALGGQEESGSPRWAPPTEQDAGLAGRAPGSASGPLSPSLSSGEGHFVCLDCGKRFSWWSSLKIHQRTHTGEKPYLCGKCGKSFSQKPNLARHQRHHTGERPFCCP

SEQ ID NO: 62428 - protein, 36 aa, Homo sapiens
MSATNNIAQARKLVEQLRIEAGIERIKERKQGEKGR

SEQ ID NO: 62429 - protein, 455 aa, Homo sapiens
MSKDEERAVKDELLGEKPEIKQKWASRLLAKLRKDIRPEFREDFVLTITGKKPPCCVLSNPDQKGKIRRIDCLRQADKVWRLDLVMVILFKGIPLESTDGERLYKSPQCSNPGLCVQPHHIGVTIKELDLYLAYFVHTPESGQSDSSNQQGDADIKPLPNGHLSFQDCFVTSGVWNVTELVRVSQTPVATASGPNFSLADLESPSYYNINQVTLGRRSITSPPSTSTTKRPKSIDDSEMESPVDDVFYPGTGRSPAAGSSQSSGWPNDVDAGPASLKKSGKLDFCSALSSQGSSPRMAFTHHPLPVLAGVRPGSPRATASALHFPSTSIIQQSSPYFTHPTIRYHHHHGQDSLKEFVQFVCSDGSGQATGQPNGSGQGKVPGSFLLPPPPPVARPVPLPMPDSKSTSTAPDGAALTPPSPSFATTGASSANRFVSIGPRDGNFLNIPQQSQSWFL

SEQ ID NO: 62430 - protein, 55 aa, Homo sapiens
MRALWVLGLCCVLLTFGSVRADDEVDVDGTVEEDLGKSREGSRTDDEVVQRFVFI

SEQ ID NO: 62431 - protein, 1907 aa, Homo sapiens
MIEDKGPRVADYFVVAGLTDVSKPLEEEIHFNDACHKVAKPKEPITDVSVIIKSLGEEVPQDYICIDVTPTGLSADLNNGSLVGPQIYLCYRRGRDKPPLTDLGVLYDWKERLKQGCEIIQSTPYGRPANISGSTSSQRIYITYRRASENMTQNTLAVTDICIIIPSKGESPPHTFCKVDKNLNNSMWGSAVYLCYKKSVAKTNTVSYKAGLICRYPQEDYESFSLPESVPLFCLPMGATIECWPSNSKYPLPVFSTFVLTGASAEKVYGAAIQFYEPYSEENLTEKQRLLLGLTSADGKSDSSKTIHTNKCICLLSHWPFFDAFRKFLTFLYRYSISGPHVLPIEKHISHFMHKVPFPSPQRPRILVQLSPHDNLILSQPVSSPLPLSGGKFSTLLQNLGPENAVTLLVFAVTEHKILIHSLRPSVLTSVTEALVSMIFPFHWPCPYVPLCPLALADVLSAPCPFIVGIDSRYFDLYDPPPDVSCVDVDTNTISQIGDKKNVAWKILPKKPCKNLMNTLNNLHQQLAKLQQRPRDDGLMDLAINDYDFNSGKRLHMIDLEIQEAFLFFMASILKGYRSYLRPITQAPSETATDAASLFALQAFLRSRDRSHQKFYNMMTKTQMFIRFIEECSFVSDKDASLAFFDDCVDKVDMDKSGEVRLIELDESFKSEHTVFVTPPEIPHLPNGEEPPLQYSYNGFPVLRNNLFERPEGFLQAKKNKLPSKSSSPNSPLPMFRRTKQEIKSAHKIAKRYSSIPQMWSRCLLRHCYGLWFICLPAYVKVCHSKVRALKTAYDVLKKMQSKKMDPPDEVCYRILMQLCGQYDQPVLAVRVLFEMQKAGIDPNAITYGYYNKAVLESTWPSRSRSGYFLWTKVRNVVLGVTQFKRALKKHAHLSQTTLSADGSDLDAVSHGSMDSGHGTHTVEQAPFNTGLIKVYATDDRSSTGGQSDLGYNSLSKDEVRRGDTSTEDIQEEKDKKGSDCSSLSESESTKGSADCLPKLSYQNSSSIVRLTGTSNNSAGKISGESMESTPELLLISSLEDTNETRNIQSRCFRKRHKSDNETNLQQQVVWGNRNRNLSGGVLMGFMLNRINQEATPGDIVEKLGADAKILSNVISKSTRPNTLDIGKPPLRSKRDSLEKESSDDDTPFDGSNYLADKVDSPVIFDLEDLDSETDVSKAGCVATQNPKRIQRMNSSFSVKPFEKTDVATGFDPLSLLVAETEQQQKEEEEEDEDDSKSISTPSARRDLAEEIVMYMNNMSSPLTSRTPSIDLQRACDDKLNKKSPPLVKACRRSSLPPNSPKPVRLTKSKSYTKSEEKPRDRLWSSPAFSPTCPFREESQDTLTHSSPSFNLDTLLVPKLDVLRNSMFTAGKGVAEKASKWYSRFTMYTTSSKDQSSDRTSLSSVGAQDSESTSLTDEDVCHELEGPISSQETSATSGTKRIDLSRISLESSASLEGSLSKFALPGKSEVTSSFNASNTNIFQNYAMEVLISSCSRCRTCDCLVHDEEIMAGWTADDSNLNTTCPFCGNIFLPFLNIEIRDLRRPGRYFLKSSPSTENMHFPSSISSQTRQSCISTSASGLDTSALSVQGNFDLNSKSKLQENFCTRSIQIPANRSKTAMSKCPIFPMARSISTSGPLDKEDTGRQKLISTGSLPATLQGATDSLGLEWHLPSPDPVTVPYLSPLVVWKELESLLENEGDHAITVADFVDHHPIVFWNLVWYFRRLDLPSNLPGLILSSEHCNKYSKIPRHCMSEDSKYVLIQMLWDNMKLHQDPGQPLYILWNAHTQKYPMVHLLQKSDNSFNQELLKSMVKSIKMNDVYGPMSQILETLNKCPHFKRQRSLYREILFLSLVALGRENIDIDAFDKEYKMAYDRLTPSQVKSTHNCDRPPSTGVMECRKTFGEPYL

SEQ ID NO: 62432 - protein, 1009 aa, Homo sapiens
MALIMEPVSKWSPSQVVDWMKGLDDCLQQYIKNFEREKISGDQLLRITHQELEDLGVSRIGHQELILEAVDLLCALNYGLETENLKTLSHKLNASAKNLQNFITGRRRSGHYDGRTSRKLPNDFLTSVVDLIGAAKSLLAWLDRSPFAAVTDYSVTRNNVIQLCLELTTIVQQDCTVYETENKILHVCKTLSGVCDHIISLSSDPLVSQSAHLEVIQLANIKPSEGLGMYIKSTYDGLHVITGTTENSPADRCKKIHAGDEVIQVNHQTVPLIPRSPTSSVATPSSTISTPTKRDSSALQDLYIPPPPAEPYIPRDEKGNLPCEDLRGHMVGKPVHKGSESPNSFLDQEYRKRFNIVEEDTVLYCYEYEKGRSSSQGRRESTPTYGKLRPISMPVEYNWVGDYEDPNKMKRDSRRENSLLRYMSNEKIAQEEYMFQRNSKKDTGKKSKKKGDKSNSPTHYSLLPSLQMDALRQDIMGTPVPETTLYHTFQQSSLQHKSKKKNKVWFRRAQPPCAKAASFFFSAIIIQGPIAGKSKRRISCKDLGRGDCEGWLWKKKDAKSYFSQKWKKYWFVLKDASLYWYINEEDEKAEGFISLPEFKIDRASECRKKYAFKACHPKIKSFYFAAEHLDDMNRWLNRINMLTAGYAERERIKQEQDYWSESDKEEADTPSTPKQDSPPPPYDTYPRPPSMSCASPYVEAKHSRLSSTETSQSQSSHEEFRQEVTGSSAVSPIRKTASQRRSWQDLIETPLTSSGLHYLQTLPLEDSVFSDSAAISPEHRRQSTLPTQKCHLQDHYGPYPLAESERMQVLNGNGGKPRSFTLPRDSGFNHCCLNAPVSACDPQDDVQPPEVEEEEEEEEEEGEAAGENIGEKSESREEKLGDSLQDLYRALEQASLSPLGEHRISTKMEYKLSFIKRCNDPVMNEKLHRLRILKSTLKAREGEVAIIDKVLDNPDLTSKEFQQWKQMYLDLFLDICQNTTSNDPLSISSEVDVITSSLAHTHSYIETHV

SEQ ID NO: 62433 - protein, 71 aa, Homo sapiens
MDMWTALLILQALLLPSLADGATPALRFVAVGDWGGVPNAPFHTAREMANAKEIARTVQILGADFILSLGD

SEQ ID NO: 62434 - protein, 91 aa, Homo sapiens
MAAKQPPPLMKKHSQTDLVSRLKTRKILGVGGEDDDGEVHRSKGLAVRLCCALLRHCHHGISLIMWNALYTAEKVIIRWTLLTEACYFGVQ

SEQ ID NO: 62435 - protein, 120 aa, Homo sapiens
MASPKGFFNYLTYFLAAGAVTLGIGFFALASALWFLICKRREIFQNSKFKAIDERCRQRPSMAKIKSHSQCVFISRNFHTGRFQLQQLKIILKMNPNLQQKISFVIPQRPAPQQIAAVLH

SEQ ID NO: 62436 - protein, 93 aa, Homo sapiens
MGKSESQMDITDINTPKPKKKQRWTPLEISLSVLVLLLTIIAVTMIALYATYDDGICKSSDCIKSAARLIQNMDATTEPCTDFFKYACGGWLK

SEQ ID NO: 62437 - protein, 694 aa, Homo sapiens
MAIDRRREAAGGGPGRQPAPAEENGSLPPGDAAASAPLGGRAGPGGGAEIQPLPPLHPGGGPHPSCCSAAAAPSLLLLDYDGSVLPFLGGLGGGYQKTLVLLTWIPALFIGFSQFSDSFLLDQPNFWCRGAGKGTELAGVTTTGRGGDMGNWTSLPTTPFATAPWEAAGNRSNSSGADGGDTPPLPSPPDKGDNASNCDCRAWDYGIRAGLVQNVVSKWDLVCDNAWKVHIAKFSLLVGLIFGYLITGCIADWVGRRPVLLFSIIFILIFGLTVALSVNVTMFSTLRFFEGFCLAGIILTLYALRIELCPPGKRFMITMVASFVAMAGQFLMPGLAALCRDWQVLQALIICPFLLMLLYWSIFPESLRWLMATQQFESAKRLILHFTQKNRMNPEGDIKGVIPELEKELSRRPKKVCIVKVVGTRNLWKNIVVLCVNSLTGYGIHHCFARSMMGHEVKVPLLENFYADYYTTASIALVSCLAMCVVVRFLGRRGGLLLFMILTALASLLQLGLLNLIGKYSQHPDSELQLKLAVGMSDSVKDKFSIAFSIVGMFASHAVGSLSVFFCAEITPTVIRCGGLGLVLASAGFGMLTAPIIELHNQKGYFLHHIIFACCTLICIICILLLPESRDQNLPENISNGEHYTRQPLLPHKKGEQPLLLTNAELKDYSGLHDAAAAGDTLPEGATANGMKAM

SEQ ID NO: 62438 - protein, 80 aa, Homo sapiens
MSDKPDLSEVEKFDRSKLKKTNTEEKNTLPSKEKGVSLCRQAGVQRHDFGSLQTSLPEFKQFSCLSLPSSWDLRHITKPG

SEQ ID NO: 62439 - protein, 273 aa, Homo sapiens
MAAGVDCGDGVGARQHVFLVSEYLKDASKKMKNGLMFVKLVNPCSGGLLHFATPVDPLFLLLHYLIKADKEGKFQPLDQVVVDNVFPNCILLLKLPGLEKLLHHVTEEKEIDNKKYYKYSKEKTLKWLEKKVNQTVAALKTNNVNVSSRVQSTAFFSGDQASTDKEEDYIRYAHGLISDYIPKELSDDLSKYLKLPEPSASLPNPPSKKIKLSDEPVEAKEDYTKFNTKDLKTEKKNSKMTAAQKALAKVDKSGMKSIDTFFGVKNKKKIGKV

SEQ ID NO: 62440 - protein, 656 aa, Homo sapiens
  MOD_RES (1)..(1): Any amino acid
XLTQAPLVWQAPGALCGGVVCPPPLLLAAAPVVPVMAAQVVGGTQACEGGWSQGLPLPPPPPPAAQLPPIVSQGNAGPWPQGAHGESSLASSQAKAPPDDSCNPRSVYENFRLWQHYKPLARRHLPQSPDTEALSCFLIPVLRSLARRKPTMTLEEGLWRAMREWQHTSNFDRMIFYEMAEKFLEFEAEEEMQIQKSQWMKGPQCLPPPATPRLEPRGPPAPEVVKQPVYLPSKAGPKAPTACLPPPRPQRPVTKARRPPPRPHRRAETKARLPPPRPQRPAETKVPEEIPPEVVQEYVDIMEELLGPSLGATGEPEKQREEGKVKQPQEEDWTPPDPGLLSYIDKLCSQKDFVTKVEAVIHPQFLEELLSPDPQMDFLALSQDLEQEEGLTLAQLVEKRLPPLKEKQHARAAPSRGTARLDSSSSKFAAGQGAERDVPDPQQGVGMETCPPQMTARDSQGRGRAHTGMARSEDSVVLLGCQDSPGLRAAWPTSPPQDHRPTCPGVGTKDALDLPGGSPVRESHGLAQGSSEEEELPSLAFLLGSQHKLLPWWLPQSPVPASGLLSPEKWGPQGTHQSPSAERRGLNLAPSPANKAKKRPLFGSLSPAEKTPYPGPGLRVSGEQSLTWGLGGPSQSQKRKGDPLVSRKEKKQHCSQ

SEQ ID NO: 62441 - protein, 202 aa, Homo sapiens
METLSFPRYNVAEIVIHIRNKILTGADGKNLTKNDLYPNPKPEVLHMIYMRALQIVYGIRLEHFYMMPVNSEVMYPHLMEGFLPFSNLVTHLDSFLPICRVNDFETADILCPKAKRTSRFLSGIINFIHFREACRETYMEFLWQYKSSADKMQQLNAAHQEALMKLERLDSVPVEEQEEFKQLSDGIQELQQSLNQDFHQKT

SEQ ID NO: 62442 - protein, 101 aa, Homo sapiens
MAERRRHKKRIQEVGEPSKEEKAVAKYLRFNCPTKSTNMMGHRVDYFIASKAVDCLLDSKWAKAKKGEEALFTTRESVVDYCNSLYLYGECNAIPVFPKGF

SEQ ID NO: 62443 - protein, 475 aa, Homo sapiens
  MOD_RES (1)..(1): Any amino acid
XYSNALQEKELAASRCRSLQEELYLLKQELQRANMVSSCELELQEQSLRTASDQESGDEELNRLKEENEKLRSLTFSLAEKDILEQSLDEARGSRQELVERIHSLRERAVAAERQREQYWEEKEQTLLQFQKSKMACQLYREKVNALQAQVCELQKERDQAYSARDSAQREISQSLVEKDSLRRQVFELTDQVCELRTQLRQLQAEPPGVLKQEARTREPCPREKQRLVRMHAICPRDDSDCSLVSSTESQLLSDLSATSSRELVDSFRSSSPAPPSQQSLYKRVAEDFGEEPWSFSSCLEIPEGDPGALPGAKAGDPHLDYELLDTADLPQLESSLQPVSPGRLDVSESGVLMRRRPARRILSQVTMLAFQGDALLEQISVIGGNLTGIFIHRVTPGSAADQMALRPGTQIVMVIRGYSRTWRPKWRPRGTHSTSGSTWPWRAGPKGSCRCIATRSCTSPTPCSRAAAAGMPTA

SEQ ID NO: 62444 - protein, 40 aa, Homo sapiens
MNVVFAVKQYISKMIEDSGPGMKVLLMDKETLIFCFYRLA

SEQ ID NO: 62445 - protein, 20 aa, Homo sapiens
  MOD_RES (1)..(1): Any amino acid
XYQRFYNFTFGKGSKHNVTP

SEQ ID NO: 62446 - protein, 144 aa, Homo sapiens
MAEAKTHWLGAALSLIPLIFLISGAEAASFQRNQLLQKEPDLRLENVQKFPSPEMIRALEYIENLRQQAHKEESSPDYNPYQGVSVPLQQKENGDESHLPERDSLSEEDWMRIILEALRQAENEPQSAPKENKPYALNSEKNFP

SEQ ID NO: 62447 - protein, 574 aa, Homo sapiens
MSLSPPCFTEEDRFSLEALQTIHKQMDDDKDGGIEVEESDEFIREDMKYKDATNKHSHLHREDKHITIEDLWKRWKTSEVHNWTLEDTLQWLIEFVELPQYEKNFRDNNVKGTTLPRIAVHEPSFMISQLKISDRSHRQKLQLKALDVVLFGPLTRPPHNWMKDFILTVSIVIGVGGCWFAYTQNKTSKEHVAKMMKDLESLQTAEQSLMDLQERLEKAQEENRNVAVEKQNLERKMMDEINYAKEEACRLRELREGAECELSRRQYAEQELEQVRMALKKAEKEFELRSSWSVPDALQKWLQLTHEVEVQYYNIKRQNAEMQLAIAKDEVAASYLIQAEKIKKKRSTVFGTLHVAHSSSLDEVDHKILEAKKALSELTTCLRERLFRWQQIEKICGFQIAHNSGLPSLTSSLYSDHSWVVMPRVSIPPYPIAGGVDDLDEDTPPIVSQFPGTMAKPPGSLARSSSLCRSRRSIVPSSPQPQRAQLAPHAPHPSHPRHPHHPQHTPHSLPSPDPDILSVSSCPALYRNEEEEEAIYFSAEKQCMIIVTSKMPLLTELVLCGFWKSEGKLESCTV

SEQ ID NO: 62448 - protein, 135 aa, Homo sapiens
MRLNQNTLLLGKKVVLVPYTSEHVPSRYHEWMKSEELQRLTASEPLTLEQEYAMQCSWQEDADKCTFIVLDAEKWQAQPGATEESCMVGDVNLFLTDLEDLTLGEIEVMIAEPSCRGKGLGTEAVLAMLSYETSL

SEQ ID NO: 62449 - protein, 90 aa, Homo sapiens
MAASMARRLWPLLTRRGFRPRGGCISNDSPRRSFTTEKRNRNLLYEYAREGYSALPQLDIERFCACPEEAAHALELRKGELRSADLPAIA

SEQ ID NO: 62450 - protein, 75 aa, Homo sapiens
MALYDEDLLKNPFYLALQKCRPDLCSKVAQIHGIVLVPCKGSLSSSIQSTCQFESYILIPVEEHFQTLNGKDVFI

SEQ ID NO: 62451 - protein, 160 aa, Homo sapiens
MSSPASTPSRRGSRRGRATPAQTRESPEPGPLQPPAPPRLPSRRSWQRWVGARDPGAQPRAGRCRLVRTDTHSRLWPGCCLIRLPFASVWFGSVLGVRMPGHLPLRDVEARIPPPRGSCSRCQPRLEWTCRALLRRTCCFPALPKCILQLSLLTLMLVHH

SEQ ID NO: 62452 - protein, 52 aa, Homo sapiens
MSIAGVAAQEIRVPLKTGFLHNGRAMGNMRKTYWSSRSEFKNFLSFQQLFKY

SEQ ID NO: 62453 - protein, 267 aa, Homo sapiens
MFTEDLKLPASFDAREQWPQCPTIKEIRDQGSCGSCWAFGAVEAISDRICIHTNAHVSVEVSAEDLLTCCGSMCGDGCNGGYPAEAWNFWTRKGLVSGGLYESHVGCRPYSIPPCEHHVNGSRPPCTGEGDTPKCSKICEPGYSPTYKQDKHYGYNSYSVSNSEKDIMAEIYKNGPVEGAFSVYSDFLLYKSGVYQHVTGEMMGGHAIRILGWGVENGTPYWLVANSWNTDWGDNGFFKILRGQDHCGIESEVVAGIPRTDQYWEKI

SEQ ID NO: 62454 - protein, 1386 aa, Homo sapiens
MAAVPQNNLQEQLERHSARTLNNKLSLSKPKFSGFTFKKKTSSDNNVSVTNVSVAKTPVLRNKDVNVTEDFSFSEPLPNTTNQQRVKDFFKNAPAGQETQRGGSKSLLPDFLQTPKEVVCTTQNTPTVKKSRDTALKKLEFSSSPDSLSTINDWDDMDDFDTSETSKSFVTPPQSHFVRVSTAQKSKKGKRNFFKAQLYTTNTVKTDLPPPSSESEQIDLTEEQKDDSEWLSSDVICIDDGPIAEVHINEDAQESDSLKTHLEDERDNSEKKKNLEEAELHSTEKVPCIEFDDDDYDTDFVPPSPEEIISASSSSSKCLSTLKDLDTSDRKEDVLSTSKDLLSKPEKMSMQELNPETSTDCDARQISLQQQLIHVMEHICKLIDTIPDDKLKLLDCGNELLQQRNIRRKLLTEVDFNKSDASLLGSLWRYRPDSLDGPMEGDSCPTGNSMKELNFSHLPSNSVSPGDCLLTTTLGKTGFSATRKNLFERPLFNTHLQKSFVSSNWAETPRLGKKNESSYFPGNVLTSTAVKDQNKHTASINDLERETQPSYDIDNFDIDDFDDDDDWEDIMHNLAASKSSTAAYQPIKEGRPIKSVSERLSSAKTDCLPVSSTAQNINFSESIQNYTDKSAQNLASRNLKHERFQSLSFPHTKEMMKIFHKKFGLHNFRTNQLEAINAALLGEDCFILMPTGGGKSLCYQLPACVSPGVTVVISPLRSLIVDQVQKLTSLDIPATYLTGDKTDSEATNIYLQLSKKDPIIKLLYVTPEKICASNRLISTLENLYERKLLARFVIDEAHCVSQWGHDFRQDYKRMNMLRQKFPSVPVMALTATANPRVQKDILTQLKILRPQVFSMSFNRHNLKYYVLPKKPKKVAFDCLEWIRKHHPYDSGIIYCLSRRECDTMADTLQRDGLAALAYHAGLSDSARDEVQQKWINQDGCQVICATIAFGMGIDKPDVRFVIHASLPKSVEGYYQESGRAGRDGEISHCLLFYTYHDVTRLKRLIMMEKDGNHHTRETHFNNLYSMVHYCENITECRRIQLLAYFGENGFNPDFCKKHPDVSCDNCCKTKDYKTRDVTDDVKSIVRFVQEHSSSQGMRNIKHVGPSGRFTMNMLVDIFLGSKSAKIQSGIFGKGSAYSRHNAERLFKKLILDKILDEDLYINANDQAIAYVMLGNKAQTVLNGNLKVDFMETENSSSVKKQKALVAKVSQREEMVKKCLGELTEVCKSLGKVFGVHYFNIFNTVTLKKLAESLSSDPEVLLQIDGVTEDKLEKYGAEVISVLQKYSEWTSPAEDSSPGISLSSSRGPGRSAAEELDEEIPVSSHYFASKTRNERKRKKMPASQRSKRRKTASSGSKAKGTKSDSVAQARVQWHNLGSLQPLPPVLK

SEQ ID NO: 62455 - protein, 273 aa, Homo sapiens
MNGKARKEAVQTAAKELLKFVNRSPSPFHAVAECRNRLLQAGFSELKETEKWNIKPESKYFMTRNSSTIIAFAVGGQYVPGNGFSLIGAHTDSPCLRVKRRSRRSQVGFQQVGVETYGGGIWSTWFDRDLTLAGRVIVKCPTSGRLEQQLVHVERPILRIPHLAIHLQRNINENFGPNTEMHLVPILATAIQEELEKGTPEPGPLNAVDERHHSVLMSLLCAHLGLSPKDIVEMELCLADTQPAVLGGAYDEFIFAPRLDNLHSCFCALQALI

SEQ ID NO: 62456 - protein, 258 aa, Homo sapiens
MGSRAELCTLLGGFSFLLLLIPGEGAKGGSLRESQGVCSKQTLVVPLHYNESYSQPVYKPYLTLCAGRRICSTYRTMYRVMWREVKREVQQTHAVCCQGWKKRHPGALTCEAICAKPCLNGGVCVRPDQCECAPGWGGKHCHVGSFTCGCPHDLVLGVDGRTCMEGSPEPPTSASILSVAVREAEKDERALKQEIHELRGRLERLEQWAGQAGAWVRAVLPVPPEELQPEQVAELWGRGDRIESLSDQVLLLEERLGA

SEQ ID NO: 62457 - protein, 173 aa, Homo sapiens
MAKFMTPVIQDNPSGWGPCAVPEQFRDMPYQPFSKGDRLGKVADWTGATYQDKRYTNKYSSQFGGGSQYAYFHEEDESSFQLVDTARTQKTAYQRNRMRFAQRNLRRDKDRRNMLQFNLQILPKSAKQKERERIRLQKKFQKQFGVRQKWDQKSQKPRDSSVEVRSDWEVKEE

SEQ ID NO: 62458 - protein, 67 aa, Homo sapiens
REMKQFHKVIDEMLVDIIEENTEIRIILQTYFQQSGLELPTASTKGSRQSSRSPSHTSLSARNRKKA

SEQ ID NO: 62459 - protein, 471 aa, Homo sapiens
MVALPMVLVLLLVLSRGESELDAKIPSTGDATEWRNPHLSMLGSCQPAPSCQKCILSHPSCAWCKQLNFTASGEAEARRCARREELLARGCPLEELEEPRGQQEVLQDQPLSQGARGEGATQLAPQRVRVTLRPGEPQQLQVRFLRAEGYPVDLYYLMDLSYSMKDDLERVRQLGHALLVRLQEVTHSVRIGFGSFVDKTVLPFVSTVPSKLRHPCPTRLERCQSPFSFHHVLSLTGDAQAFEREVGRQSVSGNLDSPEGGFDAILQAALCQEQIGWRNVSRLLVFTSDDTFHTAGDGKLGGIFMPSDGHCHLDSNGLYSRSTEFDYPSVGQVAQALSAANIQPIFAVTSAALPVYQELSKLIPKSAVGELSEDSSNVVQLIMDAYNSLSSTVTLEHSSLPPGVHISYESQCEGPEKREGKAEDRGQCNHVRINQTGLCRVWGLQDWPTGHQLQYSLCPYQCDPGLGPYLG

SEQ ID NO: 62460 - protein, 358 aa, Homo sapiens
MVKLSIVLTPQFLSHDQGQLTKELQQHVKSVTCPCEYLRKVINTLADHHHRGTDFGGSPWLHVIIAFPTSYKVVITLWIVYLWVSLLKTIFWSRNGHDGSTDVQQRAWRSNRRRQEGLRSICMHTKKRVSSFRGNKIGLKDVITLRRHVETKVRAKIRKRKVTTKINHHDKINGKRKTARKQKMFQRAQELRRRAEDYHKCKIPPSARKALCNWVRMAAAEHRHSSGLPYWPYLTAETLKNRMGHQPPPPTQQHSITDNSLSLKTPPECLLTPLPPSADDNLKTPPECVLTPLPPSADDNLKTPPECVLTPLPPSADDNLKTPPECLLTPLPPSADDNLKTPPECLLTPLPPSALPSA

SEQ ID NO: 62461 - protein, 1995 aa, Homo sapiens
MKMADPIMDLFDDPNLFGLDSLTDDSFNQVTQDPIEEALGLPSSLDSLDQMNQDGGGGDVGNSSASELVPPPEETAPTELSKESTAPAPESITLHDYTTQPASQEQPAQPVLQTSTPTSGLLQVSKSQEILSQGNPFMGVSATAVSSSSAGGQPPQSAPKIVILKAPPSSSVTGAHVAQIQAQGITSTAQPLVAGTANGGKVTFTKVLTGTPLRPGVSIVSGNTVLAAKVPGNQAAVQRIVQPSRPVKQLVLQPVKGSAPAGNPGATGPPLKPAVTLTSTPTQGESKRITLVLQQPQSGGPQGHRHVVLGSLPGKIVLQGNQLAALTQAKNAQGQPAKVVTIQLQVQQPQQKIQIVPQPPSSQPQPQQPPSTQPVTLSSVQQAQIMGPGQSPGQRLSVPVKVVLQPQAGSSQGASSGLSVVKVLSASEVAALSSPASSAPHSGGKTGMEENRRLEHQKKQEKANRIVAEAIARARARGEQNIPRVLNEDELPSVRPEEEGEKKRRKKSAGERLKEEKPKKSKTSGASKTKGKSKLNTITPVVGKKRKRNTSSDNSDVEVMPAQSPREDEESSIQKRRSNRQVKRKKYTEDLDIKITDDEEEEEVDVTGPIKPEPILPEPVQEPDGETLPSMQFFVENPSEEDAAIVDKVLSMRIVKKELPSGQYTEAEEFFVKYKNYSYLHCEWATISQLEKDKRIHQKLKRFKTKMAQMRHFFHEDEEPFNPDYVEVDRILDESHSIDKDNGEPVIYYLVKWCSLPYEDSTWELKEDVDEGKIREFKRIQSRHPELKRVNRPQASAWKKLELSHEYKNRNQLREYQLEGVNWLLFNWYNRQNCILADEMGLGKTIQSIAFLQEVYNVGIHGPFLVIAPLSTITNWEREFNTWTEMNTIVYHGSLASRQMIQQYEMYCKDSRGRLIPGAYKFDALITTFEMILSDCPELREIEWRCVIIDEAHRLKNRNCKLLDSLKHMDLEHKVLLTGTPLQNTVEELFSLLHFLEPSQFPSESEFLKDFGDLKTEEQVQKLQAILKPMMLRRLKEDVEKNLAPKQETIIEVELTNIQKKYYRAILEKNFSFLSKGAGHTNMPNLLNTMMELRKCCNHPYLINGAEEKILTEFREACHIIPHDFHLQAMVRSAGKLVLIDKLLPKLKAGGHKVLIFSQMVRCLDILEDYLIQRRYLYERIDGRVRGNLRQAAIDRFSKPDSDRFVFLLCTRAGGLGINLTAADTCIIFDSDWNPQNDLQAQARCHRIGQSKAVKVYRLITRNSYEREMFDKASLKLGLDKAVLQSMSGRDGNITGIQQFSKKEIEDLLRKGAYAAIMEEDDEGSKFCEEDIDQILLRRTTTITIESEGKGSTFAKASFVASENRTDISLDDPNFWQKWAKKADLDMDLLNSKNNLVIDTPRVRKQTRHFSTLKDDDLVEFSDLESEDDERPRSRRHDRHHAYGRTDCFRVEKHLLVYGWGRWRDILSHGRFKRRMTERDVETICRAILVYCLLHYRGDENIKGFIWDLISPAENGKTKELQNHSGLSIPVPRGRKGKKVKSQSTFDIHKADWIRKYNPDTLFQDESYKKHLKHQCNKVLLRVRMLYYLRQEVIGDQAEKVLGGAIASEIDIWFPVVDQLEVPTTWWDSEADKSLLIGVFKHGYEKYNTMRADPALCFLEKAGRPDDKAIAAEHRVLDNFSDIVEGVDFDKDCEDPEYKPLQGPPKDQDDEGDPLMMMDEEISVIDGDEAQVTQQPGHLFWPPGSALTARLRRLVTAYQRSYKREQMKIEAAERGDRRRRRCEAAFKLKEIARREKQQRWTRREQTDFYRVVSTFGVEYDPDTMQFHWDRFRTFARLDKKTDESLTKYFHGFVAMCRQVCRLPPAAGDEPPDPNLFIEPITEERASRTLYRIELLRRLREQVLCHPLLEDRLALCQPPGPELPKWWEPVRHDGELLRGAARHGVSQTDCNIMQDPDFSFLAARMNYMQNHQAGAPAPSLSRCSTPLLHQQYTSRT

SEQ ID NO: 62462 - protein, 575 aa, Homo sapiens
MKITSTSCICPVLVCLCFVQRCYGTAHHSSIKVMRNQTKHIEGETEVHHRPKRGWVWNQFFVLEEHMGPDPQYVGKLHSNSDKGDGSVKYILTGEGAGTIFIIDDTTGDIHSTKSLDREQKTHYVLHAQAIDRRTNKPLEPESEFIIKVQDINDNAPKFTDGPYIVTVPEMSDMGTSVLQVTATDADDPTYGNSARVVYSILQGQPYFSVDPKTGVIRTALHNMDREAREHYSVVIQAKDMAGQVGGLSGSTTVNITLTDVNDNPPRFPQKHYQLYVPESAQVGSAVGKIKANDADTGSNADMTYSIINGDGMGIFSISTDKETREGILSLKKPLNYEKKKSYTLNIEGANTHLDFRFSHLGPFKDATMLKIIVGDVDEPPLFSMPSYLMEVYENAKIGTVVGTVLAQDPDSTNSLVRYFINYNVEDDRFFNIDANTGTIRTTKVLDREETPWYNITVTASEIDNPDLLSHVTVGIRVLDVNDNPPELAREYDIIVCENSKPGQVIHTISATDKDDFANGPRFNFFLDERLPVNPNFTLKDNEAAAAPSPSGFVHAREMGVCGPAMQKPSCPRLV

SEQ ID NO: 62463 - protein, 129 aa, Homo sapiens
MYHGMNPSNGDGFLEQQQQQQQPQSPQRLLAVILWFQLALCFGPAQLTGGFDDLQVCADPGIPENGFRTPSGGVFFEGSVARFHCQDGFKLKGATKRLCLKHFNGTLGWIPSDNSICVQEAASARLEPA

SEQ ID NO: 62464 - protein, 110 aa, Homo sapiens
  MOD_RES (1)..(1): Any amino acid
XTSQNLDSGTDLSFPWILNVLNLKAFDFYKVIESFIKAEGNLTREMIKHLERCEHRIMESLAWLSVILPYPGERNVMQEAKKKLNKQAMMDSHLSLLPLGHVLFVQSHFY

SEQ ID NO: 62465 - protein, 50 aa, Homo sapiens
MRMLVSGRRVKKWQLIIQLFATCFLASLMFFWEPIDNHIVSHMKSYSYRY

SEQ ID NO: 62466 - protein, 110 aa, Homo sapiens
MEGCVSNLMVCNLAYSGKLEELKESILADKSLATRTDQDSRTALHWACSAGHTEIVEFLLQLGVPVNDKDDAASKNRHEIAVMLLEGGANPDAKDHYEATAMHRAAAKDT

SEQ ID NO: 62467 - protein, 121 aa, Homo sapiens
MDFQRGKNLRYQLLQLVEPFGVISNHLILNKINEAFIEMATTEDAQAAVDYYTTTPALVFGKPVRVHLSQKYKRIKKPEGKPDQKFDQKQELGRVIHLSNLPHSGYSDSAVLKLAEPYGKI

SEQ ID NO: 62468 - protein, 321 aa, Homo sapiens
MAAGLARLLLLLGLSAGGPAPAGAAKMKVVEEPNAFGVNNPFLPQASRLQAKRDPSPVSDRFCAWTLGISVRSLPGPVHLFRLSGKCFSLVESTYKYEFCPFHNVTQHEQTFRWNAYSGILGIWHEWEIANNTFTGMWMRDGDACRSRSRQSKVELACGKSNRLAHVSEPSTCVYALTFETPLVCHPHALLVYPTLPEALQRQWDQVEQDLADELITPQGHEKLLRTLFEDAGYLKTPEENEPTQLEGGPDSLGFETLENCRKAHKELSKEIKRLKGLLTQHGIPYTRPTETSNLEHLGHETPRAKSPEQLRGDPGLRGSL

SEQ ID NO: 62469 - protein, 187 aa, Homo sapiens
  MOD_RES (1)..(1): Any amino acid
XIEKTDRRQSFASLALRKRYSYLTEPGMSPQSPCERTDIRMAIVADHLGLSWTELARELNFSVDEINQIRVENPNSLISQSFMLLKKWVTRDGKNATTDALTSVLTKINRIDIVTLLEGPIFDYGNISGTRSFADENNVFHDPVDDGPPVVTAEDASLEDSKLEDSVPLTEMPEAVDVDESQLENVC

SEQ ID NO: 62470 - protein, 117 aa, Homo sapiens
MAVQISKKRKFVADGIFKAELNEFLTRELAEDGYSGVEVRVTPTRTEIIILATRTQNVLGEKGRRIRELTAVVQKRFGFPEGSVELYAEKVATRGLCAIAQAESLRYKLLGGLAVRR

SEQ ID NO: 62471 - protein, 40 aa, Homo sapiens
  MOD_RES (1)..(1): Any amino acid
XAASAARGAAALRRSINQPVAFVRRIPWTAASRIIVHIAQ

SEQ ID NO: 62472 - protein, 553 aa, Homo sapiens
MSDSGSQLGSMGSLTMKSQLQITVISAKLKENKKNWFGPSPYVEVTVDGQSKKTEKCNNTNSPKWKQPLTVIVTPVSKLHFRVWSHQTLKSDVLLGTAALDIYETLKSNNMKLEEVVVTLQLGGDKEPTETIGDLSICLDGLQLESEVVTNGETTCSESASQNDDGSRSKDETRVSTNGSDDPEDAGAGENRRVSGNNSPSLSNGGFKPSRPPRPSRPPPPTPRRPASVNGSPSATSESDGSSTGSLPPTNTNTNTSEGATSGLIIPLTISGGSGPRPLNPVTQAPLPPGWEQRVDQHGRVYYVDHVEKRTTWDRPEPLPPGWERRVDNMGRIYYVDHFTRTTTWQRPTLESVRNYEQWQLQRSQLQGAMQQFNQRFIYGNQDLFATSQSKEFDPLGPLPPGWEKRTDSNGRVYFVNHNTRITQWEDPRSQGQLNEKPLPEGWEMRFTVDGIPYFVDHNRRTTTYIDPRTGKSALDNGPQIAYVRDFKAKVQYFRFWCQQLAMPQHIKITVTRKTLFEDSFQQIMSFSPQDLRRRLWVIFPGEEGLDYGGVAR

SEQ ID NO: 62473 - protein, 84 aa, Homo sapiens
  MOD_RES (1)..(1): Any amino acid
XDEVIGVSVSVRDREDVVQVWNVNASLVGEATVLEKIYELLPHITFKAVFYKLSQKLLLTIPVSEQNISAMVRASIPSLICCQP

SEQ ID NO: 62474 - protein, 689 aa, Homo sapiens
MFANLKYVSLGILVFQTTSLVLTMRYSRTLKEEGPRYLSSTAVVVAELLKIMACILLVYKDSKCSLRALNRVLHDEILNKPMETLKLAIPSGIYTLQNNLLYVALSNLDAATYQVTYQLKILTTALFSVSMLSKKLGVYQWLSLVILMTGVAFVQWPSDSQLDSKELSAGSQFVGLMAVLTACFSSGFAGVYFEKILKETKQSVWIRNIQLGFFGSIFGLMGVYIYDGELVSKNGFFQGYNRLTWIVVVLQPQGIGSPSVYHAVIVIFLEFFAWGLLTAPTLVVLHETFPKHTFLMNGLIQGVKGLLSFLSAPLIGALSDVWGRKSFLLLTVFFTCAPIPLMKISPWWYFAVISVSGVFAVTFSVVFAYVADITQEHERSMAYGLVSATFAASLVTSPAIGAYLGRVYGDSLVVVLATAIALLDICFILVAVPESLPEKMRPASWGAPISWEQADPFASLKKVGQDSIVLLICITVFLSYLPEAGQYSSFFLYLRQTIVLSLLMRSIGNKNTILLGLGFQILQLAWYGFGSEPWMMWAAGAVAAMSSITFPAVSALVSRTADADQQGVVQGMITGIRGLCNGLGPALYGFIFYIFHVELKELPITGTDLGTNTSPQHHFEQNSIIPGPPFLFGACSVLLALLVALFIPEHTNLSLRSSSWRKHCGSHSHPHNTQAPGEAKEPLLQDTNV

SEQ ID NO: 62475 - protein, 53 aa, Homo sapiens
MAELQMLLEEEIPGGRRALFDSYTNLERVADYCENNYIQLLSIFPFCEVSVSR

SEQ ID NO: 62476 - protein, 280 aa, Homo sapiens
MSEAGEEQPMETTGATENGHEAVPEGESPAGAGTGAAAGAGGATAAPPSGNQNGAEGDQINASKNEEDAGKMFVGGLSWDTSKKDLKDYFTKFGEVVDCTIKMDPNTGRSRGFGFILFKDAASVEKVLDQKEHRLDGRVIDPKKAMAMKKDPVKKIFVGGLNPEATEEKIREYFGEFGEIEAIELPMDPKLNKRRGFVFITFKEEEPVKKVLEKKFHTVSGSKCEIKVAQPKEVYQQQQYGSGGRGNRNRGNRGSGGGQGSTNYGKSQRRGGHQNNYKPY

SEQ ID NO: 62477 - protein, 89 aa, Homo sapiens
MAELSEPEGPVDWKERCVALESQLMKFRVQASKIRELLAEKMQQLERQVIDAERQAEKAFQQTESCSVAQAGVQWRDLGLLQPPPPGFK

SEQ ID NO: 62478 - protein, 35 aa, Homo sapiens
MLQACKMEGFPLVPPAARRRSACTSSCWTCSAAAT

SEQ ID NO: 62479 - protein, 178 aa, Homo sapiens
MAFLASGPYLTHQQKVLRLYKRALRHLESWCVQRDKYRYFACLMRARFEEHKNEKDMAKATQLLKEAEEEFWYRQHPQPYIFPDSPGGTSYERYDCYKVPEWCLDDWHPSEKAMYPDYFAKREQWKKLRRESWEREVRSTCTSLFLSYVDGVKFCSPQAEVQIPAMTVTLGPCFSDIL

SEQ ID NO: 62480 - protein, 648 aa, Homo sapiens
MISASRAAAARLVGAAASRGPTAARHQDSWNGLSHEAFRLVSRRDYASEAIKGAVVGIDLGTTNSCVAVMEGKQAKVLENAEGARTTPSVVAFTADGERLVGMPAKRQAVTNPNNTFYATKRLIGRRYDDPEVQKDIKNVPFKIVRASNGDAWVEAHGKLYSPSQIGAFVLMKMKETAENYLGHTAKNAVITVPAYFNDSQRQATKDAGQISGLNVLRVINEPTAAALAYGLDKSEDKVIAVYDLGGGTFDISILEIQKGVFEVKSTNGDTFLGGEDFDQALLRHIVKEFKRETDINLPYLTMDSSGPKHLNMKLTRAQFEGIVTDLIRRTIAPCQKAMQDAEVSKSDIGEVILVGGMTRMPKVQQTVQDLFGRAPSKAVNPDEAVAIGAAIQGGVLAGDVTDVLLLDVTPLSLGIETLGGVFTKLINRNTTIPTKKSQVFSTAADGQTQVEIKVCQGEREMAGDNKLLGQFTLIGIPPAPRGVPQIEVTFDIDANGIVHVSAKDKGTGREQQIVIQSSGGLSKDDIENMVKNAEKYAEEDRRKKERVEAVNMAEGIIHDTETKMEEFKDQLPADECNKLKEEISKMRELLARKDSETGENIRQAASSLQQASLKLFEMAYKKMASEREGSGSSGTGEQKEDQKEEKQ

SEQ ID NO: 62481 - protein, 1016 aa, Homo sapiens
MVAMAEAEAGVAVEVRGLPPAVPDELLTLYFENRRRSGGGPVLSWQRLGCGGVLTFREPADAERVLAQADHELHGAQLSLRPAPPRAPARLLLQGLPPGTTPQRLEQHVQALLRASGLPVQPCCALASPRPDRALVQLPKPLSEADVRVLEEQAQNLGLEGTLVSLARVPQARAVRVVGDGASVDLLLLELYLENERRSGGGPLEDLQRLPGPLGTVASFQQWQVAERVLQQEHRLQGSELSLVPHYDILEPEELAENTSGGDHPSTQGPRATKHALLRTGGLVTALQGAGTVTMGSGEEPGQSGASLRTGPMVQGRGIMTTGSGQEPGQSGTSLRTGPMGSLGQAEQVSSMPMGSLEHEGLVSLRPVGLQEQEGPMSLGPVGSAGPVETSKGLLGQEGLVEIAMDSPEQEGLVGPMEITMGSLEKAGPVSPGCVKLAGQEGLVEMVLLMEPGAMRFLQLYHEDLLAGLGDVALLPLEGPDMTGFRLCGAQASCQAAEEFLRSLLGSISCHVLCLEHPGSARFLLGPEGQHLLQGLEAQFQCVFGTERLATATLDTGLEEVDPTEALPVLPGNAHTLWTPDSTEEVRELLATLEGLDLDGEDWLPRELEEEGPQEQPEEEVTPGHEEEEPVAPSTVAPRWLEEEAALQLALHRSLEPQGQVAEQEEAAALRQALTLSLLEQPPLEAEEPPDGGTDGKAQLVVHSAFEQDVEELDRALRAALEVHVQEETVGPWRRTLPAELRARLERCHGVSVALRGDCTILRGFGAHPARAARHLVALLAGPWDQSLAFPLAASGPTLAGQTLKGPWNNLERLAENTGEFQEVVRAFYDTLDAARSSIRVVRVERVSHPLLQQQYELYRERLLQRCERRPVEQVLYHGTTAPAVPDICAHGFNRSFCGRNATVYGKGVYFARRASLSVQDRYSPPNADGHKAVFVARVLTGDYGQGRRGLRAPPLRGPGHVLLRYDSAVDCICQPSIFVIFHDTQALPTHLITCEHVPRASPDDPSGLPGRSPDT

SEQ ID NO: 62482 - protein, 71 aa, Homo sapiens
MSTGGDFGNPLRKFKLVFLGEQSVGKTSLITRFMYDSFDNTYQLFRRVAAALPGMESTQDRSREDMIDIKL

SEQ ID NO: 62483 - protein, 842 aa, Homo sapiens
MGYLRIFSPHPAKTGDGAQAEDLLLEVDLRDPVLQVEVGKFVSGTEMLHLAVLHSRKLCVYSVSGTLGNVEHGNQCQMKLMYEHNLQRTACNMTYGSFGGVKGRDLICIQSMDGMLMVFEQESYAFGRFLPGFLLPGPLAYSSRTDSFLTVSSCQQVESYKYQVLAFATDADKRQETEQQKLGSGKRLVVDWTLNIGEQALDICIVSFNQSASSVFVLGERNFFCLKDNGQIRFMKKLDWSPSCFLPYCSVSEGTINTLIGNHNNMLHIYQDVTLKWATQLPHIPVAVRVGCLHDLKGVIVTLSDDGHLQCSYLGTDPSLFQAPNVQSRELNYDELDVEMKELQKIIKDVNKSQGVWPMTEREDDLNVSVVVSPNFDSVSQATDVEVGTDLVPSVTVKVTLQNRVILQKAKLSVYVQPPLELTCDQFTFEFMTPDLTRTVSFSVYLKRSYTPSELEGNAVVSYSRPTDRNPDGIPRVIQCKFRLPLKLICLPGQPSKTASHKITIDTNKSPVSLLSLFPGFASQSDDDQVNVMGFHFLGGARITVLASKTSQRYRIQSEQFEDLWLITNELILRLQEYFEKQGVKDFACSFSGSIPLQEYFELIDHHFELRINGEKLEELLSERAVQFRAIQRRLLARFKDKTPAPLQHLDTLLDGTYKQVIALADAVEENQGNLFQSFTRLKSATHLVILLIALWQKLSADQVAILEAAFLPLQEDTQELGWEETVDAAISHLLKTCLSKSSKEQALNLNSQLNIPKDTSQLKKHITLLCDRLSKGGRLCLSTDAAAPQTMVMPGGCTTIPESDLEERSVEQDSTELFTNHRHLTAETPRPEVSPLQGVSE

SEQ ID NO: 62484 - protein, 142 aa, Homo sapiens
MRKSSSPSLSNCNSVLANKIFGIPLDELQQGGHPDNEVPFIVRHVVDYIEEHGGLEQQGLFQVNGNAETVEWLRQRYDSGEEVDLVKEADVPSAISLLRFFLQELPEPVIPGSLHIHLMQLSQDYNNEDEFGRKLRFLLQQL

SEQ ID NO: 62485 - protein, 92 aa, Homo sapiens
MAYQIVLELHFSHCAAMGAALLMLIENALITQSRLMLLESVLIFFNLLAVLSYLKFFNCQKHRSVCSVTCSPEQWLCWSSRSSCTYCSSTST

SEQ ID NO: 62486 - protein, 150 aa, Homo sapiens
MSYGSIARGGGLGSRGPFGGPSRQGCQPLECARCWTEYGIRHFPCPSPESKLQNRCVGKDGEGDLGPAGTPIVPRARKRGPGVAPEGSRMPEPTSSPTIGPRKDSAAGPHGRMAGPSTTRAKKRKPNFCPQETEVLVSKVSKHHQLLFGT

SEQ ID NO: 62487 - protein, 128 aa, Homo sapiens
MQSISFASGGDPDTTDYVAYVAKDPVNQRACHILECHNGMAQDVISTIGQAFELRFKQYLKNPSLNTSCESEEVHIDSHAEEREDHEYYNEIPGKQPPVGGVSDMRIKVQATEQMAYCPIQCEKLCYL

SEQ ID NO: 62488 - protein, 114 aa, Homo sapiens
MGELASESQGSKELGDVLFQMAEVHRQIQNQLEEMLKSFHNELLTQLEQKVELDSRYLSAALKKYQTEQRSKGDALDKCQAELKKLRKKSQGSKNPQKYSDKELQYIDAISNKQ

SEQ ID NO: 62489 - protein, 178 aa, Homo sapiens
PEHLLNTSDNVTVQCHTPRVIIQTVATEDITSSISQAELTVDSDIQSSDFPEPPDALEADTFPDEIHHPKMTVEPSFNDAHVSKFSDQNSTELMNSVMVRTEEEISDTDLKQEESPSDLASAYVTEGLESPTIEEQVDQTIDDETILIVPSPHGFIQASDVIDTESVLPLTTLTGTVI

SEQ ID NO: 62490 - protein, 103 aa, Homo sapiens
  MOD_RES (1)..(1): Any amino acid
XSQLKLDHYRAALRSCSLVLEHQPDNIKALFRKGKVLAQQGEYSEAIPILRAALKLEPSNKLPLPSADDPRRALKAGEEACGAAEHGDRLVPENAGQPQPAAC

SEQ ID NO: 62491 - protein, 817 aa, Homo sapiens
MAKFRGRDPRDHYDLLQRLGGGTYGEVFKARDKVSGDLVALKMVKMEPDDDVSTLQKEILILKTCRHANIVAYHGSYLWLQKLWICMEFCGAGSLQDIYQVTGSLSELQISYVCREVLQGLAYLHSQKKIHRDIKGANILINDAGEVRLADFGISAQIGATLARRLSFIGTPYWMAPEVAAVALKGGYNELCDIWSLGITAIELAELQPPLFDVHPLRVLFLMTKSGYQPPRLKEKGKWSAAFHNFIKVTLTKSPKKRPSATKMLSHQLVSQPGLNRGLILDLLDKLKNPGKGPSIGDIEDEEPELPPAIPRRIRSTHRSSSLGIPDADCCRRHMEFRKLRGMETRPPANTARLQPPRDLRSSSPRKQLSESSDDDYDDVDIPTPAEDTPPPLPPKPKFRSPSDEGPGSMGDDGQLSPGVLVRCASGPPPNSPRPGPPPSTSSPHLTAHSEPSLWNPPSRELDKPPLLPPKKEKMKRKGCALLVKLFNGCPLRIHSTAAWTHPSTKDQHLLLGAEEGIFILNRNDQEATLEMLFPSRTTWVYSINNVLMSLSGKTPHLYSHSILGLLERKETRAGNPIAHISPHRLLARKNMVSTKIQDTKGCRACCVAEGASSGGPFLCGALETSVVLLQWYQPMNKFLLVRQVLFPLPTPLSVFALLTGPGSELPAVCIGVSPGRPGKSVLFHTVRFGALSCWLGEMSTEHRGPVQVTQVEEDMVMVLMDGSVKLVTPEGSPVRGLRTPEIPMTEAVEAVAMVGGQLQAFWKHGVQVWALGSDQLLQELRDPTLTFRLLGSPRPVVVETRPVDDPTAPSNLYIQE

SEQ ID NO: 62492 - protein, 140 aa, Homo sapiens
MPYQYPALTPEQKKELSDIAHRIVAPGSIAKRLQSIGTENTEENRRFYRQLLLTADDRVNPCIGGVILFHETLYQKADDGRPFPQVIKSKGGVVGIKVDKGVVPLAGTNGETTTQGLDGLSERCAQYKKDGADFAKWRCV

SEQ ID NO: 62493 - protein, 173 aa, Homo sapiens
  MOD_RES (1)..(1): Any amino acid
XRMCMRHRSIETKLRQFTNALLESLINPLQERIEDWKKAANQLDKDHAKEYKRARHEIKKKSSDTLKLQKKARKGKGDLQPQLDSALQDVNDMYLLLEETEKQAVRRALIEERGRFCTFITFLQPVVNGELTMLGEITHLQGIIDDLVVLTAEPHKLPPASEQVIKDLKGSDY

SEQ ID NO: 62494 - protein, 138 aa, Homo sapiens
MELKSPEEEVVAALPEGMRPDSNLYGFPWELVICAAVVGFFAVLFFLWRSFRSVRSRLYVGREKKLALMLSGLIEEKSKLLEKFSLVQKEYEGYEVESSLKDASFEKEATEAQSLEFVEGSQISEATCEKLNRSNSEL

SEQ ID NO: 62495 - protein, 186 aa, Homo sapiens
MMAAVKSTEAHPSSNKDPTQGQKSALQGNSPDSEASRQRFRQFCYQEVTGPHEAFSKLWELCCQWLRPKTHSKEEILELLVLEQFLTILPEEIQTWVREQHPENGEEAVALVEDVQRAPGQQQQVCPGAMKRPRRSWLFLVVLNFMENSRPVSRTARSTGPWRKDSGSRVFCGPQNSVAPSSKAYS

SEQ ID NO: 62496 - protein, 185 aa, Homo sapiens
  MOD_RES (1)..(1): Any amino acid
XPRKMFRHTDSLFPILLQTLSDESDEVILKDLEVLAEIASSPAGQTDDPGPLDGPDLQASHSELQVPTPGRAGLLNTSGTKGLECSPSTPTMNSYFYKFMINLLKRFSSERKLLEVRGPFIIRSALAARFLLFLPRPRLFTFTPFKCQSSHLLFPFSLLLFLTFGSVRNEEGCPFILVADASDMK

SEQ ID NO: 62497 - protein, 209 aa, Homo sapiens
GKKSEAATEKQKLGYPPIAPFYCMKEDVLAYVFDSVWCKVVSCMEQLTRSHWEGFASDDESNVAVTRPDSESSCVLSELHPLVLPRVPQSKVLYITSNPMSLCQASRHQPNVNDLLVHGMPLQPRNLSLMDKLLDLDDKLLMRPGSSTILSTRNWPNRAVEFSTSSLSYTVQSTRRRNPPPRTLHPISTSHSCAETPRSVEEILRGARV

SEQ ID NO: 62498 - protein, 298 aa, Homo sapiens
GEKAKGGPPPGNAAGDTGQPAEDSDHGGKPPLPAEKPAPGPGLPPEPREQRDVERAGGNQAASQLEAEIKKIVAEAGRAEMLDHAVLLQVIKEQQVQQKRLLDQQEKLLAVIEEQHKEIHQQRQEDEEDKPRQVEVHQEPGAAVPRGQEAPEGKARETVENLPPLPLDPVLRAPGGRPAPSQDLNQRSLEHSEGPVGRDPAGPPDGGPDTEPRAAQAKLRDGQKDAAPRAAGTVKELPKGPEQVPVPDPAREAGGPEERLAEEFPGQSQDVTGGSQDRKKPGKEVAATGTSILKEANW

SEQ ID NO: 62499 - protein, 123 aa, Homo sapiens
  MOD_RES (1)..(1): Any amino acid
XGKSTEQGNHDQLKELYSTSAHWHGLLCDRRLFLDIPYQALDQGNRESLTATLEYVEEKTNVDSVFVNFQNDRNDRGALLRAFSYMGFEVVRPDHPALPPLDNVIFMVYPLERDVGHLPSEPP

SEQ ID NO: 62500 - protein, 130 aa, Homo sapiens
MACSLGGALAGPIIVEPHVTAVWGKNVSLKCLIEVNETITQISWEKIHGKSSQTVAVHHPQYGFSVQGEYQGRVLFKNYSLNDATITLHNIGFSDSGKYICKAVTFPLGNAQSSTTVTVLVEPTVSLIKG

SEQ ID NO: 62501 - protein, 225 aa, Homo sapiens
MDLDVVNMFVIAGGTLAIPILAFVASFLLWPSALIRIYYWYWRRTLGMQVRYVHHEDYQFCYSFRGRPGHKPSILMLHGFSAHKDMWLSVVKFLPKNLHLVCVDMPGHEGTTRSSLDDLSIDGQVKRIHQFVECLKLNKKPFHLVGTSMGGQVAGVYAAYYPSDVSSLCLVCPAGLQYSTDNQFVQRLKELQGSAAVEKIPLIPSTPEEMSEMLQLCSYVRFKVP

SEQ ID NO: 62502 - protein, 91 aa, Homo sapiens
MGETEKRIETHRIRCLSKLKMFLLAITCAFVSKTLSGSYMNSMLTQIERQFNIPTSLVGFINGSFEIGNLLLIIFVSYFGTKLHRPIMIGI

SEQ ID NO: 62503 - protein, 14 aa, Homo sapiens
MPKRGKKGAPFASS

SEQ ID NO: 62504 - protein, 68 aa, Homo sapiens
MSEIQGTVEFSVELHKFYNVDLFQRGYYQIRVTLKVSSRIPHRLSASIAGQTEVLNIHMSEQEPAQGK

SEQ ID NO: 62505 - protein, 114 aa, Homo sapiens
MTQNLGGPIRAYILAHKDAIQLWRTLMGPTRVFRARHVAPDSIRGSFGLTDTRNTTHGSDSVVSASREIAAFFPDFSEQRWYEEEEPQLRCGPVCYSPEGGVHYVAGTGGLGPA

SEQ ID NO: 62506 - protein, 166 aa, Homo sapiens
MANSGCKDVTGPDEESFLYFAYGSNLLTERIHLRNPSAAFFCVARLQDFKLDFGNSQGKTSQTWHGGIATIFQSPGDEVWGVVWKMNKSNLNSLDEQEGVKSGMYVVIEVKVATQEGKEITCRSYLMTNYESAPPSPQYKKVEKETSHCLSESGKSPLQAQDKNVG

SEQ ID NO: 62507 - protein, 134 aa, Homo sapiens
MEYDEKLARFRQAHLNPFNKQSGPRQHEQGPGEEVPDVTPEEALPELPPGEPEFRCPERVMDLGLSEDHFSRPVGLFLASDVQQLRQAIEECKQVILELPEQSEKQKDAVVRLIHLRLKLQELKDPNEDEPNIR

SEQ ID NO: 62508 - protein, 321 aa, Homo sapiens
  MOD_RES (1)..(1): Any amino acid
XFNGGMATTSTEIELPDVEPAAFLALLKFLYSDEVQIGPETVMTTLYTAKKYAVPALEAHCVEFLKKNLRADNAFMLLTQAGVQWHDLSSLQPPPPAFKRFSCLSLHSSWDYRPPPPRLAKKKEKKKPERTFSLSLRKCQARLFDEPQLASLCLENIDKNTADAITAEGFTDIDLDTLVAVLERDTLGIREVRLFNAVVRWSEAECQRQQLQVTPENRRKVLGKALGLIRFPLMTIEEFAAGPAQSGILVDREVVSLFLHFTVNPKPRVEFIDRPRCCLRGKECSINRFQQVESRWGYSGTSDRIRFSVNKRIFVVGFGLY

SEQ ID NO: 62509 - protein, 42 aa, Homo sapiens
MGLSFFSKHLPIQEGQPWALKTPADIISTVEFNHTGELLATE

SEQ ID NO: 62510 - protein, 263 aa, Homo sapiens
MAEIKEKICDYLFNVSDSSALNLAKNIGLTKARDINAVLIDMERQGDVYRQGTTPPIWHLTDKKRERMQIKRNTNSVPETAPAAIPETKRNAEFLTCNIPTSNASNNMVTTEKVENGQEPVIKLENRQEARPEPARLKPPVHYNGPSKAGYVDFENGQWATDDIPDDLNSIRAAPGEFRAIMEMPSFYSHGLPRCSPYKKLTECQLKNPISGLLEYAQFASQTCEFNMIEQSGPPHEPRLSSMAESFPQLKLEARKWPSRMQL

SEQ ID NO: 62511 - protein, 146 aa, Homo sapiens
MESPQLHCILNSNSVACSFAVGAGFLAFLSCLAFLVLDTQETRIAGTRFKTAFQLLDFILAVLWAVVWFMGFCFLANQWQHSPPKEFLLGSSSAQAAIAFTFFSILVWASPQPSPSPDLPSPSQPSARAFLPTDIPGLPGIPGPPK

SEQ ID NO: 62512 - protein, 188 aa, Homo sapiens
MAAAAVSGALGRAGWRLLQLRCLPVARCRQALVPRAFHASAVGLRSSDEQKQQPPNSFSQQHSETQGAEKPDPESSHSPPRYTDQGGEEEEDYESEEQLQHRILTAALEFVPAHGWTAEAIAEGAQSLGLSSAAASMFGKDGSELILHFVTQCNTRLTRVLEEEQKLVQLGQAEPSASSCSLTTSRPA

SEQ ID NO: 62513 - protein, 169 aa, Homo sapiens
MKKMSNIYESAANTLGIFNSPCLTKVELRVACKGISDRDALSKPDPCVILKMQSHGQWFEVDRTEVIRTCINPVYSKLFTVDFYFEEVQRLRFEVHDISSNHNGLKEADFLGGMECTLGQIVSQRKLSKSLLKHGNTAGKSSITVIAEELSGNDDYVELAFNARKLDDK

SEQ ID NO: 62514 - protein, 162 aa, Homo sapiens
MLALASHLSTVESEKQKLRAQVRRLCQENQWLRDELAGTQQRLQRSEQAVAQLEEEKKHLEFLGQLRQYDEDGHTSEEKEGDATKDSLDDLFPNEEEEDPSNGLSRGQGATAAQQGGYEIPARLRTLHNLVIQYAAQGRYEVAVPLCKQALEDLERTSGRGH

SEQ ID NO: 62515 - protein, 68 aa, Homo sapiens
MDSKKRSSTEAEGSKERGLVHIWQAGSFPITPERLPGWGGKTVLQAALGVKHGVLLTEGMNSNSQCIL

SEQ ID NO: 62516 - protein, 287 aa, Homo sapiens
MKTLETQPLAPDCCPSDQDPAPAHPSPHASPMNKNADSELMPPPPERGDPPRLSPDPVAGSAVSQELREGDPVSLSTPLETEFGSPSELSPRIEEQELSENTSLPAEEANGSLSEEEANGPELGSGKAMEDTSGEPAAEDEGDTAWNYSFSQLPRFLSGSWSEFSTQPENFLKGCKWAPDGSCILTNSADNILRIYNLPPELYHEGEQVEYAEMVPVLRMVEGDTIYDYCWYSLMSSAQPDTSYTGVSVSMSLSAWPAAAGRTRFISGTHSLESSGLPFAPTTTWMS

SEQ ID NO: 62517 - protein, 270 aa, Homo sapiens
  MOD_RES (1)..(1): Any amino acid
XLNLQAADTVVIFDSDWNPHQEEDEVPDDETLNQMIARREEEFDLFMRMDMDRRREDARNPKRKPRLMEEDELPSWIIKDDAEVERLTCEEEEEKIFGRGSRQRRDVDYSDALTEKQWLRAIEDGNLEEMEEEVRLKKRKRRRNVDKDPAKEDVEKAKKRRGRPPAEKLSPNPPKLTKQMNAIIDTVINYKDSSGRQLSEVFIQLPSRKELPEYYELIRKPVDFKKIKERIRNHKYRSLGDLEKDVMLLCHNAQTFNLEGSQIYEDSIVL

SEQ ID NO: 62518 - protein, 148 aa, Homo sapiens
MCRTNRGTVGGYFLAGRSMVWWPVGASLFASNIGSGHFVGLAGTGAASGLAVAGFEWNALFVVLLLGWLFAPVYLTAGVITMPQYLRKRFGGRRIRLYLSVLSLFLYIFTKISVDMFSGAVFIQQALGWNIYASVIALLGITMIYTVT

SEQ ID NO: 62519 - protein, 141 aa, Homo sapiens
  MOD_RES (1)..(1): Any amino acid
XRPLVDRLEPGELIPNGPFSFYGASRTILLLGRPDGKGGHEIGSKSASRWDWDPRTGCRRAELGLPKGNADLSPTPTWTRIRRQTPRACAPGRRAAKRRPGQPRVRTAVGDARSRGEGGREHSRVKEVKRPRALPGQPGGF

SEQ ID NO: 62520 - protein, 337 aa, Homo sapiens
MAETLFWTPLLVVLLAGLGDTEAQQTTLHPLVGRVFVHTLDHETFLSLPEHVAVPPAVHITYHAHLQGHPDLPRWLRYTQRSPHHPGFLYGSATPEDRGLQVIEVTAYNRDSFDTTRQRLVLEIGDPEGPLLPYQAEFLVRSHDAEEVLPSTPASRFLSALGGLWEPGELQLLNVTSALDRGGRVPLPIEGRKEGVYIKVDKSVPEPADEVPTPGDGILEHDPFFCPPTEAPDRDFLVDALVTLLVPLLVALLLTLLLAYVMCCRREGRLKRDLATSDIQMVHHCTIHGNTEELRQMAASREVPRPLSTLPMFNVHTGERLPPRVDSAQVPLILDQH

SEQ ID NO: 62521 - protein, 351 aa, Homo sapiens
  MOD_RES (1)..(1): Any amino acid
XSNYGSPRPAHANMNANAAAGLAPEHIPTPGAALSWQAAIDAARQAKLMGSAGNATISTVSSTQRKRQQYGKPKKQGSTTATRPPRALLCLTLKNPIRRACISIVEWKPFEIIILLTIFANCVALAIYIPFPEDDSNATNSNLERVEYLFLIIFTVEAFLKVIAYGLLFHPNAYLRNGWNLLDFIIVVVGLFSAILEQATKADGANALGGKGAGFDVKALRAFRVLRPLRLVSGVPSLQVVLNSIIKAMVPLLHIALLVLFVIIIYAIIGLELFMGKMHKTCYNQEGIAEDDPSPCALETGHGRQCQNGTVCKPGWDGPKHGITNFDNFAFAMLTVFQCITMEGWTDVLYW

SEQ ID NO: 62522 - protein, 9 aa, Homo sapiens
MDNGDWGYM

SEQ ID NO: 62523 - protein, 146 aa, Homo sapiens
MLKEDCASELKVHLAKSLPLPSSVNRPRIDLIVFVVNLHSKYSLQNTEESLRHVDASFFLGKVCFLATGAGRESHCSIHRHTVVKLAHTYQSPLLYCDLEVEGFRATMAQRLVRVLQICAGHVPGVSALNLLSLLRSSEGPSLEDL

SEQ ID NO: 62524 - protein, 83 aa, Homo sapiens
MNQPCNSMEPRVMDDDMLKLAVGDQGPQEEAGQLAKQEGILFKDVLSLQLDFRRKTADEPKGEQDDGQEDSQEDILRIDNLWQ

SEQ ID NO: 62525 - protein, 276 aa, Homo sapiens
MEGSPSLRRMTVMREKGRRQAVRGPAFMFNDRGTSLTAEEERFLDAAEYGNIPVVRKMLEESKTLNVNCVDYMGQNALQLAVGNEHLEVTELLLKKENLARIGDALLLAISKGYVRIVEAILNHPGFAASKRLTLSPCEQELQDDDFYAYDEDGTRFSPDITPIILAAHCQKYEVVHMLLMKGARIERPHDYFCKCGDCMEKQRHDSFSHSRSRINAYKGLASPAYLSLSSEDPVLTALELSNELAKLANIEKEFKISEQVENSKFRLETVEKHLE

SEQ ID NO: 62526 - protein, 55 aa, Homo sapiens
FVAAGFTTFDLISRMSIDDIRRIGVILIGHQRRIVSSIQTLRLHMMHIQEKGFHV

SEQ ID NO: 62527 - protein, 244 aa, Homo sapiens
MASPTSTNPAHAHFESFLQAQLCQDVLSSFQELCGALGLEPGGGLPQYHKIKDQLNYWSAKSLWTKLDKRAGQPVYQQGRACTSTKCLVVGAGPCGLRVAVELALLGARVVLVEKRTKFSRHNVLHLWPFTIHDLRALGAKKFYGRFCTGTLDHISIRQLQLLLLKVALLLGVEIHWGVTFTGLQPPPRKGSGWRAQLQPNPPAQLANYEFDVLISAAGGKFVPEGFKVREMRGKLAIGITANF

SEQ ID NO: 62528 - protein, 276 aa, Homo sapiens
METGVRIYNVEPLMEKGHLDHEQVGSMGLVEMLHRSNLLALVGGGSSPKFSEISVLIWDDAREGKDSKEKLVLEFTFTKPVLSVRMRHDKIVIVLKNRIYVYSFPDNPRKLFEFDTRDNPKGLCDLCPSLEKQLLVFPGHKCGSLQLVDLASTKPGTSSAPFTINAHQSDIACVSLNQPGTVVASASQKGTLIRLFDTQSKEKLVELRRGTDPATLYCINFSHDSSFLCASSDKGTVHIFALKDTRLNRRSAAACRLARVGKVGPMIGQYVDSQWS

SEQ ID NO: 62529 - protein, 90 aa, Homo sapiens
  MOD_RES (1)..(1): Any amino acid
XKTYHALSNLPKARAALTSARTTANAIYCPPKLQATLDMQSGIIHAAEEKDWKTAYSYFYEAFEGYDSIDSPKAITSLKYMLLCKIMLNT

SEQ ID NO: 62530 - protein, 333 aa, Homo sapiens
MAAGLARLLLLLGLSAGGEWPGRPRPQAPRALCTPASPLTVSLPVGPAPAGAAKMKVVEEPNAFGVNNPFLPQASRLQAKRDPSPVSGPVHLFRLSGKCFSLVESTYKYEFCPFHNVTQHEQTFRWNAYSGILGIWHEWEIANNTFTGMWMRDGDACRSRSRQSKVELACGKSNRLAHVSEPSTCVYALTFETPLVCHPHALLVYPTLPEALQRQWDQVEQDLADELITPQGHEKLLRTLFEDAGYLKTPEENEPTQLEGGPDSLGFETLENCRKAHKELSKEIKRLKGLLTQHGIPYTRPTETSNLEHLGHETPRAKSPEQLRGDPGLRGSL

SEQ ID NO: 62531 - protein, 156 aa, Homo sapiens
MPVPWFLLSLALGRSPVVLSLERLVGPQDATHCSPGLSCRLWDSDILCLPGDIVPAPGPVLAPTHLQTELVLRCQKETDCDLCLRVAVHLAVHGHWEEPEDEEKFGGAADSGVEEPRNASLQAQVVLSFQAYPTARCVLLEVQVPAALVQFGLCGI

SEQ ID NO: 62532 - protein, 336 aa, Homo sapiens
  MOD_RES (1)..(1): Any amino acid
XVCQTPAIADIVILVDGSWSIGRFNFRLVRHFLENLVTAFDVGSEKTRIGVKNADVNELQEIASEPDSTHVYNVAEFDLMHTVVESLTRTLCSRVEEQDREIKASAHAITGPPTELITSEVTARSFMVNWTHAPGNVEKYRVVYYPTRGGKPDEVVVDGTVSSTVLKNLMSLTEYQIAVFAIYAHTASEGLRGTETTLALPMASDLLLYDVTENSMRVKWDAVPGASGYLILYAPLTEGLAGDEKEMKIGETHTDIELSGLLPNTEYTVTVYAMFGEEASDPVTGQETTLALSPPRNLRISNVGSNSARLTWDPTSRQINGYRIVYNNADGTEINE

SEQ ID NO: 62533 - protein, 599 aa, Homo sapiens
  MOD_RES (1)..(1): Any amino acid
XRETLTYAQAQRIVEVDIDGRLHRISIYDPLKIITEDELTAQDITECNSNKENSEQPQFPGKSKKPSSKGKKKESCSKHASGTSFHLPQPSFRMVDSGIQPEAPPLPAAYYRYIEKPPEDLDAEVEYDMDEEDLAWLDMVNEKRRVDGHSLVSADTFELLVDRLEKESYLESRSSGAQQSLIDEDAFCCVCLDDECHNSNVILFCDICNLAVHQECYGVPYIPEGQWLCRCCLQSPSRPVDCILCPNKGGAFKQTSDGHWAHVVCAIWIPEVCFANTVFLEPIEGIDNIPPARWKLTCYICKQKGLGAAIQCHKVNCYTAFHVTCAQRAGLFMKIEPMRETSLNGTIFTVRKTAYCEAHSPPGAATARRKGDSPRSISETGDEEGLKEGDGEEEEEEEVEEEEQEAQGGVSGSLKGVPKKSKMSLKQKIKKEPEEAGQDTPSTLPMLAVPQIPSYRLNKICSGLSFQRKNQFMQRLHNYWLLKRQARNGVPLIRRLHSHLQSQRNAEQREQDEKTSAVKEELKYWQKLRHDLERARLLIELIRKREKLKREQVKVQQAAMELELMPFNVLLRTTLDLLQEKDPAHIFAEPVNLSEVLYV

SEQ ID NO: 62534 - protein, 42 aa, Homo sapiens
MEVPTAYMISPKEREKAFCLNSSMETLILLGLKSENTMLLRC

SEQ ID NO: 62535 - protein, 93 aa, Homo sapiens
MAANVAHGLQQNVLYVDSNGGLTASRLLQLLQAKTQDEEEQAEALRRIQVVHAFDIFQMLDVLQELRGTVAQQDGIPEHLNHIPHCLHVHLPC

SEQ ID NO: 62536 - protein, 334 aa, Homo sapiens
MERRRITSAARRSYVSSGEMMVGGLAPGRRLGPGTRLSLARMPPPLPTRVDFSLAGALNAGFKETRASERAEMMELNDRFASYIEKVRFLEQQNKALAAELNQLRAKEPTKLADVYQAELRELRLRLDQLTANSARLEVERDNLAQDLATVRQKLQDETNLRLEAENNLAAYRQEADEATLARLDLERKIESLEEEIRFLRKIHEEEVRELQEQLARQQVHVELDVAKPDLTAALKEIRTQYEAMASSNMHEAEEWYRSKFADLTDAAARNAELLRQAKHEANDYRRQLQSLTCDLESLRGTEYQDLLNVKLALDIEIATYRKLLEGEENRITI

SEQ ID NO: 62537 - protein, 38 aa, Homo sapiens
MAKSAEVKLAIFGRAGVGKSALVVRFLTKRFIWEYDPT

SEQ ID NO: 62538 - protein, 35 aa, Homo sapiens
SCPMIPLYRNLPDHSAATKPSLFLFLVSLLHIFFK

SEQ ID NO: 62539 - protein, 210 aa, Homo sapiens
MDLHLFDYSEPGNFSDISWPCNSSDCIVVDTVMCPNMPNKSVLLYTLSFIYIFIFVIGMIANSVVVWVNIQAKTTGYDTHCYILNLAIADLWVVLTIPVWVVSLVQHNQWPMGELTCKVTHLIFSINLFGSIFFLTCMSVDRYLSITYFTNTPSSRKKMVRRVVCILVWLLAFCVSLPDTYYLKTVTSASNNETYCRSFYPEHSIKEWLI

SEQ ID NO: 62540 - protein, 64 aa, Homo sapiens
MDAFTRFTNQTQGRDRLFRATQYTCMLLRYLLEPKAGKEKVVMKLKKLESSVSTGRKYKIDLCL

SEQ ID NO: 62541 - protein, 45 aa, Homo sapiens
MADPKYADLPGIARNEPDVYETSDLPEDDQAEFDAFAQIFKTLLE

SEQ ID NO: 62542 - protein, 780 aa, Homo sapiens
GQKQRVAIARALIRNPKILLLDMATSALDNESEAMVQEVLSKIQHGHTIISVAHRLSTVRAADTIIGFEHGTAVERGTHEELLERKGVYFTLVTLQSQGNQALNEEDIKDATEDDMLARTFSRGSYQDSLRASIRQRSKSQLSYLVHEPPLAVVDHKSTYEEDRKDKDIPVQEEVEPAPVRRILKFSAPEWPYMLVGSVGAAVNGTVTPLYAFLFSQILGTFSIPDKEEQRSQINGVCLLFVAMGCVSLFTQFLQGYAFAKSGELLTKRLRKFGFRAMLGQDIAWFDDLRNSPGALTTRLATDASQVQGAAGSQIGMIVNSFTNVTVAMIIAFSFSWKLSLVILCFFPFLALSGATQTRMLTGFASRDKQALEMVGQITNEALSNIRTVAGIGKERRFIEALETELEKPFKTAIQKANIYGFCFAFAQCIMFIANSASYRYGGYLISNEGLHFSYVFRVISAVVLSATALGRAFSYTPSYAKAKISAARFFQLLDRQPPISVYNTAGEKWDNFQGKIDFVDCKFTYPSRPDSQVLNGLSVSISPGQTLAFVGSSGCGKSTSIQLLERFYDPDQGKVAISSLISVTRNVCLLNSHHPMIDGHDSKKVNVQFLRSNIGIVSQEPVLFACSIMDNIKYGDNTKEIPMERVIAAAKQAQLHDFVMSLPEKYETNVGSQGSQLSRGEKQRIAIARAIVRDPKILLLDEATSALDTESEKTVQVALDKAREGRTCIVIAHRLSTIQNADIIAVMAQGVVIEKGTHEELMAQKGAYYKLVTTGSPIS

SEQ ID NO: 62543 - protein, 215 aa, Homo sapiens
SLYSEKEVYSRSAAPGSLGYQWLSDGSGVFEIAEASGVRTGTKIIIHLKSDCKEFSSEARVRDVVTKYSNFVSFPLYLNGRRMNTLQAIWMMDPKDVREWQHEEFYRYVAQAHDKPRYTLHYKTDAPLNIRSIFYVPDMKPSMFDVSRELGSSVALYSRKVLIQTKATDILPKWLRFIRGVVDSEDIPLNLSRELLQESALIRKLRDVLQQRLIK

SEQ ID NO: 62544 - protein, 191 aa, Homo sapiens
  MOD_RES (1)..(1): Any amino acid
XVLYSGWLRKSPPEKKLRLFAWRKRWFILRRGQTSSDPDVLEYYKNDGSKKPLRTINLNLCEQLDVDVTLNFNKKEIQKGYMFDIKTSERTFYLVAETREDMNEWVQSICQICGFRQEESTAEPSCSHQHLPQEQEPTSEPPVSHCVPPTWPIPAPPGCLRSHQHASQRAEHASFLRQVHPAWWRECQPAC

SEQ ID NO: 62545 - protein, 58 aa, Homo sapiens
RSQSGGYSDRSSGGSYRDSYDSYEAGQRAEARGIPGRPQTASRLASSAVASRVLSILC

SEQ ID NO: 62546 - protein, 170 aa, Homo sapiens
MDADEGQDMSQVSGKESPPVSDTPDEGDEPMPIPEDLSTTSGGQQSSKSDRVVGERPFQCNQCGASFTQKGNLLRHIKLHSGEKPFKCHLCNYACRRRDALTGHLRTHSVIKEETNHSEMAEDLCKIGSERSLVLDRLASNVAKRKSSMPQKFLGDKGLSDTPYDSSASY

SEQ ID NO: 62547 - protein, 405 aa, Homo sapiens
MLFPLQVAAVTSSVRDDPLEHCVSPRTRARSPEICKMADNLDEFIEEQKARLAEDKAELESDPPYMEMKGKLSAKLSENSKILISMAKENIPPNSQQTRGSLGIDYGLSLPLGEDYERKKHKLKEELRQDYRRYLTQERLKLERNKEYNQFLRGKEESSEKFRQVEKSTEPKSQRNKKPIGQVKPDLTSQIQTSCENSEGPRKDVLTPSEAYEELLNQRRLEEDRYRQLDDEIELRNRRIIKKANEEVGISNLKHQRFASKAGIPDRRFHRFNEDRVFDRRYHRPDQDPEVSEEMDERFRYESDFDRRLSRVYTNDRMHRNKRGNMPPMEHDGDVIEQSNIRISSAENKSAPDNETSKSANQDTCSPFAGMLFGGEDRELIQRRKEKYRLELLEQMAEQQRNKRR

SEQ ID NO: 62548 - protein, 208 aa, Homo sapiens
MADMQNLVERLERAVGRLEAVSHTSDMHRGYADSPSKAGAAPYVQAFDSLLAGPVAEYLKISKEIGGDVQKHAEMVHTGLKLERALLVTASQCQQPAENKLSDLLAPISEQIKEVITFREKNRGSKLFNHLSAVSESIQALGWVAMAPKPGPYVKEMNDAAMFYTNRVLKEYKDVDKKHVDWVKAYLSIWTELQAYIKEFHTTGLAWS

SEQ ID NO: 62549 - protein, 655 aa, Homo sapiens
QREELTKRREKLSKRREKIVKENGEGDKNVANINEEMESLTANIDYINDSISDCQANIMQMEEAKEEGETLDVTAVINACTLTEARYLLDHFLSMGINKGLQAAQKEAQIKVLEGRLKQTEITSATQNQLLFHMLKEKAELNPELDALLGHALQENVEDSTDEDAPLNSPGSEGSTLSSDLMKLCGEVKPKNKARRRTTTQMELLYADSSELASDTSTGDASLPGPLTPVAEGQEIGMNTETSGTSAREKELSPPPGLPSKIGSISRQSSLSEKKIPEPSPVTRRKAYEKAEKSKAKEQKQGIINPFPASKGIRAFPLQCIHIAEGHTKAVLCVDSTDDLLFTGSKDRTCKVWNLVTGQEIMSLGGHPNNVVSVKYCNYTSLVFTVSTSYIKVWDIRDSAKCIRTLTSSGQVTLGDACSASTSRTVAIPSGENQINQIALNPTGTFLYAASGNAVRMWDLKRFQSTGKLTGHLGPVMCLTVDQISSGQDLIITGSKDHYIKMFDVTEGALGTVSPTHNFEPPHYDGIEALTIQGDNLFSGSRDNGIKKWDLTQKDLLQQVPNAHKDWVCALGVVPDHPVLLSGCRGGILKVWNMDTFMPVGEMKGHDSPINAICVNSTHIFTAADDRTVRIWKARNLQDGQISDTGDLGEDIASN

SEQ ID NO: 62550 - protein, 226 aa, Homo sapiens
MEKVPGEMEIERRERSEELSEAERKAVQAMWARLYANCEDVGVAILVRFFVNFPSAKQYFSQFKHMEDPLEMERSPQLRKHACRVMGALNTVVENLHDPDKVSSVLALVGKAHALKHKVEPVYFKPTGHTALFGAVGPLTPPPSLAAPRAEGRVLKTLLDAPFLGAKEAGGIPDSTSPKEASVAARVPPWSCWEAALAAWMLTPARRAERGPLFLAFLLTVRERPS

SEQ ID NO: 62551 - protein, 137 aa, Homo sapiens
MSGARSKLALFLCGCYVVALGAHTGEESVADHHEAEYYVAAVYEHPSILSLNPLALISRQEALELMNQNLDIYEQQVMTAAQKDVQIIVFPEDGIHGFNFTRTSIYPFLDFMPSPQVVRWNPCLEPHRFNDTESLTL

SEQ ID NO: 62552 - protein, 181 aa, Homo sapiens
MEAEEAQRGASPPISAIEEFSIIPEAPMRSSQVSALGLEAQEDEDPSYKWREEHRLSATQQNSRGPAVEKHPGPSDTVVFREKKPKEVMGGFSRRCSKLINSSQLLYQEYSDVVLNKEIQSQQRLESLSETPGPSSPRQPRKALVSSESYLQRLSMASSGSLWQEIPVVRNSTVLLSMTHE

SEQ ID NO: 62553 - protein, 946 aa, Homo sapiens
MKILILGIFLFLCSTPAWAKEKHYYIGIIETTWDYASDHGEKKLISVDTEHSNIYLQNGPDRIGRLYKKALYLQYTDETFRTTIEKPVWLGFLGPIIKAETGDKVYVHLKNLASRPYTFHSHGITYYKEHEGAIYPDNTTDFQRADDKVYPGEQYTYMLLATEEQSPGEGDGNCVTRIYHSHIDAPKDIASGLIGPLIICKKDSLDKEKEKHIDREFVVMFSVVDENFSWYLEDNIKTYCSEPEKVDKDNEDFQESNRMYSVNGYTFGSLPGLSMCAEDRVKWYLFGMGNEVDVHAAFFHGQALTNKNYRIDTINLFPATLFDAYMVAQNPGEWMLSCQNLNHLKAGLQAFFQVQECNKSSSKDNIRGKHVRHYYIAAEEIIWNYAPSGIDIFTKENLTAPGSDSAVFFEQGTTRIGGSYKKLVYREYTDASFTNRKERGPEEEHLGILGPVIWAEVGDTIRVTFHNKGAYPLSIEPIGVRFNKNNEGTYYSPNYNPQSRSVPPSASHVAPTETFTYEWTVPKEVGPTNADPVCLAKMYYSAVEPTKDIFTGLIGPMKICKKGSLHANGRQKDVDKEFYLFPTVFDENESLLLEDNIRMFTTAPDQVDKEDEDFQESNKMHWTFNVECLTTDHYTGGMKQKYTVNQCRRQSEDSTFYLGERTYYIAAVEVEWDYSPQREWEKELHHLQEQNVSNAFLDKGEFYIGSKYKKVVYRQYTDSTFRVPVERKAEEEHLGILGPQLHADVGDKVKIIFKNMATRPYSIHAHGVQTESSTVTPTLPGETLTYVWKIPERSGAGTEDSACIPWAYYSTVDQVKDLYSGLIGPLIVCRRPYLKVFNPRRKLEFALLFLVFDENESWYLDDNIKTYSDHPEKVNKDDEEFIESNKMHAINGRMFGNLQGLTMHVGDEVNWYLMGMGNEIDLHTVHFHGHSFQYKHLLRLTGEYGM

SEQ ID NO: 62554 - protein, 113 aa, Homo sapiens
MRTEPLCGASPLLVPGDPYSVVVLLQGYAEPEGVGDAVRADGSVTLVLPQTRGPASSHRESPRGSGGAEAALEEAARGPILVDTGGPWAREALLGALAGQGVAPGDVTLVVGT

SEQ ID NO: 62555 - protein, 360 aa, Homo sapiens
MSKSKVDNQFYSVEVGDSTFTVLKRYQNLKPIGSGAQGIVCAAYDAVLDRNVAIKKLSRPFQNQTHAKRAYRELVLMKCVNHKNIISLLNVFTPQKTLEEFQDVYLVMELMDANLCQVIQMELDHERMSYLLYQMLCGIKHLHSAGIIHRDLKPSNIVVKSDCTLKILDFGLARTAGTSFMMTPYVVTRYYRAPEVILGMGYKENDIDQWNKVIEQLGTPCPEFMKKLQPTVRNYVENRPKYAGLTFPKLFPDSLFPADSEHNKLKASQARDLLSKMLVIDPAKRISVDDALQHPYINVWYDPAEVEAPPPQIYDKQLDEREHTIEEWKELIYKEVMNSEEKTKNGVVKGQPSPSAQVQQ

SEQ ID NO: 62556 - protein, 193 aa, Homo sapiens
  MOD_RES (1)..(1): Any amino acid
XSVGPPVAVPEPIGFPTRAHPTLQAPSLEDVTKQYMLNLHSGEVPAPVPVDMPCLPLAAPPSAEAKPPEAARPADEPTPASKCCSKPQVDMRKHVAMTLLDTEQSYVESLRTLMQVGLGAHSPENGLSEPRRLSDGCEQTPFMDKGLRPESRVPGIRRLSMKNPQHGHSREGGRLLPGKRECRGARPPQGRRP

SEQ ID NO: 62557 - protein, 230 aa, Homo sapiens
MTARRELTSVYMELRHLQIMLAEGANAAYLQLLNLFAYGTYPDYIANKESLPELSTAQQNKLKHLTIVSLASRMKCIPYSVLLKDLEMRNLRELEDLIIEAVYTDIIQGKLDQRNQLLEVDFCIGRDIRKKDINNIVKTLHEWCDGCEAVLLGIEQQVLRANQYKENHNRTQQQVEAEVTNIKKTLKATASSSAQEMEQQLAERECPPHAEQRQPTKKMSKVKGLVSSRH

SEQ ID NO: 62558 - protein, 19 aa, Homo sapiens
MSLPLTEEQRKKIEENRQK

SEQ ID NO: 62559 - protein, 195 aa, Homo sapiens
MDLKTMENLGLAQNCTISIQDYEVFRCEDSLDERKIKGVIELRKSLLSALRTYEPYGSLVQQIRILLLGPIGAGKSSFFNSVRSVFQGHVTHQALVGTNTTGISEKYRTYSIRDGKDGKYLPFILCDSLGLSEKEGGLCRDDIFYILNGNIRDRYQFNPMESIKLNHHDYIDSPSLKDRIHCVAFVFDASSIQYF

SEQ ID NO: 62560 - protein, 291 aa, Homo sapiens
MIQLTATPVSALVDEPVHIRATGLIPFQMVSFQASLEDENGDMFYSQAHYRANEFGEVDLNHASSLGGDYMGVHPMGLFWSLKPEKLLTRLLKRDVMNRPFQVQVKLYDLELIVNNKVASAPKASLTLERWYVAPGVTRIKVREGRLRGALFLPPGEGLFPGVIDLFGGLGGLLEFRASLLASRGFASLALAYHNYEDLPRKPEVTDLEYFEEAANFLLRHPKVFGSGVGVVSVCQGVQIGLSMAIYLKQVTATVLINGTNFPFGIPQAQTAKAGGNISVSKEEAWKPVGP

SEQ ID NO: 62561 - protein, 104 aa, Homo sapiens
MGCTLSAEERAALERSKAIEKNLKEDGISAAKDVKLLLLGAGESGKSTIVKQMKIIHEDGFSGEDVKQYKPVVYSNTIQSLAAIVRAMDTLGIEYGDKERKVGP

SEQ ID NO: 62562 - protein, 149 aa, Homo sapiens
VVVGFSAALGYRYYGTTKVCWLSTENNFIWSFIGPACLIILVNLLAFGVIIYKVFRHTAGLKPEVSCFENIRSCARGALALLFLLGTTWIFGVLHVVHASVVTAYLFTVSNAFQGMFIFLFLCVLSRKIQEEYYRLFKNVPCCFGCLSC

SEQ ID NO: 62563 - protein, 62 aa, Homo sapiens
MQILLSGVHSAAISCGHKQGVHFVQQDCHPFSVPRKRRTSFASVWISPLPSQSFLHLGVQCL

SEQ ID NO: 62564 - protein, 133 aa, Homo sapiens
MENMHLRRVRTMPRHSQSLTMAPYSSVSLVEQLEDRILCHEKTTAALVEHAFRIKDDIVNSLQKMQNKGGGDRLARLFLEEHIRNITAIVKQLNRDIEVLQEQIRARDNISYGTNSALKTLEMRQLSGLGDLR

SEQ ID NO: 62565 - protein, 148 aa, Homo sapiens
MGNSRSRVGRSFCSQFLPEEQAEIDQLFDALSSDKNSPNVSSKSFSLKALQNHVGEALPPEMVTRLYDGMRRVDLTGKAKGPSENVSQEQFTASMSHLLKGNSEEKSLMIMKMISATEGPVKAREVQKFTEDLVGSVVHVLSHRQELR

SEQ ID NO: 62566 - protein, 63 aa, Homo sapiens
MALHSPQMESGSVAPAGVRWRDLSSLQPRPPWFKQFSWLSLPSSRDYSIFLEILALMNSINSL

SEQ ID NO: 62567 - protein, 39 aa, Homo sapiens
MLLLAAAFLVAFVLLLYMVSPLISPKPLALPGAHVVWEG

SEQ ID NO: 62568 - protein, 951 aa, Homo sapiens
NTPSSLAVCADGELYVADLGNIRIRFIRKNKPFLNTQNMYELSSPIDQELYLFDTTGKHLYTQSLPTGDYLYNFTYTGDGDITLITDNNGNMVNVRRDSTGMPLWLVVPDGQVYWVTMGTNSALKSVTTQGHELAMMTYHGNSGLLATKSNENGWTTFYEYDSFGRLTNVTFPTGQVSSFRSDTDSSVHVQVETSSKDDVTITTNLSASGAFYTLLQDQVRNSYYIGADGSLRLLLANGMEVALQTEPHLLAGTVNPTVGKRNVTLPIDNGLNLVEWRQRKEQARGQVTVFGRRLRVHNRNLLSLDFDRVTRTEKIYDDHRKFTLRILYDQAGRPSLWSPSSRLNGVNVTYSPGGYIAGIQRGIMSERMEYDQAGRITSRIFADGKTWSYTYLEKSMVLLLHSQRQYIFEFDKNDRLSSVTMPNVARQTLETIRSVGYYRNIYQPPEGNASVIQDFTEDGHLLHTFYLGTGRRVIYKYGKLSKLAETLYDTTKVSFTYDETAGMLKTINLQNEGFTCTIRYRQIGPLIDRQIFRFTEEGMVNARFDYNYDNSFRVTSMQAVINETPLPIDLYRYDDVSGKTEQFGKFGVIYYDINQIITTAVMTHTKHFDAYGRMKEVQYEIFRSLMYWMTVQYDNMGRVVKKELKVGPYANTTRYSYEYDADGQLQTVSINDKPLWRYSYDLNGNLHLLSPGNSARLTPLRYDIRDRITRLGDVQYKMDEDGFLRQRGGDIFEYNSAGLLIKAYNRAGSWSVRYRYDGLGRRVSSKSSHSHHLQFFYADLTNPTKVTHLYNHSSSEITSLYYDLQGHLFAMELSSGDEFYIACDNIGTPLAVFSGTGLMIKQILYTAYGEIYMDTNPNFQIIIGYHGGLYDPLTKLVHMGRRDYDVLAGRWTSPDHELWKHLSSSNVMPFNLYMFKNNNPISNSQDIKCFMTERTKDFLPKTATLLWPHT

SEQ ID NO: 62569 - protein, 150 aa, Homo sapiens
ERKKTELALAKNYPGKKVSSTNNTPVPRLTSNPSRVDRLIVDELRELARVVTLLGKMERLRSSLLHASISTALDRHLESIHIVQSRRKDEIVNASNRQRQGVPRCQDDRDVFALASAIKEMCVATRKTRTALWCALQMTLPKTASTADVH

SEQ ID NO: 62570 - protein, 128 aa, Homo sapiens
MENPQDIFSSNGGCLSDIVIEKYLVESKESVSHVQLACSMQDCAFPLDGTELCIWNTKDPSHQLLILRGHHQPITAMAFGNKVNPLLICSASLDYVIMWNLDECREKVLQALDLQFDGWTPLSSCGTG

SEQ ID NO: 62571 - protein, 204 aa, Homo sapiens
TRWEAMKAKATELRVCCARRKREAREFKPPQMRGSTRLNISDDLKIGFFSTDHATQTDSSEILSVKELSSSTQKLAQMMKSLQVDFGFLKQLLQLKFEDRLKEESLSLFTILHDRILEIEKHYQQNEDKMRKSFNQQLADAIAVIKGMYQQFFEVEEENVSLQDASTVKTNILLRKLKEKEEVIKELKEELDQYKDFGFHKMSK

SEQ ID NO: 62572 - protein, 116 aa, Homo sapiens
MSNEVETSATNGQPDQQAAPKAPSKKEKKKGPEKTDEYLLARFKGDGVKYKAKLIGIDDVPDARGDKMSQDSMMKLKGMAAAGRSQGQHKQRIWVNISLSGIKIIDEKTGVRIHIC

SEQ ID NO: 62573 - protein, 162 aa, Homo sapiens
MVKLSIVLTPQFLSHDQGQLTKELQQHVKSVTCPCEYLRKVINTLADHHHRGTDFGGSPWLHVIIAFPTSYKVVITLWIVYLWVSLLKTIFWSRNGHDGSTDVQQRAWRSNRRRQEGLRSICMHTKKRVSSFRGNKIVLKDVITLRRHVETKVRAKIRKRKV

SEQ ID NO: 62574 - protein, 35 aa, Homo sapiens
GSVPNKFYVHNDMFRYEDEVFGDSEPELDEGEKMK

SEQ ID NO: 62575 - protein, 112 aa, Homo sapiens
  MOD_RES (1)..(1): Any amino acid
XPALQAQPLRTTSTLASSLPGHAAKTLPGGAGKGRTPSAFPQTPAAPPATLGEGSADTEDRKLPAPGADVKVHRARKTMPKSVVGLVILCLLLLFPFSHLFCFNNGKWTLVH

SEQ ID NO: 62576 - protein, 745 aa, Homo sapiens
MPERLAEMLLDLWTPLIILWITLPPCIYMAPMNQSQVLMSGSPLELNSLGEEQRILNRSKRGWVWNQMFVLEEFSGPEPILVGRLHTDLDPGSKKIKYILSGDGAGTIFQINDVTGDIHAIKRLDREEKAEYTLTAQAVDWETSKPLEPPSEFIIKVQDINDNAPEFLNGPYHATVPEMSILGTSVTNVTATDADDPVYGNSAKLVYSILEGQPYFSIEPETAIIKTALPNMDREAKEEYLVVIQAKDMGGHSGGLSGTTTLTVTLTDVNDNPPKFAQSLYHFSVPEDVVLGTAIGRVKANDQDIGENAQSSYDIIDGDGTALFEITSDAQAQDGIIRLRKPLDFETKKSYTLKVEAANVHIDPRFSGRGPFKDTATVKIVVEDADEPPVFSSPTYLLEVHENAALNSVIGQVTARDPDITSSPIRFSIDRHTDLERQFNINADDGKITLATPLDRELSVWHNITIIATEIRNHSQISRVPVAIKVLDVNDNAPEFASEYEAFLCENGKPGQVIQTVSAMDKDDPKNGHYFLYSLLPEMVNNPNFTIKKNEDNSLSILAKHNGFNRQKQEVYLLPIIISDSGNPPLSSTSTLTIRVCGCSNDGVVQSCNVEAYVLPIGLSMGALIAILACIILLLVIVVLFVTLRRHKNEPLIIKDDEDVRENIIRYDDEGGGEEDTEAFDIATLQNPDGINGFLPRKDIKPDLQFMPRLQKRVARRNITRCCLKRKTVENHGFNELRGQDQKRK

SEQ ID NO: 62577 - protein, 164 aa, Homo sapiens
MKMVMPSWFDLMGLSPDAPEDEAGIKKAAENIKALIEHEMKNGIPANRIVLGGFSQGGALSLYTALTCPHPLAGIVALSCWLPLHRAFPQAANGSAKDLAILQCHGELDPMVPVRFGALTAEKLRSVVTPARVQFKTYPGVMHSSCPQEMAAVKEFLEKLLPPV

SEQ ID NO: 62578 - protein, 185 aa, Homo sapiens
  MOD_RES (1)..(1): Any amino acid
XLGGADKRLRDNHEWKKLIMVQHWPETVCEKIQNDCRDPPDYWTIHGLWPDKSEGCNRSWPFNLEEIKDLLPEMRAYWPDVIHSFPNRSRFWKHEWEKHGTCAAQVDALNSQKKYFGRSLELYRELDLNSVLLKLGIKPSINYYQTTEEDLNLDVEPTTEDTAEEVTIHVLLHSALFGEIGPRRW

SEQ ID NO: 62579 - protein, 178 aa, Homo sapiens
MAPWPPKGLVPAMLWGLSLFLNLPGPIWLQPSPPPQSSPPPQPHPCHTCRGLVDSFNKGLERTIRDNFGGGNTAWEEENLSKYKDSETRLVEVLEGVCSKSDFECHRLLELSEELVESWWFHKQQEAPDLFQWLCSDSLKLCCPAGTFGPSCLHRAAGQRRSSPPRRGRGRAETLLTS

SEQ ID NO: 62580 - protein, 246 aa, Homo sapiens
LAREMDGRRVLGRFWSGWRRGLGVRPVPEDAGFGTEARHQRQPRGSCQRSGPLGDQPFAGLLPKNLSREELVDALRAAVVDRKGPLVTLNKPQGLPVTGKPGELTLFSVLPELSQSLGLREQELQVVRASGKESSGLVLLSSCPQTASRLQKYFTHARRAQRPTATYCAVTDGIPAASEGKIQAALKLEHIDGVNLTVPVKAPSRKDILEGVKKTLSHFRVVATGSGCALVQLQPLTGRSGTLASL

SEQ ID NO: 62581 - protein, 50 aa, Homo sapiens
MASKKVCIVGSGNWSLGTICHGSGGDKEGAQPSPRSWVAMQPSWHSLTHG

SEQ ID NO: 62582 - protein, 503 aa, Homo sapiens
MDLIPNLAVETWLLLAVSLILLYLYGTRTHGLFKKLGIPGPTPLPFLGNALSFRKGYWTFDMECYKKYRKVWGIYDCQQPMLAITDPDMIKTVLVKECYSVFTNRRPFGPVGFMKNAISIAEDEEWKRIRSLLSPTFTSGKLKEMVPIIAQYGDVLVRNLRREAETGKPVTLKHVFGAYSMDVITSTSFGVSIDSLNNPQDPFVENTKKLLRFNPLDPFVLSIKVFPFLTPILEALNITVFPRKVISFLTKSVKQIKEGRLKETQKHRVDFLQLMIDSQNSKDSETHKALSDLELMAQSIIFIFAGYETTSSVLSFIIYELATHPDVQQKVQKEIDTVLPNKAPPTYDTVLQLEYLDMVVNETLRLFPVAMRLERVCKKDVEINGMFIPKGVVVMIPSYVLHHDPKYWTEPEKFLPERFSKKNKDNIDPYIYTPFGSGPRNCIGMRFALVNMKLALVRVLQNFSFKPCKETQIPLKLRLGGLLQPEKPIVLKVESRDGTVSGT

SEQ ID NO: 62583 - protein, 700 aa, Homo sapiens
MAPEVVKREPYGKPVDVWGCGVILFILLSGCLPFYGTKERLFEGIIKGKYKMNPRQWSHISESAKDLVRRMLMLDPAERITVYEALNHPWLKERDRYAYKIHLPETVEQLRKFNARRKLKGAVLAAVSSHKFNSFYGDPPEELPDFSEDPTSSGAVSQVLDSLEEIHALTDCSEKDLDFLHSVFQDQHLHTLLDLYDKINTKSSPQIRNPPSDAVQRAKEVLEEISCYPENNDAKELKRILTQPHFMALLQTHDVVAHEVYSDEALRVTPPPTSPYLNGDSPESANGDMDMENVTRVRLVQFQKNTDEPMGITLKMNELNHCIVARIMHGGMIHRQGTLHVGDEIREINGISVANQTVEQLQKMLREMRGSITFKIVPSYRTQSSSCEIYVRAQFEYDPAKDDLIPCKEAGIRFRVGDIIQIISKDDHNWWQGKLENSKNGTAGLIPSPELQEWRVACIAMEKTKQEQQASCTWFGKKKKQYKDKYLAKHNAVFDQLDLVTYEEVVKLPAFKRKTLVLLGAHGVGRRHIKNTLITKHPDRFAYPIPHTTRPPKKDEENGKNYYFVSHDQMMQDISNNEYLEYGSHEDAMYGTKLETIRKIHEQGLIAILDVEPQALKVLRTAEFAPFVVFIAAPTITPGLNEDESLQRLQKESDILQRTYAHYFDLTIINNEIDETIRHLEEAVELVCTAPQWVPVSWVY

SEQ ID NO: 62584 - protein, 35 aa, Homo sapiens
CGKRPRVDLTQFLQCVQQFLWGEDVCGSWRRQRRQ

SEQ ID NO: 62585 - protein, 276 aa, Homo sapiens
MPLLDGDLEGSGKHSSRKVDSPFGPGSPSKGFFSRGPQPRPSSPMSAPVRPKTSPGSPKTVFPFSYQESPPRSPRRMSFSGIFRSSSKESSPNSNPATSPGGIRFFSRSRKTSGLSSSPSTPTQVTKQHTFPLESYKHEPERLENRIYASSSPPDTGQRFCPSSFQSPTRPPLASPTHYAPSKAAALAAALGPAEAGMLEKLEFEDEAVEDSESGVYMRFMRSHKCYDIVPTSSKLVVFDTTLQVSVLHFHEFFGIFWMATTLYSNLKPAMPANVY

SEQ ID NO: 62586 - protein, 649 aa, Homo sapiens
MEMRWFLSKIQDDFRGGKINLEKTQRLLEKLDIRCSYIHVKQIFKDNDRLKQGRITIEEFRAIYRIITHREEIIEIFNTYSENRKILLASNLAQFLTQEQYAAEMSKAIAFEIIQKYEPIEEVRKAHQMSLEGFTRYMDSRECLLFKNECRKVYQDMTHPLNDYFISSSHNTYLVSDQLLGPSDLWGYVSALVKGCRCLEIDCWDGAQNEPVVYHGYTLTSKLLFKTVIQAIHKYAFMTSDYPVVLSLENHCSTAQQEVMADNLQATFGESLLSDMLDDFPDTLPSPEALKFKILVKNKKIGTLKETHERKGSDKRGKVEEWEEEVADGEEEEEEEEEEEEEEEDKFKESEVLESVLGDNQDKETGVKKLPGVMLFKKKKTRKLKIALALSDLVIYTKAEKFKSFQHSRLYQQFNENNSIGETQARKLSKLRVHEFIFHTRKFITRIYPKATRADSSNFNPQEFWNIGCQMVALNFQTPGLPMDLQNGKFLDNGGSGYILKPHFLRESKSYFNPSNIKEGMPITLTIRLISGIQLPLTHSSSNKGDSLVIIEVFGVPNDQMKQQTRVIKKNAFSPRWNETFTFIIHVPELALIRFVVEGQGLIAGNEFLGQYTLPLLCMNKGYRRIPLFSRMGESLEPASLFVYVWYVR

SEQ ID NO: 62587 - protein, 1184 aa, Homo sapiens
MHVNASARRWGRGGAAALPGPAASPRRPAPRTGPVGRPTLAPSPSRAHAHAKTNLLPGRAVQAPDAVPGAGSSRAPARWRPRDPGSSAPDAWQRFRPAPLRAQPRPPPRPAPGPPPPRKGGCGGQWRAPQDRTRGLRSRNSPRPPLAQPRLRHANQWRAPPGTPAADWRRPARSGRAVRDGGGGAGGSERELGLADGMEDYEQELCGVEDDFHNQFAAELEVLAELEGASTPSPSGVPLFTAGRPPRTFEEALARGDAASSPAPAASVGSSQGGARKRQVDADLQPAGSLPHAPRIKRPRLQVVKRLNFRSEEMEEPPPPDSSPTDITPPPSPEDLAELWGHGFSEAAADVGLTRASPAARNPVLRRPPILEDYVHVTSTEGVRAYLVLRADPMAPGVQGSLLHVPWRGGGQLDLLGVSLASLKKQVDGERRERLLQEAQKLSDTLHRSGEEEAAQPLGAPEEEPTDGQDASSHCLWVDEFAPRHYTELLSDDFTNRCLLKWLKLWDLVVFGHERPSRKPRPSVEPARVSKEATAPGKWKSHEQVLEEMLEAGLDPSQRPKQKVALLCGPPGLGKTTLAHVIARHAGYSVVEMNASDDRSPEVFRTRIEAATQMESVLGAGGKPNCLVIDEIDGAPVAAINVLLSILNRKGPQEVGPQGPAVPSGGGRRRRAEGGLLMRPIICICNDQFAPSLRQLKQQAFLLHFPPTLPSRLVQRLQEGMRADPGVLAALCEKTDNDIRACINTLQFLYSRGQRELSVRDVQATRVGLKDQRRGLFSVWQEVFQLPRAQRSSQHVSVLTCHGTPGDAGLVVLQDMGDAGLGLWDVLLLAWTRRGTFPGRFYRVLHAAASAGEHEKVVQGLFDNFLRLRLRDSSLGAVCVALDWLAFDDLLAGAAHHSQSFQLLRYPPFLPVAFHVLFASSHTPRITFPSSQQEAQNRMSQMRNLIQTLVSGIAPATRSRATPQALLLDALCLLLDILAPKLRPVSTQLYSTREKQQLASLVGTMLAYSLTYRQERTPDGQYIYRLEPNVEELCRFPELPARKPLTYQTKQLIAREIEVEKMRRAEASARVENSPQVDGSPPGLEGLLGGIGEKGVHRPAPRNHEQRLEHIMRRAAREEQPEKDFFGRVVVRSTAVPSAGDTAPEQDSVERRMGTAVGRSEVWFRFNEGVSNAVRRSLYIRDLL

SEQ ID NO: 62588 - protein, 680 aa, Homo sapiens
  MOD_RES (1)..(1): Any amino acid
XERRSTSFPLSGPPRKPQESRGHVSPAEDQTIQAPPVSVSALARDSPLTPNEMSSSTLTSPIEASWVSSQNDSPGDASEGPEYLAIGNLDPRGRTASCQSHSSNAESSSSNLFSSSSSQKPDSAASSLGDQEGGGESQLSSVLRRSSFSEGQTLTVTSGAKKSHIRSHSDTSIASRGAPESCNDKAKLRGPLPYSGQSSEVSTPSSLYMEYEGGRYLCSGEGMFRRPSEGQSLISYLSEQDFGSCADLEKENAHFSISESLIAAIELMKCNMMSQCLEEEEVEEEDSDREIQELKQKIRLRRQQIRTKNLLPMYQEAEHGSFRVTSSSSQFSSRDSAQLSDSGSADEVDEFEIQDGSEGSNLTHISKNGLSVSLASMFSDADIRRNTASSSKSFVSSQSFSHCFLHSTSAEAVAMGLLKQFEGMQLPAASELEWLVPEHDAPQKLLPIPDSLPISPDDGQHADIYKLRIRVRGNLEWAPPRPQIIFNVHPAPTRKIAVAKQNYRCAGCGIRTDPDYIKRLRYCEYLGKYFCQCCHENAQMAIPSRVLRKWDFSKYYVSNFSKDLLIKIWNDPLFNVQDINSALYRKVKLLNQVRLLRVQLCHMKNMFKTCRLAKELLDSFDTVPGHLTEDLHLYSLNDLTATRKGELGPRLAELTRAGATHVERCMVRKSHCSMQLSPCF

SEQ ID NO: 62589 - protein, 83 aa, Homo sapiens
MSILDEPGEPPSPSLTTTSTSQWKKHWFVLTDSSLKYYRDSTAEEADELDGEIDLRSCTDVTEYAVQRNYGFQIHTKDAVYTL

SEQ ID NO: 62590 - protein, 92 aa, Homo sapiens
  MOD_RES (1)..(1): Any amino acid
XFISNKYLVKRQSRDYDVEWGYAFDVHLNAFYPLLVILHFIQLFFINPLPFLKNTVILLYPFAPLILLYGLSLALGWNFTHTLCSFYKYRVK

SEQ ID NO: 62591 - protein, 446 aa, Homo sapiens [sequence omitted]

SEQ ID NO: 62592 - protein, 4434 aa, Homo sapiens
  MOD_RES (1)..(1): Any amino acid
XKNTISVKAVCDYRQIEITICKNDECVLEDNSQRTKWKVISPTGNEAMVPSVCFLIPPPNKDAIEMASRVEQSYQKVMALWHQLHVNTKSLISWNYLRKDLDLVQTWNLEKLRSSAPGECHQIMKNLQAHYEDFLQDSRDSVLFSVADRLRLEEEVEACKARFQHLMKSMENEDKEETVAKMYISELKNIRLRLEEYEQRVVKRIQSLASSRTDRDAWQDNALRIAEQEHTQEDLQQLRSDLDAVSMKCDSFLHQSPSSSSVPTLRSELNLLVEKMDHVYGLSTVYLNKLKTVDVIVRSIQDAELLVKGYEIKLSQEEVVLADLSALEAHWSTLRHWLSDVKDKNSVFSVLDEEIAKAKVVAEQMSRLTPERNLDLERYQEKGSQLQERWHRVIAQLEIRQSELESIQEVLGDYRACHGTLIKWIEETTAQQEMMKPGQAEDSRVLSEQLSQQTALFAEIERNQTKLDQCQKFSQQYSTIVKDYELQLMTYKAFVESQQKSPGKRRRMLSSSDAITQEFMDLRTRYTALVTLTTQHVKYISDALRRLEEEEKVVEEEKQEHVEKVKELLGWVSTLARNTQGKATSSETKESTDIEKAILEQQVLSEELTTKKEQVSEAIKTSQIFLAKHGHKLSEKEKKQISEQLNALNKAYHDLCDGSANQLQQLQSQLAHQTEQKTLQKQQNTCHQQLEDLCSWVGQAERALAGHQGRTTQQDLSALQKNQSDLKDLQDDIQNRATSFATVVKDIEGFMEENQTKLSPRELTALREKLHQAKEQYEALQEETRVAQKELEEAVTSALQQETEKSKAAKELAENKKKIDALLDWVTSVGSSGGQLLTNLPGMEQLSGASLEKGALDTTDGYMGVNQAPEKLDKQCEMMKARHQELLSQQQNFILATQSAQAFLDQHGHNLTPEEQQMLQQKLGELKEQYSTSLAQSEAELKQVQTLQDELQKFLQDHKEFESWLERSEKELENMHKGGSSPETLPSLLKRQGSFSEDVISHKGDLRFVTISGQKVLDMENSFKEGKEPSEIGNLVKDKLKDATERYTALHSKCTRLGSHLNMLLGQYHQFQNSADSLQAWMQACEANVEKLLSDTVASDPGVLQEQLATTKQLQEELAEHQVPVEKLQKVARDIMEIEGEPAPDHRHVQETTDSILSHFQSLSYSLAERSSLLQKAIAQSQSVQESLESLLQSIGEVEQNLEGKQVSSLSSGVIQEALATNMKLKQDIARQKSSLEATREMVTRFMETADSTTAAVLQGKLAEVSQRFEQLCLQQQEKESSLKKLLPQAEMFEHLSGKLQQFMENKSRMLASGNQPDQDITHFFQQIQELNLEMEDQQENLDTLEHLVTELSSCGFALDLCQHQDRVQNLRKDFTELQKTVKEREKDASSCQEQLDEFRKLVRTFQKWLKETEGSIPPTETSMSAKELEKQIEHLKSLLDDWASKGTLVEEINCKGTSLENLIMEITAPDSQGKTDLTEIQCDMSDVNLKYEKLGGVLHERQESLQAILNRMEEVHKEANSVLQWLESKEEVLKSMDAMSSPTKTETVKAQAESNKAFLAELEQNSPKIQKVKEALAGLLVTYPNSQEAENWKKIQEELNSRWERATEVTVARQRQLEESASHLACFQAAESQLRPWLMEKELMMGVLGPLSIDPNMLNAQKQQVQFMLKEFEARRQQHEQLNEAAQGILTGPGDVSLSTSQVQKELQSINQKWVELTDKLNSRSSQIDQAIVKSTQYQELLQDLSEKVRAVGQRLSVQSAISTQPEAVKQQLEETSEIRSDLEQLDHEVKEAQTLCDELSVLIGEQYLKDELKKRLETVALPLQGLEDLAADRINRLQAALASTQQFQQMFDELRTWLDDKQSQQAKNCPISAKLERLQSQLQENEEFQKSLNQHSGSYEVIVAEGESLLLSVPPGEEKRTLQNQLVELKNHWEELSKKTADRQSRLKDCMQKAQKYQWHVEDLVPWIEDCKAKMSELRVTLDPVQLESSLLRSKAMLNEVEKRRSLLEILNSAADILINSSEADEDGIRDEKAGINQNMDAVTEELQAKTGSLEEMTQRLREFQESFKNIEKKVEGAKHQLEIFDALGSQACSNKNLEKLRAQQEVLQALEPQVDYLRNFTQGLVEDAPDGSDASQLLHQAEVAQQEFLEVKQRVNSGCVMMENKLEGIGQFHCRVREMFSQLADLDDELDGMGAIGRDTDSLQSQIEDVRLFLNKIHVLKLDIEASEAECRHMLEEEGTLDLLGLKRELEALNKQCGKLTERGKARQEQLELTLGRVEDFYRKLKGLNDATTAAEEAEALQWVVGTEVEIINQQLADFKMFQKEQVDPLQMKLQQVNGLGQGLIQSAGKDCDVQGLEHDMEEINARWNTLNKKVAQRIAQLQEALLHCGKFQDALEPLLSWLADTEELIANQKPPSAEYKVVKAQIQEQKLLQRLLDDRKATVDMLQAEGGRIAQSAELADREKITGQLESLESRWTELLSKAAARQKQLEDILVLAKQFHETAEPISDFLSVTEKKLANSEPVGTQTAKIQQQIIRHKALNEEIVNRKKNVDQAIKNGQALLKQTTGEEVLLIQEKLDGIKTRYADITVTSSKALRTLEQARQLATKFQSTYEELTGWLREVEEELATSGGQSPTGEQIPQFQQRQKELKKEVMEHRLVLDTVNEVSRALLELVPWRAREGLDKLVSDANEQYKLVSDTIGQRVDEIDAAIQRSQQYEQAADAELAWVAETKRKLMALGPIRLEQDQTTAQLQVQKAFSIDIIRHKDSMDELFSHRSEIFGTCGEEQKTVLQEKTESLIQQYEAISLLNSERYARLERAQVLVNQFWETYEELSPWIEETRALIAQLPSPAIDHEQLRQQQEEMRQLRESIAEHKPHIDKLLKIGPQLKELNPEEGEMVEEKYQKAENMYAQIKEEVRQRALALDEAVSQSTQITEFHDKIEPMLETLENLSSRLRMPPLIPAEVDKIRECISDNKSATVELEKLQPSFEALKRRGEELIGRSQGADKDLAAKEIQDKLDQMVFFWEDIKARAEEREIKFLDVLELAEKFWYDMAALLTTIKDTQDIVHDLESPGIDPSIIKQQVEAAETIKEETDGLHEELEFIRILGADLIFACGETEKPEVRKSIDEMNNAWENLNKTWKERLEKLEDAMQAAVQYQDTLQAMFDWLDNTVIKLCTMPPVGTDLNTVKDQLNEMKEFKVEVYQQQIEMEKLNHQGELMLKKATDETDRDIIREPLTELKHLWENLGEKIAHRQHKLEGALLALGQFQHALEELMSWLTHTEELLDAQRPISGDPKVIEVELAKHHVLKNDVLAHQATVETVNKAGNELLESSAGDDASSLRSRLEAMNQCWESVLQKTEEREQQLQSTLQQAQGFHSEIEDFLLELTRMESQLSASKPTGGLPETAREQLDTHMELYSQLKAKEETYNQLLDKGRLMLLSRDDSGSGSKTEQSVALLEQKWHVVSSKMEERKSKLEEALNLATEFQNSLQEFINWLTLAEQSLNIASPPSLILNTVLSQIEEHKVFANEVNAHRDQIIELDQTGNQLKFLSQKQDVVLIKNLLVSVQSRWEKVVQRSIERGRSLDDARKRAKQFHEAWKKLIDWLEDAESHLDSELEISNDPDKIKLQLSKHKEFQKTLGGKQPVYDTTIRTGRALKEKTLLPEDSQKLDNFLGEVRDKWDTVCGKSVERQHKLEEALLFSGQFMDALQALVDWLYKVEPQLAEDQPVHGDLDLVMNLMDAHKVFQKELGKRTGTVQVLKRSGRELIENSRDDTTWVKGQLQELSTRWDTVCKLSVSKQSRLEQALKQAEVFRDTVHMLLEWLSEAEQTLRFRGALPDDTEALQSLIDTHKEFMKKVEEKRVDVNSAVAMGEVILAVCHPDCITTIKHWITIIRARFEEVLTWAKQHQQRLETALSELVANAELLEELLAWIQWAETTLIQRDQEPIPQNIDRVKALIAEHQTFMEEMTRKQPDVDRVTKTYKRKNIEPTHAPFIEKSRSGGRKSLSQPTPPPMPILSQSEAKNPRINQLSARWQQVWLLALERQRKLNDALDRLEELKEFANFDFDVWRKKYMRWMNHKKSRVMDFFRRIDKDQDGKITRQEFIDGILASKFPTTKLEMTAVADIFDRDGDGYIDYYEFVAALHPNKDAYRPTTDADKIEDEVTRQVAQCKCAKRFQVEQIGENKYRFGDSQQLRLVRILRSTVMVRVGGGWMALDEFLVKNDPCRARGRTNIELREKFILPEGASQGMTPFRSRGRRSKPSSRAASPTRSSSSASQSNHSCTSMPSSPATPASGTKVIPSSGSKLKRPTPTFHSSRTSLAGDTSNSSSPASTGAKTNRADPKKSASRPGSRAGSRAGSRASSRRGSDASDFDLLETQSACSDTSESSAAGGQGNSRRGLNKPSKIPTMSKKTTTASPRTPGPKR

SEQ ID NO: 62593 - protein, 264 aa, Homo sapiens
  MOD_RES (1)..(1): Any amino acid
XTSKLPNDLLDLQQPTFHPSVHPMSTASQVASTWGDAVDDAIPSLNPFLTKSSGDVHLSISSDVSTFTTRTPTHEMFVGFTPSPVAQPHPSAGLNVDFESVFGNKSTNVIVDSGGGLLKPTVASQNQNLPVAKLPPSKLVSDDLDSSLANLVGNLGIGNGTTKNDVNWSQPGEKKLTGGSNWQPKVAPTTAWNAATMNGMHFPQYAPPVMAYPATTPTGMIGYGIPPQMGSVPVMTQPTLIYSQPVMRPPNPFGPVSGAQIQFM

SEQ ID NO: 62594 - protein, 1062 aa, Homo sapiens
QTHNSVIGVPIRETPILDDYDCEEDEEPPRRANHVSREDEFGSQVTHTLDSLGHPGEEKVDFEKKAAAEATQETVESLMQKFKESFRANTPIEIGQLQPPLRSTSAGKRKRRSKSRGGISFGRAKGTSGSEADDETQLTFYTEQYRSRRRSKGLLKSPVNKTALTLIAVSSCILAMVCGSQMSCPLTVKVTLHVPEHFIADGSSFVVSEGSYLDISDWLNPAKLSLYYQINATSPWVRDLCGQRTTDACEQLCDPETGECSCHEGYAPDPVHRHLCVRSDWGQSEGPWPYTTLERGYDLVTGEQAPEKILSLGQGLWLPVSKSFVVPPVELSINPLASCKTDVLVTEDPADVREEAMLSTYFETINDLLSSFGPVRDCSRNNGGCTRNFKCVSDRQVDSSGCVCPEELKPMKDGSGCYDHSKGIDCSDGFNGGCEQLCLQQTLPLPYDATSSTIFMFCGCVEEYKLAPDGKSCLMLSDVCEGPKCLKPDSKFNDTLFGEMLHGYNNRTQHVNQGQVFQMTFRENNFIKDFPQLADGLLVIPLPVEEQCRGVLSEPLPDLQLLTGDIRYDEAMGYPMVQQWRVRSNLYRVKLSTITLAAGFTNVLKILTKESSREELLSFIQHYGSHYIAEALYGSELTCIIHFPSKKVQQQLWLQYQKETTELGSKKELKSMPFITYLSGLLTAQMLSDDQLISGVEIRCEEKGRCPSTCHLCRRPGKEQLSPTPVLLEINRVVPLYTLIQDNGTKEAFKSALMSSYWCSGKGDVIDDWCRCDLSAFDANGLPNCSPLLQPVLRLSPTVEPSSTVVSLEWVDVQPAIGTKVSDYILQHKKVDEYTDTDLYTGEFLSFADDLLSGLGTSCVAAGRSHGEVPEVSIYSVIFKCLEPDGLYKFTLYAVDTRGRHSELSTVTLRTACPLVDDNKAEEIADKIYNLYNGYTSGKEQQMAYNTLMEVSASMLFRVQHHYNSHYEKFGDFVWRSEDELGPRKAHLILRRLERVSSHCSSLLRSAYIQSRVETVPYLFCRSEEVRPAGMVWYSILKDTKITCEEKMVSMARNTYGESKGR

SEQ ID NO: 62595 - protein, 73 aa, Homo sapiens
YSEDREQVRGFEAEEGLMLAADIMRGEDFTPAEEFVPQEELGAAKKQLANWQDAHYRRQLRWKMLQKEPQPRT

SEQ ID NO: 62596 - protein, 141 aa, Homo sapiens
MARHRNVRGYNYDEAAQFIYSRRDKPSVEPVEEYDYEDLKESSNSVSNHQLSGFDQARLYSCLDHMREVLGDAVPDEILIEAVLKNKFDVQKALSGVLEQDRVQSLKDKNEATVSTGKIAKGKPVDSQTSRSESEIVPKVA

SEQ ID NO: 62597 - protein, 151 aa, Homo sapiens
MTDNSNNQLVVRAKFNFQQTNEDELSFSKGDVIHVTRVEEGGWWEGTLNGRTGWFPSNYVREVKASEKPVSPKSGTLKSPPKGFDTTAINKSYYNVPVLSRGAESSAHEGGGTPRDCMEVEPGSPGSEVLPAGLKGMPASRHIWEPECAVV

SEQ ID NO: 62598 - protein, 92 aa, Homo sapiens
MTSFRLALIQLQISSIKSDNVTRACSFIREAATQGAKIVSLPECFNSPYGAKYFPEYAEKIPGESTQKLSEVAKECSIYLIGGNFLPTRLYP

SEQ ID NO: 62599 - protein, 197 aa, Homo sapiens
GFEWGGQRRASHNSTFSAYSRGVFRRDAHKSEVAHRFKDLGEENFKALVLIAFAQYLQQCPFEDHVKLVNEVTEFAKTCVADESAENCDKSLHTLFGDKLCTVATLRETYGEMADCCAKQEPERNECFLQHKDDNPNLPRLVRPEVDVMCTAFHDNEETFLKKYLYEIARRHPYFYAPELLFFAKRYKAAFTECCQA

SEQ ID NO: 62600 - protein, 47 aa, Homo sapiens
MARKLVMFRDVAIDFSQEEWECLDSAQRDLYRDVMLENYSNLVSLAL

SEQ ID NO: 62601 - protein, 227 aa, Homo sapiens
MPTGDFDSKPSWADQVEEEGEDDKCVTSELLKGIPLATGDTSPEPELLPGAPLPPPKEVINGNIKTVTEYKIDEDGKKFKIVRTFRIETRKASKAVARRKDLNCQEEEDPMNKLKGQKIVSCRICKGDHWTTRCPYKDTLGPMQKELAEQLGLSTGEKEKLPGELEPVQATQNKTGKYVPPSLRDGASRRGESMQPNRRADDNATIRVTNLSEDTRETDLQELFRPF

SEQ ID NO: 62602 - protein, 120 aa, Homo sapiens
RIQEASLSTESFLPAQSESISLIRFHGVAILSPLVRKAPNASDFDQWEMETVYSNSEVRNLNVPATFPNSFPSHTEHSTAAKLDKIAGILPLDNEDQCKTDGIDLARDSEGFNSPKQCDS

SEQ ID NO: 62603 - protein, 939 aa, Homo sapiens
KQLEKENKRLRQQAEIKDTTLEENNVKIGNLEKENKTLSKEIGIYKESCVRLKELEKENKELVKRATIDIKTLVTLREDLVSEKLKTQQMNNDLEKLTHELEKIGLNKERLLHDEQSTDDSRYKLLESKLESTLKKSLEIKEEKIAALEARLEESTNYNQQLRQELKTVKKNYEALKQRQDEERMVQSSPPISGEDNKWERESQETTRELLKVKDRLIEVERNNATLQAEKQALKTQLKQLETQNNNLQAQILALQRQTVSLQEQNTTLQTQNAKLQVENSTLNSQSTSLMNQNAQLLIQQSSLENENESVIKEREDLKSLYDSLIKDHEKLELLHERQASEYESLISKHGTLKSAHKNLEVEHRDLEDRYNQLLKQKGQLEDLEKMLKVEQEKMLLENKNHETVAAEYKKLCGENDRLNHTYSQLLKETEVLQTDHKNLKSLLNNSKLEQTRLEAEFSKLKEQYQQLDITSTKLNNQCELLSQLKGNLEEENRHLLDQIQTLMLQNRTLLEQNMESKDLFHVEQRQYIDKLNELRRQKEKLEEKIMDQYKFYDPSPPRRRGNWITLKMRKLIKSKKDINRERQKSLTLTPTRSDSSEGFLQLPHQDSQDSSSVGSNSLEDGQTLGTKKSSMVALKRLPFLRNRPKDKDKMKACYRRSMSMNDLVQSMVLAGQWTGSTENLEVPDDISTGKRRKELGAMAFSTTAINFSTVNSSAGFRSKQLVNNKDTTSFEDISPQGVSDDSSTGSRVHAGAVNNQSRPQSHSSGEFSLLHDHEAWSSSGSSPIQYLKRQTRSSPVLQHKISETLESRHHKIKTGSPGSEVVTLQQFLEESNKLTSVQIKSSSQENLLDEVMKSLSVSSDFLGKDKPVSCGLASVISTAEGTTRRTSIHDFLTKDSRLPISVDSPPAAADSNTTAASNVDKVQESRNSKSRSREQQSS

SEQ ID NO: 62604 - protein, 73 aa, Homo sapiens
MDPSLLRERELFKKRALSTPVVEKRSASSESSSSSSKKKKTKVEHGGSSGSKQNSVFPVVYTVAWDVLNTLGE

SEQ ID NO: 62605 - protein, 332 aa, Homo sapiens
MLTFFLVSGGSLWLFVEFVLSLLEKMQTQEILRILRLPELGDLGQFFRSLSATTLVSMGALAAILAYWFTHRPKALQPPCNLLMQSEEVEDSGGARRSVIGSGPQLLTHYYDDARTMYQVFRRGLSISGNGPCLGFRKPKQPYQWLSYQEVADRAEFLGSGLLQHNCKACTDQFIGVFAQNRPEWIIVELACYTYSMVVVPLYDTLGPGAIRYIINTADISTVIVDKPQKAVLLLEHVERKETPGLKLIILMDPFEEALKERGQKCGVVIKSMQAVEDCGQENHQAPVPPQPDDLSIVCFTSGTTGNPKGAMLTHGNVVADFSGFLKVTEIT

SEQ ID NO: 62606 - protein, 159 aa, Homo sapiens
MRPDRAEAPGPPAMAAGGPGAGSAAPVSSTSSLPLAALNMRVRRRLSLFLNVRTQVAADWTALAEEMDFEYLEIRQLETQADPTGRLLDAWQGRPGASVGRLLELLTKLGRDDVLLELGPSIGAAGWWWLSLMITCRARNVTSRPNLHSASLQVPIRSD

SEQ ID NO: 62607 - protein, 151 aa, Homo sapiens
MKKDDSPCSLDKLEADRSWENIPVTFKSPVPVNSDDSPQQTSRAKSAKGVLEDFLNNDNQSCTLSGGKHHGPVEALKQMLFNLQAVQERFNQNKTTDPKEEIKQVSEDDFSKLQLKESMIPITRSLQKALHHLSRLRDLVDDTNGERSPKM

SEQ ID NO: 62608 - protein, 123 aa, Homo sapiens
METPSQRRATRSGAQASSTPLSPTRITRLQEKEDLQELNDRLAVYIDRVRSLETENAGLRLRITESEEVVSREVSGIKAAYEAELGDARKTLDSVAKERARLQLELSKVREEFKELKARLRQP

SEQ ID NO: 62609 - protein, 169 aa, Homo sapiens
MKIFCSRANPTTGSVEWLEEDEHYDYHQEIARSSYADMLHDKDRNVKYYQGIRAAVSRVKDRGQKALVLDIGTGTGLLSMMAVTAGADFCYAIEVFKPMADAAVKIVEKNGFSDKIKVINKHSTEVTVGPEGDMPCRANILVTELFDTELIGEGALPSYEHAHRHLVEE

SEQ ID NO: 62610 - protein, 352 aa, Homo sapiens
MAYHSFLVEPISCHAWNKDRTQIAICPNNHEVHIYEKSGAKWTKVHELKEHNGQVTGIDWAPESNRIVTCGTDRNAYVWTLKGRTWKPTLVILRINRAARCVRWAPNENKFAVGSGSRVISICYFEQENDWWVCKHIKKPIRSTVLSLDWHPNNVLLAAGSCDFKCRIFSAYIKEVEERPAPTPWGSKMPFGELMFESSSSCGWVHGVCFSASGSRVAWVSHDSTVCLADADKKMAVATLASETLPLLALTFITDNSLVAAGHDCFPVLFTYDAAAGMLSFGGRLDVPKQSSQRGLTARERFQNLDKKASSEGGTAAGAGLDSLHKNSVRSRCSAAARPSARSSAPLAWMAA

SEQ ID NO: 62611 - protein, 103 aa, Homo sapiens
MFEQDFEKPKEEDPPKAESPGTEPTANSTVTETNSTQPNPKGSQGGNDTSPTGNSTPGLNTGNNPPAQNGIGPLPAVNASGQGGPGSQIPWRPSQPNIRENHP

SEQ ID NO: 62612 - protein, 217 aa, Homo sapiens
MAEGELKDMEQFFDDLSDSFSGTEPEVHKTSVVGLFLRHMILAYSKLSFSQVFKLYTALQQYFQNGEKKTVEDADMELTSRDEGERKMEKEELDVSVREEEVSCSGPLSQKQAEFFLSQQASLLKNDETKALTPASLQKELNNLLKFNPDFAEAHYLSYLNNLRVQDVFSSTHSLLHYFDRLILTGAESKSNGEEGYGRSLRYAALNLAALHCRFGH

SEQ ID NO: 62613 - protein, 264 aa, Homo sapiens
ADSMLLALQLSMAENNKQHSGEFTVSLSDVLLTWKYLLHEKLNLPVENMDVTDHYEDVRKIYDDFLKNSNMLDLIDVYQKCRALTSNCENYNTVSPSQLLDFLSGKQYAVGDETDLSIPTSPTSKYNRDNEKVQLLARKIIFSYLNLLVNSKNDLAVAYILNIPDRGLGREAFTDLKHAAREKQMSIFLVATSFIRTIELGGKGYAPPPSDPLRTHVKGLSNFINFIDKLDEILGEIPNPRGCKSICWKINNWNEFWKCSSGQK

SEQ ID NO: 62614 - protein, 72 aa, Homo sapiens
MGNCAKRPWRRGPKDPLQWLGSPPRGSCPSPSSSPKEQGDPAPGVQGYSVLNSLVGPACIFLRPSIAATQLV

SEQ ID NO: 62615 - protein, 34 aa, Homo sapiens
MRLHDFVSKTVIKPESCVPCGKRIKFGKLSLKCR

SEQ ID NO: 62616 - protein, 165 aa, Homo sapiens
MAELDIGQHCQVEHCRQRDFLPFVCDDCSGIFCLEHRSRESHGCPEVTVINERLKTDQHTSYPCSFKDCAERELVAVICPYCEKNFCLRHRHQSDHECEKLEIPKPRMAATQKLVKDIIDSKTGETASKRWKGAKNSETAAKVALMKLKMHADGDKSLPQMSNLE

SEQ ID NO: 62617 - protein, 103 aa, Homo sapiens
MASEARGGLGAPPLQSARSLPGPAPCLKHFPLDLRTSMDGKCKEIAEELFTRSLAESELRSAPYEFPEESPIEQLEERRQRLERQISQDVKLEPDILLRAKQD

SEQ ID NO: 62618 - protein, 585 aa, Homo sapiens
MTALDLFLTNQFSEALSYLKPRTKESMYHSLTYATILEMQAMMTFDPQDILLAGNMMKEAQMLCQRHRRKSSVTDSFSSLVNRPTLGQFTEEEIHAEVCYAECLLQRAALTFLQGSSHGGAVRPRALHDPSHACSCPPGPGRQHLFLLQDENMVSFIKGGIKVRNSYQTYKELDSLVQSSQYCKGENHPHFEGGVKLGVGAFNLTLSMLPTRILRLLEFVGFSGNKDYGLLQLEEGASGHSFRSVLCVMLLLCYHTFLTFVLGTGNVNIEEAEKLLKPYLNRYPKGAIFLFFAGRIEVIKGNIDAAIRRFEECCEAQQHWKQFHHMCYWELMWCFTYKGQWKMSYFYADLLSKENCWSKATYIYMKAAYLSMFGKEDHKPFGDDEVELFRAVPGLKLKIAGKSLPTEKFAIRKSRRYFSSNPISLPVPALEMMYIWNGYAVIGKQPKLTDGILEIITKAEEMLEKGPENEYSVDDECLVKLLKGLCLKYLGRVQEAEENFRSISANEKKIKYDHYLIPNALLELALLLMEQDRNEEAIKLLESAKQNYKNYSMESRTHFRIQAATLQAKSSLENSSRSMVSSVSL

SEQ ID NO: 62619 - protein, 436 aa, Homo sapiens
  MOD_RES (1)..(1): Any amino acid
XHMQTQSSPFARGNVFGEPPTELQIKQQELYKNFLRFQIEEKKQREEAERERLRIAEEKEERRLAEQRARIQQEYEEEQEKKREKEEEQRLKNEEHIRLAEERQKEAERKKKEEEEKYNLQLQHYCERDNLIGEETKHMRQPSPIVPALQNKIASKLQRPPSVDSIIRSFIHESSMSRAQSPPVPARKNQLRAEEEKKNVIMELSEMRKQLRSEERRLQERLLHMDSDDEIPIRKKERNPMDIFDMARHRLQAPVRRQSPKGLDAATFQNVHDFNELKDRDSETRVDLKFMYLDPPRDHHTLEIQQQALLREQQKRLNRIKMQEGAKVDLDAIPSAKVREQRMPRDDTSDFLKNSLLESDSAFIGAYGETYPAIEDDVLPPPSQLPSARERRRNKWKGLDISPALSPRLDCSGVISVHCTLCPSGVQGILLPQPPK

SEQ ID NO: 62620 - protein, 184 aa, Homo sapiens
  MOD_RES (1)..(1): Any amino acid
XPAWTEIFGVLSVATIKFEMLSTAPQSQLFLALADSSISTKGTKSGTFVMYNCARLATLFESYKCSMEQGLYPTFPPVSSLDFSLLHDEGEWLLLFNSILPFPDLLSRTAVLDCTAPGLHIAVRTEMICKFLVQLSMDFSSYYNREPRPHLFGQMFVRLQLLRAVREVLHTGLAMLGLPPLSHI

SEQ ID NO: 62621 - protein, 81 aa, Homo sapiens
MWHEARKHERKLRGMMVDYKKRAERRREYYEKISQRSSACTRSTLMSCTEASRDPAKMRRRSWQRRRLPSVIPTRTARWPR

SEQ ID NO: 62622 - protein, 258 aa, Homo sapiens
MPACCSCSDVFQYETNKVTRIQSMNYGTIKWFFHVIIFSYVCFALVSDKLYQRKEPVISSVHTKVKGIAEVKEEIVENGVKKLVHSVFDTADYTFPLQGNSFFVMTNFLKTEGQEQRLCPEYPTRRTLCSSDRGCKKGWMDPQSKGIQTGRCVVYEGNQKTCEVSAWCPIEAVEEAPRPALLNSAENFTVLIKNNIDFPGHNYTTRNILPGLNITCTFHKTQNPQCPIFRLGDIFRETGDNFSDVAIQIRQVLQGKQC

SEQ ID NO: 62623 - protein, 37 aa, Homo sapiens
MPKVKRSRKAPPDGWELIEPTLDELDQKMREGCSAVA

SEQ ID NO: 62624 - protein, 197 aa, Homo sapiens
MISFCPDCGKSIQAAFKFCPYCGNSLPVEEHVGSQTFVNPHVSSFQGSGSRPPTPKSSPQKTRKSPQVTRGSPQKTSCSPQKTRQSPQTLKRSRVTTSLEALPTGTVLTDKSGRQWKLKSFQTRDNQGILYEAAPTSTLTCDSGPQKQKFSLKLVLGVTQPGEEPSVGPGCQPKACAVREVCAAGGLPAAGCPGVPP

SEQ ID NO: 62625 - protein, 824 aa, Homo sapiens
MARQKKMGQSVLRAVFFLVLGLLGHSHGGFPNTISIGGLFMRNTVQEHSAFRFAVQLYNTNQNTTEKPFHLNYHVDHLDSSNSFSVTNAFCSQFSRGVYAIFGFYDQMSMNTLTSFCGALHTSFVTPSFPTDADVQFVIQMRPALKGAILSLLGHYKWEKFVYLYDTERGFSILQAIMEAAVQNNWQVTARSVGNIKDVQEFRRIIEEMDRRQEKRYLIDCEVERINTILEQVVILGKHSRGYHYMLANLGFTDILLERVMHGGANITGFQIVNNENPMVQQFIQRWVRLDEREFPEAKNAPLKYTSALTHDAILVIAEAFRYLRRQRVDVSRRGSAGDCLANPAVPWSQGIDIERALKMVQVQGMTGNIQFDTYGRRTNYTIDVYEMKVSGSRKAGYWNEYERFVPFSDQQISNDSASSENRTIVVTTILESPYVMYKKNHEQLEGNERYEGYCVDLAYEIAKHVRIKYKLSIVGDGKYGARDPETKIWNGMVGELVYGRADIAVAPLTITLVREEVIDFSKPFMSLGISIMIKKPQKSKPGVFSFLDPLAYEIWMCIVFAYIGVSVVLFLVSRFSPYEWHLEDNNEEPRDPQSPPDPPNEFGIFNSLWFSLGAFMQQGCDISPRSLSGRIVGGVWWFFTLIIISSYTANLAAFLTVERMVSPIESAEDLAKQTEIAYGTLDSGSTKEFFRRSKIAVYEKMWSYMKSAEPSVFTKTTADGVARVRKSKGKFAFLLESTMNEYIEQRKPCDTMKVGGNLDSKGYGVATPKGSALRNAVNLAVLKLNEQGLLDKLKNKWWYDKGECGSGGGDSKNACKPCSIETQ

SEQ ID NO: 62626 - protein, 96 aa, Homo sapiens
MEPLLLGRGLIVYLMFLLLKFSKAIEIPSSVQQVPTIIKQSKVQVAFPFDEYFQIECEAKGNPEPTFSWTKDGNPFYFTDHRIIPSNNSGTFRIPN

SEQ ID NO: 62627 - protein, 104 aa, Homo sapiens
MREIVHLQAGQCGNQIGAKAHTMGTVTCNWRGSTCTTTRPQEEIMSPERCWWTWNPAPWTLSVLAPSVRSFGRTTSCLANPEPATTGQRGTTRRAQSWWTLSWT

SEQ ID NO: 62628 - protein, 260 aa, Homo sapiens
MSFRKVVRQSKFRHVFGQPVKNDQCYEDIRVSRVTWDSTFCAVNPKFLAVIVEASGGGAFLVLPLSKTGRIDKAYPTVCGHTGPVLDIDWCPHNDEVIASGSEDCTVMVWQIPENGLTSPLTEPVVVLEGHTKRVGIIAWHPTARNVLLSAGCDNVVLIWNVGTAEELYRLDSLHPDLIYNVSWNHNGSLFCSACKDKSVRIIDPRRGTLVAEREKAHEGARPMRAIFLADGKVFTTGFSRMSERQLALWDPGVRRFCLA

SEQ ID NO: 62629 - protein, 323 aa, Homo sapiens
GSIYYNQEGTCWYEGDWVQNIKKGWGIRCYKSGNIYEGQWEDNMRHGEGRMRWLTTNEEYTGRWERGIQNGFGTHTWFLKRIRSSQYPLRNEYIGEFVNGYRHGRGKFYYASGAMYDGEWVSNKKHGMGRLTFKNGRVYEGAFSNDHIAGFPDLEVEFISCLDLSSGVAPRLSRSAELIRKLDGSESHSVLGSSIELDLNLLLDMYPETVQPEEKKQVEYAVLRNITELRRIYSFYSSLGCGHSLDNTFLMTKLHFWRFLKDCKFHHHKLTLADMDRILSANNDIPVEEIHSPFTTILLRTFLNYLLHLAYHIYHEEFQQFIP

SEQ ID NO: 62630 - protein, 916 aa, Homo sapiens
MMLIQKAKSRCTELEKEIEELRSKPVTEGTGDIIKALTERLDALLLEKAETEQQCLSLKKENIKMKQEVEDSVTKMGDAHKELEQSHINYVKEIENLKNELMAVRSKYSEDKANLQKQLEEAMNTQLELSEQLKFQNNSEDNVKKLQEEIEKIRPGFEEQILYLQKQLDATTDEKKETVTQLQNIIEANSQHYQKNINSLQEELLQLKAIHQEEVKELMCQIEASAKEHEAEINKLNELKENLVKQCEASEKNIQKKYECELENLRKATSNANQDNQICSILLQENTFVEQVVNEKVKHLEDTLKELESQHSILKDEVTYMNNLKLKLEMDAQHIKDEFFHEREDLEFKINELLLAKEEQGCVIEKLKSELAGLNKQFCYTVEQHNREVQSLKEQHQKEISELNETFLSDSEKEKLTLMFEIQGLKEQCENLQQEKQEAILNYESLREIMEILQTELGESAGKISQEFESMKQQQASDVHELQQKLRTAFTEKDALLETVNRLQGENEKLLSQQELVPELENTIKNLQEKNGVYLLSLSQRDTMLKELEGKINSLTEEKDDFINKLKNSHEEMDNFHKKCEREERLILELGKKVEQTIQYNSELEQKVNELTGGLEETLKEKDQNDQKLEKLMVQMKVLSEDKEVLSAEVKSLYEENNKLSSEKKQLSRDLEVFLSQKEDVILKEHITQLEKKLQLMVEEQDNLNKLLENEQVQKLFVKTQLYGFLKEMGSEVSEDSEEKDVVNVLQAVGESLAKINEEKCNLAFQRDEKVLELEKEIKCLQEESVVQCEELKSLLRDYEQEKVLLRKELEEIQSEKEALQSDLLEMKNANEKTRLENQNLLIQVEEVSQTCSKSEIHNEKEKCFIKEHENLKPLLEQKELRDRRAELILLKDSLAKSPSVKNDPLSSVKELEEKI

SEQ ID NO: 62631 - protein, 149 aa, Homo sapiens
MPLFFRKRKPSEEARKRLEYQMCLAKEAGADDILDISKCELSEIPFGAFATCKVLQKKVLIVHTNHLTSLLPKSCSLLSLATIKVLDLHDNQLTALPDDLGQLTALQTESHSVAQAGVQWCNLSSPQPLPPGFKQFSCLSLPSSWDYRS

SEQ ID NO: 62632 - protein, 328 aa, Homo sapiens
MCDRNGGRRLRQWLIEQIDSSMYPGLIWENEEKSMFRIPWKHAGKQDYNQEVDASIFKAWAVFKGKFKEGDKAEPATWKTRLRCALNKSPDFEEVTDRSQLDISEPYKVYRIVPEEEQKCKLGVATAGCVNEVTEMECGRSEIDELIKEPSVDDYMGMIKRSPSPPEACRSQLLPDWWAQQPSTGVPLVTGYTTYDAHHSAFSQMVISFYYGGKLVGQATTTCPEGCRLSLSQPGLPGTKLYGPEGLELVRFPPADAIPSERQRQVTRKLFGHLERGVLLHSSRQGVFVKRLCQGRVFCSGNAVVCKGRPNKLERDEVVQVFDTSQFF

SEQ ID NO: 62633 - protein, 771 aa, Homo sapiens
MVDLESEVPPLPPRYRFRDLLLGDQGWQNDDRVQVEFYMNENTFKERLKLFFIKNQRSSLRIRLFNFSLKLLSCLLYIIRVLLENPSQGNEWSHIFWVNRSLPLWGLQVSVALISLFETILLGYLSYKGNIWEQILRIPFILEIINAVPFIISIFWPSLRNLFVPVFLNCWLAKHALENMINDLHRAIQRTQSAMFNQVLILISTLLCLIFTCICGIQHLERIGKKLNLFDSLYFCIVTFSTVGFGDVTPETWSSKLFVVAMICVALVVLPIQFEQLAYLWMERQKSGGNYSRHRAQTEKHVVLCVSSLKIDLLMDFLNEFYAHPRLQDYYVVILCPTEMDVQVRRVLQIPMWSQRVIYLQGSALKDQDLLRAKMDDAEACFILSSRCEVDRTSSDHQTILRAWAVKDFAPNCPLYVQILKPENKFHIKFADHVVCEEEFKYAMLALNCICPATSTLITLLVHTSRGQEGQQSPEQWQKMYGRCSGNEVYHIVLEESTFFAEYEGKSFTYASFHAHKKFGVCLIGVRREDNKNILLNPGPRYIMNSTDICFYINITKEENSAFKNQDQQRKSNVSRSFYHGPSRLPVHSIIASMGTVAIDLQDTSCRSASGPTLSLPTEGSKEIRRPSIAPVLEVADTSSIQTCDLLSDQSEDETTPDEEMSSNLEYAKGYPPYSPYIGSSPTFCHLLHEKVPFCCLRLDKSCQHNYYEDAKAYGFKNKLIIVAAETAGNGLYNFIVPLRAYYRPKKELNPIVLLLDNPFSHKISATDHCS

SEQ ID NO: 62634 - protein, 125 aa, Homo sapiens
MIICPTRPFTALKRSFEVEEVETPNSTPPRRVQTPLLRATVASSTQKFQDLGVKNSEPSARHVDSLSQRSPKASLRRVELSGPKAAEPVSRRTELSIDISSKQVENAGAIGPSRFGLKRAEVLGH

SEQ ID NO: 62635 - protein, 763 aa, Homo sapiens
MSSARTPLPTLNERDTEQPTLGHLDSKPSSKSNMIRGRNSATSADEQPHIGNYRLLKTIGKGNFAKVKLARHILTGKEVAVKIIDKTQLNSSSLQKLFREVRIMKVLNHPNIVKLFEVIETEKTLYLVMEYASGGEVFDYLVAHGRMKEKEARAKFRQIVSAVQYCHQKFIVHRDLKAENLLLDADMNIKIADFGFSNEFTFGNKLDTFCGSPPYAAPELFQGKKYDGPEVDVWSLGVILYTLVSGSLPFDGQNLKELRERVLRGKYRIPFYMSTDCENLLKKFLILNPSKRGTLEQIMKDRWMNVGHEDDELKPYVEPLPDYKDPRRTELMVSMGYTREEIQDSLVGQRYNEVMATYLLLGYKSSELEGDTITLKPRPSADLTNSSAPSPSHKVQRSVSANPKQRRFSDQAGPAIPTSNSYSKKTQSNNAENKRPEEDRESGRKASSTAKVPASPLPGLERKKTTPTPSTNSVLSTSTNRSRNSPLLERASLGQASIQNGKDSLTMPGSRASTASASAAVSAARPRQHQKSMSASVHPNKASGLPPTESNCEVPRPSTAPQRVPVASPSAHNISSSGGAPDRTNFPRGVSSRSTFHAGQLRQVRDQQNLPYGVTPASPSGHSQGRRGASGSIFSKFTSKFVRRPHVVGSGGNDKEKEEFREAKPRSLRFTWSMKTTSSMEPNEMMREIRKVLDANSCQSELHEKYMLLCMHGTPGHEDFVQWEMEVCKLPRLSLNGVRFKRISGTSMAFKNIASKIANELKL

SEQ ID NO: 62636 - protein, 1646 aa, Homo sapiens
MAVLRQLALLLWKNYTLQKRKVLVTVLELFLPLLFSGILIWLRLKIQSENVPNATIYPGQSIQELPLFFTFPPPGDTWELAYIPSHSDAAKTVTETVRRALVINMRVRGFPSEKDFEDYIRYDNCSSSVLAAVVFEHPFNHSKEPLPLAVKYHLRFSYTRRNYMWTQTGSFFLKETEGWHTTSLFPLFPNPGPREPTSPDGGEPGYIREGFLAVQHAVDRAIMEYHADAATRQLFQRLTVTIKRFPYPPFIADPFLVAIQYQLPLLLLLSFTYTALTIARAVVQEKERRLKEYMRMMGLSSWLHWSAWFLLFFLFLLIAASFMTLLFCVKVKPNVAVLSRSDPSLVLAFLLCFAISTISFSFMVSTFFSKGMGIQWRDLLSPVNVDDDFCFGQVLGMLLLDSVLYGLVTWYMEAVFPGQFGVPQPWYFFIMPSYWCGKPRAVAGKEEEDSDPEKALRNEYFEAEPEDLVAGIKIKHLSKVFRVGNKDRAAVRDLNLNLYEGQITVLLGHNGAGKTTTLSMLTGLFPPTSGRAYISGYEISQDMVQIRKSLGLCPQHDILFDNLTVAEHLYFYAQLKGLSRQKCPEEVKQMLHIIGLEDKWNSRSRFLSGGMRRKLSIGIALIAGSKVLILDEPTSGMDAISRRAIWDLLQRQKSDRTIVLTTHFMDEADLLGDRIAIMAKGELQCCGSSLFLKQKYGAGYHMTLVKEPHCNPEDISQLVHHHVPNATLESSAGAELSFILPRESTHRFEGLFAKLEKKQKELGIASFGASITTMEEVFLRVGKLVDSSMDIQAIQLPALQYQHERRASDWAVDSNLCGAMDPSDGIGALIEEERTAVKLNTGLALHCQQFWAMFLKKAAYSWREWKMVAAQVLVPLTCVTLALLAINYSSELFDDPMLRLTLGEYGRTVVPFSVPGTSQLGQQLSEHLKDALQAEGQEPREVLGDLEEFLIFRASVEGGGFNERCLVAASFRDVGERTVVNALFNNQAYHSPATALAVVDNLLFKLLCGPHASIVVSNFPQPRSALQAAKDQFNEGRKGFDIALNLLFAMAFLASTFSILAVSERAVQAKHVQFVSGVHVASFWLSALLWDLISFLIPSLLLLVVFKAFDVRAFTRDGHMADTLLLLLLYGWAIIPLMYLMNFFFLGAATAYTRLTIFNILSGIATFLMVTIMRIPAVKLEELSKTLDHVFLVLPNHCLGMAVSSFYENYETRRYCTSSEVAAHYCKKYNIQYQENFYAWSAPGVGRFVASMAASGCAYLILLFLIETNLLQRLRGILCALRRRRTLTELYTRMPVLPEDQDVADERTRILAPSPDSLLHTPLIIKELSKVYEQRVPLLAVDRLSLAVQKGECFGLLGFNGAGKTTTFKMLTGEESLTSGDAFVGGHRISSDVGKVRQRIGYCPQFDALLDHMTGREMLVMYARLRGIPERHIGACVENTLRGLLLEPHANKLVRTYSGGNKRKLSTGIALIGEPAVIFLDEPSTGMDPVARRLLWDTVARARESGKAIIITSHSMEECEALCTRLAIMVQGQFKCLGSPQHLKSKFGSGYSLRAKVQSEGQQEALEEFKAFVDLTFPGSVLEDEHQGMVHYHLPGRDLSWAKVFGILEKAKEKYGVDDYSVSQISLEQVFLSFAHLQPPTAEEGR

SEQ ID NO: 62637 - protein, 86 aa, Homo sapiens
MSFAEIKHKYLWSEPQNCSATKSNYLRGTGPYPPSVDWRKKGNFVSPVKNQGACGSCWTFSTTGALESAIAIATGKMLSLQPQLSS

SEQ ID NO: 62638 - protein, 105 aa, Homo sapiens
  MOD_RES (1)..(1): Any amino acid
XTLAAAADIATMVSGSSGLAAARLLSRSFLLPQNGIRHCSYTASRQHLYVDKNTKIICQGFTGKQELLLLTRHLSQPAGIGIWHQTRWRNHSRERRPDTSGLTCL

SEQ ID NO: 62639 - protein, 387 aa, Homo sapiens
MVGGSVPVFDEIILSTARMNRVLSFHSVSGILVCQAGCVLEELSRYVEERDFIMPLDLGAKGSCHIGGNVATNAGGLRFLRYGSLHGTVLGLEVVLADGTVLDCLTSLRKDNTGYDLKQLFIGSEGTLGIITTVSILCPPKPRAVNVAFLGCPGFAEVLQTFSTCKGMLGEILSAFEFMDAVCMQLVGRHLHLASPVQESPFYVLIETSGSNAGHDAEKLGHFLEHALGSGLVTDGTMATDQRKVKMLWALRERITEALSRDGYVYKYDLSLPVERLYDIVTDLRARLGPHAKHVVGYGHLGDGNLHLNVTAEAFSPSLLAALEPHVYEWTAGQQGSVSAEHGVGFRKRDVLGYSKPPGALQLMQQLKALLDPKGILNPYKTLPSQA

SEQ ID NO: 62640 - protein, 918 aa, Homo sapiens
MDCQLSILLLLSCSVLDSFGELIPQPSNEVNLLDSKTIQGELGWISYPSHGWEEISGVDEHYTPIRTYQVCNVMDHSQNNWLRTNWVPRNSAQKIYVELKFTLRDCNSIPLVLGTCKETFNLYYMESDDDHGVKFREHQFTKIDTIAADESFTQMDLGDRILKLNTEIREVGPVNKKGFYLAFQDVGACVALVSVRVYFKKCPFTVKNLAMFPDTVPMDSQSLVEVRGSCVNNSKEEDPPRMYCSTEGEWLVPIGKCSCNAGYEERGFMCQACRPGFYKALDGNMKCAKCPPHSSTQEDGSMNCRCENNYFRADKDPPSMACTRPPSSPRNVISNINETSVILDWSWPLDTGGRKDVTFNIICKKCGWNIKQCEPCSPNVRFLPRQFGLTNTTVTVTDLLAHTNYTFEIDAVNGVSELSSPPRQFAAVSITTNQAAPSPVLTIKKDRTSRNSISLSWQEPEHPNGIILDYEVKYYEKQEQETSYTILRARGTNVTISSLKPDTIYVFQIRARTAAGYGTNSRKFEFETSPDSFSISGESSQVVMIAISAAVAIILLTVVIYVLIGRFCGYKSKHGADEKRLHFGNGHLKLPGLRTYVDPHTYEDPTQAVHEFAKELDATNISIDKVVGAGEFGEVCSGRLKLPSKKEISVAIKTLKVGYTEKQRRDFLGEASIMGQFDHPNIIRLEGVVTKSKPVMIVTEYMENGSLDSFLRKHDAQFTVIQLVGMLRGIASGMKYLSDMGYVHRDLAARNILINSNLVCKVSDFGLSRVLEDDPEAAYTTRGGKIPIRWTSPEAIAYRKFTSASDVWSYGIVLWEVMSYGERPYWEMSNQDVIKAVDEGYRLPPPMDCPAALYQLMLDCWQKDRNNRPKFEQIVSILDKLIRNPGSLKIITSAAARPSNLLLDQSNVDITTFRTTVT

SEQ ID NO: 62641 - protein, 413 aa, Homo sapiens
MQASPIRIPTVSNDIDWDFCFHMSQQTEIPAHQQTDELYPTGGCGESEEETKAKEKEKAIDCMSHPKEKLAQSQKKVAQLIKEKMNTQANKELIRCVILSRIIFGDHHWKCARALANLAYGYLTLRGLPVQAKKHATSAKNTLLTWKANTTSNKEKEEILEALVKLYYTLGVAWLLQNRGREAYFNLQKAERNMKELKELYKGGVCELQVSENDLTLALGRASLAIHRLNLALAYFEKAIGDVIAAKGDRTSDLISLYEEAAQIEQLRRNHNQAIQYLQQAHSVCVSLFTEVSPKTAEMSALLAKAYAMSGEAQHRDAVEIYFIRSINAYRATLGSEDFETLSTTEEFCKWLVQNGEKQCLMIQIFVYGGEHSRSRETKSLLTLWQRTSSSSSRWRREAIPGRRNSTYKGTEA

SEQ ID NO: 62642 - protein, 258 aa, Homo sapiens
EAGVRGTEEDGCWVCNLESVSQSQTWQENKLSEYQIDIFFAQTWTDSRLRFNSTMKILTLNSNMVGLIWIPDTIFRNSKTAEAHWITTPNQLLRIWNDGKILYTLRLTINAECQLQLHNFPMDEHSCPLIFSSYGYPKEEMIYRWRKNSVEAADQKSWRLYQFDFMGLRNTTEIVTTSAGDYVVMTIYFELSRRMGYFTIQTYIPCILTVVLSWVSFWIKKDATPARTALGITTVLTMTTLSTIARKSLPRVSYVTAM

SEQ ID NO: 62643 - protein, 48 aa, Homo sapiens
MTLLPGDNSDYDYSALSCTSDASFHPAFLPQRQAIKGAFYRRAQRLRP

SEQ ID NO: 62644 - protein, 1886 aa, Homo sapiens
MFRQFYLWTCLASGIILGSLFEICLGQYDDDCKLARGGPPATIVAIDEESRNGTILVDNMLIKGTAGGPDPTIELSLKDNVDYWVLMDPVKQMLFLNSTGRVLDRDPPMNIHSIVVQVQCINKKVGTIIYHEVRIVVRDRNDNSPTFKHESYYATVNELTPVGTTIFTGFSGDNGATDIDDGPNGQIEYVIQYNPDDPTSNDTFEIPLMLTGNIVLRKRLNYEDKTRYFVIIQANDRAQNLNERRTTTTTLTVDVLDGDDLGPMFLPCVLVPNTRDCRPLTYQAAIPELRTPEELNPIIVTPPIQAIDQDRNIQPPSDRPGILYSILVGTPEDYPRFFHMHPRTAELSLLEPVNRDFHQKFDLVIKAEQDNGHPLPAFAGLHIEILDENNQSPYFTMPSYQGYILESAPVGATISDSLNLTSPLRIVALDKDIEDTKDPELHLFLNDYTSVFTVTQTGITRYLTLLQPVDREEQQTYTFSITAFDGVQESEPVIVNIQVMDANDNTPTFPEISYDVYVYTDMRPGDSVIQLTAVDADEGSNGEITYEILVGAQGDFIINKTTGLITIAPGVEMIVGRTYALTVQAADNAPPAERSTGILTLGKALDRESTDRYILIITASDGRPDGTSTATVNIVVTDVNDNAPVFDPYLPRNLSVVEEEANAFVGQVKATDPDAGINGQVHYSLGNFNNLFRITSNGSIYTAVKLNREVRDYYELVVVATDGAVHPRHSTLTLAIKVLDIDDNSPVFTNSTYTVLVEENLPAGTTILQIEAKDVDLGANVSYRIRSPEVKHFFALHPFTGELSLLRSLDYEAFPDQEASITFLVEAFDIYGTMPPGIATVTVIVKDMNDYPPVFSKRIYKGMVAPDAVKGTPITTVYAEDADPPGLPASRVRYRVDDVQFPYPASIFEVEEDSGRVITRVNLNEEPTTIFKLVVVAFDDGEPVMSSSATVKILVLHPGEIPRFTQEEYRPPPVSELATKGTMVGVISAAAINQSIVYSIVSGNEEDTFGINNITGVIYVNGPLDYETRTSYVLRVQADSLEVVLANLRVPSKSNTAKVYIEIQDENNHPPVFQKKFYIGGVSEDARMFTSVLRVKATDKDTGNYSVMAYRLIIPPIKEGKEGFVVETYTGLIKTAMLFHNMRRSYFKFQVIATDDYGKGLSGKADVLVSVVNQLDMQVIVSNVPPTLVEKKIEDLTEILDRYVQEQIPGAKVVVESIGARRHGDAFSLEDYTKCDLTVYAIDPQTNRAIDRNELFKFLDGKLLDINKDFQPYYGEGGRILEIRTPEAVTSIKKRGESLGYTEGALLALAFIIILCCIPAILVVLVSYRQFKVRQAECTKTARIQAALPAAKPAVPAPAPVAAPPPPPPPPPGAHLYEELGDSSMHNLFLLYHFQQSRGNNSVSEDRKHQQVVMPFSSNTIEAHKSAHVDGSLKSNKLKSARKFTFLSDEDDLSAHNPLYKENISQVSTNSDISQRTDFVDPFSPKIQAKSKSLRGPREKIQRLWSQSVSLPRRLMRKVPNRPEIIDLQQWQGTRQKAENENTGICTNKRGSSNPLLTTEEANLTEKEEIRQGETLMIEGTEQLKSLSSDSSFCFPRPHFSFSTLPTVSRTVELKSEPNVISSPAECSLELSPSRPCVLHSSLSRRETPICMLPIETERNIFENFAHPPNISPSACPLPPPPPISPPSPPPAPAPLAPPPDISPFSLFCPPPSPPSIPLPLPPPTFFPLSVSTSGPPTPPLLPPFPTPLPPPPPSIPCPPPPSASFLSTECVCITGVKCTTNLMPAEKIKSSMTQLSTTTVCKTDPQREPKGILRHVKNLAELEKSVANMYSQIEKNYLRTNVSELQTMCPSEVTNMEITSEQNKGSLNNIVEGTEKQSHSQSTSL

SEQ ID NO: 62645 - protein, 40 aa, Homo sapiens
MAEEYHRESMLVEWEQVKQRILHTLLASGEDALDFTQESE

SEQ ID NO: 62646 - protein, 201 aa, Homo sapiens
  MOD_RES (1)..(1): Any amino acid
XLTYEREEVLMNSLERLNGLPYLNKVVVVWNSPKLPSEDLLWPDIGVPIMVVRTEKNSLNNRFLPWNEIETEAILSIDDDAHLRHDEIMFGFRVWREARDRIVGFPGRYHAWDIPHQSWLYNSNYSCELSMVLTGAAFFHKVTSRWTFRCPGCPQALSHDDSHFHERHKCINFFVKVYGYMPLLYTQFRVDSVLFKTRLPH

SEQ ID NO: 62647 - protein, 136 aa, Homo sapiens
MQIFVKTLTGKTITLEVEPSDTIENVKAKIQDKEGIPPDQQRLIFAGKQLEDGRTLSDYNIQKESTLHLVLRLRGGMQIFVKTLTGKTITLEVEPSDTIENVKAKIQDKEGIPPDQQRLIFAGKQLEDGRTLSDYN

SEQ ID NO: 62648 - protein, 158 aa, Homo sapiens
MASSAEGDEGTVVALAGVLQSGFQELSLNKLATSLGASEQALRLIISIFLGYPFALFYRHYLFYKETYLIHLFHTFTGLSIAYFNFGNQLYHSLLCIVLQFLILRLMGRTITAVLTTFCFQMAYLLAGYYYTATGNYDIKWTMPHCVLTLKLIEFLVL

SEQ ID NO: 62649 - protein, 379 aa, Homo sapiens
MSDMEDDFMCDDEEDYDLTNFPEMMNRYKQLLTYIRSAVTRNYSEKSINSILDYISTSKQMDLLQEFYETTLEALKDAKNDRLWFKTNTKLGKLYLEREEYGKLQKILRQLHQSCQTDDGEDDLKKGTQLLEIYALEIQMYTAQKNNKKLKALYEQSLHIKSAIPHPLIMGVIRECGGKMHLREGEFEKAHTDFFEAFKNYDESGSPRRTTCLKYLVLANMLMKSGINPFDSQEAKPYKNDPEILAMTNLVSAYQNNDITEFEKILKTNHSNIMDDPFIREHIEELLRNIRTQVLIKLIKPYTRIHIPFISKELNIDVADVESLLVQCILDNTIHGRIDQVNQLLELDHQKRGGARYTALDKWTNQLNSLNQAVVSKLA

SEQ ID NO: 62650 - protein, 433 aa, Homo sapiens
MADTRSVHETRFEAAVKVIQSLPKNGSFQPTNEMMLKFYSFYKQATEGPCKLSRPGFWDPIGRYKWDAWSSLGDMTKEEAMIAYVEEMKKIIETMPMTEKVEELLRVIGPFYEIVEDKKSGRSSDITSVRLEKISKCLEDLGNVLTSTPNAKTVNGKAESSDSGAESEEEEAQEEVKGAEQSDNDINDDHVEDVTGIQHLTSDSDSEVYCDSMEQFGQEESLDSFTSNNGPFQYYLGGHSSQPMENSGFREDIQVPPGNGNIGNMQVVAVEGKGEVKHGGEDGRNNSGAPHREKRGGETDEFSNVRRGRGHRMQHLSEGTKGRQVGSGGDGERWGSDRGSRGSLNEQIALVLMRLQEDMQNVLQRLQKLETLTALQAKSSTSTLQTAPQPTSQRPSWWPFEMSPGVLTFAIIWPFIAQWLVYLYYQRRRRKLN

SEQ ID NO: 62651 - protein, 277 aa, Homo sapiens
MVVMIVGFLTVLIQGSTHAGGFHNVLEQSTNGSRLHIFDFDVDPLRRHTFWTITVGGTFTWLGIYGVNQSTIQRCISCKTEKHAKLALYFNLLGLWIILVCAVFSGLIMYSHFKDCDPWTSGIISAPDQLMPYFVMEIFATMPGLPGLFVACAFSGTLSTVASSINALATVTFEDFVKSCFPHLSDKLSTWISKGLCRSLIWRDVYLYGCGCICHGRCCAGFPQHSRHVWRTNAGLILPGNRVPFCELEGCTRRSSYWNHLVILGGHWGLHLPCTSL

SEQ ID NO: 62652 - protein, 189 aa, Homo sapiens
MMWSNFFLQEENRRRGAAGRRRAHGQGRSGLTPEREGKVKLALLLAAVGATLAVLSVGTEFWVELNTYKANGSAVCEAAHLGLWKACTKRLWQADVPVDRDTCGPAELPGGLLLLVSLEVFRHSVRALLQRVSPEPPPAPRLTYEYSWSLGCGVGAGLILLLGAGCFLLLTLPSWPWGSLCPKRGHRAT

SEQ ID NO: 62653 - protein, 396 aa, Homo sapiens
MAPVPLGPLGETYCEEHGEKIYFFCENDAEFLCVFCREGPTHQAHTVGFLDEAIQPYRDRLRSRLEALSTERDEIEDVKCQEDQKLQVLLTQIESKKHQVETAFERLQQELEQQRCLLLARLRELEQQIWKERDEYITKVSEEVTRLGAQVKELEEKCQQPASELLQDVRGTIVTCEMKTFVSPEAISPDLVKKIRDFHRKILTLPEMMRMFSENLAHHLEIDSGVITLDPQTASRSLVLSEDRKSVRYTRQKKSLPDSPLRFDGLPAVLGFPGFSSGRHRWQVDLQLGDGGGCTVGVAGEGVRRKGEMGLSAEDGVWAVIISHQQCWASTSPGTDLPLSEIPRGVRVALDYEAGQVTLHNAQTQEPIFTFTASFSGKVFPFFAVWKKGSCLTLKG

SEQ ID NO: 62654 - protein, 370 aa, Homo sapiens
MVQPFTTIPFPPPPQNGIPTEYGVPHTQDYAGQTGEHNLTLYGSTQAHGEQSSNSPSTQNGSLTTEGGAQTDGQQSQTQSSENSESKSTPKRLHVSNIPFRFRDPDLRQMFGQFGKILDVEIIFNERGSKGFGFVTFENSADADRAREKLHGTVVEGRKIEVNNATARVMTNKKMVTPYANGWKLSPVVGAVYGPELYAASSFQADVSLGNDAAVPLSGRGGINTYIPLIIPGFPYPTAATTAAAFRGAHLRGRGRTVYGAVRAVPPTAIPAYPGVVYQDGFYGADLYIESANCFRSNRVDMQPTDMHSLLLQPQPPLLQPLQPLTVTVMAGCTQPTPTMPLPLPLAMELALWRVYTEVATADLPPTEVT

SEQ ID NO: 62655 - protein, 22 aa, Homo sapiens
MLRPRFLPPDDRTVREALGRRQ

SEQ ID NO: 62656 - protein, 35 aa, Homo sapiens
MSRYLLPLSALGTVAGAAVLLKRQHHPGLPRHGEV

SEQ ID NO: 62657 - protein, 384 aa, Homo sapiens
MSKSKVDNQFYSVEVGDSTFTVLKRYQNLKPIGSGAQGIVCAAYDAVLDRNVAIKKLSRPFQNQTHAKRAYRELVLMKCVNHKNIISLLNVFTPQKTLEEFQDVYLVMELMDANLCQVIQMELDHERMSYLLYQMLCGIKHLHSAGIIHRDLKPSNIVVKSDCTLKILDFGLARTAGTSFMMTPYVVTRYYRAPEVILGMGYKENVDIWSVGCIMGEMVRHKILFPGRDYIDQWNKVIEQLGTPCPEFMKKLQPTVRNYVENRPKYAGLTFPKLFPDSLFPADSEHNKLKASQARDLLSKMLVIDPAKRISVDDALQHPYINVWYDPAEVEAPPPQIYDKQLDEREHTIEEWKELIYKEVMNSEEKTKNGVVKGQPSPSAQVQQ

SEQ ID NO: 62658 - protein, 273 aa, Homo sapiens
MKLKDSLFDLDGPKVASPLSPTSLTHTSRPPAALTPVPLSQGDLSHPPRKKDRKNRKLGPGAGAGFGVLRRPRPTPGDGEKRSRIKKSKKRKLKKAERGDRLPPPGPPQAPPSDTDSEEEEEEEEEEEEEEMATVVGGEAPVPVLPTPPEAPRPPATVHPEGVPPADSESKEVGSTETSQDGDASSSEGEMRVMDEDIMVESGDDSWDLITCYCRKPFAGRPMIECSLCGTWIHLSCAKIKKTNVPDFFYCQKCKELRPEARRLGGPPKSGEP

SEQ ID NO: 62659 - protein, 132 aa, Homo sapiens
MAAEFDTFLASGLRWFCHVDDDNYVNPRALLQLLRAFPLARDVYVGRPSLNRPIHASEPQPHNRTRLVQFWFATGGAGFCINRKLALKMAPWASGSRFMDTSALIRLPDDCTMGYIIECKLGGRLQPSPLFH

SEQ ID NO: 62660 - protein, 482 aa, Homo sapiens
MVDFPGYNLSGAVASFLFILLTMKQSEDFRVIGPAHPILAGVGEDALLTCQLLPKRTTMHVEVRWYRSEPSTPVFVHRDGVEVTEMQMEEYRGWVEWIENGIAKGNVALKIHNIQPSDNGQYWCHFQDGNYCGETSLLLKVAGLGSAPSIHMEGPGESGVQLVCTARGWFPEPQVYWEDIRGEKLLAVSEHRIQDKDGLFYAEATLVVRNASAESVSCLVHNPVLTEEKGSVISLPEKLQTELASLKVNGPSQPILVRVGEDIQLTCYLSPKANAQSMEVRWDRSHRYPAVHVYMDGDHVAGEQMAEYRGRTVLVSDAIDEGRLTLQILSARPSDDGQYRCLFEKDDVYQEASLDLKVVSLGSSPLITVEGQEDGEMQPMCSSDGWFPQPHVPWRDMEGKTIPSSSQALTQGSHGLFHVQTLLRVTNISAVDVTCSISIPFLGEEKIATFSLSESRMTFLWKTLLVWGLLLAVAVGLPRKRS

SEQ ID NO: 62661 - protein, 502 aa, Homo sapiens
MAIHLDKQNIILKNDKDEYLKKTRDGVLPPYQDAKPPSPASIKKTYTTSKFNDAEPAKGNLFIGVEVLPENLHLDESETSEEDHGSLEKEKYEQFLSLEEGTKAHYFFEKVVNAAQTWFSLFGWPEGPHSFSIPETIRRDVYKMQFYSSTSPPQKFSRQNDFSKYNKTIYDVLLHLSGKMPPGINSSQSLPVDNHEKRVIQLHLQHSSLLDFLNAQGGCISHVLPEFLLEPEDYKRWIEIMSSTNTMPVSSCTPKKKCSIVIEMSKFEAWSKRAWTDVFLQIYKVLVLSRVVPYCSNNMPPICVQNTPKVNPCFASSNIYSDSERILLSWMNINYENTRHVIWKNCHKDVIPSERWIVNFDKDLSDGLVFATQLGAYCPFLIESHFINMYTRPKSPEEYLHNCLIIVNTLYEIDFDVEIQVCLRVFPKEMDAGVSGLRKEDMPSVWVVTIRLAVAVARTKRQKKGDIQFACFFVCLFFFIFVVISFSLWSRMHFFLLLPLDI

SEQ ID NO: 62662 - protein, 47 aa, Homo sapiens
MDMAQEPVTFRDVAIYFSREEWACLEPSQRALYRDVMLDNFSSVAAL

SEQ ID NO: 62663 - protein, 570 aa, Homo sapiens
MGVKTFTHSSSSHSQEMLGKLNMLRNDGHFCDITIRVQDKIFRAHKVVLAACSDFFRTKLVGQAEDENKNVLDLHHVTVTGFIPLLEYAYTATLSINTENIIDVLAAASYMQMFSVASTCSEFMKSSILWNTPNSQPEKGLDAGQENNSNCNFTSRDGSISPVSSECSVVERTIPVCRESRRKRKSYIVMSPESPVKCGTQTSSPQVLNSSASYSENRNQPVDSSLAFPWTFPFGIDRRIQPEKVKQAENTRTLELPGPSETGRRMADYVTCESTKTTLPLGTEEDVRVKVERLSDEEVHEEVSQPVSASQSSLSDQQTVPGSEQVQEDLLISPQSSSIGSVDEGVSEGLPTLQSTSSTNAPPDDDDRLENVQYPYQLYIAPSTSSTERPSPNGPDRPFQCPTCGVRFTRIQNLKQHMLIHSGIKPFQCDRCGKKFTRAYSLKMHRLKHEGKRCFRCQICSATFTSFGEYKHHMRVSRHIIRKPRIYECKTCGAMFTNSGNLIVHLRSLNHEASELANYFQSSDFLVPDYLNQEQEETLVQYDLGEHGFESNSSVQMPVISQYHSKGKEP

SEQ ID NO: 62664 - protein, 68 aa, Homo sapiens
MGGGDLNLKKSWHPQTLRNVEKVWKAEQKHEAERKKIEELQRELREERAREEMQRYAEDVGAVKSSWK

SEQ ID NO: 62665 - protein, 348 aa, Homo sapiens
MSLLVVSMACVGFFLLQGAWPHEGVHRKPSLLAHPGRLVKSEETVILQCWSDVMFEHFLLHREGMFNDTLRLIGEHHDGVSKANFSISRMTQDLAGTYRCYGSVTHSPYQVSAPSDPLDIVIIGLYEKPSLSAQPGPTVLAGENVTLSCSSRSSYDMYHLSREGEAHERRLPAGPKVNGTFQADFPLGPATHGGTYRCFGSFHDSPYEWSKSSDPLLVSVTGNPSNSWPSPTEPSSKTGNPRHLHILIGTSVVIILFILLFFLLHRWCSNKKNAAVMDQESAGNRTANSEDSDEQDPQEVTYTQLNHCVFTQRKITRPSQRPKTPPTDIIVYTELPNAESRSKVVSCP

SEQ ID NO: 62666 - protein, 102 aa, Homo sapiens
MGPRRLLLVAACFSLCGPLLSARTRARRPVTFRWGVPPPSRAQPMPLWTRSWRVQPACHGVLDMEEDGAEAPWGSLQSCVALVIVFLPGPPPKRKALTLLHQ

SEQ ID NO: 62667 - protein, 76 aa, Homo sapiens
MSDQELAEVFADSDDENLNTESPAGLHPLPRAGYLRSPSWTRTRAEQSHEKQPLGDPERQATVLDTFLTVERPQED

SEQ ID NO: 62668 - protein, 867 aa, Homo sapiens
MAADVVGDVYVLVEHPFEYTGKDGRRVAIRPNERYRLLRRSTEHWWHVRREPGGRPFYLPAQYVRELPALGNPAAAAPPGPHPSPAAPEPLAYDYRFVSAAATAGPDGAPEESGGRASSLCGPAQRGAATQRSSLAPGLPACLYLRPAAPVRPAQSLNDLACAAVSPPAGLLGSSGSFKACSVAGSWVCPRPLARSDSENVYEVIQDLHVPPPEESAEQVDDPPEPVYANIERQPRATSPGAAAAPLPSPVWETHTDAGTGRPYYYNPDTGVTTWESPFEAAEGAASPATSPASVDSHVSLETEWGQYWDEESRRVFFYNPLTGETAWEDEAENEPEEELEMQPGLSPGSPGDPRPPTPETDYPESLTSYPEEDYSPVGSFGEPGPTSPLTTPPGWSCHVSQDKQMLYTNHFTQEQWVRLEDPHGKPYFYNPEDSSVRWELPQVPVPAPRSIHKSSQDGDTPAQASPPEEKTKTLDKAGVLHRTKTADKGKRLRKKHWSASWTVLEGGVLTFFKDSKTSAAGGLRQPSKFSTPEYTVELRGATLSWAPKDKSSRKNVLELRSRDGSEYLIQHDSEAIISTWHKAIAQGIQELSAELPPEESESSRVDFGSSERLGSWQEKEEDARPNAAAPALGPVGLESDLSKVRHKLRKFLQRRPTLQSLREKGYIKDQVFGCALAALCERERSRVPRFVQQCIRAVEARGLDIDGLYRISGNLATIQKLRYKVDHDERLDLDDGRWEDVHVITGALKLFFRELPEPLFPFSHFRQFIAAIKLQDQARRSRCVRDLVRSLPAPNHDTLRMLFQHLCRVIEHGEQNRMSVQSVAIVFGPTLLRPEVEETSMPMTMVFQNQVVELILQQCADIFPPH

SEQ ID NO: 62669 - protein, 209 aa, Homo sapiens
MPRGSRARGSKRKRSWNTECPSFPGERPLQVRRAGLRTAGAAASLSEAWLRCGEGFQNTSGNPSLTAEEKTITEKHLELCPRPKQETTTSKSTSGLTDITWSSSGSDLSDEDKTLSQLQRDELQFIDWEIDSDRAEASDCDEFEDDEGAVEISDCASCASNQSLTSDEKLSELPKRWTSRKTKWTAESREICYFFVETSMYFLPKDTFR

SEQ ID NO: 62670 - protein, 260 aa, Homo sapiens
MDIASTNTSNKSDTNMEQVPATNDTIKRLESKLLKNQAKQQSESGRLSLGASRGSSVESLPPTSEGKRMSADMSEIEARIAATTGNGQPRRRSIQDLTVTGTEPGQVSSRSSSPSVRMITTSGPTSEKPTRSHPWTPDDSTDTNGSDNSIPMAYLTLDHQLQPLAPCPNSKESMAVFEQHCKMAQEYMKVQTEIALLLQRKQELVAELDQDEKDQQNTSRLVQEHKKLLDENKSLSTYYQQCKKQLEVIRSQQQKRQGTS

SEQ ID NO: 62671 - protein, 504 aa, Homo sapiens
MKQTKLEIQKALAEDATVYEYDSIYDEMQKKKEENNPKLLLGKDRKPKYIHNLLKAVEIRKKEQEKRMEKKIQREREMEKGEFDDKEAFVTSAYKKKLQERAEEEEREKRAAALEACLDVTKQKDLSGFYRHLLNQAVGEEEVPKCSFREARSGIKEEKSRGFSNEVSSKNRIPQEKCILQTDVKVEENPDADSDFDAKSSADDEIEETRVNCRREKVIETPENDFKHHRSQNHSRSPSEERGHSTRHHTKGSRTSRGHEKREDQHQQKQSRDQENHYTDRDYRKERDSHRHREASHRDSHWKRHEQEDKPRARDQRERSDRVWKREKDREKYSQREQERDRQQNDQNRPSEKGEKEEKSKAKEEHMKVRKERYENNDKYRDREKREVGVQSSERNQDRKESSPNSRAKDKFLDQERSNKMRNMAKDKERNQEKPSNSESSLGAKHRLTEEGQEKGKEQERPPEAVSKFAKRNNEETVMSARDRYLARQMARVNAKTYIEKEDD

SEQ ID NO: 62672 - protein, 128 aa, Homo sapiens
MSDHGDVSLPPEDRVRALSQLGSAVEVNEDIPPRRYFRSGVEIIRMASIYSEEGNIEHAFILYNKYITLFIEKLPKHRDYKSAVIPEKKDTVKVGLHFHCCPSKSFRAAQTDFKIKVVVSASEYQILQ

SEQ ID NO: 62673 - protein, 42 aa, Homo sapiens
MASATAPAAAVPTLASPLEQLRHLAEELRLLLPRVRGNPEVL

SEQ ID NO: 62674 - protein, 85 aa, Homo sapiens
MSLRVSQSVLIRRMESSFPYSNGLTLLLTDAGLDLLGSSSLLTSASQSAGITDVSYRSQLPLFLINGINVFLNGGRGNICQLYLC

SEQ ID NO: 62675 - protein, 845 aa, Homo sapiens
MSGARGEGPEAGAGGAGGRAAPENPGGVLSVELPGLLAQLARSFALLLPVYALGYLGLSFSWVLLALALLAWCRRSRGLKALRLCRALALLEDEERVVRLGVRACDLPAWVHFPDTERAEWLNKTVKHMWPFICQFIEKLFRETIEPAVRGANTHLSTFSFTKVDVGQQPLRINGVKVYTENVDKRQIILDLQISFVGNCEIDLEIKRYFCRAGVKSIQIHGTMRVILEPLIGDMPLVGALSIFFLRKPLLEINWTGLTNLLDVPGLNGLSDTIILDIISNYLVLPNRITVPLVSEVQIAQLRFPVPKGVLRIHFIEAQDLQGKDTYLKGLVKGKSDPYGIIRVGNQIFQSRVIKENLSPKWNEVYEALVYEHPGQELEIELFDEDPDKDDFLGSLMIDLIEVEKERLLDEWFTLDEVPKGKLHLRLEWLTLMPNASNLDKVLTDIKADKDQANDGLSSALLILYLDSARNLPSGKKISSNPNPVVQMSVGHKAQESKIRYKTNEPVWEENFTFFIHNPKRQDLEVEVRDEQHQCSLGNLKVPLSQLLTSEDMTVSQRFQLSNSGPNSTIKMKIALRVLHLEKRERPPDHQHSAQVKRPSVSKEGRKTSIKSHMSGSPGPGGSNTAPSTPVIGGSDKPGMEEKAQPPEAGPQGLHDLGRSSSSLLASPGHISVKEPTPSIASDISLPIATQELRQRLRQLENGTTLGQSPLGQIQLTIRHSSQRNKLIVVVHACRNLIAFSEDGSDPYVRMYLLPDKRRSGRRKTHVSKKTLNPVFDQSFDFSVSLPEVQRRTLDVAVKNSGGFLSKDKGLLGKVLVALASEELAKGWTQWYDLTEDGTRPQAMT

SEQ ID NO: 62676 - protein, 36 aa, Homo sapiens
MTVAMLMKNTIIAAKKVLRLEEREVLKSKELGVATN

SEQ ID NO: 62677 - protein, 131 aa, Homo sapiens
MGGDGRYVLNGHWVVSPPGTYEAAGTHVVYTRDTGPQETLQAAGPTSHDLLLQVLLQEPNPGIEFEFWLPRERYSPFQARVQALGWPLRQPQPRGVEPQPPAAPAVTPAQTPTLAPGPSAGPPPPGPGDPL

SEQ ID NO: 62678 - protein, 340 aa, Homo sapiens
MGLGRVLLFLAVAFPFAPPAAAAEPHSLRYNLMVLSQDGSVQSGFLAEGHLDGQPFLRYDRQKRRAKPQGQWAEDVLGAKTWDTETEDLTENGQDLRRTLTHIKDQKGVPQSSRAQTLAMNVTNFWKEDAMKTKTHYRAMQADCLQKLQRYLKSGVAIRRTVPPMVNVTCSEVSEGNITVTCRASSFYPRNITLTWRQDGVSLSHNTQQWGDVLPDGNGTYQTWVATRIRQGEEQRFTCYMEHSGNHGTHPVPSGKALVLQSQRTDFPYVSAAMPCFVIIIILCVPCCKKKTSAAEGPELVSLQVLDQHPVGTGDHRDAAQLGFQPLMSATGSTGSTEGA

SEQ ID NO: 62679 - protein, 46 aa, Homo sapiens
MDGSRRGKGQLSGATAASPLAPGGAPSLGSGQLSARPPLGALPTPG

SEQ ID NO: 62680 - protein, 56 aa, Homo sapiens
MMVQRLGLISPPASQVSTACNQISPSLQRAMNAANLNIPPSDTRKCGKHGKVPSTK

SEQ ID NO: 62681 - protein, 235 aa, Homo sapiens
MFRDFGEPGPSSGNGGGYGGPAQPPAAAQAAQQKFHLVPSINTMSGSQELQWMVQPHFLGPSSYPRPLTYPQYSPPQPRPGVIRALGPPPGVRRRPCEQETDKLEDEKSGLQREIEELQKQKERLELVLEAHRPICKIPEGAKEGDTGSTSGTSSPPAPCRPVPCISLSPGPVLEPEALHTPTLMTTPSLTPFTPSLVFTYPSTPEPCASAHRKSSSSSGDPSSDPLGSPTLLAL

SEQ ID NO: 62682 - protein, 588 aa, Homo sapiens
MATTATCTRFTDDYQLFEELGKGAFSVVRRCVKKTSTQEYAAKIINTKKLSARDHQKLEREARICRLLKHPNIVRLHDSISEEGFHYLVFDLVTGGELFEDIVAREYYSEADASHCIHQILESVNHIHQHDIVHRDLKPENLLLASKCKGAAVKLADFGLAIEVQGEQQAWFGFAGTPGYLSPEVLRKDPYGKPVDIWACGVILYILLVGYPPFWDEDQHKLYQQIKAGAYDFPSPEWDTVTPEAKNLINQMLTINPAKRITADQALKHPWVCQRSTVASMMHRQETVECLRKFNARRKLKGAILTTMLVSRNFSVGRQSSAPASPAASAAGLAGQAAKSLLNKKSDGGVKKRKSSSSVHLMPQSNNKNSLVSPAQEPAPLQTAMEPQTTVVHNATDGIKGSTESCNTTTEDEDLKAAPLRTGNGSSVPEGRSSRDRTAPSAGMQPQPSLCSSAMRKQEIIKITEQLIEAINNGDFEAYTKICDPGLTSFEPEALGNLVEGMDFHKFYFENLLSKNSKPIHTTILNPHVHVIGEDAACIAYIRLTQYIDGQGRPRTSQSEETRVWHRRDGKWLNVHYHCSGAPAAPLQ

SEQ ID NO: 62683 - protein, 399 aa, Homo sapiens
MACLLETPIRMSVLSEVTASSRHYVDRLFDPDPQKVLQGVIDMKNAVIGNNKQKANLIVLGAVPRLLYLLQQETSSTELKTECAVVLGSLAMGTENNVKSLLDCHIIPALLQGLLSPDLKFIEACLRCLRTIFTSPVTPEELLYTDATVIPHLMALLSRSRYTQEYICQIFSHCCKGPDHQTILFNHGAVQNIAHLLTSLSYKVRMQALKCFSVLAFENPQVSMTLVNVLVDGELLPQIFVKMLQRDKPIEMQLTSAKCLTYMCRAGAIRTDDNCIVLKTLPCLVRMCSKERLLEERVEGAETLAYLIEPDVELQRIASITDHLIAMLADYFKYPSSVSAITDIKRLDHDLKHAHELRQAAFKLYASLGANDEDIRKKVSLGEGRPPVLTASRQGVTST

SEQ ID NO: 62684 - protein, 450 aa, Homo sapiens
VKKTMEATLQTIQDIVTVEDFDVSDCFQYSNSMESVKSTVSETFMSKPSIAKRRANQQETEQFYFTKMKEYLEGRNLITKLQAKHDLLQKTLGESQRTDCSLARRSSTVRKQDSSQAIPLVVESCIRFISRHGLQHEGIFRVSGSQVEVNDIKNAFERGEDPLAGDQNDHDMDSIAGVLKLYFRGLEHPLFPKDIFHDLMACVTMDNLQERALHIRKVLLVLPKTTLIIMRYLFAFLNHLSQFSEENMMDPYNLAICFGPSLMSVPEGHDQVSCQAHVNELIKTIIIQHENIFPSPRELEGPVYSRGGSMEDYCDSPHGETTSVEDSTQDVTAEHHTSDDECEPIEAIAKFDYVGRTARELSFKKGASLLLYQRASDDWWEGRHNGIDGLIPHQYIVVQDTEDGVVERSSPKSEIEVISEPPEEKVTARAGASCPSGGHVADIYLANINK

SEQ ID NO: 62685 - protein, 448 aa, Homo sapiens
MNPIVYWEYQIMPQVPVFTVEVKNYGVKNSEWIDACINISHHYCNISDHVGDPSNSLWVRVKARVGQKESAYAKSEEFAVCRDGKIGPPKLDIRKEEKQIMIDIFHPSVFVNGDEQEVDYDPETTCYIRVYNVYVRMNGSEIQYKILTQKEDDCDEIQCQLAIPVSSLNSQYCVSAEGVLHVWGVTTEKSKEVCITIFNSSIKGSLWIPVVAALLLFLVLSLVFICFYIKKINPLKEKSIILPKSLISVVRSATLETKPESKYVSLITSYQPFSLEKEVVCEEPLSPATVPGMHTEDNPGKVEHTEELSSITEVVTTEENIPDVVPGSHLTPIERESSSPLSSNQSEPGSIALNSYHSRNCSESDHSRNGFDTDSSCLESHSSLSDSEFPPNNKGEIKTEGQELITVIKAPTSFGYDKPHVLVDLLVDDSGKESLIGYRPTEDSKEFS

SEQ ID NO: 62686 - protein, 97 aa, Homo sapiens
MTPQSLLQTTLFLLSLLFLVQGSGTRHTGAASTTNPHQTCASPSRTPKRPSQSMPLSLQPTLLPDPSLTPGASTTSASTGTDMLGDYIFSMASVTSC

SEQ ID NO: 62687 - protein, 370 aa, Homo sapiens
MAPPSPSTTSSNNNSSSSSNSGWDQLSKTNLYIRGLPPHTTDQDLVKLCQPYGKIVSTKAILDKTTNKCKGYGFVDFDSPAAAQKAVSALKASGVQAQMAKQQEQDPTNLYISNLPLSMDEQELENMLKPFGQVISTRILRDSSGTSRGVGFARMESTEKCEAVIGHFNGKFIKTPPGVSAPTEPLLCKFADGGQKKRQNPNKYIPNGRPWHREGEAGMTLTYDPTTAAIQNGFYPSPYSIATNRMITQTSITPYIASPVSAYQVQSPSWMQPQPYILQHPGAVLTPSMEHTMSLQPASMISPLAQQMSHLSLGSTGTYMPATSAMQGAYLPQYAHMQTTAVPVEEASGQQQVAVETSNDHSPYTFQPNK

SEQ ID NO: 62688 - protein, 149 aa, Homo sapiens
MCVRRSLVGLTFCTCYLASYLTNKYVLSVLKFTYPTLFQGWQTLIGGLLLHVSWKLGWVEINSSSRSHVLVWLPASVLFVGIIYAGSRALSRLAIPVFLTLHNVAEVIICGYQKCFQKEKTSPAKICRLHLERTRQNQTSRLSSCLKGD

SEQ ID NO: 62689 - protein, 365 aa, Homo sapiens
MERAGATSRGGQAPGFLLRLHTEGRAEAARVQEQDLRQWGLTGIHLRSYQLEGVNWLAQRFHCQNGCILGDEMGLGKTCQTIALFIYLAGRLNDEGPFLILCPLSVLSNWKEEMQRFAPGLSCVTYAGDKEERACLQQDLKQESRFHVLLTTYEICLKDASFLKSFPWSVLVVDEAHRLKNQSSLLHKTLSEFSVVFSLLLTGTPIQNSLQELYSLLSFVEPDLFSKEEVGDFIQRYQDIEKESESASELHKLLQPFLLRRVKAEVATELPKKTEVVIYHGMSALQKKYYKAILMKDLDAFENETAKKVKLQNILSQLRKCVDHPYLFDGVEPEPFEVGDHLTEASGKLHLLDKLLAFLYSGLQL

SEQ ID NO: 62690 - protein, 81 aa, Homo sapiens
MIHFILLFSRQGKLRLQKWYITLPDKERKKITREIVQIILSRGHRTSSFVDWKELKLVYKRSVSWILSLILKRLISSWTSL

SEQ ID NO: 62691 - protein, 605 aa, Homo sapiens
MVFQTRYPSWIILCYIWLLRFAHTGEAQAAKEVLLLDSKAQQTELEWISSPPNGWEEISGLDENYTPIRTYQVCQVMEPNQNNWLRTNWISKGNAQRIFVELKFTLRDCNSLPGVLGTCKETFNLYYYETDYDTGRNIRENLYVKIDTIAADESFTQGDLGERKMKLNTEVREIGPLSKKGFYLAFQDVGACIALVSVKVYYKKCWSIIENLAIFPDTVTGSEFSSLVEVRGTCVSSAEEEAENAPRMHCSAEGEWLVPIGKCICKAGYQQKGDTCEPCGRGFYKSSSQDLQCSRCPTHSFSDKEGSSRCECEDGYYRAPSDPPYVACTRPPSAPQNLIFNINQTTVSLEWSPPADNGGRNDVTYRILCKRCSWEQGECVPCGSNIGYMPQQTGLEDNYVTVMDLLAHANYTFEVEAVNGVSDLSRSQRLFAAVSITTGQAAPSQVSGVMKERVLQRSVELSWQEPEHPNGVITEYEIKYYEKDQRERTYSTVKTKSTSASINNLKPGTVYVFQIRAFTAAGYGNYSPRLDVATLEEATATAVSSEQNPVIIIAVVAVAGTIILVFMVFGFIIGRRHCGYSKADQEGDEELYFHSLVTNEHLSVL

SEQ ID NO: 62692 - protein, 97 aa, Homo sapiens
MSSRTVLAPGNDRNSDTAENLLLDAEANIKIADFGFSNEFTLGSKLDTFCGSPPYAAPELFQGKKYDGPEVDIWSLGVILYTLVSGSLPFDGHNLKR

SEQ ID NO: 62693 - protein, 443 aa, Homo sapiens
MASVVLPSGSQCAAAAAAAAPPGLRLRLLLLLFSAAALIPTGDGQNLFTKDVTVIEGEVATISCQVNKSDDSVIQLLNPNRQTIYFRDFRPLKDSRFQLLNFSSSELKVSLTNVSISDEGRYFCQLYTDPPQESYTTITVLVPPRNLMIDIQKDTAVEGEEIEVNCTAMASKPATTIRWFKGNTELKGKSEVEEWSDMYTVTSQLMLKVHKEDDGVPVICQVEHPAVTGNLQTQRYLEVQYKPQVHIQMTYPLQGLTREGDALELTCEAIGKPQPVMVTWVRVDDEMPQHAVLSGPNLFINNLNKTDNGTYRCEASNIVGKAHSDYMLYVYDTTATTEPAVHGLTQLPNSAEELDSEDLSDSRAGEEGSIRAVDHAVIGGVVAVVVFAMLCLLIILGRYFARHKGTYFTHEAKGADDAADADTAIINAEGGQNNSEEKKEYFI

SEQ ID NO: 62694 - protein, 198 aa, Homo sapiens
MLLILLSVALLALSSAQNLNEDVSQEESPSLIAGNPQGPSPQGGNKPQGPPPPPGKPQGPPPQGGNKPQGPPPPGKPQGPPPQGDKSRSPRSPPGKPQGPPPQGGKPQGPPPQGGNKPQGPPPPGKPQGPPAQGGSKSQSARSPPGKPQGPPQQEGNNPQGPPPPAGGNPQQPQAPPAGQPQGPPRPPQGGRPSRPPQ

SEQ ID NO: 62695 - protein, 175 aa, Homo sapiens
MTRILEATNSLFLPLPPGFHTLHTILGVQCLPLHNLLHCIDSGVLLLTETAVIRLMKDLDNTEKNEKLKFSIIVRLPPLIGQKICRLWDHPMSSNIISRNHVTRLLQNYKKQPRNSMINKSSFSVEFLPLNYFIEILTDIESSNQALYPFEGHDNVDAEFVEEAALKHTAMLLGL

SEQ ID NO: 62696 - protein, 253 aa, Homo sapiens
MSGGGVIRGPAGNNDCRIYVGNLPPDIRTKDIEDVFYKYGAIRDIDLKNRRGGPPFAFVEFEDPRDAEDAVYGRDGYDYDGYRLRVEFPRSGRGTGRGGGGGGGGGAPRGRYGPPSRRSENRVVVSGLPPSGSWQDLKDHMREAGDVCYADVYRDGTGVVEFVRKEDMTYAVRKLDNTKFRSHEGETAYIRVKVDGPRSPSYGRSRSRSRSRSRSRSRSNSRSRSYSPRRSRGSPRYSPRHSRSRSHISEEMD

SEQ ID NO: 62697 - protein, 382 aa, Homo sapiens
MPGGGPQGAPAAAGGGGVSHRAGSRDCLPPAACFRRRRLARRPGYMRSSTGPGIGFLSPAVGTLFRFPGGVSGEESHHSESRARQCGLDSRGLLVRSPVSKSAAAPTVTSVRGTSAHFGIQLRGGTRLPDRLSWPCGPGSAGWQQEFAAMDSSETLDASWEAACSDGARRVRAAGSLPSAELSSNSCSPGCGPEVPPTPPGSHSAFTSSFSFIRLSLGSAGERGEAEGCPPSREAESHCQSPQEMGAKAASLDGPHEDPRCLSRPFSLLATRVSADLAQAARNSSRPERDMHSLPDMDPGSSSSLDPSLAGCGGDGSSGSGDAHSWDTLLRKWEPVLRDCLLRNRRQMEVISLRLKLQKLQEDAVENDDYDKGPAEMTPTPH

SEQ ID NO: 62698 - protein, 7 aa, Homo sapiens
  MOD_RES (1)..(1): Any amino acid
XPSLGLG

SEQ ID NO: 62699 - protein, 112 aa, Homo sapiens
MTAELREAMALAPWGPVKVKKEEEEEENFPGQASSQQVHSENIKVWAPVQGLQTGLDGSEEEEKGQNISWDMAVVLKATQEAPAASTLGSYSLPGTLAKSEILETHGTMNFL

SEQ ID NO: 62700 - protein, 489 aa, Homo sapiens
MAAEVLSRRCVLMRLLDFSYEQYQKALRQSAGAVVIILPRAMAAVPQDVVRQFMEIEPEMLAMETAVPVYFAVEDEALLSIYKQTQAASASQGSASAAEVLLRTATANGFQMVTSGVQSKAVSDWLIASVEGRLTGLGGEDLPTIVIVAHYDAFGVAPWLSLGADSNGSGVSVLLELARLFSRLYTYKRTHAAYNLLFFASGGGKFNYQGTKRWLEDNLDHTDSSLLQDNVAFVLCLDTVGRGSSLHLHVSKPPREGTLQHAFLRELETVAAHQFPEVRFSMVHKRINLAEDVLAWEHERFAIRRLPAFTLSHLESHRDGQRSSIMDVRSRVDSKTLTRNTRIIAEALTRVIYNLTEKGTPPDMPVFTEQMQIQQEQLDSVMDWLTNQPRAAQLVDKDSTFLSTLEHHLSRYLKDVKQHHVKADKRDPEFVFYDQLKQVMNAYRVKPAVFDLLLAVGIAAYLGMAYVAVQHFSLLYKTVQRLLVKAKTQ

SEQ ID NO: 62701 - protein, 314 aa, Homo sapiens
MYQVDFLDTNIIITEPYFNFTSIQESMNEILFEEYQFQAVLRVNAGALSAHRYFRDNPSELCCIIVDSGYSFTHIVPYCRSKKKKEAIIRINVGGKLLTNHLKEIISYRQLHVMDETHVINQVKEDVCYVSQDFYRDMDIAKLKGEENTVMIDYVLPDFSTIKKGFCKPREEMVLSGKYKSGEQILRLANERFAVPEILFNPSDIGIQEMGIPEAIVYSIQNLPEEMQPHFFKNIVLTGGNSLFPGFRDRVYSEVRCLTPTDYDVSVVLPENPITYAWEGGKLISENDDFEDMVVTREDYEENGHSVCEEKFDI

SEQ ID NO: 62702 - protein, 191 aa, Homo sapiens
MLSPRGVTRARQLLPLRLWPRRSWGDGSIMASMQTTGRRVEVWFPKRLQKELLALQNDPPPGMTLNEKSVQNSITQWIVDMEGAPGTLYEGEKFQLLFKFSSRYPFDSPQVMFTGENIPVHPHVYSNGHICLSILTEDWSPALSVQSVCLSIISMLSSCKEKRRPPDNSFYVRTCNKNPKKTKWWYHDDTC

SEQ ID NO: 62703 - protein, 147 aa, Homo sapiens
MDEEYDVIVLGTGLTECILSGIMSVNGKKVLHMDRNPYYGGESSSITPLEELYKRFQLLEGPPESMGRGRDWNVDLIPKFLMANGQLVKMLLYTEVTRYLDFKVVEGSFVYKGGKIYKVPSTETEALASRPPLNPRDIAKCLSQEGP

SEQ ID NO: 62704 - protein, 42 aa, Homo sapiens
MSLAAYCVICCRRIGTSTSPPKSGTHWRDIKVLYFLHMKFWP

SEQ ID NO: 62705 - protein, 106 aa, Homo sapiens
  MOD_RES (1)..(1): Any amino acid
XFKQAVYKQTMKLFAELEIKRKEREAKEMHERKRQREEEIEAQEKAKREREWQKNFEESRDGRVDSWRNFQANTKGKKEKKNRTFLRPPKVKMEQRTESALRRGPK

SEQ ID NO: 62706 - protein, 1024 aa, Homo sapiens
MDLASKAGKHLQLKETFERHSRVYTFEMQIIKAKDNFAGNYRCEVTYKDKFDSCSFDLEVHESTGTTPNIDIRSAFKRSGEGQEDAGELDFSGLLKRREVKQQEEEPQVDVWELLKNAKPSEYEKIAFQYGITDLRGMLKRLKRMRREEKKSAAFAKILDPAYQVDKGGRVRFVVELADPKLEVKWYKNGQEIRPSTKYIFEHKGCQRILFINNCQMTDDSEYYVTAGDEKCSTELFVREPPIMVTKQLEDTTAYCGERVELECEVSEDDANVKWFKNGEEIIPGPKSRYRIRVEGKKHILIIEGATKADAAEYSVMTTGGQSSAKLSVDLKPLKILTPLTDQTVNLGKEICLKCEISENIPGKWTKNGLPVQESDRLKVVHKGRIHKLVIANALTEDEGDYVFAPDAYNVTLPAKVHVIDPPKIILDGLDADNTVTVIAGNKLRLEIPISGEPPPKAMWSRGDKAIMEGSGRIRTESYPDSSTLVIDIAERDDSGVYHINLKNEAGEAHASIKVKVVDFPDPPVAPTVTEVGDDWCIMNWEPPAYDGGSPILGYFIERKKKQSSRWMRLNFDLCKETTFEPKKMIEGVAYEVRIFAVNAIGISKPSMPSRPFVPLAVTSPPTLLTVDSVTDTTVTMRWRPPDHIGAAGLDGYVLEYCFEGTEDWIVANKDLIDKTKFTITGLPTDAKIFVRVKAVNAAGASEPKYYSQPILVKEIIEPPKIRIPRHLKQTYIRRVGEAVNLVIPFQGKPRPELTWKKDGAEIDKNQINIRNSETDTIIFIRKAERSHSGKYDLQVKVDKFVETASIDIQIIDRPGPPQIVKIEDVWGENVALTWTPPKDDGNAAITGYTIQKADKKSMEWFTVIEHYHRTSATITELVIGNEYYFRVFSENMCGLSEDATMTKESAVIARDGKIYKNPVYEDFDFSEAPMFTQPLVNTYAIAGYNATLNCSVRGNPKPKITWMKNKVAIVDDPRYRMFSNQGVCTLEIRKPSPYDGGTYCCKAVNDLGTVEIECKLEVKVIAQ

SEQ ID NO: 62707 - protein, 610 aa, Homo sapiens
MEGKQAKVLENAEGARTTPSVVAFTADGERLVGMPAKRQAVTNPNNTFYATKRLIGRRYDDPEVQKDIKNVPFKIVRASNGDAWVEAHGKLYSPSQIGAFVLMKMKETAENYLGHTAKNAVITVPAYFNDSQRQATKDAGQISGLNVLRVINEPTAAALAYGLDKSEDKVIAVYDLGGGTFDISILEIQKGVFEVKSTNGDTFLGGEDFDQALLRHIVKEFKRETGVDLTKDNMALQRVREAAEKAKCELSSSVQTDINLPYLTMDSSGPKHLNMKLTRAQFEGIVTDLIRRTIAPCQKAMQDAEVSKSDIGEVILVGGMTRMPKVQQTVQDLFGRAPSKAVNPDEAVAIGAAIQGGVLAGDVTDVLLLDVTPLSLGIETLGGVFTKLINRNTTIPTKKSQVFSTAADGQTQVEIKVCQGEREMAGDNKLLGQFTLIGIPPAPRGVPQIEVTFDIDANGIVHVSAKDKGTGREQQIVIQSSGGLSKDDIENMVKNAEKYAEEDRRKKERVEAVNMAEGIIHDTETKMEEFKDQLPADECNKLKEEISKMRELLARKDSETGENIRQAASSLQQASLKLFEMAYKKMASEREGSGSSGTGEQKEDQKEEKQ

SEQ ID NO: 62708 - protein, 185 aa, Homo sapiens
MADISLDELIRKRGAAAKGRLNARPGVGGVRSRVGIQQGLLSQSTRTATFQQRFDARQKIGLSDARLKLGVKDAREKLLQKDARFRIKGKVQDAREMLNSRKQQTTVPQKPRQVADAREKISLKRSSPAAFINPPIGTVTPALKLTKTIQVGLRAVPLLCLVSGGAWVGSRSQASCPLPSGSRPH

SEQ ID NO: 62709 - protein, 237 aa, Homo sapiens
MTPDHFPSLFCKEMSVGYANGIRVMSMTHTGEPGFMLYIPIEYALHVYNEVMSVGQKYGIRNAGYYALRSLRIEKFFAFWGQDINNLTTPLECGRESRVKLEKGMDFIGRDALLQQKQNGVYKRLTMFILDDHDSDLDLWPWWGEPIYRNGQYVGKTTSSAYSYSLERHVCLGFVHNFSEDTGEEQVVTADFINRGEYEIDIAGYRFQAKAKLYPVASLFTQKRRKDDMELSDLHGK

SEQ ID NO: 62710 - protein, 480 aa, Homo sapiens
MAGLRNESEQEPLLGDTPGSREWDILETEEHYKSRWRSIRILYLTMFLSSVGFSVVMMSIWPYLQKIDPTADTSFLGWVIASYSLGQMVASPIFGLWSNYRPRKEPLIVSILISVAANCLYAYLHIPASHNKYYMLVARGLLGIGAVFQTCFTFLGEKGVTWDVIKLQINMYTTPVLLSAFLGILNIILILAILREHRVDDSGRQCKSINFEEASTDEAQVPQGNIDQVAVVAINVLFFVTLFIFALFETIITPLTMDMYAWTQEQAVLYNGIILAALGVEAVVIFLGVKLLSKKIGERAILLGGLIVVWVGFFILLPWGNQFPKIQWEDLHNNSIPNTTFGEIIIGLWKSPMEDDNERPTGCSIEQAWCLYTPVIHLAQFLTSAVLIGLGYPVCNLMSYTLYSKILGPKPQGVYMGWLTASGSGARILGPMFISQVYAHWGPRWAFSLVCGIIVLTITLLGVVYKRLIALSVRYGRIQE

SEQ ID NO: 62711 - protein, 135 aa, Homo sapiens
MPSDFISLLSADLDLESPKSLYSRESVYDLLPKELQLPPSRETSVASMSQTSGGEAGSPPPAVVAADASSAPSSSSMGGACSSFTTSSSPTIYSTSVTDSKAMQVESCSSAVGNIGKPKRNWSKEEPYVVWTISC

SEQ ID NO: 62712 - protein, 538 aa, Homo sapiens
MGCLWGLALPLFFFCWEVGVSGSSAGPSTRRADTAMTTDDTEVPAMTLAPGHAALETQTLSAETSSRASTPAGPIPEAETRGAKRISPARETRSFTKTSPNFMVLIATSVETSAASGSPEGAGMTTVQTITGSDPEEAIFDTLCTDDSSEEAKTLTMDILTLAHTSTEAKGLSSESSASSDGPHPVITPSRASESSASSDGPHPVITPSRASESSASSDGPHPVITPSWSPGSDVTLLAEALVTVTNIEVINCSITEIETTTSSIPGASDIDLIPTEGVKASSTSDPPALPDSTEAKPHITEVTASAETLSTAGTTESAAPHATVGTPLPTNSATEREVTAPGATTLSGALVTVSRNPLEETSALSVETPSYVKVSGAAPVSIEAGSAVGKTTSFAGSSASSYSPSEAALKNFTPSETPTMDIATKGPFPTSRDPLPSVPPTTTNSSRGTNSTLAKITTSAKTTMKPPTATPTTARTRPTTDVSAGENGGFLLLRLSVASPEDLTDPRVAERLMQQLHRELHAHAPHFQVSLLRVRRG

SEQ ID NO: 62713 - protein, 43 aa, Homo sapiens
MGTENTPGGKASPDPQDVRPSVFHNIKLFVLCHSLLQLAQLMI

SEQ ID NO: 62714 - protein, 159 aa, Homo sapiens
MSGARSKLALFLCGCYVVALGAHTGEESVADHHEAEYYVAAVYEHPSILSLNPLALISRQEALELMNQNLDIYEQQVMTAAQKDVQIIVFPEDGIHGFNFTRTSIYPFLDFMPSPQVVRWNPCLEPHRFNDTEVIPAFFLSRLRVHRGDLSQGPEAVTC

SEQ ID NO: 62715 - protein, 578 aa, Homo sapiens
MEPDVPLPQTLLSHPSYLKVFVPDYTRELLLELRDCVSNGSLGCPVRLTVGPVTLPSNFQKVLTCTGAPWPCRLLLPSPPWDRWLQVTAESLVGPLGTVAFSAVAALTACRPRSVTIQPLLQSSQNQSFNASSGLLSPSPDHQDLGRSGRVDRSPFCLTNYPVTREDMDVVSVHFQPLDRVSVRVCSDTPSVMRLRLNTGMDSGGSLTISLRANKTEMRNETVVVACVNAASPFLGFNTSLNCTTAFFQGYPLSLSAWSRRANLIIPYPETDNWYLSLQLMCPENAEDCEQAVVHVETTLYLVPCLNDCGPYGQCLLLRRHSYLYASCSCKAGWRGWSCTDNSTAQTVAQQRAATLLLTLSNLMFLAPIAVSVRRFFLVEASVYAYTMFFSTFYHACDQPGEAVLCILSYDTLQYCDFLGSGAAIWVTILCMARLKTVLKYVLFLLGTLVIAMSLQLDRRGMWNMLGPCLFAFVIMASMWAYRCGHRRQCYPTSWQRWAFYLLPGVSMASVGIAIYTSMMTSDNYYYTHSIWHILLAGSAALLLPPPDQPAEPWACSQKFPCHYQICKNDREELYAVT

SEQ ID NO: 62716 - protein, 812 aa, Homo sapiens
MGWRPRRARGTPLLLLLLLLLLWPVPGAGVLQGHIPGQPVTPHWVLDGQPWRTVSLEEPVSKPDMGLVALEAEGQELLLELEKNHRLLAPGYIETHYGPDGQPVVLAPNHTDHCHYQGRVRGFPDSWVVLCTCSGMSGLITLSRNASYYLRPWPPRGSKDFSTHEIFRMEQLLTWKGTCGHRDPGNKAGMTSLPGGPQSRGRREARRTRKYLELYIVADHTLFLTRHRNLNHTKQRLLEVANYVDQLLRTLDIQVALTGLEVWTERDRSRVTQDANATLWAFLQWRRGLWAQRPHDSAQLLTGRAFQGATVGLAPVEGMCRAESSGGVSTDHSELPIGAAATMAHEIGHSLGLSHDPDGCCVEAAAESGGCVMAAATGHPFPRVFSACSRRQLRAFFRKGGGACLSNAPDPGLPVPPALCGNGFVEAGEECDCGPGQECRDLCCFAHNCSLRPGAQCAHGDCCVRCLLKPAGALCRQAMGDCDLPEFCTGTSSHCPPDVYLLDGSPCARGSGYCWDGACPTLEQQCQQLWGPGSHPAPEACFQVVNSAGDAHGNCGQDSEGHFLPCAGRDALCGKLQCQGGKPSLLAPHMVPVDSTVHLDGQEVTCRGALALPSAQLDLLGLGLVEPGTQCGPRMVCQSRRCRKNAFQELQRCLTACHSHGVCNSNHNCHCAPGWAPPFCDKPGFGGSMDSGPVQAENHDTFLLAMLLSVLLPLLPGAGLAWCCYRLPGAHLQRCSWGCRRDPACSGPKDGPHRDHPLGGVHPMELGPTATGQPWPLDPENSHEPSSHPEKPLPAVSPDPQDQVQMPRSCLW

SEQ ID NO: 62717 - protein, 105 aa, Homo sapiens
MVLPQGLLTFRDVAIEFSQEEWKCLDPAQRTLYRDVMLENYRNLVSLGIFSKCEIKELPPKKESNTGEIFQTVMLERHESHDIQDFCFRETQKNVHDSQCLWKHD

SEQ ID NO: 62718 - protein, 59 aa, Homo sapiens
MARGRHVGSSETKLLQHLLEACGRCEEVPEAYVDIHTGLSGSGVAFVCAFSEALAEGAV

SEQ ID NO: 62719 - protein, 127 aa, Homo sapiens
MSDTLTADVIGRRVEVNGEHATVRFAGVVPPVAGPWLGVEWDNPERGKHDGSHEGTVYFKCRHPTGGSFIRPNKVNFGTDFLTAIKNRYVLEDGPEEDRKEQIVTIGNKPVETIGFDSIMKQQRASG

SEQ ID NO: 62720 - protein, 125 aa, Homo sapiens
MEKEKGNDDGIPDQENSLDFSEHFNQLELLETHGHLIPTGTQSLWVGNSDEDEEQDDKNEEWYRLQEKKMEKDPSRLLLWAAEKNRVKKKITEGSVTVGKALGSSQKTCLYCYGHHTYLLIVRTK

SEQ ID NO: 62721 - protein, 427 aa, Homo sapiens
MHACTDLLNKANTYAEQHFADVVLSEEFLNLGIEQVCSLISSDKLTISSEEKVFEAVIAWVNHDKDVRQEFMARLMEHVRLPLLPREYLVQRVEEEALVKNSSACKDYLIEAMKYHLLPTEQRILMKSVRTRLRTPMNLPKLMVVVGGQAPKAIRSVECYDFKEERWHQVAELPSRRCRAGMVYMAGLVFAVGGFNGSLRVRTVDSYDPVKDQWTSVANMRDRRSTLGAAVLNGLLYAVGGFDGSTGLSSVEAYNIKSNEWFHVAPMNTRRSSVGVGVVGGLLYAVGGYDGASRQCLSTVECYNATTNEWTYIAEMSTRRSGAGVGVLNNLLYAVGGHDGPLVRKSVEVYDPTTNAWRQVADMNMCRRNAGVCAVNGLLYVVGGDDGSCNLASVEYYNPTTDKWTVVSSCMSTGRSYAGVTVIDKPL

SEQ ID NO: 62722 - protein, 162 aa, Homo sapiens
MAGPVKDREAFQRLNFLYQAAHCVLAQDPENQALARFYCYTERTIAKRLVLRRPLSSSAPRDPSVKRTLCRGCSSLLVPGLTCTQRQRRCRGQRWTVQTCLTCQRSQRFLNDPGHLLWGDRPEAQLGSQADSKPLQPLPNTAHSISDRLPEEKMQTKGSSNQ

SEQ ID NO: 62723 - protein, 40 aa, Homo sapiens
MVKLSIVLTPQFLSHDQGQLTKELQQHVKSVTCPCEYLRK

SEQ ID NO: 62724 - protein, 202 aa, Homo sapiens
MVGRRALIVLAHSERTSFNYAMKEAAAAALKKKGWEVVESDLYAMNFNPIISRKDITGKLKDPANFQYPAESVLAYKEGHLSPDIVAEQKKLEAADLVIFQSGILHFCGFQVLEPQLTYSIGHTPADARIQILEGWKKRLENIWDETPLYFAPSSLFDLNFQAGFLMKKEVQDEEKNKKFGLSVGHHLGKSIPTDNQIKARK

SEQ ID NO: 62725 - protein, 241 aa, Homo sapiens
MINPYRNLPLAIIISLPIVTLVYVLTNLAYFTTLSTEQMLSSEAVAVDFGNYHLGVMSWIIPVFVGLSCFGSVNGSLFTSSRLFFVGSREGHLPSILSMIHPQLLTPVPSLVFTCVMTLLYAFSKDIFSVINFFSFFNWLCVALAIIGMIWLRHRKPELERPIKVNLALPVFFILACLFLIAVSFWKTPVECGIGFTIILSGLPVYFFGVWWKNKPKWLLQGIFSTTVLCQKLMQVVPQET

SEQ ID NO: 62726 - protein, 354 aa, Homo sapiens
MEREPSASEAAPAAAALFAWGANSYGQLGLGHKEDVLLPQQLNDFCKPRSVRRITGGGGHSAVVTDGGDLFVCGLNKDGQLGLGHTEDIPYFTPCKSLFGCPIQQVACGWDFTIMLTENGQVLSCGSNSFGQLGVPHGPRRCVVPQAIELHKEKVVCIAAGLRHAVAATASGIVFQWGTGLASCGRRLCPGQTLPLFFTAKEPSRVTGLENSKAMCVLAGSDHSASLTDAGEVYVWGSNKHGQLANEAAFLPVPQKIEAHCFQNEKVTAIWSGWTHLVAQTETGKMFTWGRADYGQLGRKLETYEGWKLEKQDSFLPCSRPPNSMPSSPHCLTGATETSFRWHLLGKSSLMSRS

SEQ ID NO: 62727 - protein, 883 aa, Homo sapiens
MKKHRRALALVSCLFLCSLVWLPSWRVCCKESSSASASSYYSQDDNCALENEDVQFQKKNTESKKLSPPVVETLPTVDLHEESSNAVVDSETVENISSSSTSEITPISKLDEIEKSGTIPIAKPSETEQSETDCDVGEALDASAPIEQPSFVSPPDSLVGQHIENVSSSHGKGKITKSEFESKVSASEQGGGDPKSALNASDNLKNESSDYTKPGDIDPTSVASPKDPEDIPTFDEWKKKVMEVEKEKSQSMHASSNGGSHATKKVQKNRNNYASVECGAKILAANPEAKSTSAILIENMDLYMLNPCSTKIWFVIELCEPIQVKQLDIANYELFSSTPKDFLVSISDRYPTNKWIKLGTFHGRDERNVQSFPLDEQMYAKYVKMFIKYIKVELLSHFGSEHFCPLSLIRVFGTSMVEEYEEIADSQYHSERQELFDEDYDYPLDYNTGEDKSSKNLLGSATNAILNMVNIAANILGAKTEDLTEGNKSISENATATAAPKMPESTPVSTPVPSPEYVTTEVHTHDMEPSTPDTPKESPIVQLVQEEEEEASPSTVTLLGSGEQEDESSPWYRKQMEEMQKAFNKTIVKLQNTSRIAEEQDQRQTEAIQLLQAQLTNMTQLVSNLSATVAELKREVSDRQSYLVISLVLCVVLGLMLCMQRCRNTSQFDGDYISKLPKSNQYPSPKRCFSSYDDMNLKRRTSFPLMRSKSLQLTGKEVDPNDLYIVEPLKFSPEKKKKRCKYKIEKIETIKPEEPLHPIANGDIKGRKPFTNQRDFSNMGEVYHSSYKGPPSEGSSETSSQSEESYFCGISACTSLCNGQSQKTKTEKRALKRRRSKVQDQGKLIKTLIQTKSGSLPSLHDIIKGNKEITVGTFGVTAVSGHI

SEQ ID NO: 62728 - protein, 337 aa, Homo sapiens
MPDSNFAERSEEQVSGAKVIAQALKTQDVEYIFGIVGIPVTEIAIAAQQLGIKYIGMRNEQAVDICAEELGNNVKPAVTLLGNIHAVTKQLLEELDKTPWQYPPESKWWKTLREKMKSNEAASKELASKKSLPMNYYTVFYHVQEQLPRDCFVVSEGANTMDIGRTVLQNYLPRHRLDAGTFGTMGVGLGFAIAAAVVAKDRSPGQWIICVEGDSAFGFSGMEVETICRYNLPIILLVVNNNGIYQGFDTDTWKEMLKFQDATAVVPPMCLLPNSHYEQVMTAFGGKGYFVQTPEELQKSLRQSLADTTKPSLINIMIEPQATRKAQDFHWLTRSNM

SEQ ID NO: 62729 - protein, 337 aa, Homo sapiens
MGNVLQGGEGQAPTRQAVLGAGLPISTPCTTINKVCASGMKAIMMASQSLMCGHQDVMVAGGMESMSNVPYVMNRGSTPYGGVKLEDLIVKDGLTDVYNKIHMGSCAENTAKKLNIARNEQDAYAINSYTRSKAAWEAGKFGNEVIPVTVTVKGQPDVVVKEDEEYKRVDFSKVPKLKTVFQKENGTVTAANASTLNDGAAALVLMTADAAKRLNVTPLARIVAFADAAVEPIDFPIAPVYAASMVLKDVGLKKEDIAMWEVNEAFSLVVLANIKMLEIDPQKVNINGGAVSLGHPIGMSGARIVGHLTHALKQGEYGLASICNGGGGASAMLIQKL

SEQ ID NO: 62730 - protein, 50 aa, Homo sapiens
MFFRVFLHFIRSHSATAVDFLPVMVHRLPGTIIGLMGWRCFTSSEWQRAQ

SEQ ID NO: 62731 - protein, 316 aa, Homo sapiens
MLETLRERLLSVQQDFTSGYEDTWAALHRRAKDCASAGELVDSEVVMLSAHWEKKKTSLVELQEQLQQLPALIADLESMTANLTHLEASFEEVENNLLHLEDLCGQCELERCKHMQSQQLENYKKNKRKELETFKAELDAEHAQKVLEMEHTQQMKLKERQKFFEEAFQQDMEQYLSTGYLQIAERREPIGSMSSMEVNVDMLEQMDLMDISDQEALDVFLNSGGEENTVLSPALGPESSTCQNEITLQVPNPSELRAKPPSSSSTCTDSATRDISEGGESPVVQSDEEEVQVDTALATSHTDREATPDGGEDSDS

SEQ ID NO: 62732 - protein, 207 aa, Homo sapiens
EFLAKAKEDFLKKWESPAQNTAHLDQFERIKTLGTGSFGRVMLVKHKETGNHYAMKILDKQKVVKLKQIEHTLNEKRILQAVNFPFLVKLEFSFKDNSNLYMVMEYVPGGEMFSHLRRIGRFSEPHARFYAAQIVLTFEYLHSLDLIYRDLKPENLLIDQQGYIQVTDFGFAKRVKGRTWTLCGTPEYLAPEIILSKVGASPALPFP

SEQ ID NO: 62733 - protein, 79 aa, Homo sapiens
MSWAARPPFLPQRHAAGQCGPVGVRKEMHCGVASRWRRRRPWLDPAAAAAAAVAGGEQQTPEPEPGEAGRDGMGDSGRD

SEQ ID NO: 62734 - protein, 669 aa, Homo sapiens
MAEQVLPQALYLSNMRKAVKIRERTPEDIFKPTNGIIHHFKTMHRYTLEMFRTCQFCPQFREIIHKALIDRNIQATLESQKKLNWCREVRKLVALKTNGDGNCLMHATSQYMWGVQDTDLVLRKALFSTLKETDTRNFKFRWQLESLKSQEFVETGLCYDTRNWNDEWDNLIKMASTDTPMARSGLQYNSLEEIHIFVLCNILRRPIIVISDKMLRSLESGSNFAPLKVGGIYLPLHWPAQECYRYPIVLGYDSHHFVPLVTLKDSGPEIRAVPLVNRDRGRFEDLKVHFLTDPENEMKEKLLKEYLMVIEIPVQGWDHGTTHLINAAKLDEANLPKEINLVDDYFELVQHEYKKWQENSEQGRREGHAQNPMEPSVPQLSLMDVKCETPNCPFFMSVNTQPLCHECSERRQKNQNKLPKLNSKPGPEGLPGMALGASRGEAYEPLAWNPEESTGGPHSAPPTAPSPFLFSETTAMKCRSPGCPFTLNVQHNGFCERCHNARQLHASHAPDHTRHLDPGKCQACLQDVTRTFNGICSTCFKRTTAEASSSLSTSLPPSCHQRSKSDPSRLVRSPSPHSCHRAGNDAPAGCLSQAARTPGDRTGTSKCRKAGCVYFGTPENKGFCTLFHRVQRKQTFCCCLRESQSHSVQVPEHHSVPGEGMRHPWKHHV

SEQ ID NO: 62735 - protein, 124 aa, Homo sapiens
MTGSCCGSTFSSLSYGGGCCQPCCCRDPCCCRPVTCQTTVCRPVTCVPRCTRPICEPCRRPVCCDPCSLQEGCCRPITCCPSSCTAVVCRPCCWATTCCQPPVSVQSPCGQPTPCSTTCRTSSC

SEQ ID NO: 62736 - protein, 180 aa, Homo sapiens
MPTGLHACVVPSDILCPPVPSRALLRNRLSLNDLSSSSTMARIWDLLFILFTLQLACKYWAPHIKKKSPFDIKVIEDIYEKEIVKSRFAIRKIMLLEFSQYLENYLWMNYSPEVSSKAYLMSICCMVNEKFRENVPAWEIFKKKPDHFPFFFKHILKAALAETDGEFSLHEQTVLLLFLD

SEQ ID NO: 62737 - protein, 170 aa, Homo sapiens
MEQAPNMAEPRGPVDHGVQIRFITEPVSGAEMGTLRRGGRRPAKDARASTYGVAVRVQGIAGQPFVVLNSGEKGGDSFGVQIKGANDQGASGALSSDLELPENPYSQVKGFPAPSQSSTSDEEPGAYWNGKLLRSHSQASLAGPGPVDPSNRSNSMLELAPKVASPGSTI

SEQ ID NO: 62738 - protein, 345 aa, Homo sapiens
MDKVVEILKPLCRSSQSTEPKYKPLGKLKRARTVHRDSEEEDDYLFDDPLPIPLRHKVPYPETFHPEVFSMTAVSEKQPEKLRQTPGCCRAECMQSSRFTNFVDCEESNSESEEEVGIPASLQGDLGSVLHLQKADGDVPQWEVFFKRNDEITDESLENFPSSTVAGGSQSPKLFSDSDGESTHISSQNSSQSTHITEQGSQGWDSQSDTVLLSSQERNSGDITSLDKADYRPTIKENIPASLMEQNVICPKDTYSDLKSRDKDVTIVPSTGEPTTLSSETHIPEEKSLLNLSTNADSQSSSDFEVPSTPEAELPKREHLQYLYEKLATGESIAVKKRKCSLLDT

SEQ ID NO: 62739 - protein, 268 aa, Homo sapiens
MSDSKEPRLQQLGLLVSKVPSSISQEQSRQDAIYQNLTQLKAAVGELSEKSKLQEIYQELTQLKAAVGELPEKSKLQEIYQELTRLKAAVGELPEKSKLQEIYQELTWLKAAVERLCHPCPWEWTFFQGNCYFMSNSQRNWHDSITACKEVGAQLVVIKSAEEQNFLQLQSSRSNRFTWMGLSDLNQEGTWQWVDGSPLLPSFKQYWNRGEPNNVGEEDCAEFSGNGWNDDKCNLAKFWICKKSAASCSRDEEQFLSPAPATPNPPPA

SEQ ID NO: 62740 - protein, 541 aa, Homo sapiens
MQQVLDNLGSLPSATGAAELDLIFLRGIMESPIVRSLAKAHERLEETKLEAVRDNNLELVQEILRDLAQLAEQSSTAAELAHILQEPHFQSLLETHDSVASKTYETPPPSPGLDPTFSNQPVPPDAVRMVGIRKTAGEHLGVTFRVEGGELVIARILHGGMVAQQGLLHVGDIIKEVNGQPVGSDPRALQELLRNASGSVILKILPSYQEPHLPRQVFVKCHFDYDPARDSLIPCKEAGLRFNAGDLLQIVNQDDANWWQACHVEGGSAGLIPSQLLEEKRKAFVKRDLELTPNSGTLCGSLSGKKKKRMMYLTTKNAEFDRHELLIYEEVARMPPFRRKTLVLIGAQGVGRRSLKNKLIMWDPDRYGTTVPYTSRRPKDSEREGQGYSFVSRGEMEADVRAGRYLEHGEYEGNLYGTRIDSIRGVVAAGKVCVLDVNPQAVKVLRTAEFVPYVVFIEAPDFETLRAMNRAALESGISTKQLTEADLRRTVEESSRIQRGYGHYFDLCLVNSNLERTFRELQTAMEKLRTEPQWVPVSWVY

SEQ ID NO: 62741 - protein, 162 aa, Homo sapiens
MGGTRPHSFHRALRPDTADQPHSAQEAASGVGAQRGTAASSTAGCGAAGPGPSAWAAEYIFYLSETSIFLGSNPTCHHVDISSYLTMLSLLGAVLVGPGPCIMPRSQLQGPSWGPGWALGSGPCCSSPSHQPVPVVRKPGLLSSFLLGECQTQGPSTGLGWE

SEQ ID NO: 62742 - protein, 45 aa, Homo sapiens
MADSSGQQGKGRRVQPQWSPPAGTQPCRLHLYNSLTRNKCFLHFL

SEQ ID NO: 62743 - protein, 349 aa, Homo sapiens
MMQNPQILAALQERLDGLVETPTGYIESLPRVVKRRVNALKNLQVKCAQIEAKFYEEVHDLERKYAVLYQPLFDKRFEIINAIYEPTEEECEWKPDEEDEISELKEKAKIEDEKKDEEKEDPKGIPEFWLTVFKNVDLLSDMVQEHDEPILKHLKDIKVKFSDAGQPMSFVLEFHFEPNEYFTNEVLTKTYRMRSEPDDSDPFSFDGPEIMGCTGCQIDWKKGKNVTLKTIKKKQKHKGRGTVRTVTKTVSNDSFFNFFAPPEVPESGDLDDDAEAILAADFEIGHFLRERIIPRSVLYFTGEAIEDDDDDYDEEGEEADEEGEEEGDEENDPDYDPKKDQNPAECKQQ

SEQ ID NO: 62744 - protein, 711 aa, Homo sapiens
MDEPMGEEEINPQTEEVSIKEIAITHHVKEGHEKADPSQFELLKVLGQGSFGKVFLVKKISGSDARQLYAMKVLKKATLKVRDRVRTKMERDILVEVNHPFIVKLHYAFQTEGKLYLILDFLRGGDLFTRLSKEVMFTEEDVKFYLAELALALDHLHSLGIIYRDLKPENILLDEEGHIKLTDFGLSKESIDHEKKAYSFCGTVEYMAPEVVNRRGHTQSADWWSFGVLMFEMLTGTLPFQGKDRKETMTMILKAKLGMPQFLSPEAQSLLRMLFKRNPANRLGAGPDGVEEIKRHSFFSTIDWNKLYRREIHPPFKPATGRPEDTFYFDPEFTAKTPKDSPGIPPSANAHQLFRGFSFVAITSDDESQAMQTVGVHSIVQLHRNSIQFTDGYEVKEDIGVGSYSVCKRCIHKATNMEFAVKIIDKSKRDPTEEIEILLRYGQHPNIITLKDVYDDGKYVYVVTELMKGGELLDKILRQKFFSEREASAVLFTITKTVEYLHAQGVVHRDLKPSNILYVDESGNPESIRICDFGFAKQLRAENGLLMTPCYTANFVAPEVLKRQGYDAACDIWSLGVLLYTMLTGYTPFANGPDDTPEEILARIGSGKFSLSGGYWNSVSDTAKDLVSKMLHVDPHQRLTAALVLRHPWIVHWDQLPQYQLNRQDAPHLVKGAMAATYSALNRNQSPVLEPVGRSTLAQRRGIKKITSTAL

SEQ ID NO: 62745 - protein, 103 aa, Homo sapiens
MDMAQEPVTFRDVAIYFSREEWACLEPSQRALYRDVMLDNFSSVAALGFCSPRPDLVSRLEQWEEPWVEDRERPEFQAVQRGPRPATQVLSGGGHWCGCLTSL

SEQ ID NO: 62746 - protein, 68 aa, Homo sapiens
MAGPAAAFRRLGALSGAAALGFASYGAHGAQFPDAYGKELFDKANKHHFLHSLALLGVPHCRKPLWAA

SEQ ID NO: 62747 - protein, 393 aa, Homo sapiens
MPSTPGFVGYNPYSHLAYNNYRLGGNPGTNSRVTASSGITIPKPPKPPDKPLMPYMRYSRKVWDQVKASNPDLKLWEIGKIIGGMWRDLTDEEKQEYLNEYEAEKIEYNESMKAYHNSPAYLAYINAKSRAEAALEEESRQRQSRMEKGEPYMSIQPAEDPDDYDDGFSMKHTATARFQRNHRLISEILSESVVPDVRSVVTTARMQVLKRQVQSLMVHQRKLEAELLQIEERHQEKKRKFLESTDSFNNELKRLCGLKVEVDMEKIAAEIAQAEEQARKRQEEREKEAAEQAERSQSSIVPEEEQAANKGEEKKDDENIPMETEETHLEETTESQQNGEEGTSTPEDKESGQEGVDSMAEEGTSDSNTGSESNSATVEEPPTDPIPEDEKKE

SEQ ID NO: 62748 - protein, 807 aa, Homo sapiens
MSGGGGGGGSAPSRFADYFVICGLDTETGLEPDELSGENFEQTPLRRTFKSKVLARYPENVEWNPFDQDAVGMLCMPKGLAFKTQADPREPQFHAFIITREDGSRTFGFALTFYEEVTSKQICSAMQTLYHMHNAEYDVLHAPPADDRDQSSMEDGEDTPVTKLQRFNSYDISRDTLYVSKCICLITPMSFMKACRSVLEQLHQAVTSPQPPPLPLESYIYNVLYEVPLPPPGRSLKFSGVYGPIICQRPSTNELPLFDFPVKEVFELLGVENVFQLFTCALLEFQILLYSQHYQRLMTVAETITALMFPFQWQHVYVPILPASLLHFLDAPVPYLMGLHSNGLDDRSKLELPQEANLCFVDIDNHFIELPEDLPQFPNKLEFVQEVSEILMAFGIPPEGNLHCSESASKLKRLRASELVSDKRNGNIAGSPLHSYELLKENETIARLQALVKRTGVSLEKLEVREDPSSNKDLKVQCDEEELRIYQLNIQIREVFANRFTQMFADYEVFVIQPSQDKESWFTNREQMQNFDKASFLSDQPEPYLPFLSRFLETQMFASFIDNKIMCHDDDDKDPVLRVFDSRVDKIRLLNVRTPTLRTSMYQKCTTVDEAEKAIELRLAKIDHTAIHPHLLDMKIGQGKYEPGFFPKLQSDVLSTGPASNKWTKRNAPAQWRRKDRQKQHTEHLRLDNDQREKYIQEARTMGSTIRQPKLSNLSPSVIAQTNWKFVEGLLKECRNKTKRMLVEKMGREAVELGHGEVNITGVEENTLIASLCDLLERIWSHGLQVKQEYFLIQNVGSLMPAHSCLP

SEQ ID NO: 62749 - protein, 99 aa, Homo sapiens
MTSLRWLKLNRTGLCYLPEELAALQKLEHLSVSHNNLTTLHGELSSLPSLRAIVARANSLKNSGVPDDIFKLDDLSVLDLSHNQLTECPRELENAKNML

SEQ ID NO: 62750 - protein, 247 aa, Homo sapiens
MRSALLERMPVMEKVTTNGPTEIVQTNGETEPAPLETKPPPSGPQPTSQANDLLDLLGGNDITPVIPTAPTSKPSSAGGELLDLLGDINLTGAPAAAPAPASVPQISQPPFLLDGLSSQPLFNDIAAGIPSITAYSKNGLKIEFTFERSNTNPSVTVITIQASNSTELDMTDFVFQAAVPKTFQLQLLSPSSSIVPAFNTGTITQVIKVLNPQKQQLRMRIKLTYNHKGSAMQDLAEVNNFPPQSWQ

SEQ ID NO: 62751 - protein, 732 aa, Homo sapiens
MKGTGIMDCAPKALLARALYDNCPDCSDELAFSRGDILTILEQHVPESEGWWKCLLHGRQGLAPANRLQILTEVAADRPCPPFLRGLEEAPASSEETYQAILTLPRPVRASLPTLPSQVYDVPTQHRGPVVLKEPEKQQLYDIPASPKKAGLHPPDSQASGQGVPLISVTTLRRGGYSTLPNPQKSEWIYDTPVSPGKASVRNTPLTSFAEESRPHALPSSSSTFYNPPSGRSRSLTPQLNNNVPMQKKLSLPEIPSYGFLVPRGTFPLDEDVSYKVPSSFLIPRVEQQNTKPNIYDIPKATSSVSQAGKELEKAKEVSENSAGHNSSWFSRRTTSPSPEPDRLSGSSSDSRASIVSSCSTTSTDDSSSSSSEESAKELSLDLDVAKETVMALQHKVVSSVAGLMLFVSRKWRFRDYLEANIDAIHRSTDHIEESVREFLDFARGVHGTACNLTDSNLQNRIRDQMQTISNSYRILLETKESLDNRNWPLEVLVTDSVQNSPDDLERFVMVARMLPEDIKRFASIVIANGRLLFKRNCEKEETVQLTPNAEFKCEKYIQPPQRETESHQKSTPSTKQREDEHSSELLKKNRANICGQNPGPLIPQPSSQQTPERKPRLSEHCRLYFGALFKAISAFHGSLSSSQPAEIITQSKLVIMVGQKLVDTLCMETQERDVRNEILRGSSHLCSLLKDVALATKNAVLTYPSPAALGHLQAEAEKLEQHTRQFRGTLG

SEQ ID NO: 62752 - protein, 64 aa, Homo sapiens
MATFPCQLCGKTFLTLEKFTIHNYSHSRERPYKCVQPDCGKAFVSRYKLMRHMATHSPQKSHQC

SEQ ID NO: 62753 - protein, 132 aa, Homo sapiens
MSSTLPALLCVGLCLSQRISAQQQMYDTPTLSVHPGPEVISGEKVTFYCRLDTATSMFLLLKEGRSSHVQRGYGKVQAEFPLGPVTTAHRGTYRCFGSYNNHAWSFPSEPVKLLVTGDIENTSLAPEDPTFP

SEQ ID NO: 62754 - protein, 350 aa, Homo sapiens
MFCCLGYEWLSGGCKTWHSAWVINTLADHRHRGTDFGGSPWLLIITVFLRSYKFAISLCTSYLCVSFLKTIFPSQNGHDGSTDVQQRARRSNRRRQEGIKIVLEDIFTLWRQVETKVRAKICKMKVTTKVNRHDKINGKRKTAKEHLRKLSMKEREHGEKERQVSEAEENGKLDMKEIHTYMEMFQRAQALRRRAEDYYRCKITPSARKPLCNRVRMAAAEHRHSSGLPYWPYLTAETLKNRMGHQPPPPTQQHSIIDNSLSLKTPPECLLTPLPPSALPSADDNLKTPAECLLYPLPPSADDNLKTPPECLLTPLPPSAPPSADDNLKTPPKCVCSLPFHPQRMIISRN

SEQ ID NO: 62755 - protein, 396 aa, Homo sapiens
MVDFAMDVYKNLYSDDIPHALREKRTTVVAQLKQLQAETEPIVKMFEDPETTRQMQSTRDGRMLFDYLADKHGFRQEYLDTLYRYAKFQYECGNYSGAAEYLYFFRVLVPATDRNALSSLWGKLASEILMQNWDAAMEDLTRLKETIDNNSVSSPLQSLQQRTWLIHWSLFVFFNHPKGRDNIIDLFLYQPQYLNAIQTMCPHILRYLTTAVITNKDVRKRRQVLKDLVKVIQQESYTYKDPITEFVECLYVNFDFDGAQKKLRECESVLVNDFFLVACLEDFIENARLFIFETFCRIHQCISINMLADKLNMTPEEAERWIVNLIRNARLDAKIDSKLGHVVMGNNAVSPYQQVIEKTKSLSFRSQMLAMNIEKKLNQNSRSEAPNWATQDSGFY

SEQ ID NO: 62756 - protein, 223 aa, Homo sapiens
AVLVVSKEQTEQILRDIQQHKEEAWVIGSVVARAEGSPRVKVKNLIESMQINGSVLKNGSLTNHFSFEKKKARVAVLISGTGSNLQALIDSTREPNSSAQIDIVISNKAAVAGLDKAERAGIPTRVINHKLYKNRVEFDSAIDLVLEEFSIDIVCLAGFMRILSGPFVQKWNGKMLNIHPSLLPSFKGSNAHEQALETGVTVTGCTVHFVAMEFHSVTQAGVE

SEQ ID NO: 62757 - protein, 85 aa, Homo sapiens
MKDKQKKKKERTWAEAARLVLENYSDAPMTPKQILQVIEAEGLKEMRSGTSPLACLNAMLHSNSRGGEGLFYKLPGRISLFTLKV

SEQ ID NO: 62758 - protein, 47 aa, Homo sapiens
MFSVRIVTADYYMASPLQGLDTCQSPLTQAPVKKVPVVRVFGATPAE

SEQ ID NO: 62759 - protein, 149 aa, Homo sapiens
MASRLLHRLRHALAGDGPGEAAASPEAEQFPESSELEDDDAEGLSSRLSGTLSFTSAEDDEDDEDEDDEEAGPDQLPLGDGTSGEDAERSPPPDGQWGSQLLARQLQDFWKKSRNTLAPQRLLFEVTSANVVKDPPSKYVTNLSSTPSP

SEQ ID NO: 62760 - protein, 27 aa, Homo sapiens
MSTVEEDSDTVTVETVNSVTLTQDTEG

SEQ ID NO: 62761 - protein, 129 aa, Homo sapiens
MKQRKGQGSGGSRGRKKRGLSDISPSTSLPPLVEGQLRCFLKLTVNRVIWKIAKPPTCVLVRVRWWGETSDGTLFCPRDALQTEPKAVRTTTRYAIRCGPKQFTSYLTGLTCPGTSVRNLRQLPSTSYH

SEQ ID NO: 62762 - protein, 9 aa, Homo sapiens
MAFPCFDEP

SEQ ID NO: 62763 - protein, 137 aa, Homo sapiens
ADVFSREPFVVWFQSPHTAVKDFVIIPLHTTPETSVKEIDELVEVYTDVKHRWKAENFIFMGDFNAGCSYVPKKAWKNIRLRTDPRFVWLIGDQEDTTVKKSTNCAYDRPWMSATTFQLNLNYSLQGPSPTAKNLSL

SEQ ID NO: 62764 - protein, 151 aa, Homo sapiens
MKTGPFAEHSNQLWNISAVPSWSKVNQGLIRMYKAEVSGGWPVCPSLLPHLVLGWGQSKRCGTWGSCFLLPHCFALNLRPAPLTLGASESPIWGMGSQRSTSHPSPEKLQSSSVLMSLEAEARTCCMGSGGDGGLPSPLSSGQRLLKARAV

SEQ ID NO: 62765 - protein, 601 aa, Homo sapiens
MSQLARRRSRYGLTSRAHNTSEAGRAGPAGGPAAGRAAARAGAMAKLLSCVLGPRLYKIYRERDSERAPASVPETPTAVTAPHSSSWDTYYQPRALEKHADSILALASVFWSISYYSSPFAFFYLYRKGYLSLSKVVPFSHYAGTLLLLLAGVACLRGIGRWTNPQYRQFITILEATHRNQSSENKRQLANYNFDFRSWPVDFHWEEPSSRKESRGGPSRRGVALLRPEPLHRGTADTLLNRVKKLPCQITSYLVAHTLGRRMLYPGSVYLLQKALMPVLLQGQARLVEECNGRRAKLLACDGNEIDTMFVDRRGTAEPQGQKLVICCEGNAGFYEVGCVSTPLEAGYSVLGWNHPGFAGSTGVPFPQNEANAMDVVVQFAIHRLGFQPQDIIIYAWSIGGFTATWAAMSYPDVSAMILDASFDDLVPLALKVMPDSWRGLVTRTVRQHLNLNNAEQLCRYQGPVLLIRRTKDEIITTTVPEDIMSNRGNDLLLKLLQHRYPRVMAEEGLRVVRQWLEASSQLEEASIYSRWEVEEDWCLSVLRSYQAEHGPDFPWSVGEDMSADGRRQLALFLARKHLHNFEATHCTPLPAQNFQMPWHL

SEQ ID NO: 62766 - protein, 193 aa, Homo sapiens
MTPTLAALLCLGLSLGPRTHVQAGPFPKPTLWAEPGSVISWGSPVTIWCQGSLEAQEYRLDKEGSPEPWDRNNPLEPKNKARFSIPSITEHHAGRYRCHYYSSAGWSEPSDPLELVMTGAYSKPTLSALPSPVVASGGNMTLQCGSQKGYHHFVLMKEGEHQLPRTLDSQQLHSGGFQALFPVGPVNPSHRRV

SEQ ID NO: 62767 - protein, 116 aa, Homo sapiens
MTAEFLSLLCLDTRTIFVAIFSCISILLLFLSVFIIYRCSQHSSSSEESTKRTSHSKLPEQEAAEADLSNMERVSLSTADPQGVTYAELSTSALSEAASDTTQEPPGSHEYAALKV

SEQ ID NO: 62768 - protein, 108 aa, Homo sapiens
MGDVLEQFFILTGLLVCLACLAKCVRFSRCVLLNYWKVLPKSFLRSMGQWAVITGAGDGIGKAYSFEAERSHPEHFFWDSPVSLASLLHVLSFQGVCVRIFQGPARGI

SEQ ID NO: 62769 - protein, 861 aa, Homo sapiens
MDNTTLLIELEYCNGGNLYDKILRQKDKLFEEEMVVWYLFQIVSAVSCIHKAGILHRDIKTLNIFLTKANLIKLGDYGLAKKLNSEYSMAETLVGTPYYMSPELCQGVKYNFKSDIWAVGCVIFELLTLKRTFDATNPLNLCVKIVQGIRAMEVDSSQYSLELIQMVHSCLDQDPEQRPTADELLDRPLLRKRRREMEEKVTLLNAPTKRPRSSTVTEAPIAVVTSRTSEVYVWGGGKSTPQKLDVIKSGCSARQVCAGNTHFAVVTVEKELYTWVNMQGGTKLHGQLGHGDKASYRQPKHVEKLQGKAIRQVSCGDDFTVCVTDEGQLYAFGSDYYGCMGVDKVAGPEVLEPMQLNFFLSNPVEQVSCGDNHVVVLTRNKEVYSWGCGEYGRLGLDSEEDYYTPQKVDVPKALIIVAVQCGCDGTFLLTQSGKVLACGLNEFNKLGLNQCMSGIINHEAYHEVPYTTSFTLAKQLSFYKIRTIAPGKTHTAAIDERGRLLTFGCNKCGQLGVGNYKKRLGINLLGGPLGGKQVIRVSCGDEFTIAATDDNHIFAWGNGGNGRLAMTPTERPHGSDICTSWPRPIFGSLHHVPDLSCRGWHTILIVEKVLNSKTIRSNSSGLSIGTVFQSSSPGGGGGGGGGEEEDSQQESETPDPSGGFRGTMEADRGMEGLISPTEAMGNSNGASSSCPGWLRKELENAEFIPMPDSPSPLSAAFSESEKDTLPYEELQGLKVASEAPLEHKPQVEASSPRLNPAVTCAGKGTPLTPPACACSSLQVEVERLQGLVLKCLAEQQKLQQENLQIFTQLQKLNKKLEGGQQVGMHSKGTQTAKEEMEMDPKPDLDSDSWCLLGTDSCRPSL

SEQ ID NO: 62770 - protein, 74 aa, Homo sapiens
MAGVVHVSLAALLLLPMAPAMHSDCIFKKEQAMCLEKIQRANELMGFNDSSPGCPGMWDNITCWKPAHVGEMVL

SEQ ID NO: 62771 - protein, 239 aa, Homo sapiens
MLLTSYNKGEMVVKEVKKRREIEGKENDLPSYRGWNTHPNERPVIYSILYSDATGRRGMDKNIGEQLNKAYEAFRQACMDRDSAVKELQQKQTENYEQRIREQQEQLSLQQTIIDKLKSQLLLVNSTQDNNYGCVPLLEDSETRKNNLTLDQPQDKVISGIAREKLPKVRRQEVSSPRKETSARSLGSPLLHERGNIEKTFWDLKEEFHKICMLAKAQKDHLSKLNIPDTATAHLEALS

SEQ ID NO: 62772 - protein, 58 aa, Homo sapiens
MLENFKLEGAGVSLGLPQQPTAPLLYPRGPHPGHVGGEPLGRAAARGAGAAVGAAASG

SEQ ID NO: 62773 - protein, 284 aa, Homo sapiens
MFANLKYVSLGILVFQTTSLVLTMRYSRTLKEEGPRYLSSTAVVVAELLKIMACILLVYKDSKCSLRALNRVLHDEILNKPMETLKLAIPSGIYTLQNNLLYVALSNLDAATYQWPSDSQLDSKELSAGSQFVGLMAVLTACFSSGFAGVYFEKILKETKQSVWIRNIQLGFFGSIFGLMGVYIYDGELVSKNGFFQGYNRLTWIVVVLQALGGLVIAAVIKYADNILKGFATSLSIILSTLISYFWLQDFVPTSVFFLGAILVITATFLYGYDPKPAGNPTKA

SEQ ID NO: 62774 - protein, 83 aa, Homo sapiens
MSSLGGGSQDAGGSSSSSTNGSGGSGSSGPKAGAADKSAVVAAAAPASVADDTPPPERRNKSGIISEPLNKSLRRSRPLSHYS

SEQ ID NO: 62775 - protein, 170 aa, Homo sapiens
  MOD_RES (1)..(1): Any amino acid
XPSIAVMDVSENIRAKIYAILGKLDFENLPGLSAEDFVTLCIIHRYLDFKIQATHKQRELANKSWEDFLARTSNAKTLKKAKSLQEKAIEASRYHKRPQNAIFHQTHIKGLNTTVPSGGVVTVESTPARLVGGPLVDTDIALKKLPIRGGALQRVKAVKIVDAPKKSIPT

SEQ ID NO: 62776 - protein, 247 aa, Homo sapiens
MAEAEFKDHSTAMDTEPNPGTSSVSTTTSSTTTTTITTSSSRMQQPQISVYSGSDRHAVQVIQQALHRPPSSAAQYLQQMYAAQQQHLMLHTAALQQQHLSSSQLQSLAAVQASLSSGRPSTSPTGSVTQQSSMSQTSINLSTSPTPAQLISRSQASSSTSGSITQQTMLLGSTSPTLTASQAQMYLRAQMLIFTPATTVAAVQSDIPVVSSSSSSSCQSAATQVQNLTLRSQKLGVLSSSQNGPPK

SEQ ID NO: 62777 - protein, 70 aa, Homo sapiens
MDFVMKQALGGATKDMGKMLGGEEEKDPDAQKKEEERQEALRQQEEERKAKHARMEAEREKVRQQIRDKD

SEQ ID NO: 62778 - protein, 139 aa, Homo sapiens
MGCVQCKDKEATKLTEERDGSLNQSSGYRYGTDPTPQHYPSFGVTSIPNYNNFHAAGGQGLTVFGGVNSSSHTGTLRTRGGTGVTLFVALYDYEARTEDDLSFHKGEKFQILNSSEGDWWEARSLTTGETGYIPSNYVA

SEQ ID NO: 62779 - protein, 140 aa, Homo sapiens
MAPTWLSDIPLVQPPGHQDVSERRLDTQRPQVTMWERDVSSDRQEPGRRGRSWGLEGSQALSQQAEVIVRQLQELRRLEEEVRLLRETSLQQKMRLEAQAMELEALARAEKAGRAEAEGLRAALAGAEVVRKNLEEGSQR

SEQ ID NO: 62780 - protein, 173 aa, Homo sapiens
MPGARDALCHQALQLLAELCARGALEHDSCQDFIYHLRDRARPRLRDPDISVSLLTLVVTACGLALFGVSLFVSWKLCWVPWRERGLPSGSKDNNQEPLNYMDTETNEQENSEDFLDPPTPCPDSSMKISHTSPDIPLSTQTGIQENCAHGVRVQRQVTEPTSSARTTWIWES

SEQ ID NO: 62781 - protein, 358 aa, Homo sapiens
MTSSRLWFSLLLAAAFAGRATALWPWPQNFQTSDQRYVLYPNNFQFQYDVSSAAQPGCSVLDEAFQRYRDLLFGSGSWPRPYLTGKRHTLEKNVLVVSVVTPGCNQLPTLESVENYTLTINDDQCLLLSETVWGALRGLETFSQLVWKSAEGTFFINKTEIEDFPRFPHRGLLLDTSRHYLPLSSILDTLDVMAYNKLNVFHWHLVDDPSFPYESFTFPELMRKGSYNPVTHIYTAQDVKEVIEYARLRGIRVLAEFDTPGHTLSWGPGIPGLLTPCYSGSEPSGTFGPVNPSLNNTYEFMSTFFLEVSSVFPDFYLHLGGDEVDFTCWKSNPEIQDFMRKKGFGEDFKQLESFYIQT

SEQ ID NO: 62782 - protein, 177 aa, Homo sapiens
EPVVPRGGFDSPFYRDSLPGSQRKTHSAASSSQGASVNPEPLHSSLDKLGPDTPKQAFTPIDLPCGSADESPAGDRECQTSLETSIFTPSPCKIPPPTRVGFGSGQPPPYDHLFEVALPKTAHHFVIRKTEELLKKAKGNTEEDGVPSTSPMEVLDRLIQQGADAHSKELNKLSSFR

SEQ ID NO: 62783 - protein, 473 aa, Homo sapiens
MRLLESKKGLSFFAFEHSEEYQQAQHKFLVAVESMEPNNIVVLLQTSPYHVDSLLQLSDACRFQEDQEMARDLVERALYSMECAFHPLFSLTSGACRLDYRRPENRSFYLALYKQMSFLEKRGCPRTALEYCKLILSLEPDEDPLCMLLLIDHLALRARNYEYLIRLFQEWEAHRNLSQLPNFAFSVPLAYFLLSQQTDLPECEQSSARQKASLLIQQALTMFPGVLLPLLESCSVRPDASVSSHRFFGPNAEISQPPALSQLVNLYLGRSHFLWKEPATMSWLEENVHEVLQAVDAGDPAVEACENRRKVLYQRAPRNIHRHVILSEIKEAVAALPPDVTTQSVMGFDPLPPSDTIYSYVRPERKGEEERNSVIWGSQLCVCRPRSFPSPPNVQALACRPLWQAKSYQPWKHHCSLLPVTVAKLYHGGGEARGRSGWGSEPQPGPEQADAGCARHDGQLPPQRPGGAARGRR

SEQ ID NO: 62784 - protein, 434 aa, Homo sapiens
MPFGCVTLGDKKNYNQPSEVTDRYDLGQVIKTEEFCEIFRAKDKTTGKLHTCKKFQKRDGRKVRKAAKNEIGILKMVKHPNILQLVDVFVTRKEYFIFLELATGREVFDWILDQGYYSERDTSNVVRQVLEAVAYLHSLKIVHRNLKLENLVYYNRLKNSKIVISDFHLAKLENGLIKEPCGTPEYLAPEVVGRQRYGRPVDCWAIGVIMYILLSGNPPFYEEVEEDDYENHDKNLFRKILAGDYEFDSPYWDDISQAAKDLVTRLMEVEQDQRITAEEAISHEWISGNAASDKNIKDGVCAQIEKNFARAKWKTVVPPQPQMEVPPQPLMAVSPQPPMEASLQPLMGVSPQPLTGALLQPLMGEPHQPQKRALCPPPKAVPCWPPRQLPPLSRLWPSRTAQPQRAPQARLHPLVKGKRLLVMPRSLKGRRPAE

SEQ ID NO: 62785 - protein, 24 aa, Homo sapiens
MENPSPAAALGKALCALLLATLGA

SEQ ID NO: 62786 - protein, 221 aa, Homo sapiens
  MOD_RES (1)..(1): Any amino acid
XLTLPTFPVVVKIGHAHSGMGKVKVENHYDFQDIASVVALTQTYATAEPFIDSKYDIRVQKIGNNYKAYMRTSISGNWKTNTGSAMLEQIAMSDRYKLWVDTCSEMFGGLDICAVKAVHGKDGKDYIFEVMDCSMPLIGEHQVEDRQLITELVISKMNQLLSRTPALSPQRPLTTQQPQSGTLKDPDSSKTPPQRPPPQGCLQYILDCNGIAVGPKQVQAS

SEQ ID NO: 62787 - protein, 212 aa, Homo sapiens
MPRPGPFSVDPRHHLSKGVVLFSPFPEAQNRRPCENLAFCPVLSSELKEASRGESFTSLVSGVSHSSLYCPVEKSNISCGNEKEPSMCGSAPSVFPSCKRLTLETMKMMLDKKQIRAIFLFEFKMGRKAAETTRNINNAFGPGTANERTVQWWFKKFCKGDESLEDEERSGRPSEVDNDQLRAIIEADPLTTTREVAEELNVNHSTVVRHLK

SEQ ID NO: 62788 - protein, 158 aa, Homo sapiens
MQSLSLGQTSISKGLNYLTIMAPGNLWHMRNNFLFGSRCWMTRFSAENIFKSVSFRLFGVKCHNTDSEPLKNEDLLKNLLTMGVDIDMARKRQPGVFHRMITNEQDLKMFLLSKGASKEVIASIISRYPRAITRTPENLSKRWDLWRKIVTSDLEIVN

SEQ ID NO: 62789 - protein, 282 aa, Homo sapiens
MQAILDATVSQGEPIQELLVTHGKVPTLVEELIAVEMWKQKVFPVFCRVEDFKPQNTFPIYMVVHHEASIINLLETVFFHKEVCESAEDTVLDLVDYCHRKLTLLVAQSGCGGPPEGEGSQDSNPMQELQKQAELMEFEIALKALSVLRYITDCVDSLSLSTLSRMLSTHNLPCLLVELLEHSPWSRREGGKLQQFEGSRWHTVAPSEQQKLSKLDGQVWIALYNLLLSPEAQARYCLTSFAKGRLLKLRAFLTDTLLDQLPNLAHLQSFLAHLTLTETQPP

SEQ ID NO: 62790 - protein, 85 aa, Homo sapiens
MSLGQSACLFLSIARSRSVMTGEQMAAFHPSSTPNPLERPIKMGWLKKQRSIVKNWQQSGPPGSTRTGTVEFPTHGSESRLATGR

SEQ ID NO: 62791 - protein, 131 aa, Homo sapiens
MAVEFDGGVVMGSDSRVSAGEAVVNRVFDKLSPLHEHIYCALSGSAADAQAVADMAAYQLELHGIELEEPPLVLAAANVVRNISYKYREDLSAHLMVAGWDQREGGQVYGTLGGMLTRQPFAIGGSGSTFI

SEQ ID NO: 62792 - protein, 152 aa, Homo sapiens
  MOD_RES (1)..(1): Any amino acid
XEDLEKTKEELKTVMSAPPPPPPPPVIPPTENEHDEHDENNAEASAELSNEGVMNHRSEEERVTETQKNERVKKQLQALSSELAQARDETKKTQNDVLHAENVKAGRDKYKTLRQIRQGNTKQRIDEFEAMWGPKLYALFQMRSCQSSIKQM

SEQ ID NO: 62793 - protein, 251 aa, Homo sapiens
MGQKKQRPARAGQPHSSSDAAQAPAEQPHSSSDAAQAPCPRERCLGPPTTPGPYRSIYFSSPKGHLTRLGLEFFDQPAVPLARAFLGQVLVRRLPNGTELRGRIVETEAYLGPEDEAAHSRGGRQTPRNRGMFMKPGTLYVYIIYGMYFCMNISSQGDGACVLLRALEPLEGLETMRQLRSTLRKGTASRVLKDRELCSGPSKLCQALAINKSFDQRDLAQDEAVWLERGPLEPSEPAVVAAARVGVGHAG

SEQ ID NO: 62794 - protein, 532 aa, Homo sapiens
MQFGKLWCGCSGEFPTRLRRRTPLTEAMEGGPAVCCQDPRAELVERVAAIDVTHLEEADGGPEPTRNGVDPPPRARAASVIPGSTSRLLPARPSLSARKLSLQERPAGSYLEAQAGPYATGPASHISPRAWRRPTIESHHVAISDAEDCVQLNQYKLQSEIGKGAYGVVRLAYNESEDRHYAMKVLSKKKLLKQYGFPRRPPPRGSQAAQGGPAKQLLPLERVYQEIAILKKLDHVNVVKLIEVLDDPAEDNLYLVFDLLRKGPVMEVPCDKPFSEEQARLYLRDVILGLEYLHCQKIVHRDIKPSNLLLGDDGHVKIADFGVSNQFEGNDAQLSSTAGTPAFMAPEAISDSGQSFSGKALDVWATGVTLYCFVYGKCPFIDDFILALHRKIKNEPVVFPEEPEISEELKDLILKMLDKNPETRIGVPDIKLHPWVTKNGEEPLPSEEEHCSVVEVTEEEVKNSVRLIPSWTTVILVKSMLRKRSFGNPFEPQARREERSMSAPGNLLVKEGFGEGGKSPELPGVQEDEAAS

SEQ ID NO: 62795 - protein, 211 aa, Homo sapiens
MASVSALTEELDSITSELHAVEIQIQELTERQQELIQKKKVLTKKIKQCLEDSDAGASNEYDSSPAAWNKEDFPWSGKVKDILQNVFKLEKFRPLQLETINVTMAGKEVFLVMPTGGGKSLCYQLPALCSDGFTLVICPLISLMEDQLMVLKQLGISATMLNASSSKEHVKWVHAEMVNKNSELKLIYVTPEKIAKSKMFMSRLEKAYEAR

SEQ ID NO: 62796 - protein, 527 aa, Homo sapiens
MWGQDSTLQDTPPPDPEIFRQRFRRFCYQNTFGPREALSRLKELCHQWLRPEINTKEQILELLVLEQFLSILPKELQVWLQEYRPDSGEEAVTLLEDLELDLSGQQVPGQVHGPEMLARGMVPLDPVQESSSFDLHHEATQSHFKHSSRKPRLLQSRALPAAHIPAPPHEGSPRDQAMASALFTADSQAMVKIEDMAVSLILEEWGCQNLARRNLSRDNRQENYGSAFPQGGENRNENEESTSKAETSEDSASRGETTGRSQKEFGEKRDQEGKTGERQQKNPEEKTRKEKRDSGPAIGKDKKTITGERGPREKGKGLGRSFSLSSNFTTPEEVPTGTKSHRCDECGKCFTRSSSLIRHKIIHTGEKPYECSECGKAFSLNSNLVLHQRIHTGEKPHECNECGKAFSHSSNLILHQRIHSGEKPYECNECGKAFSQSSDLTKHQRIHTGEKPYECSECGKAFNRNSYLILHRRIHTREKPYKCTKCGKAFTRSSTLTLHHRIHARERASEYSPASLDAFGAFLKSCV

SEQ ID NO: 62797 - protein, 46 aa, Homo sapiens
MCSLASGATGYSHLLKKHFHTVSLSISLILTAWFINMDLNFMDTLS

SEQ ID NO: 62798 - protein, 526 aa, Homo sapiens
MECGIPPTLVCVGRGGGLHTVGVFHVLSQLISLCTIPEVFKEKPKINIIIWYYFPSAWRTCFNISSSVGLLLTNSYKFCPRDRRHAIHGNMGKTRVVRRQKQEQDTTTYSTERSEHFKPCRDKDLAYCLNDGECFVIETLTGSHKHCRCKEGYQGVRCDQFLPKTDSILSDPTDHLGIEFMESEEVYQRQVLSISCIIFGIVIVGMFCAAFYFKSKKQAKQIQEQLKVPQNGKSYSLKASSTMAKSENLVKSHVQLQNYSKVERHPVTALEKMMESSFVGPQSFPEVPSPDRGSQSVKHHRSLSSCCSPGQRSGMLHRNAFRRTPPSPRSRLGGIVGPAYQQLEESRIPDQDTIPCQGYSSSGLKTQRNTSINMQLPSRETNPYFNSLEQKDLVGYSSTRASSVPIIPSVGLEETCLQMPGISEVKSIKWCKNSYSADVVNVSIPVSDCLIAEQQEVKILLETVQEQIRILTDARRSEDYELASVETEDSASENTAFLPLSPTAKSEREAQFVLRNEIQRDSALTK

SEQ ID NO: 62799 - protein, 204 aa, Homo sapiens
MLPGLRRLLQAPASACLLLMLLALPLAAPSCPMLCTCYSSPPTVSCQANNFSSVPLSLPPSTQRLFLQNNLIRTLRPGTFGSNLLTLWLFSNNLSTIYPGTFRHLQALEELDLGDNRHLRSLEPDTFQGLERLQSLHLYRCQLSSLPGNIFRGLVSLQYLYLQENSLLHLQGKKEKGKSLLCSWRMDALKMEGIPVIVIHCYYY

SEQ ID NO: 62800 - protein, 1536 aa, Homo sapiens
MGVVNFVFRASEDLQVLENYSDAPMTPKQILQVIEAEGLKEMSGTSPLACLNAMLHSNSRGGEGLFYKLPGRISLFTLKKDALQWSRHPATVEGEEPEDTADVESCGSNEASTVSGENDVSLDETSSNASCSTESQSRPLSNPRDSYRASSQANKQKKKTGVMLPRVVLTPLKVNGAHVESASGFSGCHADGESGSPSSSSSGSLALGSAAIRGQAEVTQDPAPLLRGFRKPATGQMKRNRGEEIDFETPGSILVNTNLRALINSRTFHALPSHFQQQLLFLLPEVDRQVGTDGLLRLSSSALNNEFFTHAAQSWRERLADGEFTHEMQVRIRQEMEKEKKVEQWKEKFFEDYYGQKLGLTKEESLQQNVGQEEAEIKSGLCVPGESVRIQRGPATRQRDGHFKKRSRPDLRTRARRNLYKKQESEQAGVAKDAKSVASDVPLYKDGEAKTDPAGLSSPHLPGTSSAAPDLEGPEFPVESVASRIQAEPDNLARASASPDRIPSLPQETVDQEPKDQKRKSFEQAASASFPEKKPRLEDRQSFRNTIESVHTEKPQPTKEEPKVPPIRIQLSRIKPPWVVKGQPTYQICPRIIPTTESSCRGWTGARTLADIKARALQVRGARGHHCHREAATTAIGGGGGPGGGGGGATDEGGGRGSSSGDGGEACGHPEPRGGPSTPGKCTSDLQRTQLLPPYPLNGEHTQAGTAMSRARREDLPSLRKEESCLLQRATVGLTDGLGDASQLPVAPTGDQPCQALPLLSSQTSVAERLVEQPQLHPDVRTECESGTTSWESDDEEQGPTVPADNGPIPSLVGDDTLEKGTGQALDSHPTMKDPVNVTPSSTPESSPTDCLQNRAFDDELGLGGSCPPMRESDTRQENLKTKALVSNSSLHWIPIPSNDEVVKQPKPESREHIPSVEPQVGEEWEKAAPTPPALPGDLTAEEGLDPLDSLTSLWTVPSRGGSDSNGSYCQQVDIEKLKINGDSEALSPHGESTDTASDFEGHLTEDSSEADTREAAVTKGSSVDKDEKPNWNQSAPLSKVNGDMRLVTRTDGMVAPQSWVSRVCAVRQKIPDSLLLASTEYQPRAVCLSMPGSSVEATNPLVMQLLQGSLPLEKVLPPAHDDSMSESPQVPLTKDQSHGSLRMGSLHGLGKNSGMVDGSSPSSLRALKEPLLPDSCETGTGLARIEATQAPGAPQKNCKAVPSFDSLHPVTNPITSSRKLEEMDSKEQFSSFSCEDQKEVRAMSQDSNSNAAPGKSPGDLTTSRTPRFSSPNVISFGPEQTGRALGDQSNVTGQGKKLFGSGNVAATLQRPRPADPMPLPAEIPPVFPSGKLGPSTNSMSGGVQTPREDWAPKPHAFVGSVKNEKTFVGGPLKANAENRKATGHSPLELVGHLEGMPFVMDLPFWKLPREPGKGLSEPLEPSSLPSQLSIKQAFYGKLSKLQLSSTSFNYSSSSPTFPKGLAGSVVQLSHKANFGASHSASLSLQMFTDSSTVESISLQCACSLKAMIMCQGCGAFCHDDCIGPSKLCVLCLVVR

SEQ ID NO: 62801 - protein, 158 aa, Homo sapiens
MTTPNKTPPGADPKQLERTGTVREIGSQAVWSLSSCKPGFGVDQLRDDNLETYWQSDGSQPHLVNIQFRRKTTVKTLCIYADYKSDESYTPSKISVRVGNNFHNLQEIRQLELVEPSGWIHVPLTDNHKKPTRTFMIQIAVLANHQNGRDTHMRQIKI

SEQ ID NO: 62802 - protein, 1773 aa, Homo sapiens
MAAAPSALLLLPPFPVLSTYRLQSRSRPSAPETDDSRVGGIMRGEKNYYFRGAAGDHGSCPTTTSPLASALLMPSEAVSSSWSESGGGLSGGDEEDTRLLQLLRTARDPSEAFQALQAALPRRGGRLGFPRRKEALYRALGRVLVEGGSDEKRLCLQLLSDVLRGQGEAGQLEEAFSLALLPQLVVSLREENPALRKDALQILHICLKRSPGEVLRTLIQQGLESTDARLRASTALLLPILLTTEDLLLGLDLTEVIISLARKLGDQETEEESETAFSALQQIGERLGQDRFQSYISRLPSALRRHYNRRLESQFGSQVPYYLELEASGFPEDPLPCAVTLSNSNLKFGIIPQELHSRLLDQEDYKNRTQAVEELKQVLGKFNPSSTPHSSLVGFISLLYNLLDDSNFKVVHGTLEVLHLLVIRLGEQVQQFLGPVIAASVKVLADNKLVIKQEYMKIFLKLMKEVGPQQVLCLLLEHLKHKHSRVREEVVNICICSLLTYPSEDFDLPKLSFDLAPALVDSKRRVRQAALEAFAVLASSMGSGKTSILFKAVDTVELQDNGDGVMNAVQARLARKTLPRLTEQGFVEYAVLMPSSAGGRSNHLAHGADTDWLLAGNRTQSAHCHCGDHVRDSMHIYGSYSPTICTRRVLSAGKGKNKLPWENEQPGIMGENQTSTSKDIEQFSTYDFIPSAKLKLSQGMPVNDDLCFSRKRVSRNLFQNSRDFNPDCLPLCAAGTTGTHQTNLSGKCAQLGFSQICGKTGSVGSDLQFLGTTSSHQEKVYASLNFGSKTQQTFGSQTECTSSNGQNPSPGAYILPSYPVSSPRTSPKHTSPLIISPKKSQDNSVNFSNSWPLKSFEGLSKPSPQKKLVSQKSSDPTGRNHGENSQEKPPVQLTPALVRSPSSRRGLNGTKPVPPIPRGISLLPDKADLSTVGHKKKEPDDIWKCEKDSLPIDLSELNFKDKDLDQEEMHSSLRSLRNSAAKKRAKLSGSTSDLESPDSAMKLDLTMDSPSLSSSPNINSYSESGVYSQESLTSSLSTTPQGKRIMSDIFPTFGSKPCPTRLSSAKKKISHIAEQSPSAGSSSNPQQISSFDFTTTKALSEDSVVVVGKGVFGSLSSAPATCSQSVISSVENGDTFSIKQSIEPPSGIYGRSVQQNISSYLDVENEKDAKVSISKSTYNKMRQKRKEEKELFHNKDCEKKEKNSWERMRHTGTEKMASESETPTGAISQYKERMPSVTHSPEIMDLSELRPFSKPEIALTEALRLLADEDWEKKIEGLNFIRCLAAFHSEILNTKLHETNFAVVQEVKNLRSGVSRAAVVCLSDLFTYLKKSMDQELDTTVKVLLHKAGESNTFIREDVDKALRAMVNNVTPARAVVSLINGGQSHLHIAVRRCTAQHLSDVLEFMEPERILSAAKDMAERILPAAAKFAQDSSQETRYYGRKMLFFMMCHPNFEKMLEKYVPSKDLPYIKDSVRNLQQKGLGEIPLDTPSAKGRRSHTGSVGNTRSSSVSRDAFNSAERAVTEVREVTRKSVPRNSLESAEYLKLITGLLNAKDFRDRINGIKQLLSDTENNQDLVVGNIVKIFDAFKSRLHDSNSKVNLVALETMHKMIPLLRDHLSPIINMLIPAIVDNNLNSKNPGIYAAATNVVQALSQHVDNYLLLQPFCTKAQFLNGKAKQDMTEKLADIVTELYQRKPHATEQKVLVVLWHLLGNMTNSGSLPGAGGNIRTATAKLSKALFAQMGQNLLNQAASQPPHIKKSLEELLDMTILNEL

SEQ ID NO: 62803 - protein, 533 aa, Homo sapiens
MTFSEILDRVGSMGHFQFLHVAILGLPILNMANHNLLQIFTAATPVHHCRPPHNASTGPWVLPMGPNGKPERCLRFVHPPNASLPNDTQRAMEPCLDGWVYNSTKDSIVTEWDLVCNSNKLKEMAQSIFMAGILIGGLVLGDLSDRFGRRPILTCSYLLLAASGSGAAFSPTFPIYMVFRFLCGFGISGITLSTVILNVEWVPTRMRAIMSTALGYCYTFGQFILPGLAYAIPQWRWLQLTVSIPFFVFFLSSWWTPESIRWLVLSGKSSKALKILRRVAVFNGKKEEGERLSLEELKLNLQKEISLAKAKYTASDLFRIPMLRRMTFCLSLAWFATGFAYYSLAMGVEEFGVNLYILQIIFGGVDVPAKFITILSLSYLGRHTTQAAALLLAGGAILALTFVPLDLQTVRTVLAVFGKGCLSSSFSCLFLYTSELYPTVIRQTGMGVSNLWTRVGSMVSPLVKITGEVQPFIPNIIYGITALLGGSAALFLPETLNQPLPETIEDLENWSVTASGPISAPPWGSRSGPRAFP

SEQ ID NO: 62804 - protein, 530 aa, Homo sapiens
MPAKGRYFLNEGEEGPDQDALYEKYQLTSQHGPLLLTLLLVAATACVALIIIAFSQGDPSRHQAILGMAFLVLAVFAALSVLMYVECLLRRWLRALALLTWACLVALGYVLVFDAWTKAACAWEQVPFFLFIVFVVYTLLPFSMRGAVAVGAVSTASHLLVLGSLMGGFTTPSVRVGLQLLANAVIFLCGNLTGAFHKHQMQDASRDLFTYTVKCIQIRRKLRIEKRQQENLLLSVLPAHISMGMKLAIIERLKEHGDRRCMPDNNFHSLYVKRHQNVSILYADIVGFTQLASDCSPKELVVVLNELFGKFDQIAKANECMRIKILGDCYYCVSGLPVSLPTHARNCVKMGLDMCQAIKQVREATGVDINMRVGIHSGNVLCGVIGLRKWQYDVWSHDVSLANRMEAAGVPGRVHITEATLKHLDKAYEVEDGHGQQRDPYLKEMNIRTYLVIDPRSQQPPPPSQHLPRPKGDAALKMRASVRMTRYLESWGAARPFAHLNHRESVSSERSPAPPPDPRQKHVPQGAVGG

SEQ ID NO: 62805 - protein, 124 aa, Homo sapiens
MAVGLCKAMSQGLVTFRDVALDFSQEEWEWLKPSQKDLYRDVMLENYRNLVWLGLSISKPNMISLLEQGKEPWMVERKMSQGHCAGSHSVAQAGVQWHDLGSLQPIPTELKQSSHLSMHTTAPG

SEQ ID NO: 62806 - protein, 104 aa, Homo sapiens
MYGKIIFVLLLSDTHKRDTYAATPRAHEVSEISVRTVYPPEEETGERVQLAHHFSEPEITLIIFGVMAGVIGTILLISYGIRRLIKRQVINENLFTKPNVERTQ

SEQ ID NO: 62807 - protein, 229 aa, Homo sapiens
MASSAAGCVVIVGSGVIGRSWAMLFASGGFQVKLYDIEQQQIRNALENIRKEMKLLEQAGSLKGSLSVEEQLSLISGCPNIQEAVEGAMHIQECVPEDLELKKKIFAQLDSIIDDRVILSSSTSCLMPSKLFAGLVHVKQCIVAHPVNPPYYIPLVELVPHPETAPTTVDRTHALMKKIGQCPMRVQKEVAGFVLNRLQYAIISEAWRLVERLRWTCWCNPFFLAAALG

SEQ ID NO: 62808 - protein, 48 aa, Homo sapiens
MIQVLQIVKELVTPSRQKAATVKEDGVLPCHPGWSAVAQSRLTASSAS

SEQ ID NO: 62809 - protein, 984 aa, Homo sapiens
MRAPARGTGCCGRSGGRWLAGAAQPRCLWAGGAGQRFMVPGGTMKSLKKDSRLRITPTRLLEASENVKEKKRAKGPEQPTPTIQEEPEPVSNVLQGDDILALAIKKEDLKEQHIPRLTEKEDKRVITQKFIIRKLKPMDPRRKVCHLVARPANPDEATKPLDYSGPGDSFDGSDQILPHHILGSLQDFKRIALARGNTQLAERIPTSPCLMTLISAEGESKQKAPKEEKRPPWAPPPQHNFLKNWQRNTALRKKQQEALSEHLKKPVSELLMHTGETYRRIQEERELIDCTLPTRRDRKSWENSGFWSRLEYLGDEMTGLVMTKTKTQRGLMEPITHIRKPHSIRVETGLPAQRDASYRYTWDRSLFLIYRRKELQRIMEELDFSQQDIDGLEVVGKGWPFSAVTVEDYTVFERSQGSSSEDTAYLGTLASSSDVSMPILGPSLLFCGKPACWIRGSNPQDKRQVGIAAHLTFETLEGEKTSSELTVVNNGTVAIWYDWRRQHQPDTFQDLKKNRMQRFYFDNREGVILPGEIKTFTFFFKSLTAGVFREFWEFRTHPTLLGGAILQVNLHAVSLTQDVFEDERKVLESKLTAHEAVTVVREVLQELLMGVLTPERTPSPVDAYLTEEDLFRHRNPPLHYEHQVVQSLHQLWRQYMTLPAKAEEARPGDKEHVSPIATEKASVNAELLPRFRSPISETQVPRPENEALRESGSQKARVGTKSPQRKSIMEEILVEESPDVDSTKSPWEPDGLPLLEWNLCLEDFRKAVMVLPDENHREDALMRLNKAALELCQKPRPLQSNLLHQMCLQLWRDVIDSLVGHSMWLRSVLGLPEKETIYLNVPEEQDQKSPPIMEVKVPVGKAGKEERKGAAQEKKQLGIKDKEDKKGAKLLGKEDRPNSKKHKAKDDKKVIKSASQDRFSLEDPTPDIILSSQEPIDPLVMGKYTQSLHSEVRGLLDTLVTDLMVLADELSPIKNVEEALRLCR

SEQ ID NO: 62810 - protein, 375 aa, Homo sapiens
MYSSSCETTRNTTGIEESTDGMILGPEDLSYQIYDVSGESNSAVSTEDLKECLKKQLEFCFSRENLSKDLYLISQMDSDQFIPIWTVANMEEIKKLTTDPDLILEVLRSSPMVQVDEKGEKVRPSHKRCIVILREIPETTPIEEVKGLFKSENCPKVISCEFAHNSNWYITFQSDTDAQQAFKYLREEVKTFQGKPIMARIKAINTFFAKNGYRLMDSSIYSHPIQTQAQYASPVFMQPVYNPHQQYSVYSIVPQSWSPNPTPYFETPLAPFPNGSFVNGFNSPGSYKTNAAAMNMGRPFQKNRVKPQFRSSGGSEHSTEGSVSLGDGQLNRYSSRNFPAERHNPTVTGHQEQTYLQKETSTLQVEQNGDYGRGR

SEQ ID NO: 62811 - protein, 188 aa, Homo sapiens
MAGARAAAAAASAGSSASSGNQPPQELGLGELLEEFSRTQYRAKDGSGTGGSKVERIEKRCLELFGRDYCFSVIPNTNGDICGHYPRHIVFLEYESSEKEKDTFESTVQVSKLQDLIHRSKMARCRGRFVCPVILFKGKGVQMMPGQMWRTSRRRTVLFEVVTRIFLIRSEAMTSSCFDTCQSNTSVT

SEQ ID NO: 62812 - protein, 333 aa, Homo sapiens
MSLTVVSMACVGFFLLQGAWPLMGGQDKPFLSARPSTVVPRGGHVALQCHYRRGFNNFMLYKEDRSHVPIFHGRIFQESFIMGPVTPAHAGTYRCRGSRPHSLTGWSAPSNPLVIMVTGNHRKPSLLAHPGPLLKSGETVILQCWSDVMFEHFFLHREGISEDPSRLVGQIHDGVSKANFSIGPLMPVLAGTYRCYGSVPHSPYQLSAPSDPLDIVITGLYEKPSLSAQPGPTVQAGENVTLSCSSWSSYDIYHLSREGEAHERRLRAVPKVNRTFQADFPLGPATHGGTYRCFGSFRALPCVWSNSSDPLLVSVTGNPSSSWPSPTEPSSKS

SEQ ID NO: 62813 - protein, 260 aa, Homo sapiens
MFSEELWLENEKKCAVVRKSKQGRKRQELLAVAFGVKVGVKGGFLWPPLKLFACSQISSLVRRAALTHNDNHFNYEKTHNFKVHTFRGPHWCEYCANFMWGLIAQGVRCSDCGLNVHKQCSKHVPNDCQPDLKRIKKVYCCDLTTLVKAHNTQRPMVVDICIREIEAREISNADERLEAVHEVLMLLPPAHYETLRYLMIHLKKVTMNEKDNFMNAENLGIVFGPTLMRPPEDSTLTTLHDMRYQKLIVQILIENEDVLF

SEQ ID NO: 62814 - protein, 89 aa, Homo sapiens
  MOD_RES (1)..(1): Any amino acid
XKAMRNNVPRDRGDTAMEVGIYANILEKQAKEESVPEVGSRPCVSTAQDEAKHSQELQYATPVFQEVAPREQEACDSYKSGYVYSELNF

SEQ ID NO: 62815 - protein, 39 aa, Homo sapiens
MQKIKSLMTRQGLKSPQESLSDLGAIESLRVPGKVLSYT

SEQ ID NO: 62816 - protein, 84 aa, Homo sapiens
MDEPSPLAQPLELNQHSRFIIGSVSEDNSEDEISNLVKLDLLEEKEGSLSPASVGSDTLSDLGISSLQDGLALHISSWIKRSGS

SEQ ID NO: 62817 - protein, 245 aa, Homo sapiens
MRLSFIVFSSQATIILPLTGDRGKISKGLEDLKRVSPVGETYIHEGLKLANEQIQKAGGLKTSSIIIALTDGKLDGLVPSYAEKEAKISRSLGASVYCVGVLDFEQAQLERIADSKEQVFPVKGGFQALKGIINSILAQSCTEILELQPSSVCVGEEFQIVLSGRGFMLGSRNGSVLCTYTVNETYTTSVKPVSVQLNSMLCPAPILNKAGEWGLTVTQAGVKWHDLTHCTFGLSGSGDPPTSAS

SEQ ID NO: 62818 - protein, 218 aa, Homo sapiens
RVLSNGVQFSRISPDGEEGYPGELKVWVTYTLDGGELIVNYRAQASQATPVNLTNHSYFNLAGQASPNINDHEVTIEADTYLPVDETLIPTGEVAPVQGTAFDLRKPVELGKHLQDFHLNGFDHNFCLKGSKEKHFCARVHHAASGRVLEVYTTQPGVQFYTGNFLDGTLKGKNGAVYPKHSGFCLETQNWPDAVNQFPFQHGIIWRQRNLEDNSRIL

SEQ ID NO: 62819 - protein, 244 aa, Homo sapiens
MASYYEILDVPRSASADDIKKAYRRKALQWHPDKNPDNKEFAEKKFKEVAEAYEVLSDKHKREIYDRYGREGLTGTGTGPSRAEAGSGGPGFTFTFRSPEEVFREFFGSGDPFAELFDFSSSSFSFSPGAGAFRSVSTSTTFVQGRRITTRRIMENGQERVEVEEDGQLKSVTINGVPDDLALGLELSRREQQPSVTSRSGGTQVQQTPASCPLDSDLSEDEDLQLAMAYSLSEMEAAGKKPAG

SEQ ID NO: 62820 - protein, 470 aa, Homo sapiens
MAETVWSTDTGEAVYRSRDPVRNLRLRVHLQRITSSNFLHYQPAAELGKDLIDLATFRPQPTASGHRPEEDEEEEIVIGWQEKLFSQFEVDLYQNETACQSPLDYQYRQEILKLENSGGKKNRRIFTYTDSDRYTNLEEHCQRMTTAASEVPSFLVERMANVRRRRQDRRGMEGGILKSRIVTWEPSEEFVRNNHVINTPLQTMHIMADLGPYKKLGYKKYEHVLCTLKVDSNGVITVKPDFTGLKGPYRIETEGEKQELWKYTIDNVSPHAQPEEEERERRVFKDLYGRHKEYLSSLVGTDFEMTVPGALRLFVNGEVVSAQGYEYDNLYVHFFVELPTAHWSSPAFQQLSGVTQTCTTKSLAMDKVAHFSYPFTFEAFFLHEDESSDALPEWPVLYCEVLSLDFWQRYRVEGYGAVVLPATPGNRSSLPFCGPHALGPKNKTNTRMLLVRGGDNWELEMFGLKEFLFL

SEQ ID NO: 62821 - protein, 177 aa, Homo sapiens
MAGPVKDREAFQRLNFLYQVSLRQGPHGDGARRPRVTAPLPQAAHCVLAQDPENQALARFYCYTERTIAKRLVLRRDPSVKRTLCRGCSSLLVPGLTCTHRQRRCRGQRWTVQTCLTCQRSQRFLNDPGHLLWGDRPEAQLGSQADSKPLQPLPNTAHSISDRLPEEKMQTQGSSNQ

SEQ ID NO: 62822 - protein, 677 aa, Homo sapiens
MPRQFPKLNISEVDEQVRLLAEKVFAKVLREEDSKDALSLFTVPEDCPIGQKEAKERELQKELAEQKSVETAKRKKSFKMIRSQSLSLQMPPQQDWKGPPAASPAMSPTTPVVTGATSLPTPAPYAMPEFQRVTISGDYCAGITLEDYEQAAKSLAKALMIREKYARLAYHRFPRITSQYLGHPRADTAPPEEGLPDFHPPPLPQEDPYCLDDAPPNLDYLVHMQGGILFVYDNKKMLEHQEPHSLPYPDLETYTVDMSHILALITDGPTKTYCHRRLNFLESKFSLHEMLNEMSEFKELKSNPHRDFYNVRKVDTHIHAAACMNQKHLLRFIKHTYQTEPDRTVAEKRGRKITLRQVFDGLHMDPYDLTVDSLDVHAGRQTFHRFDKFNSKYNPVGASELRDLYLKTENYLGGEYFARMVKEVARELEESKYQYSEPRLSIYGRSPEEWPNLAYWFIQHKVYSPNMRWIIQVPRIYDIFRSKKLLPNFGKMLENIFLPLFKATINPQDHRELHLFLKYVTGFDSVDDESKHSDHMFSDKSPNPDVWTSEQNPPYSYYLYYMYANIMVLNNLRRERGLSTFLFRPHCGEAGSITHLVSAFLTADNISHGLLLKKSPVLQYLYYLAQIPIAMSPLSNNSLFLEYSKNPLREFLHKGLHVSLSTDDPMQFHYTKLKCGS

SEQ ID NO: 62823 - protein, 345 aa, Homo sapiens
MYRTKVGLKDRQQLYKLIISQLLYDGYISIANGLINEIKPQSVCAPSEQLLHLIKLGMENDDTAVQYAIGRSDTVAPGTGIDLEFDADVQTMSPEASEYETCYVTSHKGPCRVATYSRDGQLIATGSADASIKILDTERMLAKSAMPIEVMMNETAQQNMENHPVIRTLYDHVDEVTCLAFHPTEQILASGSRDYTLKLFDYSKPSAKRAFKYIQEAEMLRSISFHPSGDFILVGTQHPTLRLYDINTFQCFVSCNPQDQHTDAICSVNYNSSANMYVTGSKDGCIKLWDGVSNRCITTFEKAHDGAEVCSAIFSKNSKYILSSGKDSVAKLWEISTGRTLVRYT

SEQ ID NO: 62824 - protein, 41 aa, Homo sapiens
MWGFLKRPVVVTADINLSLVALTGMGLLSRLWRLTYPRAVV

SEQ ID NO: 62825 - protein, 498 aa, Homo sapiens
MAAAAPVAADDDERRRRPGADSISSYEAQITALKQERQQQQQDCEEKERELGRLKQLLSRAYPLDSLEKQMEKAHEDSEKLREIVLPMEKEIEELKAKLLRAEELIQEIQRRPRHAPSLHGSTELLPLSRDPSPPLEPLEELSGDGGPAAEAFAHNCDDSASISSFSLGGGVGSSSSLPQSRQGLSPEQEETASLVSTGTLVPEGIYLPPPGYQLVPDTQWEQLQTEGRQLQKDLESVSRERDELQEGLRRSNEDCAKQMQVLLAQVQNSEQLLRTLQGTVSQAQERVQLQMAELVTTHKCLHHEVKRLNEENQGLRAEQLPSSAPQGSQQEQGEEESLPSSVPELQQLLCCTRQEARARLQAQEHGAERLRIEIVTLREALEEETVARASLEGQLRVQREETEVLEASLCSLRTEMERVQQEQSKAQLPDLLSEQRAKVLRLQAELETSEQVQRDFVRLSQALQVRLERIRQAETLEQVRSIMDEAPLTDVRDIKDT

SEQ ID NO: 62826 - protein, 61 aa, Homo sapiens
MSELSDEASEPELLNRSLSMWHGLGTQVSGEELDVPLDLHTAASIGQYEVVKECVQRKVQS

SEQ ID NO: 62827 - protein, 108 aa, Homo sapiens
MEVAEPSSPTEEEEEEEEHSAEPRPRTRSNPEGAEDRAVGAQASVGSRSEGEGEAASADDGSLNTSGAGPKSWQVPPPAPEVQIRTPRVNCPEKVLQNQRPQCLPEDD

SEQ ID NO: 62828 - protein, 103 aa, Homo sapiens
MSTYKRATLDEEDLVDSLSEGDAYPNGLQVNFHSPRSGQRCWAARTQVEKRLVVLVVLLAAGLVACLAALGIQYQTRSPSVCLSEACVSVTSSILSSMDPTVD

SEQ ID NO: 62829 - protein, 44 aa, Homo sapiens
MTDDKDVLRDVWFGRIPTCFTLYQDEITEREAEPYYALSNWFAI

SEQ ID NO: 62830 - protein, 200 aa, Homo sapiens
MMPFGKISQQLCGVKKLPWSCDSRYFWGWLNAVFNKVDYDRIRDVGPDRAASEWLLRCGAMVRYHGQERWQKDYNHLPTGPLDKYKIQAIDATDSCIMSIGFDHMEGLEHVEKIRLCKCHYIEDDCLLRLSQLENLQKTILEMEIISCGNITDKGIIALRHLRNLKYLLLSDLPGVREKENLVQAFKTALPSLELKLQLK

SEQ ID NO: 62831 - protein, 77 aa, Homo sapiens
MAARCSTRWLLVVVGTPRLPAISGRGARPPREGVVGAWLSRKLSVPAFASSLTSCGPRALLTLRPGVSLTACQEVSP

SEQ ID NO: 62832 - protein, 434 aa, Homo sapiens
LEVRPKESWNHADFVHCEDTESVPGKPSVNADEEVGGPQICRVCGDKATGYHFNVMTCEGCKGFFRRAMKRNARLRCPFRKGACEITRKTRRQCQACRLRKCLESGMKKEMIMSDEAVEERRALIKRKKSERTGTQPLGVQGLTEEQRMMIRELMDAQMKTFDTTFSHFKNFRLPGVLSSGCELPESLQAPSREEAAKWSQVRKDLCSLKVSLQLRGEDGSVWNYKPPADSGGKEIFSLLPHMADMSTYMFKGIISFAKVISYFRDLPIEDQISLLKGAAFELCQLRFNTVFNAETGTWECGRLSYCLEDTAGGFQQLLLEPMLKFHYMLKKLQLHEEEYVLMQAISLFSPDRPGVLQHRVVDQLQEQFAITLKSYIECNRPQPAHRFLFLKIMAMLTELRSINAQHTQRLLRIQDIHPFATPLMQELFGITGS

SEQ ID NO: 62833 - protein, 134 aa, Homo sapiens
MGAMCLLHASLSEYVLLFGTALGSRGHSGRYWAEISDTIISGTFHQWREGTTKSEVFYPGETVVHGPGEATAVEWGPNTWMVEYGRGVIPSTLAFALADTVFSTQDFLTLFYTLRSYARGLRLELTTYLFGQDP

SEQ ID NO: 62834 - protein, 162 aa, Homo sapiens
MNIFEDIGDYVPSTTKTPRDKERERYRERERDRERDRDRDRERERERDRERERERDREREEEKKRHSYFEKPKVDDEPMDVDKGPGSTKELIKSINEKFAGSAGWEGTESLKKPEDKKQLGDFFGMSNSYAECYPATMDDMAVDSDEEVDYSKMDQGNKKGP

SEQ ID NO: 62835 - protein, 41 aa, Homo sapiens
MNVPFKRLSVVFGEHTLLVTVSGQRVFVVKRQNRGREPIDV

SEQ ID NO: 62836 - protein, 309 aa, Homo sapiens
MEGNKTWITDITLPRFQVGPALEILLCGLFSAFYTLTLLGNGVIFGIICLDCKLHTPMYFFLSHLAIVDISYASNYVPKMLTNLMNQESTISFFPCIMQTFLYLAFAHVECLILVVMSYDRYADICHPLRYNILMSWRVCTVLAVASWVFSFLLALVPLVLILRLPFCGPHEINHFCEILSVLKLACADTWLNQVVIFAACVFILVGPLCLVLVSYLRILAAILRIQSGEGRRKAFSTCSSHLCVVGLFFGSAIVTYMAPKSRHPEEQQKVLSLFYSLFNPMLNPLIYSLRNAEVKGALRRALRKERLT

SEQ ID NO: 62837 - protein, 141 aa, Homo sapiens
MGNIFEKLFKSLLGKKKMRILILSLDTAGKTTILYKLKLGETVPAVPTVGFCVETVEYKNNTFAVWDVGSHFKIRPLWQHFFQNTKGSCSIDQAGVQWRDLGSLQRPLPKLRFVSHTSPHTKLLHTRPRTASRKCFFRGKI

SEQ ID NO: 62838 - protein, 335 aa, Homo sapiens
MDPDSDQPLNSLDVKPLRKPRIPMETFRKVGIPIIIALLSLASIIIVVVLIKVILDKYYFLCGQPLHFIPRKQLCDGELDCPLGEDEEHCVKSFPEGPAVAVRLSKDRSTLQVLDSATGNWFSACFDNFTEALAETACRQMGYSSKPTFRAVEIGPDQDLDVVEITENSQELRMRNSSGPCLSGSLVSLHCLACGKSLKTPRVVGVEEASVDSWPWQVSIQYDKQHVCGGSILDPHWVLTAAHCFRKHTDVFNWKVRAGSDKLGSFPSLAVAKIIIIEFNPMYPKDNDIALMKLQFPLTFSGTVRPICLPFFDEELTPATPLWIIGWGFTKQNGG

SEQ ID NO: 62839 - protein, 17 aa, Homo sapiens
MPNWGGGKKSGALVHSE

SEQ ID NO: 62840 - protein, 274 aa, Homo sapiens
MECALLLACAFPAAGSGPPRGLAGLGRVAKALQLCCLCCASVAAALASDSSSGASGLNDDYVFVTPVEVDSAGSYISHDILHNGRKKRSAQNARSSLHYRFSAFGQELHLELKPSAILSSHFIVQVLGKDGASETQKPEVQQCFYQGFIRNDSSSSVAVSTCAGLSGLIRTRKNEFLISPLPQLLAQEHNYSSPAGHHPHVLYKRTAEEKIQRYRGYPGSGRNYPGYSPSHIPHASQSRETEYHHRRLQKQHFCGRRKKCICSQASHRGHLSKV

SEQ ID NO: 62841 - protein, 338 aa, Homo sapiens
MWQLWASLCCLLVLANARSRPSFHPLSDELVNYVNKRNTTWQAGHNFYNVDMSYLKRLCGTFLGGPKPPQRVMFTEDLKLPASFDAREQWPQCPTIKEIRDQGSCGSCWAFGAVEAISDRICIHTNAHVSVEVSAEDLLTCCGSMCGDGCNGGYPAEAWNFWTRKGLVSGGLYESHVGCRPYSIPPCEHHVNGSRPPCTGEGDTPKCSKICEPGYSPTYKQDKHYGYNSYSVSNSEKDIMAEIYKNGPVEGAFSVYSDFLLYKSVYQHVTGEMMGGHAIRILGWGVENGTPYWLVANSWNTDWGDNGFFKILRGQDHCGIESEVVAGIPRTDQYWEKI

SEQ ID NO: 62842 - protein, 176 aa, Homo sapiens
MLRWLIGGGREPQGLAEKSPLQTIGEEQTQNPYTELLVLKAHHDIVRFLVQLDDYRFASAGDDGIVVVWNAQTGEKLLELNGHTQKITAIITFPSLESCEEKNQLILTASADRTVIVWDGDTTRQVQRISCFQSTVKCLTVLQRLDVWLSGGNDLCVWNRKLDLLCKTSHLSDTGW

SEQ ID NO: 62843 - protein, 151 aa, Homo sapiens
PQTDQKSHSQRALGTQTPALQGPQLLNTDPSSEETRPPHVNPDRLCHMEPANHFWHAGDLQAMISKEFHLAATQDDCRKGRTQEDILVPSSHPELFASVLPMAPEEAARLQQPQPLPPPSGIHLSASRTLAPTLLYSSPPSHSPFGLSSLI

SEQ ID NO: 62844 - protein, 224 aa, Homo sapiens
PSQRAALHLSVPRPAARVALVLSGCGVYDGTEIHEASAILVHLSRGGAEVQIFAPDVPQMHVIDHTKGQPSEGESRNVLTESARIARGKITDLANLSAANHDAAIFPGGFGAAKNLSTFAVDGKDCKVNKEVERVLKEFHQAGKPIGHSLKDLPGHCPGRPLKWSLRKRCRLRAPEGGPCCSRVTAGVKVSPMVSTSGSRPCQRSVPWMSAQREEPMALSSVTD

SEQ ID NO: 62845 - protein, 69 aa, Homo sapiens
MSQPPLLPASAETRKFTRALSKPGTAAELRQSVSEVVRGSVLLAAGEPLPVDPFSLESVMCPGSASSSC

SEQ ID NO: 62846 - protein, 112 aa, Homo sapiens
MAAVAAASAELLIIGWYIFRVLLQGGSWVSRRRCSGTPCRSWHTRCRGPGGRCWGSAGSEPPTEAPAPSPGRPYHQVLLCISASTGASAAQECGVPCVPSPEEHLARSVRGQ

SEQ ID NO: 62847 - protein, 174 aa, Homo sapiens
MLTENGQVLSCGSNSFGQLGVPHGPRRCVVPQAIELHKEKVVCIAAGLRHAVAATASGIVFQWGTGLASCGRRLCPGQTLPLFFTAKEPSRVTGLENSKAMCVLAGSDHSASLTDAGEVYVWGSNKHGQLANEAAFLPVPQKIEAHCFQNEKVTAIWSGWTHLVAQTGLLWLRA

SEQ ID NO: 62848 - protein, 83 aa, Homo sapiens
MAPGCKIMKVMPSKFLCEFVLLQKDLGQLMESRTYAYLCCPPRVSGCTPTLSPRPSRLIMLQMWIPLRNLYSQLWLKALWSLA

SEQ ID NO: 62849 - protein, 842 aa, Homo sapiens
MCGSERILQAGNILEIRVGQAGARRVATMTSPVLVDIREEVTCPICLELLTEPLSIDCGHSFCQACITPNGRESVIGQEGERSCPVCQTSYQPGNLRPNRHLANIVRRLREVVLGPGKQLKAVLCADHGEKLQLFCQEDGKVICWLCERSQEHRGHHTFLVEEVAQEYQEKFQESLKKLKNEEQEAEKLTAFIREKKTSWKNQMEPERCRIQTEFNQLRNILDRVEQRELKKLEQEEKKGLRIIEEAENDLVHQTQSLRELISDLERRCQGSTMELLQDVSDVTERSEFWTLRKPEALPTKLRSMFRAPDLKRMLRVCRELTDVQSYWAIQGSLTRRERRASGVRTRRSQGSSAMASKILLNVQEEVTCPICLELLTEPLSLDCGHSLCRACITVSNKEAVTSMGGKSSCPVCGISYSFEHLQANQHLANIVERLKEVKLSPDNGKKRDLCDHHGEKLLLFCKEDRKVICWLCERSQEHRGHHTVLTEEVFKECQEKLQAVLKRLKKEEEEAEKLEADIREEKTSWKYQVQTERQRIQTEFDQLRSILNNEEQRELQRLEEEEKKTLDKFAEAEDELVQQKQLVRELISDVECRSQWSTMELLQDMSGIMKWSEIWRLKKPKMVSKKLKTVFHAPDLSRMLQMFRELTAVRCYWVDVTLNSVNLNLNLVLSEDQRQVISVPIWPFQCYNYGVLGSQYFSSGKHYWEVDVSKKTAWILGVYCRTYSRHMKYVVRRCANRQNLYTKYRPLFGYWVIGLQNKCKYGVFEESLSSDPEVLTLSMAVPPCRVGVFLDYEAGIVSFFNVTSHGSLIYKFSKCCFSQPVYPYFNPWNCPAPMTLCPPSS

SEQ ID NO: 62850 - protein, 47 aa, Homo sapiens
MEPDSVIEDKTIELMLPKCMFGILLKKAGYSKRKESWKMLDCCLFSD

SEQ ID NO: 62851 - protein, 104 aa, Homo sapiens
MSCVPWKGDKAKSESLELPQAAPPQIYHEKQRRELCALHALNNVFQDSNAFTRDTLQEIFQRLSPNTMVTPHKKSMLGNGNYDVNVIMAALQTKGYEAVWWDKR

SEQ ID NO: 62852 - protein, 249 aa, Homo sapiens
  MOD_RES (1)..(1): Any amino acid
XQFDTKVIIQTLLKYPINHFWGVSSIYRMILQQDFTSIRFPALEHCYTGGEVVLPKDQEEWKRRTGLLLYENYGQSETGLICATYWGMKIKPGFMGKATPPYDVQGDPEKTAKVECGDFYNTGDRGKMDEEGYICFLGRSDDIINASGYRIGPAEVESALVEHPAVAESAVVGSPDPIRGEVVKAFIVLTPQFLSHDKDQLTKELQQHVKSVTAPYKYPRKVEFVSELPKTITGKIERKELRKKETGQM

SEQ ID NO: 62853 - protein, 167 aa, Homo sapiens
MEKLSALQEQKGELRKRLSYTTHKLEKLETEFDSTRHYLEIELRRAQEELEKVTEKLRRIQSNYMALQRINQELEDKLYRMGQHYEEEKRALSHEIVALNSHLLEAKVTIDKLSEDNELYRKDCNLAAQLLQCSQTYGRVHKVSELPSDFQERVSLHMEKHGCSLPS

SEQ ID NO: 62854 - protein, 137 aa, Homo sapiens
MALDRRRWLMAQQQQELQQKEQELKNHQEEEQQSEEKLQPHKKLNVPQPPVAKLWTSQEQPQPSQQQPSVQPPSQPPPQPSTLPQAQVWPGPQPPQPQPPPQPTQPSAQARCTQHTSKCNLQDSQRPGHQPTSAGIY

SEQ ID NO: 62855 - protein, 396 aa, Homo sapiens
MASLSRALRVAAAHPRQSPTRGMGPCNLSSAAGPTAEKSVPYQRTLKEGQGTSVVAQGPSRPLPSTANVVVIGGGSLGCQTLYHLAKLGMSGAVLLERERLTSGTTWHTAGLLWQLRPSDVEVELLAHTRRVVSRELEEETGLHTGWIQNGGLFIASNRQRLDEYKRLMSLGKAYGVESHVLSPAETKTLYPLMNVDDLYGTLYVPHDGTMDPAGTCTTLARAASARGAQVIENCPVTGIRVWTDDFGVRRVAGVETQHGSIQTPCVVNCAGVWASAVGRMAGVKVPLVAMHHAYVVTERIEGIQSFTLLPTLEYSGTVSAHCNLRLPGSSNSRASASHVAGIKCARHHTRLIFFCILVETEFHHVAKAGLELLSSGNPPISDFQSARITGVSHHA

SEQ ID NO: 62856 - protein, 151 aa, Homo sapiens
MALQTLQSSWVTFRKILSHFPEELSLAFVYGSGVYRQAGPSSDQKNAMLDFVFTVDDPVAWHSKNLKKNWSHYSFLKVLGPKIITSIQNNYGAGVYYNSLIMCNGRLIKYGVISTNVLIEDLLNWNNLYIAGRLQKPASLAVSQEFTGFSL

SEQ ID NO: 62857 - protein, 494 aa, Homo sapiens
MHRRQRWAARYSPGPLPLPGLGNLLHVDFQNTPYCFDQLRRRFGDVFSLQLAWTPVVVLNGLAAVREALVTHGEDTADRPPVPITQILGFGPRSQGVFLARYGPAWREQRRFSVSTLRNLGLGKKSLEQWVTEEAACLCAAFANHSGRPFRPNGLLDKAVSNVIASLTCGRRFEYDDPRFLRLLDLAQEGLKEESGFLREVLNAVPVLLHIPALAGKVLRFQKAFLTQLDELLTEHRMTWDPAQPPRDLTEAFLAEMEKAKGNPESSFNDENLRIVVADLFSAGMVTTSTTLAWGLLLMILHPDVQQGGRVQAGAHPIVGTHVCPGRVQQEIDDVIGQVRRPEMGDQAHMPYTTAVIHEVQRFGDIVPLGVTHMTSRDIEVQGFRIPKGTTLITNLSSVLKDEAVWEKPFRFHPEHFLDAQGHFVKPEAFLPFSAGRRACLGEPLARMELFLFFTSLLQHFSFSVPTGQPRPSHHGVFAFLVTPSPYELCAVPR

SEQ ID NO: 62858 - protein, 763 aa, Homo sapiens
MAVRERAAAAMAALERRVPSLDDFAGQSWSSWVERADLPAADGAELEESSKNTKKLDAMTLIKEDMSIFGHCPAHDDFYLVVCNHCSQVVKPQAFQKHCERRHGPLSKLYGRAPPPPPAPASSQKCHVVNGQGPACRAPGSTKTSSREKGQGSRSRGHQPPEKTQKDNLCLFVPVVNLEKMSSLPKPDGHGIRVAPPSAFLSQPGGLTKDSPGKPPMAPPSKEPPGRENIEIIPSEGSSHWAEGSPPEKEPSGTRLPPKTHRKMARKECDLNRQCGVINPETKKICTRLLTCKIHSVHQRREVQGRAKDFDVLVAELKANSRKGESPKEKSPGRKEQVLERPSQELPSSVQVVAAVAAPSSTFSVRAKQTYPYCALPRSRASSESELDDEGPCGGDGDPGLFPFPMPRGGTQASSEESEEEGTSDDLHPPPDCHYATRPPRPQAFCTFGSRLVSPGCYVFSRRLDRFCSALSSMLERHLSTHMWKKIPPAAEPPAHLVNSPLSAPLSPSSTGTCPRLPGPTLRPACPASMPPTKDNLVPSYPAGSPSVAAACSQAECMGGSQAITSPLPANTPSPSFSKLPPSKASKSSKGKDGVEVEAPSRKRKLSPGPTTLKRTCILEPTGKGKPSGCRGLSAKTKTALSMGLNGTMGPRVKRAGPLDCRGSPHQLPTPVKASQLENRGAAGHPAKALPTNCLSEEEVAKKRKNLATYCRPVKAKHCQAGAPADVACSVRRKKPGPALAFEEKCSTLKVLELPLFPEGKGV

SEQ ID NO: 62859 - protein, 15 aa, Homo sapiens
MTAGASDYFSLVSVN

SEQ ID NO: 62860 - protein, 846 aa, Homo sapiens
MSKRGMSSRAKGDKAEALAALQAANEDLRAKLTDIQIELQQEKSKVSKVEREKNQELRQVREHEQHKTAVLLTELKTKLHEEKMKELQAVRETLLRQHEAELLRVIKIKDNENQRLQALLSALRDGGPEKVKTVLLSEAKEEAKKGFEVEKVKMQQEISELKGAKRQVEEALTLVIQADKIKAAEIRSVYHLHQEEITRIKKECEREIRRLMEEIKFKDRAVFVLERELGVQAGHAQRLQLQKEALDEQLSQVREADRHPGSPRRELPHAAGAGDASDHSGSPEQQLDEKDARRFQLKIAELSAIIRKLEDRNALLSEERNELLKRVREAESQYKPLLDKNKRLSRKNEDLSHALRRMENKLKFVTQENIEMRQRAGIIRRPSSLNDLDQSQDEREVDFLKLQIVEQQNLIDELSKTLETAGYVKSVLERDKLLRFRKQRKKMAKLPKPVVVETFFGYDEEASLESDGSSVSYQTDRTDQTPCTPDDDLEEGMAKEETELRFRQLTMEYQALQRAYALLQEQVGGTLDAEREVKTREQLQAEVQRAQARIEDLEKALAEQGQDMKWIEEKQALYRRNQELVEKIKQMETEEARLRHEVQDARDQNELLEFRILELEERERKSPAISFHHTPFVDGKSPLQVYCEAEGVTDIVVAELMKKLDILGDNAVSNLTNEEQVVVIQARTVLTLAEKWLQQIEETEAALQRKMVDLESEKELFSKQKGYLDEELDYRKQALDQANKHILELEAMLYDALQQEAGAKVAELLSEEEREKLKVAVEQWKRQVMSELRERDAQILRERMELLQLAQQRIKELEERIEAQKRQIKELEEKFLFLFLFFSLAFILWS

SEQ ID NO: 62861 - protein, 7 aa, Homo sapiens
VDIVSTI

SEQ ID NO: 62862 - protein, 36 aa, Homo sapiens
MLVRGPHFELQRCKTHLFSSNYLTQREKLETLYQGY

SEQ ID NO: 62863 - protein, 647 aa, Homo sapiens
MRFTFNERSNPDDDSMGIQIVKDLHRTGCSSYCGQEAEQDRVVLKRVLLAYARWNKTVGYCQGFNILAALILEVMEGNEGDALKIMIYLIDKVLPESYFVNNLRALSVDMAVFRDLLRMKLPELSQHLDTLQRTANKESGGGYEPPLTNVFTMQWFLTLFATCLPNQTVLKIWDSVFFEGSEIILRVSLAIWAKLGEQIECCETADEFYSTMGRLTQEMLENDLLQSHELMQTVYSMAPFPFPQLAELREKYTYNITPFPATVKPTSVSGRHSKARDSDEENDPDDEDAVVNAVGCLGPFSGFLAPELQKYQKQIKEPNEEQSLRSNNIAELSPGAINSCRSEYHAAFNSMMMERMTTDINALKRQYSRIKKKQQQQVHQVYIRADKGPVTSILPSQVNSSPVINHLLLGKKMKMTNRAAKNAVIHIPGHTGGKISPVPYEDLKTKLNSPWRTHIRVHKKNMPRTKSHPGCGDTVGLIDEQNEASKTNGLGAAEAFPSGCTATAGREGSSPEGSTRRTIEGQSPEPVFGDADVDVSAVQAKLGALELNQRDAAAETELRVHPPCQRHCPEPPSAPEENKATSKAPQGSNSKTPIFSPFPSVKPLRKSATARNLGLYGPTERTPTVHFPQMSRSFSKPGGGNSGTKKR

SEQ ID NO: 62864 - protein, 190 aa, Homo sapiens
NIKKLTAGRLAAAHFDGKGEVEEYFRDIGVPMTSVRLPCYFENLLSHFLPQKAPDGKSYLLSLPTGDVPMDGMSVSDLGPVVLSLLKMPEKYVGQNIGLSTCRHTAEEYAALLTKHTRKVVHDAKVGLPPQMTPEDYEKLGFPGARDLANMFRFYALRPDRDIELTLRLNPKALTLDQWLEQHKGDFNLL

SEQ ID NO: 62865 - protein, 11 aa, Homo sapiens
  MOD_RES (1)..(1): Any amino acid
XEYCNSTTFYA

SEQ ID NO: 62866 - protein, 43 aa, Homo sapiens
MGETKEVGVLECSSMISVHCSLNLLGSSNPPVLSSQNAGITVS

SEQ ID NO: 62867 - protein, 360 aa, Homo sapiens
MVTLITEKLQSQSLDDLTCKAEAGPLQYSAETLNKSGRLFPLELNDQSPWKVFSGGPPVRSQAATGPDFSFLPGLSAAAHTMGLQWQPQSPRPGAGLGAASTVDPSESTGSSTAPPTKRHCRSLSEPEELVRCRSPWRPGSSKVWTPVSKRRCDSGGSATRQGSPGAVLPRSAVWSTGPTSPATPRPSSASGGFVDSSEGSAGSGPLWCSAESCLPSTRRRPSLSQERLAGAGTPLPWASSSPTSTPALGGRRGLLRCRSQPCVLSGKRSRRKRRREEDARWTRPSLDFLKMTQPHSCARECESRVRGLGVSLQHLSGPSSQSRGSTLNENKTPWFEMEGNLAPEDFKKFKKPLLPQLRR

SEQ ID NO: 62868 - protein, 118 aa, Homo sapiens
MPVEEFVAGWISGALGLVLGHPFDTVKVRLQTQTTYRGIVDCMVKIYRHESLLGFFKGMSFPIASIAVVNSVLFGVYSNTLLVLTATSHQERRAQPPSYMHIFLAGCTGGFLQAYCLA

SEQ ID NO: 62869 - protein, 235 aa, Homo sapiens
MEEIKPASASCVSKEKPSKVSDLISRFEGGSSLSNYSDLKKESAVNLNAPRTPGRHGLTTTPQQKLLSQHLPQRQGNDTDKTQGAQTCVANGVMAAQNQMECEEEKAATLSSDTSIQASEPLLDTHIVNGERDETATAPASPTTDSCDGNASDSSYRTPGIGPVLPLEERGAETETKVQERENGESPLELEQLDQHHEMKETNEQKLHKIANELLLTERAYVNRLDLLDQKIEWR

SEQ ID NO: 62870 - protein, 366 aa, Homo sapiens
MPYWRNWNAPPFRTVMNIPTQLLFPWISIPERRLTLMRLRRSFLFRITQVPCREAQEPKESPPPSKTSAAAQLDELMAHLTEMQAKVAVRADAGKKHLPDKQDHKASLDSMLGGLEQELQDLGIATVPKGHCASCQKPIAGKVIHALGQSWHPEHFVCTHCKEEIGSSPFFERSGLAYCPNDYHQLFSPRCAYCAAPILDKVLTAMNQTWHPEHFFCSHCGEVFGAEGFHEKDKKPYCRKDFLAMFSPKCGGCNRPVLENYLSAMDTVWHPECFVCGDCFTSFSTGSFFELDGRPFCELHYHHRRGTLCHGCGQPITGRCISAMGYKFHPEHFVCAFCLTQLSKGIFREQNDKTYCQPCFNKLFPL

SEQ ID NO: 62871 - protein, 199 aa, Homo sapiens
MSLLNPVLLPPKVKAYLSQGERFIKWDDETTVASPVILRVDPKGYYLYWTYQSKEMEFLDITSIRDTRFGKFAKMPKSQKLRDVFNMDFPDNSFLLKTLTVVSGPDMVDLTFHNFVSYKENVGKAWAEDVLALVKHPLTANASRSTFLDKILVKLKMQLNSEGKIPVKNFFQMFPADRKRVEAALSACHLPKGKPGGAR

SEQ ID NO: 62872 - protein, 454 aa, Homo sapiens
MAQQANVGELLAMLDSPMLGVRDDVTAVFKENLNSDRGPMLVNTLVDYYLETSSQPALHILTTLQEPHDKHLLDRINEYVGKAATRLSILSLLGHVIRLQPSWKHKLSQAPLLPSLLKCLKMDTDVVVLTTGVLVLITMLPMIPQSGKQHLLDFFDIFGRLSSWCLKKPGHVAEVYLVHLHASVYALFHRLYGMYPCNFVSFLRSHYSMKENLETFEEVVKPMMEHVRIHPELVTGSKDHELDPRRWKRLETHDVVIECAKISLDPTEASYEDGYSVSHQISARFPHRSADVTTSPYADTQNSYGCATSTPYSTSRLMLLNMPGQLPQTLSSPSTRLITEPPQATLWSPSMVCGMTTPPTSPGNVPPDLSHPYSKVFGTTAGGKGTPLGTPATSPPPAPLCHSDDYVHISLPQATVTPPRKVRSSSSAIPLPRHSDSLASLTLRSLIMPDRILT

SEQ ID NO: 62873 - protein, 98 aa, Homo sapiens
MIGPEKGVVHLATAAVLNAVWDLWAKQEGKPVWKLLVDMDPRMLVSCIDFRYITDVLTEEDALEILQKGQIGKKEREKQMLAQGYPAYTTSCAWLGYS

SEQ ID NO: 62874 - protein, 103 aa, Homo sapiens
MLKNDCFQEFFQLNYLQHLSLSRCYDIIPETLLELGEIPTLKTLQVFGIVPDGTLQLLKEALPHLQINCSHFTTIARPTIGNKKNQEIWGIKCRLTLQKPSCL

SEQ ID NO: 62875 - protein, 726 aa, Homo sapiens
MASWGGEKRGGAEGSPKPAVYATRKTPSVGSQGDQWYLGYPGDQWSSGFPYSWWKNSVGSESKHGEGALDQPQHDVRLEDLGELHRAARSGDVPGVEHILAPGDTGVDKRDRKKSIQQLVPEYKEKQTPESLPQNNNPDWHPTNLTLSDETCQRSKNLKVDDKCPSVSPSMPENQSATKELGQMNLTEREKMDTGVVLLSGNDTLHDLCQSQLPENKESKEAEQDSELTSEEEQERLKGCENKQPQKTSQEPEMAKDCDREDIPIYPVLPHVQKSEEMWIEQGKLEWKNQLKLVINELKQRFGEIYEKYKIPACPEEEPLLDNSTRGTDVKDIPFNLTNNIPGCEEEDASEISVSVVFETFPEQKEPSLKNIIHPYYHPYSGSQEHVCQSSSKFHLHENKLDCDNDNKPGIGHIFSTDKNFHNDASTKKARNPEVVMVEMKEDQEFDLQMTKNMNQNSDSGSTNNYKSLKPKLENLSSLPPDSDRTSEVYLHEELQQDMQKFKNEVNTLEEEFLALKKEDVQLHKDVEEEMEKHRSNSTELSGTLTDGTTVGNDDDGLNQQIPRKENGEHDRPADKTSNEKNEVKNQIYPEADFADSMEPSEIASEDCELSHSVYENFMLLIEQLRMEYKDSASLPRIQDTFCLCEHLLKLKNNHCDQLTVKLKQMENMVSVLQNELSETKKTKLQLELQKIEWEKELYDLRFLIGIRKKRISFMKIACCRKKLPC

SEQ ID NO: 62876 - protein, 113 aa, Homo sapiens
MLHALLRSRMIQGRILLLTICAAGIGGTFQFGYNLSIINAPTLHIQEFTNETWQARTGEPLPDHLVLLMWSLIVSLYPLGGLFGALLAGPLAITLGSLSFCVFHFPQGRSPSW

SEQ ID NO: 62877 - protein, 179 aa, Homo sapiens
MTEDSQRNFRSVYYEKVGFRGVEEKKSLEILLKDDRLDTEKLCTFSQRFPLPSMYRALVWKVLLGILPPHHESHAKVMMYRKEQYLDVLHALKVVRFVSDATPQAEVYLRMYQLESGKLPRSPSFPLEPDDEVFLAIAKAMEEMVEDSVDCYWITRRFVNQLNTKYRDSLPQLEGINVG

SEQ ID NO: 62878 - protein, 979 aa, Homo sapiens
MWRLRRAAVACEVCQSLVKHSSGIKGSLPLQKLHLVSRSIYHSHHPTLKLQRPQLRTSFQQFSSLTNLPLRKLKFSPIKYGYQPRRNFWPARLATRLLKLRYLILGSAVGGGYTAKKTFDQWKDMIPDLSEYKWIVPDIVWEIDEYIDFGHKLVSEVIGASDLLLLLGSPEETAFRATDRGSESDKHFRKGLLGELILLQQQIQEHEEEARRAAGQYSTSYAQQKRKVSDKEKIDQLQEELLHTQLKYQRILERLEKENKELRKLVLQKDDKGIHHRKLKKSLIDMYSEVLDVLSDYDASYNTQDHLPRVVVVGDQSAGKTSVLEMIAQARIFPRGSGEMMTRSPVKVTLSEGPHHVALFKDSSREFDLTKEEDLAALRHEIELRMRKNVKEGCTVSPETISLNVKGPGLQRMVLVDLPGVINTVTSGMAPDTKETIFSISKAYMQNPNAIILCIQDGSVDAERSIVTDLVSQMDPHGRRTIFVLTKVDLAEKNVASPSRIQQIIEGKLFPMKALGYFAVVTGKGNSSESIEAIREYEEEFFQNSKLLKTSMLKAHQVTTRNLSLAVSDCFWKMVRESVEQQADSFKATRFNLETEWKNNYPRLRELDRNELFEKAKNEILDEVISLSQVTPKHWEEILQQSLWERVSTHVIENIYLPAAQTMNSGTFNTTVDIKLKQWTDKQLPNKAVEVAWETLQEEFSRFMTEPKGKEHDDIFDKLKEAVKEESIKRHKWNDFAEDSLRVIQHNALEDRSISDKQQWDAAIYFMEEALQARLKDTENAIENMVGPDWKKRWLYWKNRTQEQCVHNETKNELEKMLKCNEEHPAYLASDEITTVRKNLESRGVEVDPSLIKDTWHQVYRRHFLKTALNHCNLCRRGFYYYQRHFVDSELECNDVVLFWRIQRMLAITANTLRQQLTNTEVRRLEKNVKEVLEDFAEDGEKKIKLLTGKRVQLAEDLKKVREIQEKLDAFIEALHQEK

SEQ ID NO: 62879 - protein, 75 aa, Homo sapiens
MPGRSCVALVLLAAAVSCAVAQHAPPVSELEPRRREGRAGAGADGGAVDRGLQKINLSSFRTNVQRCSSMVHHKS

SEQ ID NO: 62880 - protein, 215 aa, Homo sapiens
MEPNDSTSTAVEEPDSLEVLVKTLDSQTRTFIVGAQMNVKEFKEHIAASVSIPSEKQRLIYQGRVLQDDKKLQEYNVGGKVIHLVERAPPQTHLPSGASSGTGSASATHGGGSPPGTRGPGASVHDRNANSYVMVGTFNLPSEPRVRLVMAQHMIRDIQTLLSRMECRGGPQPQHSQPPPQPPAVTPEPVALSSQTSEPVESEAPPREPMEAEEV

SEQ ID NO: 62881 - protein, 136 aa, Homo sapiens
MASGNARIGKPAPDFKATAVVDGAFKEVKLSDYKGKYVVLFFYPLDFTFVCPTEIIAFSNRAEDFRKLGCEVLGVSVDSQFTHLAWINTPRKEGGLGPLNIPLLADVTRRLSEDYGVLKTDEGIAYSLSRWLEAWQ

SEQ ID NO: 62882 - protein, 1268 aa, Homo sapiens
MSSVAVLTQESFAEHRSGLVPQQIKVATLNSEEESDPPTYKDAFPPLPEKAACLESAQEPAGAWGNKIRPIKASVITQVFHVPLEERKYKDMNQFGEGEQAKICLEIMQRTGAHLELSLAKDQGLSIMVSGKLDAVMKARKDIVARLQTQASATVAIPKEHHRFVIGKNGEKLQDLELKTATKIQIPRPDDPSNQIKITGTKEGIEKARHEVLLISAEQDKRAVERLEVEKAFHPFIAGPYNRLVGEIMQETGTRINIPPPSVNRTEIVFTGEKEQLAQAVARIKKIYEEKKKKTTTIAVEVKKSQHKYVIGPKGNSLQEILERTGVSVEIPPSDSISETVILRGEPEKLGQALTEVYAKANSFTVSSVAAPSWLHRFIIGKKGQNLAKITQQMPKVHIEFTEGEDKITLEGPTEDVNVAQEQIEGMVKDLINRMDYVEINIDHKFHRHLIGKSGANINRIKDQYKVSVRIPPDSEKSNLIRIEGDPQGVQQAKRELLELASRMENERTKDLIIEQRFHRTIIGQKGERIREIRDKFPEVIINFPDPAQKSDIVQLRGPKNEVEKCTKYMQKMVADLVENSYSISVPIFKQFHKNIIGKGGANIKKIREESNTKIDLPAENSNSETIIITGKRANCEAARSRILSIQKDLANIAEVEVSIPAKLHNSLIGTKGRLIRSIMEECGGVHIHFPVEGSGSDTVVIRGPSSDVEKAKKQLLHLAEEKQTKSFTVDIRAKPEYHKFLIGKGGGKIRKVRDSTGARVIFPAAEDKDQDLITIIGKEDAVREAQKELEALIQNLDNVVEDSMLVDPKHHRHFVIRRGQVLREIAEEYGGVMVSFPRSGTQSDKVTLKGAKDCVEAAKKRIQEIIEDLEAQVTLECAIPQKFHRSVMGPKGSRIQQITRDFSVQIKFPDREENAVHSTEPVVQENGDEAGEGREAKDCDPGSPRRCDIIIISGRKEKCEAAKEALEALVPVTIEVEVPFDLHRYVIGQKGSGIRKMMDEFEVNIHVPAPELQSDIIAITGLAANLDRAKAGLLERVKELQAEQEDRALRSFKLSVTVDPKYHPKIIGRKGAVITQIRLEHDVNIQFPDKDDGNQPQDQITITGYEKNTEAARDAILRIVGELEQMVSEDVPLDHRVHARIIGARGKAIRKIMDEFKVDIRFPQSGAPDPNCVTVTGLPENVEEAIDHILNLEEEYLADVVDSEALQVYMKPPAHEEAKAPSRGFVVRDAPWTASSSEKAPDMSSSEEFPSFGAQVAPKTLPWGPKR

SEQ ID NO: 62883 - protein, 91 aa, Homo sapiens
MSYMLPHLHNGWQVDQAILSEEDRVVVIRFGHDWDPTCMKMDEVLYSIAEKVKNFAVIYLVDITEVPDFNKMYELYDPCTVMFFFSYHRGW

SEQ ID NO: 62884 - protein, 141 aa, Homo sapiens
  MOD_RES (1)..(1): Any amino acid
XIQNPDPAVYQLRDSKSSDKSVCLFTDFDSQTNVSQSKDSDVYITDKTVLDMRSMDFKSNSAVAWSNKSDFACANAFNNSIIPEDTFFPSPESSCDVKLVEKSFETDTNLNFQNLSVIGFRILLLKVAGFNLLMTLRLWSS

SEQ ID NO: 62885 - protein, 270 aa, Homo sapiens
MDAALLLNVEGVKKTILHGGTGELPNFITGSRVIFHFRTMKCDEERTVIDDSRQVGQPMHIIIGNMFKLEVWEILLTSMRVHEVAEFWCDTIHTGVYPILSRSLRQMAQGKDPTEWHVHTCGLANMFAYHTLGYEDLDELQKEPQPLVFVIELLQVDAPSDYQRETWNLSNHEKMKAVPVLHGEGNRLFKLGRYEEASSKYQEAIICLRNLQTKEKPWEVQWLKLEKMINTLILNYCQCLLKKEEYYEVLEHTSDILRHHPGARGCRGGQ

SEQ ID NO: 62886 - protein, 139 aa, Homo sapiens
MAGKKVLIVYAHQEPKSFNGSLKNVAVDELSRQGCTVTVSDLYAMNLEPRATDKDITGTLSNPEVFNYGVETHEAYKQRSLASDITDEQKKVREADLVIFQFPLYWFSVPAILKGWMDRVLCQGFAFDIPGFYDSGLLQ

SEQ ID NO: 62887 - protein, 154 aa, Homo sapiens
MFLRQELPVRLANIMKEISLLPDNLLRTPSVQLVQSWYIQSLQELLDFKDKSAEDAKAIYDFTDTVIRIRNRHNDVIPTMAQGVIEYKESFGVDPVTSQNVQYFLDRFYMSRISIRMLLNQHSLLFGGKGKGSPSHRKHIGSINPNCNVLEVIK

SEQ ID NO: 62888 - protein, 112 aa, Homo sapiens
MATKTELSPTARESKNAQDMQVDETLIPRKVPSLCSARYGIALVLHFCNFTTIAQNVIMNITMVAMVNSTSPQSQLNDSSEVLPVDSFGGLSKAPKSLPAKECYWDALLPSS

SEQ ID NO: 62889 - protein, 241 aa, Homo sapiens
MSLYCGIACRRKFFWCYRLLSTYVTKTRYLFELKEDDDACKKAQQTGAFYLFHSLAPLLQTSAHQYLAPRHSLLELERLLGKFGQDAQRIEDSVLIGCSEQQEAWFALDLGLDSSFSISASLHKPEMETELKGSFIELRKALFQLNARDASLLSTAQALLRWHDAHQFCSRSGQPTKKNVAGSKRVCPSNNIIYYPQMAPVAITLVSDGTRCLLARQSSFPKGMYSALAGFCDIAYRAVLN

SEQ ID NO: 62890 - protein, 224 aa, Homo sapiens
MSWKKALRIPGGLRVATVTLMLAMLSTPVAEGRDSPEDFVYQFKGMCYFTNGTERVRLVTRYIYNREEYARFDSDVGVYRAVTPLGPPDAEYWNSQKEVLERTRAELDTVCRHNYQLELRTTLQRRVEPTVTISPSRTEALNHHNLLVCSVTDFYPAQIKVRWFRNDQEETTGVVSTPLIRNGDWTFQILVMLEMTPQRGDVYTCHVEHPSLQNPIIVEWRLLH

SEQ ID NO: 62891 - protein, 107 aa, Homo sapiens
RSQGAEGALTGKQPDGSAEKAVLEQFGFPLTGTEVMQTESIVNLSLIPISLQPSVPSMKIMLEVGGHEDTWLQQEITNFQVKPWLKPFTFLTLCLRILIIILDIGTE

SEQ ID NO: 62892 - protein, 106 aa, Homo sapiens
  MOD_RES (1)..(1): Any amino acid
XMTDLLNAEDIKKAVGAFSATDSFDHKKFFQMVGLKKKSADDVKKVFHMLDKDKSGFIEEDELGFILKGFSPDARDLSAKETKMLMAAGDKDGDGKIGVDDPADVD

SEQ ID NO: 62893 - protein, 130 aa, Homo sapiens
MSSRPLESPPPYRPDEFKPNHYAPSNDIYGGEMHVRPMLSQPAYSFYPEDEILHFYKWTSPPGVIRILSMLIIVMCIAIFACVASTLAWDRGYGTSLLGGHCHCTGVHDYCGFCFNNFLCCENSKKDGQV

SEQ ID NO: 62894 - protein, 7 aa, Homo sapiens
MAAHRKH

SEQ ID NO: 62895 - protein, 85 aa, Homo sapiens
MSPDLFFRIFTPVVFFTTAFDMDTYMLQKLFWQILLISIPGFLVNYILVLWHLASVNQLLLKPTQWLLFSAILVSSDPMLTAAAI

SEQ ID NO: 62896 - protein, 131 aa, Homo sapiens
METSSRELQAAEYLEKHQIKEVVSYLTSALLFFRPEKPKEYLISLLERLRIAKVTGVAFPFFMDNSNIVAMFEMMDSSGRGTISFVQYKEALKTLGLCTEDEDLQDDGHKITLDKFKEEVNKRMKEIWSAF

SEQ ID NO: 62897 - protein, 212 aa, Homo sapiens
MAETSALPTGFGELEVLAVGMVLLVEALSGLSLNTLTIFSFCKTPELRTPCHLLVLSLALADSGISLNALVAATSSLLRRWPYGSDGCQAHGFQGFVTALASICSSAAIAWGRYHHYCTRSQLAWNSAVSLVLFVWLSSAFWAALPLLGWGHYDYEPLGTCCTLDYSKGDRNFTSFLFTMSFFNFAMPLFITITSYSLMEQKLGKSGHLQAA

SEQ ID NO: 62898 - protein, 1347 aa, Homo sapiens
MATQQKASDERISQFDHNLLPELSALLGLDAVQLAKELEEEEQKERAKMQKGYNSQMRSEAKRLKTFVTYEPYSSWIPQEMAAAGFYFTGVKSGIQCFCCSLILFGAGLTRLPIEDHKRFHPDCGFLLNKDVGNIAKYDIRVKNLKSRLRGGKMRYQEEEARLASFRNWPFYVQGISPCVLSEAGFVFTGKQDTVQCFSCGGCLGNWEEGDDPWKEHAKWFPKCEFLRSKKSSEEITQYIQSYKGFVDITGEHFVNSWVQRELPMASAYCNDSIFAYEELRLDSFKDWPRESAVGVAALAKAGLFYTGIKDIVQCFSCGGCLEKWQEGDDPLDDHTRCFPNCPFLQNMKSSAEVTPDLQSRGELCELLETTSESNLEDSIAVGPIVPEMAQGEAQWFQEAKNLNEQLRAAYTSASFRHMSLLDISSDLATDHLLGCDLSIASKHISKPVQEPLVLPEVFGNLNSVMCVEGEAGSGKTVLLKKIAFLWASGCCPLLNRFQLVFYLSLSSTRPDEGLASIICDQLLEKEGSVTEMCMRNIIQQLKNQVLFLLDDYKEICSIPQVIGKLIQKNHLSRTCLLIAVRTNRARDIRRYLETILEIKAFPFYNTVCILRKLFSHNMTRLRKFMVYFGKNQSLQKIQKTPLFVAAICAHWFQYPFDPSFDDVAVFKSYMERLSLRNKATAEILKATVSSCGELALKGFFSCCFEFNDDDLAEAGVDEDEDLTMCLMSKFTAQRLRPFYRFLSPAFQEFLAGMRLIELLDSDRQEHQDLGLYHLKQINSPMMTVSAYNNFLNYVSSLPSTKAGPKIVSHLLHLVDNKESLENISENDDYLKHQPEISLQMQLLRGLWQICPQAYFSMVSEHLLVLALKTAYQSNTVAACSPFVLQFLQGRTLTLGALNLQYFFDHPESLSLLRSIHFPIRGNKTSPRAHFSVLETCFDKSQVPTIDQDYASAFEPMNEWERNLAEKEDNVKSYMDMQRRASPDLSTGYWKLSPKQYKIPCLEVDVNDIDVVGQDMLEILMTVFSASQRIELHLNHSRGFIESIRPALELSKASVTKCSISKLELSAAEQELLLTLPSLESLEVSGTIQSQVKLIQNSPNLHVFHLKCNFFSDFGSLMTMLVSCKKLTEIKFSDSFFQAVPFVASLPNFISLKILNLEGQQFPDEETSEKFAYILGSLSNLEELILPTGDGIYRVAKLIIQQCQQLHCLRVLSFFKTLNDDSVVEIAKVAISGGFQKLENLKLSINHKITEEGYRNFFQALDNMPNLQELDISRHFTECIKAQATTVKSLSQCVLRLPRLIRLNMLSWLLDADDIALLNVMKERHPQSKYLTILQKWILPFSPIIQK

SEQ ID NO: 62899 - protein, 55 aa, Homo sapiens
MKAHPKEMVPLMGKRVAAPSGNPAILPEKRPAEITPTKKSRHRVLPHWPQTPDLN

SEQ ID NO: 62900 - protein, 62 aa, Homo sapiens
MLKEEHEVAVLGAPHNPAPPTSTVIHIRSETSVPDHVVWSLFNTLFMNPCCLGFIAFAYSVK

SEQ ID NO: 62901 - protein, 85 aa, Homo sapiens
MKLKELERPAVQAWSPASQYPLYLATGTSAQQLDSSFSTNGTLEIFEVDFRDPSLDLKHRGVLSALSRATSWLQGPAILKSSFGI

SEQ ID NO: 62902 - protein, 186 aa, Homo sapiens
MKRRQKRKHLENEESQETAEKGGGMSKSQEDALQPGSTRVAKGWSQGVGEVTSTSEYCSCVSSSRKLIHSGIQRIHRDSPQPQSPLAQVQERGETPPRSQHVSLSSYSSYKTCVSSLCVNKEERGMKIYYMQVQMNKGVAVSWETEETLESLEKQPRMEEVTLSEVVRQLRLMGQKILEDGVAFSC

SEQ ID NO: 62903 - protein, 68 aa, Homo sapiens
MARLVAVCRDGEEEFPFERRQIPLYIDDTLTVSGPGRAGPAAPLAAVSPPPPPPGRALRTGERVCCNS

SEQ ID NO: 62904 - protein, 366 aa, Homo sapiens
MRVMAPRTLILLLSGALALTETWACSHSMRYFYTAVSRPGRGEPRFIAVGYVDDTQFVRFDSDAASPRGEPRAPWVEQEGPEYWDRETQKYKRQAQTDRVSLRNLRGYYNQSEAGSHTLQWMYGCDLGPDGRLLRGYDQSAYDGKDYIALNEDLRSWTAADTAAQITQRKWEAARAAEQQRAYLEGTCVEWLRRYLENGKETLQRAEHPKTHVTHHLVSDHEATLRCWALGFYPAEITLTWQRDGEDQTQDTELVETRPAGDGTFQKWAAVVVPSGEEQRYTCHVQHEGLPEPLTLRWEPSSQPTIPIVGIVAGLAVLAVLAVLGAVVAVVMCRRKSSGGKGGSCSQAASSNSAQGSDESLIACKA

SEQ ID NO: 62905 - protein, 253 aa, Homo sapiens
MMNSDQKAVKFLANFYINGGKHWTHGHLRQTQPEPTQPKASVLLLGPEPGMAWDETQPPKMKEIPVGLRLQTGTPQESLPTYTQTLRELLLEQRPLITADLEVPSPTRYQVPSPSVRESSPHPHYSIGCKHQGREGGGRRAWQTLWFQSESPFTQKADFDQEQKASLQAPGKRCPGPNTYNILPGSRLQSPRSPAFSMSRSPAFTSWLSTSRTPGPAAYHVEDCNSRFPSAPGVVIQGVRRPKRHDTGPFCTL

SEQ ID NO: 62906 - protein, 437 aa, Homo sapiens
MASDSMSSKQARNHITKGKRQQQHQQIKNRSSISDGDGEDSFIFEANEAWKDFHGSLLRFYENGELCDVTLKVRLPLLPVDFLMGVVAKEQIVKQNLKCRDLLDEARNYHLHLSSRAVPDFEYSIRTTPRKHTAGVLFCVGGRGGSGDPFRSIECYSINKNSWFFGPEMNSRRRHVGVISVEGKVYAVGGHDGNEHLGSMEMFDPLTNKWMMKASMNTKRRGIALASLGGPIYAIGGLDDNTCFNDVERYDIESDQWSTVAPMNTPRGGVGSVALVNHVYAVGGNDGMASLSSVERYDPHLDKWIEVKEMGQRRAGNGVSKLHGCLYVVGGFDDNSPLSSVERYDPRSNKWDYVAALTTPRGGVGIATVMGKIFAVGGHNGNAYLNTVEAFDPVLNRWELVGSVSHCRAGAGVAVCSCLTSQIRDVGHGSNNVVDCM

SEQ ID NO: 62907 - protein, 52 aa, Homo sapiens
NYVWLRLLERALPGRAPHALLAKLLCDQVVGAPIAVSAFYVGSHSIPQAEVQ

SEQ ID NO: 62908 - protein, 88 aa, Homo sapiens
MGGAEWESEQTGVKTFGPFGSGSQDNLTMYMDLVDGIFLNQIMLQIDPRPTNQRINKHVNNDVNLRIQNLTILVRNIKTYYQDRPFFR

SEQ ID NO: 62909 - protein, 31 aa, Homo sapiens
MELLHPLGRDSPIAGFLQKNKAGGMHHICIE

SEQ ID NO: 62910 - protein, 52 aa, Homo sapiens
MNSGHSFSQTPSASFHGAGGGWGRPRSFPRAPTVHGGAGGARISLSFTTRSC

SEQ ID NO: 62911 - protein, 73 aa, Homo sapiens
MASLTVKAYLLGKEDAAREIRRFSFCCSPEPEAEAEAAAGPGPCERLLSRVAALFPALRPGGFQAHYRGGGFR

SEQ ID NO: 62912 - protein, 411 aa, Homo sapiens
MGITCPIVPGIFPIQGYHSLRQLVKLSKLEVPQEIKDVIEPIKDNDAAIRNYGIELAVSLCQELLASGLVPGLHFYTLNREMATTEVLKRLGMWTEDPRRPLPWALSAHPKRREEDVRPIFWASRPKSYIYRTQEWDEFPNGRWGNSSSPAFGELKDYYLFYLKSKSPKEELLKMWGEELTSEESVFEVFVLYLSGEPNRNGHKVTCLPWNDEPLAAETSLLKEELLRVNRQGILTINSQPNINGKPSSDPIVGWGPSGGYVFQKAYLEFFTSRETAEALLQVLKKYELRVNYHLVNVKGENITNAPELQPNAVTWGIFPGREIIQPTVVDPVSFMFWKDEAFALWIERWGKLYEEESPSRTIIQYIHDNYFLVNLVDNDFPLDNCLWQVVEDTLELLNRPTQNARETEAP

SEQ ID NO: 62913 - protein, 95 aa, Homo sapiens
MRLFVSDGVPGCLPVLAAAGRARGRAEVLISTVGPEDCVVPFLTRPKVPVLQLDSGNYLFSTSAICRYFFLLSGWEQDDLTNQWLEWEATELQRS

SEQ ID NO: 62914 - protein, 200 aa, Homo sapiens
MDSYLLMWGLLTFIMVPGCQAELCDDDPPEIPHATFKAMAYKEGTMLNCECKRGFRRIKSGSLYMLCTGNSSHSSWDNQCQCTSSATRNTTKQVTPQPEEQKERKTTEMQSPMQPVDQASLPGEEKPQASPEGRPESETSCLVTTTDFQIQTEMAATMETSIFTTEYQVAVAGCVFLLISVLLLSGLTWQRRQRKSRRTI

SEQ ID NO: 62915 - protein, 147 aa, Homo sapiens
MASNVTNKTDPRSMNSRVFIGNLNTLVVKKSDVEAIFSKYGKIVGCSVHKGFAFVQYVNERNARAAVAGEDGRMIAGQVLDINLAAEPKVNRGKAGVKRSAAEMYGSVTEHPSPSPLLSVYQETLHEGAKVASILRVDSGDLPSLES

SEQ ID NO: 62916 - protein, 131 aa, Homo sapiens
MLTLKEYWQKNRPRVPAGVNRNRKTNGSIPETATSGGCQPPGDSATGFHREGPTSSATLKDLESPCQERAVVLDSTSVKISRLKNTIKSLKQQKKQVEHQLEEEKKANNERQKAERELEVQIQTLIIQKEE

SEQ ID NO: 62917 - protein, 406 aa, Homo sapiens
MAAVGAGGSTAAPGPGAVSAGALEPGTASAGETVCPSSRMGGGAHRRLKYISLAVLVVQNASLILSIRYARTLPGDRFFATTAVVMAEVLKGLTCLLLLFAQKRGNVKHLVLFLHEAVLVQYVDTLKLAVPSLIYTLQNNLQYVAISNLPAATFQVTYQLKILTTALFSVLMLNRSLSRLQWASLLLLFTGVAIVQAQQAGGGGPRPLDQNPGAGLAAVVASCLSSGFAGVYFEKILKGSSGSVWLRNLQLGLFGTALGLVGLWWAEGTAVATRGFFFGYTPAVWGVVLNQAFGGLLVAVVVKYADNILKGFATSLSIVLSTVASIRLFGFHVDPLFALGAGLVIGAVYLYSLPRGAAKAIASASASASGPCVHQQPPGQPPPPQLSSHRGDLITEPFLPKSVLVK

SEQ ID NO: 62918 - protein, 333 aa, Homo sapiens
  MOD_RES (1)..(1): Any amino acid
XNQSPQAHRSTVPHTAGLGQLCLLGFGMDWRASEAWMVPRAPKGAWDPRESQDLLDNRAPLGPRVFPGPRVPSALMERRVLKGSQGSPACLGPPGEVIQPLPIQMPKKTRRSVDGSRLMQEDEAIPTGGAPGSPGGLEEIFGSLDSLREEIEQMRRPTGTQDSPARTCQDLKLCHPELPDGEYWVDPNQGCARDAFRVFCNFTAGGETCVTPRDDVTQFSYVDSEGSPVGVVQLTFLRLLSVSAHQDVSYPCSGAARDGPLRLRGANEDELSPETSPYVKEFRDGCQTQQGRTVLEVRTPVLEQLPVLDASFSDLGAPPRRGGVLLGPVCFMG

SEQ ID NO: 62919 - protein, 170 aa, Homo sapiens
MKGLFQNPAVQFHSKELYVAADEASIAPILAEAQAHFGRRLGLGSYPDWGSNYYQVKLTLDSEEEGPLEECLAYLTARLPQGSLVPYMPNAVEQASEAVYKLAESGNYLMFQTPSRSCISAASPLSLSWNSFYRTLSREQAIPENQIASPPSEAKGAEEPWMGPFPGQQG

SEQ ID NO: 62920 - protein, 916 aa, Homo sapiens
MKSSLLLRGVHFCFHLPGTAKIETAVTSTPSASGQFSKPFSFSPSGTGFNFGIITPTPSSNFTAAQGATPSTKESSQPDAFSSGGGSKPSYEAIPESSPPSGITSASNTTPGEPAASSSRPVAPSGTALSTTSSKLETPPSKLGELLFPSSLAGETLGSFSGLRVGQADDSTKPTNKASSTSLTSTQPTKTSGVPSGFNFTAPPVLGKHTEPPVTSSATTTSVAPPAATSTSSTAVFGSLPVTSAGSSGVISFGGTSLSAGKTSFSFGSQQTNSTVPPSAPPPTTAATPLPTSFPTLSFGSLLSSATTPSLPMSAGRSTEEATSSALPEKPGDSEVSASAASLLEEQQSAQLPQAPPQTSDSVKKEPVLAQPAVSNSGTAASSTSLVALSAEATPATTGVPDARTEAVPPASSFSVPGQTAVTAAAISSAGPVAVETSSTPIASSTTSIVAPGPSAEAAAFGTVTSGSSVFAQPPAASSSSAFNQLTNNTATAPSATPVFGQVAASTAPSLFGQQTGSTASTAAATPQVSSSGFSSPAFGTTAPGVFGQTTFGQASVFGQSASSAASVFSFSQPGFSSVPAFGQPASSTPTSTSGSVFGAASSTSSSSSFSFGQSSPNTGGGLFGQSNAPAFGQSPGFGQGGSVFGGTSAATTTAATSGFSFCQASGFGSSNTGSVFGQAASTGGIVFGQQSSSSSGSVFGSGNTGRGGGFFSGLGGKPSQDAANKNPFSSASGGFGSTATSNTSNLFGNSGAKTFGGFASSSFGEQKPTGTFSSGGGSVASQGFGFSSPNKTGGFGAAPVFGSPPTFGGSPGFGGVPAFGSAPAFTSPLGSTGGKVFGEGTAAASAGGFGFGSSSNTTSFGTLASQNAPTFGSLSQQTSGFGTQSSGFSGFGSGTGGFSFGSNNSSVQGFGGWRS

SEQ ID NO: 62921 - protein, 213 aa, Homo sapiens
MASFPPRVNEKEIDGSYFAWSQGHRTVKLVPWSQCLQNFLLHGTKNVTNSSSLRLPRQNSDGGQKNKPREHIIDCGDIVWSLAFGSSVPEKQSRCVNIEWHRFRFGQDQLLLATGLNNGRIKIWDVYTGKLLLNLVDHTEVVRDLTFAPDGSLILVSASRDKTLRVWDLKDDGNMMKVLRGHQNWVYSCAFSPDSSMLCSVGASKAVVAAILV

SEQ ID NO: 62922 - protein, 189 aa, Homo sapiens
MLLRAAWRRAAVAVTAAPGPKPAAPTRGLRLRVGDRAPQSAVPADTAAAPEVGPVLRPLYMDVQATTPLDPRVLDAMLPYLINYYGNPHSRTHAYGWESEAAMERARQQVASLIGADPREIIFTSGATESNNIAIKTESHSVIQAGVQWHDLDSLQAPPPGFTPFSCLSLLSSWDYRRPPPHPANFLYF

SEQ ID NO: 62923 - protein, 248 aa, Homo sapiens
MVDTEMPFWPTNFGISSVDLSVMEDHSHSFDIKPFTTVDFSSISTPHYEDIPFTRTDPVVADYKYDLKLQEYQSAIKVEPASPPYYSEKTQLYNKPHEEPSNSLMAIECRVCGDKASGFHYGVHACEGCKGFFRRTIRLKLIYDRCDLNCRIHKKSRNKCQYCRFQKCLAVGMSHNAIRFGRMPQAEKEKLLAEISSDIDQLNPESADLRALAKHLYDSYIKSFPLTKAKARAILTGKTTDKSTAQVC

SEQ ID NO: 62924 - protein, 115 aa, Homo sapiens
MGSRWSSEEERQPLLGPGLGPGLGASWRSREAAAAALPAAVPGPGRVYGRRWLVLLLFSLLAFVQGLVWNTWGPIQNSARQAYGFSSWDIALLVLWGPIGFLPCFAFMWLLDKRD

SEQ ID NO: 62925 - protein, 218 aa, Homo sapiens
MRLLPRLLLLLLLVFPATVLFRGGPRGLLAVAQDLTEDEETVEDSIIEDEDDEAEVEEDEPTDLVEDKEEEDVSGEPEASPSADTTILFVKGEEPMGGRPFGLVINLNYKDLNGNVFQDAVFNQTVTVIEREDGLDGETIFMYMFLAGLGLLVIVGLHQLLESRKRKRPIQKVEMGTSSQNDVDMSWIPQETLNQINKASPRRLPRKRAQKRSVGSDE

SEQ ID NO: 62926 - protein, 276 aa, Homo sapiens
MKKTPVFLESLVTNMLRLRAICPFSWRVFQFRPISCEPLIIQMNKCTDEEQMFGFIERNKAILSEKQVGCAFDMLWKLQKQKTSLLKNAEYVRDHPQFLTLHNLATNKFKLMNDDTLVNVLYVTQQFAGEAHDPLVEALVTEAWRRLERFDIKLLSEFSSCLADQHLYFSPLMGKIADIVHRNLETTQDLSSLSVLMVNISSLISRHFQQQLVNKTELLFDTIDSSEVNVAKSIAKFLRNVRYRYQPLLERCNNVFLSNVDHLDLDSISKILSVYK

SEQ ID NO: 62927 - protein, 57 aa, Homo sapiens
MVWKVAVFLSVALGIGAVPIDDPEDGGKHWVVIVAGSNGWYNYRHQADACHAYQIIH

SEQ ID NO: 62928 - protein, 110 aa, Homo sapiens
MDLTKGCVTFEDIAIYFSQDEWGLLDEAQRLLYLEVMLENFALVASLGCGHGTEDEETPSDQNVSVGVSQSKAGSSTQKTQSCEMCVPVLKDILHLADLPGQKPYLVGEC

SEQ ID NO: 62929 - protein, 167 aa, Homo sapiens
MSKPEDLKVVKNCANTTRSFCDLTDEWRSTHEAYVTVLEGFSGNTTLFSCSHNFWLAIDMSFEPPEFEIVGFTNHINVMVKFPSIVEEELQFDLSLVIEEQSEGIVKKHKPEIKGNMSGNFTYIIDKLIPNTNYCVSVYLEHSDEQAVIKSPLKCTLLPPGQESEFS

SEQ ID NO: 62930 - protein, 54 aa, Homo sapiens
  MOD_RES (1)..(1): Any amino acid
XALGAPFLLEDPANQFLRLKRHVNLQDYWDPDHSSDVWVNTLAKQEYLYDNQNN

SEQ ID NO: 62931 - protein, 986 aa, Homo sapiens
MPRATWANSKERSWAESERGPRDTGNGGSKAERHIQEIETGRGGDRAKAHRRQRMRLRGTERASLGPGRRLGDSRGTDMPGARAQGLAAAMTEESEETVLYIEHRYVCSECNQLYGSLEEVLMHQNSHVPQQHFELVGVADPGVTVATDTASGTGLYQTLVQESQYQCLECGQLLMSPSQLLEHQELHLKMMAPQEAVPAEPSPKAPPLSSSTIHYECVDCKALFASQELWLNHRQTHLRATPTKAPAPVVLGSPVVLGPPVGQARVAVEHSYRKAEEGGEGATVPSAAATTTEVVTEVELLLYKCSECSQLFQLPADFLEHQATHFPAPVPESQEPALQQEVQASSPAEVPVSQPDPLPASDHSYELRNGEAIGRDRRGRRARRNNSGEAGGAATQELFCSACDQLFLSPHQLQQHLRSHREGVFKCPLCSRVFPSPSSLDQHLGDHSSESHFLCVDCGLAFGTEALLLAHRRAHTPNPLHSCPCGKTFVNLTKFLYHRRTHGVGGVPLPTTPVPPEEPVIGFPEPAPAETGEPEAPEPPVSEETSAGPAAPGTYRCLLCSREFGKALQLTRHQRFVHRLERRHKCSICGKMFKKKSHVRNHLRTHTGERPFPCPDCSKPFNSPANLARHRLTHTGERPYRCGDCGKAFTQSSTLRQHRLVHAQHFPYRCQECGVRFHRPYRLLMHRYHHTGEYPYKCRECPRSFLLRRLLEVHQLVVHAGRQPHRCPSCGAAFPSSLRLREHRCAAAAAQAPRRFECGTCGKKVGSAARLQAHEAAHAAAGPGEVLAKEPPAPRAPRATRAPVASPAALGSTATASPAAPARRRGLECSECKKLFSTETSLQVHRRIHTGERPYPCPDCGKAFRQSTHLKDHRRLHTGERPFACEVCGKAFAISMRLAEHRRIHTGERPYSCPDCGKSYRSFSNLWKHRKTHQQQHQAAVRQQLAEAEAAVGLAVMETAVEALPLVEAIEIYPLAEAEGVQISG

SEQ ID NO: 62932 - protein, 251 aa, Homo sapiens
MAPLLLQLAVLGAALAAAALVLKRDPAFTYEVIVVDDGSKDQTSKVAFKYCQKYGSDKVRVITLVKNRGKGGAIRMGIFSSRGEKILMADADGATKFPDVEKLEKGLNDLQPWPNQMAIACGSRAHLEKESIAQRSYFRTLLMYGFHFLVWFLCVKGIRDTQCGFKLFTREAASRTFSSLHVERWAFDVELLYIAQFFKIPIAEIAVNWTEIEGSKLVPFWSWLQMGKDLLFIRLRYLTGAWRLEQTRKMN

SEQ ID NO: 62933 - protein, 133 aa, Homo sapiens
MSSEPPPPYPGGPTAPLLEEKSGAPPTPGRSSPAVMQPPPGMPLPPADIGPPPYEPPGHPMPQPGFIPPHMSADGTYMPPAAKPTSTRTSACANGAGTRDSPACQSGPLCFAPCAQWSLSRSHLGLGAVPPSP

SEQ ID NO: 62934 - protein, 460 aa, Homo sapiens
MAQFYYKRNVNAPYRDRIPLRIVRAESELSPSEKAYLNAVEKGDYASVKKSLEEAEIYFKININCIDPLGRTALLIAIENENLELIELLLSFNVYVGDALLHAIRKEVVGAVELLLNHKKPSGEKQVPPILLDKQFSEFTPDITPIILAAHTNNYEIIKLLVQKGVSVPRPHEVRCNCVECVSSSDVDSLRHSRSRLNIYKALASPSLIALSSEDPFLTAFQLSWELQELSKVENEFKSEYEELSRQCKQFAKDLLDQTRSSRELEIILNYRDDNSLIEEQSGNDLARLKLAIKYRQKEFVAQPNCQQLLASRWYDEFPGWRRRHWAVKMVTCFIIGLLFPVFSVCYLIAPKSPLGLFIRKPFIKFICHTASYLTFLFLLLLASQHIDRSDLNRQGPPPTIVEWMILPWVLGFIWGEIKQMWDGGLQDYIHDWWNLMDFVMNSLYLATISLKIVAFVKVI

SEQ ID NO: 62935 - protein, 62 aa, Homo sapiens
MWATLPLLCAGAWLLGVPVCGAAELCVNSLEKFHFKSWMSKKTKAHCVLVAESVGEHQCMCF

SEQ ID NO: 62936 - protein, 440 aa, Homo sapiens
  MOD_RES (1)..(1): Any amino acid
XHMQTQSSPFARGNVFGEPPTELQIKQQELYKNFLRFQIEEKKQREEAERERLRIAEEKEERRLAEQRARIQQEYEEEQEKKREKEEEQRLKNEEHIRLAEERQKEAERKKKEEEEKYNLQLQHYCERDNLIGEETKHMRQPSPIVPALQNKIASKLQRPPSVDSIIRSFIHESSMSRAQSPPVPARKNQLRAEEEKKNVIMELSEMRKQLRSEERRLQERLLHMDSDDEIPIRKKERNPMDIFDMARHRLQAPVRRQSPKGLDAATFQNVHDFNELKDRDSETRVDLKFMYLDPPRDHHTLEIQQQALLREQQKRLNRIKMQEGAKVDLDAIPSAKVREQRMPRDDTSDFLKNSLLESDSAFIGAYGETYPAIEDDVLPPPSQLPSARERRRNKWKGLDIGVRCRGPSPFFCMWPSSCSSSICLKTVLPLHFVNSVHKR

SEQ ID NO: 62937 - protein, 216 aa, Homo sapiens
MRTEDLPKAVVFLEPQWYSVLEKDSVTLKCQGAYSPEDNSTQWFHNENLISSQASSYFIDAATVNDSGEYRCQTNLSTLSDPVQLEVHIGWLLLQAPRWVFKEEDPIHLRCHSWKNTALHKVTYLQNGKDRKYFHHNSDFHIPKATLKDSGSYFCRGLVGSKNVSSETVNITITQGLAVSTISSFSPPGYQVSFCLVMVLLFAVDTGLYFSVKTNI

SEQ ID NO: 62938 - protein, 81 aa, Homo sapiens
MHLRAHRTRRGKVSPTAKTKSLLHFIVLCVAGVVVHAQEQGIDILHQLGLGGKDVRHSSPATAVPSASTPLPQGVHLTESG

SEQ ID NO: 62939 - protein, 133 aa, Homo sapiens
MTKTDPAPMAPPPRGEEEEEEEEDEPVPEAPSPTQERRQKPVVHPSAPAPLPKDYAFTFFDPNDPACQEILFDPQTTIPELFAIVRQWVPQVQHKIDVIGNEILRRGCHVNDRDGLTDMTLLHYACKAGAHGV

SEQ ID NO: 62940 - protein, 165 aa, Homo sapiens
MDPLFQQTHKQVHEIQSCMGRLETADKQSVHIVENEIQASIDQIFSRLERLEILSSKEPPNKRQNARLRVDQLKYDVQHLQTALRNFQHRRHAREQQERQREELLSRTFTTNGTQKKILDIANMLGLSNTVMRLIEKRAFQDKYFMIGGMLLTCVVMFLVVQYLT

SEQ ID NO: 62941 - protein, 47 aa, Homo sapiens
MDGRRVPAQPAAEVRPGQGRGATAGPRGAAPPAGRVTVRLASLQSEV

SEQ ID NO: 62942 - protein, 825 aa, Homo sapiens
MGLGKTCQTIALFIYLAGRLNDEGPFLILCPLSVLSNWKEEMQRFAPGLSCVTYAGDKEERACLQQDLKQESRFHVLLTTYEICLKDASFLKSFPWSVLVVDEAHRLKNQSSLLHKTLSEFSVVFSLLLTGTPIQNSLQELYSLLSFVEPDLFSKEEVGDFIQRYQDIEKESESASELHKLLQPFLLRRVKAEVATELPKKTEVVIYHGMSALQKKYYKAILMKDLDAFENETAKKVKLQNILSQLRKCVDHPYLFDGVEPEPFEVGDHLTEASGKLHLLDKLLAFLYSGGHRVLLFSQMTQMLDILQDYMDYRGYSYERVDGSVRGEERHLAIKNFGQQPIFVFLLSTRAGGVGMNLTAADTVIFVDSDFNPQNDLQAAARAHRIGQNKSVKVIRLIGRDTVEEIVYRKAASKLQLTNMIIEGGHFTLGAQKPAADADLQLSEILKFGLDKLLASEGSTMDEIDLESILGETKDGQWVSDALPAAEGGSRDQEEGKNHMYLFEGKDYSKEPSKEDRKSFEQLVNLQKTLLEKASQEGRSLRNKGSVLIPGLVEGSTKRKRVLSPEELEDRQKKRQEAAAKRRRLIEEKKRQKEEAEHKKKMAWWESNNYQSFCLPSEESEPEDLENGEESSAELDYQDPDATSLKYVSGDVTHPQAGAEDALIVHCVDDSGHWGRGGLFTALEKRSAEPRKIYELAGKMKDLSLGGVLLFPVDDKESRNKGQDLLALIVAQHRDRSNVLSGIKMAALEEGLKKIFLAAKKKKASVHLPRIGHATKGFNWYGTERLIRKHLAARGIPTYIYYFPRSKSAVLHSQSSSSSSRQLVP

SEQ ID NO: 62943 - protein, 169 aa, Homo sapiens
MPVMRLFPCFLQLLAGLALPAVPPQWALSAGNGSSEVEVVPFQEVWGRSYCRALERLVDVVSEYPSEVEHMFSPSCVSLLRCTGCCGDENLHCVPVETANVTMQLLKIRSGDRPSYVELTFSQHVRCECRPLREKMKPERRRPKGRGKRRREKQRPTDCHLCGDAVPRR

SEQ ID NO: 62944 - protein, 810 aa, Homo sapiens
KREGFCQLLQQMKNKHSEQPEPDMITIFIGTWNMGNAPPPKKITSWFLSKGQGKTRDDSADYIPHDIYVIGTQEDPLSEKEWLEILKHSLQEITSVTFKTVAIHTLWNIRIVVLAKPEHENRISHICTDNVKTGIANTLGNKGAVGVSFMFNGTSLGFVNSHLTSGSEKKLRRNQNYMNILRFLALGDKKLSPFNITHRFTHLFWFGDLNYRVDLPTWEAETIIQKIKQQQYADLLSHDQLLTERREQKVFLHFEEEEITFAPTYRFERLTRDKYAYTKQKATGMKYNLPSWCDRVLWKSYPLVHVVCQSYGSTSDIMTSDHSPVFATFEAGVTSQFVSKNGPGTVDSQGQIEFLRCYATLKTKSQTKFYLEFHSSCLESFVKSQEGENEEGSEGELVVKFGETLPKLKPIISDPEYLLDQHILISIKSSDSDESYGEGCIALRLEATETQLPIYTPLTHHGELTGHFQGEIKLQTSQGKTREKLYDFVKTERDESSGPKTLKSLTSHDPMKQWEVTSRAPPCSGSSITEIINPNYMGVGPFGPPMPLHVKQTLSPDQQPTAWSYDQPPKDSPLGPCRGESPPTPPGQPPISPKKFLPSTANRGLPPRTQESRPSDLGKNAGDTLPQEDLPLTKPEMFENPLYGSLSSFPKPAPRKDQESPKMPRKEPPPCPEPGILSPSIVLTKAQEADRGEGPGKQVPAPRLRSFTCSSSAEGRAAGGDKSQGKPKTPVSSQAPVPAKRPIKPSRSEINQQTPPTPTPRPPLPVKSPAVLHLQHSKGRDYRDNTELPHHGKHRPEEGPPGPLGRTAMQ

SEQ ID NO: 62945 - protein, 362 aa, Homo sapiens
MRVTAPRTLLLLLWGAVALTETWAGSHSMRYFYTAMSRPGRGEPRFITVGYVDDTLFVRFDSDATSPRKEPRAPWIEQEGPEYWDRETQISKTNTQTYRENLRTALRYYNQSEAGSHIIQRMYGCDVGPDGRLLRGYDQDAYDGKDYIALNEDLSSWTAADTAAQITQRKWEAARVAEQDRAYLEGLCVESLRRYLENGKETLQRADPPKTHVTHHPISDHEVTLRCWALGFYPAEITLTWQRDGEDQTQDTELVETRPAGDRTFQKWAAVVVPSGEEQRYTCHVQHEGLPKPLTLRWEPSSQSTVPIVGIVAGLAVLAVVVIGAVVAAVMCRRKSSGGKGGSYSQAACSDSAQGSDVSLTA

SEQ ID NO: 62946 - protein, 91 aa, Homo sapiens
MKPVSRRTLDWIYSVVSPGDRGPPPCRLTGPAGGKALFLQHPETPKSIPELSISLPHLDSASSWRIRSSASYVRAAGCTRHWNPIYSTLLL

SEQ ID NO: 62947 - protein, 114 aa, Homo sapiens
METRSPGLNNMKPQSLQLVLEEQVLALQQQMAENQAASWRKLKNSQEAQQRQATLVRKLQAKVLQYRSWCQELEKRLEATGGPIPQRWENVEEPNLDELLVRLEEEQQRCESLA

SEQ ID NO: 62948 - protein, 97 aa, Homo sapiens
MPKGGCPKAPQQEELPLSSDMVEKQTGKKDKDKVSLTKTPKLERGDGGKEVRERASKRKLPFTAGANGEQKDSDTDASSPVPVVVLQGWYAPRSTMA

SEQ ID NO: 62949 - protein, 103 aa, Homo sapiens
MTTFERKLQDQDKKSQEVSSTSNQENENGSGSEEVCYTVINHIPHQRSSLSSNDDGYENIDSLTRKVRQFRERSETEYALLRTSVSRPCSCTHEHDYEVVFPH

SEQ ID NO: 62950 - protein, 34 aa, Homo sapiens
MRRKTRNFKHKTVKDNKVLTEGSDQESEKDNSQC

SEQ ID NO: 62951 - protein, 211 aa, Homo sapiens
MQPGATTCTEDRIQHALERCLHGLSLSRRSTSWSAGLCLNCWSLQELVSRDPGHFLILLEQILQKTREVQEKGTYDLLTPLALLFYSTVLCTPHFPPDSDLLLKAASTYHRFLTWPVPYCSICQELLTFIDAELKAPGISYQRLVRAEQGLPIRSHRSSTVPRPWQSLRTSSRRPQRHRSWHLASGMLQRPGGGSGPSCRRWEKKLASLGC

SEQ ID NO: 62952 - protein, 179 aa, Homo sapiens
  MOD_RES (1)..(1): Any amino acid
XDLKNVFPPEVAVFEPSEAEISHTQKATLVCLATGFYPDHVELSWWVNGKEVHSGVSTDPQPLKEQPALNDSRYCLSSRLRVSATFWQNPRNHFRCQVQFYGLSENDEWTQDRAKPVTQIVSAEAWGRADCGFTSESYQQGVLSATILYEILLGKATLYAVLVSALVLMAMVKRKDSRG

SEQ ID NO: 62953 - protein, 79 aa, Homo sapiens
MALVSGISLDPEAAIGVTKRPPPKWVDGVDEIQYDVGRIKQKMKELASLHDKHLNRPTLDDSSEEEHAIEITTQEITQA

SEQ ID NO: 62954 - protein, 535 aa, Homo sapiens
MLLPLLLLLPMCWAVEVKRPRGVSLTNHHFYDESKPFTCLDGSATIPFDQVNDDYCDCKDGSDEPGTAACPNGSFHCTNTGYKPLYIPSNRVNDGVCDCCDGTDEYNSGVICENTCKEKGRKERESLQQMAEVTREGFRLKKILIEDWKKAREEKQKKLIELQAGKKSLEDQVEMLRTVKEEAEKPEREAKEQHQKLWEEQLAAAKAQQEQELAADAFKELDDDMDGTVSVTELQTHPELDTDGDGALSEAEAQALLSGDTQTDATSFYDRVWAAIRDKYRSEALPTDLPAPSAPDLTEPKEEQPPVPSSPTEEEEEEEEEEEEEAEEEEEEEDSEVQGEQPKEAPPPLSPPQPASPAEEDKMPPYDEQTQAFIDAAQEARNKFEEAERSLKDMEESIRNLEQEISFDFGPNGEFAYLYSQCYELTTNEYVYRLCPFKLVSQKPKLGGSPTSLGTWGSWIGPDHDKFSAMKYEQGTGCWQGPNRSTTVRLLCGKETMVTSTTEPSRCEYLMELMTPAACPEPPPEAPTEDDHDEL

SEQ ID NO: 62955 - protein, 214 aa, Homo sapiens
MPLEERNVFWLSKGNLTGDQGYFDAHALAMDYRSLGFRECLAEVARYLSIIEGLDASDPLRVRLVSHLNNYASQREAASGAHAGLGHIPWGTVFGHHPHIAHPLLLPQNGHGNAGTTASPTEPHHQGRLGSAHPEAPALRAPPSGSLGPVLPVVTSASKLSPPLLSSVASLSAFPFSFGSFHLLSPNALSPSAPTQAANLGKPYRPWGTEIGAF

SEQ ID NO: 62956 - protein, 358 aa, Homo sapiens
MRHSLTKLLAASGSNSPTRSESPEPAATCSLPSDLTRAAAGEEETAAAGSPGRKQQFGDEGELEAGRGSRGGVAVRAPSPEEMEEEAIASLPGEETEDMDFLSGLELADLLDPRQPDWHLDPGLSSPGPLSSSGGGSDSGGLWRGDDDDEAAAAEMQRFSDLLQRLLNGIGGCSSSSDSGSAEKRRRKSPGGGGGGGSGNDNNQAATKSPRKAAAAAARLNRLKKKEYVMGLESRVRGLAAENQELRAENRELGKRVQALQEESRYLRAVLANETGLARLLSRLSGVGLRLTTSLFRDSPAGDHDYALPVGKQKQDLLEEDDSAGGVCLHVDKDKVSVEFCSACARKASSSLKIFFFR

SEQ ID NO: 62957 - protein, 230 aa, Homo sapiens
MAPAADREGYWGPTTSTLDWCEENYSVTWYIAEFLVGMGSWCFHMTLKYEMQLLDELPMIYSCCIFVYCMFECFKIKNSVNYHLLFTLVLFSLIVTTVYLKVKEPIFHQVMYGMLVFTLVLRSIYIVTWVYPWLRGLGYTSLGIFLLGFLFWNIDNIFCESLRNFRKKVPPIIGITTQFHAWWHILTGLGSYLHILFSLYTRTLYLRYRPKVKFLFGIWPVILFEPLRKH

SEQ ID NO: 62958 - protein, 316 aa, Homo sapiens
MFPPSGHQDVSERRLDTQRPQVTMWERDVSSDRQEPGRRGRSWGLEGSQALSQQAEVIVRQLQELRWLEEEVWLLRETSLQQKMRLEAQAMELEALARAEKAGRAEAEGLRAALAGAEVVRKNLEEGRQRELEEVQRLHQEQLSSLTQAHEEALSSLTSKAEGLEKSLSSLETRRAGEAKELAEAQREAELLRKQLSKTQEDLEAQVTLVENLRKYVGEQVPSEVHSQTWELERQKLLETMQHLQEDRDSLHATAELLQVRVQSLTHILALQEEELTRKVQPSDSLEPEFTRKCQSLLNRWREKVFALMVQLKAQE

SEQ ID NO: 62959 - protein, 126 aa, Homo sapiens
MLKCVPCTYKKEPVRISNGNKIWTLKFSHNISNKTPLVLLHGFGGGLGLWALNFGDLCTNRPVYAFDLLGFGRSSRPRFDSDAEEVENQFVESIEEWRCALGLDKMILLGHNLGGFLAAAYSLKYP

SEQ ID NO: 62960 - protein, 438 aa, Homo sapiens
MSLTVVSMACVGFFLLQGAWPLMGGQDKPFLSARPSTVVPRGGHVALQCHYRRGFNNFMLYKEDRSHVPIFHGRIFQESFIMGPVTPAHAGTYRCRGSRPHSLTGWSTPSNPLVIMVTGNHRKPSLLAHPGPLLKSGETVILQCWSDVMFEHFFLHREGISEDPSRLVGQIHDGVSKANFSIGPLMPVLAGTYRCYGSVPHSPYQLSAPSDPLDIVITGLYEKPSLSAQPGPTVQAGENVTLSCSSWSSYDIYHLSREGEAHERRLRAVPKVNRTFQADFPLGPATHGGTYRCFGSFRALPCVWSNSSDPLLVSVTGICRHLHVLIGTSVVIFLFILLLFFLLYRWCSNKKNAAVMDQEPAGDRTVNRQDSDEQDPQEVMYAQLDHCVFIQRKISRPSQRPKTPLTDTSVYTELPNAEPRSKVVSCPRAPQSGLEGVF

SEQ ID NO: 62961 - protein, 122 aa, Homo sapiens
  MOD_RES (1)..(1): Any amino acid
XLSSAAGREITLPEGSRRPPPTRSHWNSQPLSGPRGAFCSLSGNALAPGQAATPPQRRRGLFFWGIYSSETTTGTSSNSSQSTSNSGLAPNPTNATTKAAGGALQSTASLFVVSLSLLHLYS

SEQ ID NO: 62962 - protein, 3668 aa, Homo sapiens
MSEPGGGGGEDGSAGLEVSAVQNVADVSVLQKHLRKLVPLLLEDGGEAPAALEAALEEKSALEQMRKFLSDPQVHTVLVERSTLKEDVGDEGEEEKEFISYNINIDIHYGVKSNSLAFIKRTPVIDADKPVSSQLRVLTLSEDSPYETLHSFISNAVAPFFKSYIRESGKADRDGDKMAPSVEKKIAELEMGLLHLQQNIEIPEISLPIHPMITNVAKQCYERGEKPKVTDFGDKVEDPTFLNQLQSGVNRWIREIQKVTKLDRDPASGTALQEISFWLNLERALYRIQEKRESPEVLLTLDILKHGKRFHATVSFDTDTGLKQALETVNDYNPLMKDFPLNDLLSATELDKIRQALVAIFTHLRKIRNTKYPIQRALRLVEAISRDLSSQLLKVLGTRKLMHVAYEEFEKVMVACFEVFQTWDDEYEKLQVLLRDIVKRKREENLKMVWRINPAHRKLQARLDQMRKFRRQHEQLRAVIVRVLRPQVTAVAQQNQGEVPEPQDMKVAEVLFDAADANAIEEVNLAYENVKEVDGLDVSKEGTEAWEAAMKRYDERIDRVETRITARLRDQLGTAKNANEMFRIFSRFNALFVRPHIRGAIREYQTQLIQRVKDDIESLHDKFKVQYPQSQACKMSHVRDLPPVSGSIIWAKQIDRQLTAYMKRVEDVLGKGWENHVEGQKLKQDGDSFRMKLNTQEIFDDWARKVQQRNLGVSGRIFTIESTRVRGRTGNVLKLKVNFLPEIITLSKEVRNLKWLGFRVPLAIVNKAHQANQLYPFAISLIESVRTYERTCEKVEERNTISLLVAGLKKEVQALIAEGIALVWESYKLDPYVQRLAETVFNFQEKVDDLLIIEEKIDLEVRSLETCMYDHKTFSEILNRVQKAVDDLNLHSYSNLPIWVNKLDMEIERILGVRLQAGLRAWTQVLLGQAEDKAEVDMDTDAPQVSHKPGGEPKIKNVVHELRITNQVIYLNPPIEECRYKLYQEMFAWKMVVLSLPRIQSQRYQVGVHYELTEEEKFYRNALTRMPDGPVALEESYSAVMGIVSEVEQYVKVWLQYQCLWDMQAENIYNRLGEDLNKWQALLVQIRKARGTFDNAETKKEFGPVVIDYGKVQSKVNLKYDSWHKEVLSKFGQMLGSNMTEFHSQISKSRQELEQHSVDTASTSDAVTFITYVQSLKRKIKQFEKQVELYRNGQRLLEKQRFQFPPSWLYIDNIEGEWGAFNDIMRRKDSAIQQQVANLQMKIVQEDRAVESRTTDLLTDWEKTKPVTGNLRPEEALQALTIYEGKFGRLKDDREKCAKAKEALELTDTGLLSGSEERVQVALEELQDLKGVWSELSKVWEQIDQMKEQPWVSVQPRKLRQNLDALLNQLKSFPARLRQYASYEFVQRLLKGYMKINMLVIELKSEALKDRHWKQLMKRLHVNWVVSELTLGQIWDVDLQKNEAIVKDVLLVAQGEMALEEFLKQIREVWNTYELDLVNYQNKCRLIRGWDDLFNKVKEHINSVSAMKLSPYYKVFEEDALSWEDKLNRIMALFDVWIDVQRRWVYLEGIFTGSADIKHLLPVETQRFQSISTEFLALMKKVSKSPLVMDVLNIQGVQRSLERLADLLGKIQKALGEYLERERSSFPRFYFVGDEDLLEIIGNSKNVAKLQKHFKKMFAGVSSIILNEDNSVVLGISSREGEEVMFKTPVSITEHPKINEWLTLVEKEMRVTLAKLLAESVTEVEIFGKATSIDPNTYITWIDKYQAQLVVLSAQIAWSENVETALSSMGGGGDAAPLHSVLSNVEVTLNVLADSVLMEQPPLRRRKLEHLITELVHQRDVTRSLIKSKIDNAKSFEWLSQMRFYFDPKQTDVLQQLSIQMANAKFNYGFEYLGVQDKLVQTPLTDRCYLTMTQALEARLGGSPFGPAGTGKTESVKALGHQLGRFVLVFNCDETFDFQAMGRIFVGLCQVGAWGCFDEFNRLEERMLSAVSQQVQCIQEALREHSNPNYDKTSAPITCELLNKQVKVSPDMAIFITMNPGYAGRSNLPDNLKKLFRSLAMTKPDRQLIAQVMLYSQGFRTAEVLANKIVPFFKLCDEQLSSQSHYDFGLRALKSVLVSAGNVKRERIQKIKREKEERGEAVDEGEIAENLPEQEILIQSVCETMVPKLVAEDIPLLFSLLSDVFPGVQYHRGEMTALREELKKVCQEMYLTYGDGEEVGGMWVEKVLQLYQITQINHGLMMVGPSGSGKSMAWRVLLKALERLEGVEGVAHIIDPKAISKDHLYGTLDPNTREWTDGLFTHVLRKIIDSVRGELQKRQWIVFDGDVDPEWVENLNSVLDDNKLLTLPNGERLSLPPNVRIMFEVQDLKYATLATVSRCGMVWFSEDVLSTDMIFNNFLARLRSIPLDEGEDEAQRRRKGKEDEGEEAASPMLQIQRDAATIMQPYFTSNGLVTKALEHAFQLEHIMDLTRLRCLGSLFSMLHQACRNVAQYNANHPDFPMQIEQLERYIQRYLVYAILWSLSGDSRLKMRAELGEYIRRITTVPLPTAPNIPIIDYEVSISGEWSPWQAKVPQIEVETHKVAAPDVVVPTLDTVRHEALLYTWLAEHKPLVLCGPPGSGKTMTLFSALRALPDMEVVGLNFSSATTPELLLKTFDHYCEYRRTPNGVVLAPVQLGKWLVLFCDEINLPDMDKYGTQRVISFIRQMVEHGGFYRTSDQTWVKLERIQFVGACNPPTDPGRKPLSHRFLRHVPVVYVDYPGPASLTQIYGTFNRAMLRLIPSLRTYAEPLTAAMVEFYTMSQERFTQDTQPHYIYSPREMTRWVRGIFEALRPLETLPVEGLIRIWAHEALRLFQDRLVEDEERRWTDENIDTVALKHFPNIDREKAMSRPILYSNWLSKDYIPVDQEELRDYVKARLKVFYEEELDVPLVLFNEVLDHVLRIDRIFRQPQGHLLLIGVSGAGKTTLSRFVAWMNGLSVYQIKVHRKYTGEDFDEDLRTVLRRSGCKNEKIAFIMDESNVLDSGFLERMNTLLANGEVPGLFEGDEYATLMTQCKEGAQKEGLMLDSHEELYKWFTSQVIRNLHVVFTMNPSSEGLKDRAATSPALFNRCVLNWFGDWSTEALYQVGKEFTSKMDLEKPNYIVPDYMPVVYDKLPQPPSHREAIVNSCVFVHQTLHQANARLAKRGGRTMAITPRHYLDFINHYANLFHEKRSELEEQQMHLNVGLRKIKETVDQVEELRRDLRIKSQELEVKNAAANDKLKKMVKDQQEAEKKKVMSQEIQEQLHKQQEVIADKQMSVKEDLDKVEPAVIEAQNAVKSIKKQHLVEVRSMANPPAAVKLALESICLLLGESTTDWKQIRSIIMRENFIPTIVNFSAEEISDAIREKMKKNYMSNPSYNYEIVNRASLACGPMVKWAIAQLNYADMLKRVEPLRNELQKLEDDAKDNQQKANEVEQMIRDLEASIARYKEEYAVLISEAQAIKADLAAVEAKVNRSTALLKSLSAERERWEKTSETFKNQMSTIAGDCLLSAAFIAYAGYFDQQMRQNLFTTWSHHLQQANIQFRTDIARTEYLSNADERLRWQASSLPADDLCTENAIMLKRFNRYPLIIDPSGQATEFIMNEYKDRKITRTSFLDDAFRKNLESALRFGNPLLVQEHGWSWRPLSSANSCRSRKPSTRCSHLEVGAK

SEQ ID NO: 62963 - protein, 528 aa, Homo sapiens
MSGVWGAGGPRCQEALAVLASLCRARPPPLGLDVETCRSFELQPPERSPSAAGAGTSVSLLAVVVIVCGVALVAVFLFLFWKLCWMPWRNKEASSPSSANPPLEALQSPSFRGNMADKLKDPSTLGFLEAAVKISHTSPDIPAEVQMSVKEHIMRHTRLQRQTTEPASSTRHTSFKRHLPRQMHVSSVDYGNELPPAAEQPTSIGRIKPELYKQKSVDGEDAKSEATKSCGKINFSLRYDYETETLIVRILKAFDLPAKDFCGSSDPYVKIYLLPDRKCKLQTRVHRKTLNPTFDENFHFPVPYEELADRKLHLSVFDFDRFSRHDMIGEVILDNLFEASDLSRETSIWKDIQYATSESVDLGEIMFSLCYLPTAGRLTLTVIKCRNLKAMDITGYSDPYVKVSLLCDGRRLKKKKTTIKKNTLNPVYNEAIIFDIPPENMDQVSLLISVMDYDRVGHNEIIGVCRVGITAEGLGRDHWNEMLAYPRKPIAHWHSLVEVKKSFKEWQGRAASFDSESSCPSPKPPPTP

SEQ ID NO: 62964 - protein, 764 aa, Homo sapiens
MTELKAKGPRAPHVAGGPPSPEVGSPLLCRPAAGPFPGSQTSDTLPEVSAIPISLDGLLFPRPCQGQDPSDEKTQDQQSLSDVEGAYSRAEATRGAGGSSSSPPEKDSGLLDSVLDTLLAPSGPGQSQPSPPACEVTSSWCLFGPELPEDPPAAPATQRVLSPLMSRSGCKVGDSSGTAAAHKVLPRGLSPARQLLLPASESPHWSGAPVKPSPQAAAVEVEEEDGSESEESAGPLLKGKPRALGGAAAGGGAAAVPPGAAAGGVALVPKEDSRFSAPRVALVEQDAPMAPGRSPLATTVMDFIHVPILPLNHALLAARTRQLLEDESYDGGAGAASAFAPPRSSPCASSTPVAVGDFPDCAYPPDAEPKDDAYPLYSDFQPPALKIKEEEEGAEASARSPRSYLVAGANPAAFPDFPLGPPPPLPPRATPSRPGEAAVTAAPASASVSSASSSGSTLECILYKAEGAPPQQGPFAPPPCKAPGASGCLLPRDGLPSTSASAAAAGAAPALYPALGLNGLPQLGYQAAVLKEGLPQVYPPYLNYLRPDSEASQSPQYSFESLPQKICLICGDEASGCHYGVLTCGSCKVFFKRAMEGRKFKKFNKVRVVRALDAVALPQPVGVPNESQALSQRFTFSPGQDIQLIPPLINLLMSIEPDVIYAGHDNTKPDTSSSLLTSLNQLGERQLLSVVKWSKSLPGFRNLHIDDQITLIQYSWMSLMVFGLGWRSYKHVSGQMLYFAPDLILNESHRSLSSFKLAKKSSSV

SEQ ID NO: 62965 - protein, 250 aa, Homo sapiens
MAAAAVNGAAGFSSSGPAATSGAVLQAATGMYEQLKGEWNRKSPNLSKCGEELGRLKLVLLELNFLPTTGTKLTKQQLILARDILEIGAQWSILRKDIPSFERYMAQLKCYYFDYKEQLPESAYMHQLLGLNLLFLLSQNRVAEFHTELERLPAKDIQTNVYIKHPVSLEQYLMEGSYNKVFLAKGNIPAESYTFFIDILLDTIRDEIAGCIEKAYEKILFTEATRILFFNTPKKMTDYAKKVAGVQGKG

SEQ ID NO: 62966 - protein, 41 aa, Homo sapiens
MAADAEPLEIILHLPLLCEDKNVPYVFVRSKQALGRACGVS

SEQ ID NO: 62967 - protein, 391 aa, Homo sapiens
MALNVAPVRDTKWLTLEVCRQFQRGTCSRSDEECKFAHPPKSCQVENGRVIACFDSLKGRCSRENCKYLHPPTHLKTQLEINGRNNLIQQKTAAAMLAQQMQFMFPGTPLHPVPTFPVGPAIGTNTAISFAPYLAPVTPGVGLVPTEILPTTPVIVPGSPPVTVPGSTATQKLLRTDKLEVCREFQRGNCARGETDCRFAHPADSTMIDTSDNTVTVCMDYIKGRCMREKCKYFHPPAHLQAKIKAAQHQANQAAVAAQAAAAAATVMTQSTAKAMKRPLEATVDLAFPPGALHPLPKRQALEKSNGTSAVFNPSVLHYQQALTSAQLQQHAAFIPTGSVLCMTPATSIDNSEIISRNGMECQESALRITKHCYCTYYPVSSSIELPQTAC

SEQ ID NO: 62968 - protein, 36 aa, Homo sapiens
MNEAMATDSPRRPSRCTGGVVVRPQAVTYIKKSGIS

SEQ ID NO: 62969 - protein, 758 aa, Homo sapiens
MAEPRQEFEVMEDHAGTYGLGDRKDQGGYTMHQDQEGDTDAGLKESPLQTPTEDGSEEPGSETSDAKSTPTAEDVTAPLVDEGAPGKQAAAQPHTEIPEGTTAEEAGIGDTPSLEDEAAGHVTQEPESGKVVQEGFLREPGPPGLSHQLMSGMPGAPLLPEGPREATRQPSGTGPEDTEGGRHAPELLKHQLLGDLHQEGPLLKGAGGKERPGSKEEVDEDRDVDESSPQDSPPSKASPAQDGRPPQTAAREATSIPGFPAEGAIPLPVDFLSKVSTEIPASEPNGPSAGRAKGQDAPLEFTFHVEITPNVQKEQAHSEEHLGRAAFPGAPGEGPEARGPSLGEDTKEADLPEPSEKQPAAAPRGKPVSWVPQLKARMVSKSKDGTGSDDKKAKTSTRSSAKTLKNRPCLSPKHPTPGSSDPLIQPSSPAVCPEPPSSPKYVSSVTPRTGSSGAKEMKLKGADGKTKIATPRGAAPPGQKGQANATRIPAKTPPAPKTPPSSGEPPKSGDRSGYSSPGSPGTPGSRSRTPSLPTPPTREPKKVAVVRTPPKSPSSAKSRLQTAPVPMPDLKNVKSKIGSTENLKHQPGGGKVQIINKKLDLSNVQSKCGSKDNIKHVPGGGSVQIVYKPVDLSKVTSKCGSLGNIHHKPGGGQVEVKSEKLDFKDRVQSKIGSLDNITHVPGGGNKKIETHKLTFRENAKAKTDHGAEIVYKSPVVSGDTSPRHLSNVSSTGSIDMVDSPQLATLADEVSASLAKQGL

SEQ ID NO: 62970 - protein, 266 aa, Homo sapiens
MSASSWPQNGMPPSSLYERLSQRMLDISGDRGVLKDVIREGAGDLVAPDASVLVKYSGYLEHMDRPFDSNYFRKTPRLMKLGEDITLWGMELGLLSMRRGELARFLFKPNYAYGTLGCPPLIPPNTTVLFEIELLDFLDCAESDKFCALSAEQQDQFPLQKVLKVAATEREFGNYLFRQNRFYDAKVRYKRALLLLRRRSAPPEEQHLVEAAKLPVLLNLSFTYLKLDRPTIALCYGEQALIIDQKNAKALFRCGQFSPWDRLVFS

SEQ ID NO: 62971 - protein, 110 aa, Homo sapiens
MLAKGKKAVMKFRNSIGNSQRMNSYQLPNINSYMMPIPPPLPPTGKITRENRSETWRRRRFRPTTAPNGLEPLLTKLSCTCLRNLKRNEKESHKQLVKEIRKKSFSYAGA

SEQ ID NO: 62972 - protein, 16 aa, Homo sapiens
MYQSLAMAANHGPPPG

SEQ ID NO: 62973 - protein, 133 aa, Homo sapiens
MEPAVSLAVCALLFLLWVRLKGLEFVLIHQRWVFVCLFLLPLSLIFDIYYYVRAWVVFKLSSAPRLHEQRVRDIQKQVREWKEQGSKTFMCTGRPGWLTVSLRVGKYKKTHKNIMINLMDILEVDTKKQFRIL

SEQ ID NO: 62974 - protein, 24 aa, Homo sapiens
MPSESFCLAAQARLDSKWLKTDIQ

SEQ ID NO: 62975 - protein, 770 aa, Homo sapiens
MSKRGMSSRAKGDKAEALAALQAANEDLRAKLTDIQIELQQEKSKVSKVEREKNQELRQVREHEQHKTAVLLTELKTKLHEEKMKELQAVRETLLRQHEAELLRVIKIKDNENQRLQALLSALRDGGPEKVKTVLLSEAKEEAKKGFEVEKVKMQQEISELKGAKRQVEEALTLVIQADKIKAAEIRSVYHLHQEEITRIKKECEREIRRLQLDEKDARRFQLKIAELSAIIRKLEDRNALLSEERNELLKRVREAESQYKPLLDKNKRLSRKNEDLSHALRRMENKLKFVTQENIEMRQRAGIIRRPSSLNDLDQSQDEREVDFLKLQIVEQQNLIDELSKTLETAGYVKSVLERDKLLRFRKQRKKMAKLPKPVVVETFFGYDEEASLESDGSSVSYQTDRTDQTPCTPDDDLEEGMAKEETELRFRQLTMEYQALQRAYALLQEQVGGTLDAEREVKTREQLQAEVQRAQARIEDLEKALAEQGQDMKWIEEKQALYRRNQELVEKIKQMETEEARLRHEVQDARDQNELLEFRILELEERERKSPAISFHHTPFVDGKSPLQVYCEAEGVTDIVVAELMKKLDILGDNANLTNEEQVVVIQARTVLTLAEKWLQQIEETEAALQRKMVDLESEKELFSKQKGYLDEELDYRKQALDQANKHILELEAMLYDALQQEAGAKVAELLSEEEREKLKVAVEQWKRQVMSELRERDAQILRERMELLQLAQQRIKELEERIEAQKRQIKELEEKFLFLFLFFSLAFILWS

SEQ ID NO: 62976 - protein, 164 aa, Homo sapiens
MSLSMGITMMCMASNTYGSNPISVYIGYTIWGSVMFIISGSLSIAAGIRTTKGLVRGSLGMNITSSVLAASGILINTFSLAFYSFHHPYCNYYGNSNNCHGTMSILMGLDGMVLLLSVLEFCIAVSLSAFGCKVLCCTPGGVVLILPSHSHMAETASPTPLNEV

SEQ ID NO: 62977 - protein, 85 aa, Homo sapiens
MTGKTQTSNVTNKNDPKSINSRVFIGNLNTAIVKKVDIEAIFSKYGKIVGCSVHKGYAFVQYMSERHARAAVAGENARVIAGQPL

SEQ ID NO: 62978 - protein, 105 aa, Homo sapiens
MEDELEPSLRPRTQIQGRILLLTICAAGIGGTFQFGYNLSIINAPTLHIQEFTNETWQARTGEPLPDHLVLLMWSLIVSLYPLGGLFGALLAGPLAITLGRSPSW

SEQ ID NO: 62979 - protein, 900 aa, Homo sapiens
MKSVCPVTSGFSSPSPSAAAAAQEVRSATDGNTSTTPPTSAKKRKLNSSSSSSSNSSNEREDFDSTSSSSSTPPLQPRDSASPSTSSFCLGVSVAASSHVPIQKKLRFEDTLEFVGFDAKMAEESSSSSSSSSPTAATSQQQQLKNKSILISSVASVHHANGLAKSSTTVSSFANSKPGSAKKLVIKNFKDKPKLPENYTDETWQKLKEAVEAIQNSTSIKYNLEELYQAVENLCSYKISANLYKQLRQICEDHIKAQIHQFREDSLDSVLFLKKIDRCWQNHCRQMIMIRSIFLFLDRTYVLQNSMLPSIWDMGLELFRAHIISDQKVQNKTIDGILLLIERERNGEAIDRSLLRSLLSMLSDLQIYQDSFEQRFLEETNRLYAAEGQKLMQEREVPEYLHHVNKRLEEEADRLITYLDQTTQKSLIATVEKQLLGEHLTAILQKGLNNLLDENRIQDLSLLYQLFSRVRGGVQVLLQQWIEYIKAFGSTIVINPEKDKTMVQELLDFKDKVDHIIDICFLKNEKFINAMKEAFETFINKRPNKPAELIAKYVDSKLRAGNKEATDEELEKMLDKIMIIFRFIYGKDVFEAFYKKDLAKRLLVGKSASVDAEKSMLSKLKHECGAAFTSKLEGMFKDMELSKDIMIQFKQYMQNQNVPGNIELTVNILTMGYWPTYVPMEVHLPPEMVKLQEIFKTFYLGKHSGRKLQWQSTLGHCVLKAEFKEGKKELQVSLFQTLVLLMFNEGEEFSLEEIKQATGIEDGELRRTLQSLACGKARVLAKNPKGKDIEDGDKFICNDDFKHKLFRIKINQIQMKETVEEQASTTERVFQDRQYQIDAAIVRIMKMRKTLSHNLLVSEVYNQLKFPVKPADLKKRIESLIDRDYMERDKENPNQYNYIA

SEQ ID NO: 62980 - protein, 37 aa, Homo sapiens
MANMNSDSRHLGTSEVDHERDPGPMNIQFEPSDLRSK

SEQ ID NO: 62981 - protein, 82 aa, Homo sapiens
MAALLLGAVLLVAQPQLVPSRPAELGQQELLRKAGTLQDDVRDGVAPNGSAQQLPQTIIIGVRKGGTRALLEMLSLHPDVAA

SEQ ID NO: 62982 - protein, 643 aa, Homo sapiens
MTLTLSVLICLGLSVGPRTCVQAGTLPKPTLWAEPASVIARGKPVTLWCQGPLETEEYRLDKEGLPWARKRQNPLEPGAKAKFHIPSTVYDSAGRYRCYYETPAGWSEPSDPLELVATGFYAEPTLLALPSPVVASGGNVTLQCDTLDGLLTFVLVEEEQKLPRTLYSQKLPKGPSQALFPVGPVTPSCRWRFRCYYYYRKNPQVWSNPSDLLEILVPGVSRKPSLLIPQGSVVARGGSLTLQCRSDVGYDIFVLYKEGEHDLVQGSGQQPQAGLSQANFTLGPVSRSHGGQYRCYGAHNLSPRWSAPSDPLDILIAGLIPDIPALSVQPGPKVASGENVTLLCQSWHQIDTFFLTKEGAAHPPLCLKSKYQSYRHQAEFSMSPVTSAQGGTYRCYSAIRSYPYLLSSPSYPQELVVSGPSGDPSLSPTGSTPTPGPEDQPLTPTGLDPQSGLGRHLGVVTGVSVAFVLLLFLLLFLLLRHRHQSKHRTSAHFYRPAGAAGPEPKDQGLQKRASPVADIQEEILNAAVKDTQPKDGVEMDARQSPHDEDPQAVTYAPVKHSRPRREMASPPSPLSGEFLDTKDRQAEEDRQMDTEAAASEAPQDVTYAQLHSLTLRREATEPPPSQEREPPAEPSIYAPLAIH

SEQ ID NO: 62983 - protein, 747 aa, Homo sapiens
MSDYSTGGPPPGPPPPAGGGGGAGGAGGGPPPGPPGAGDRGGGGPGGGGPGGGSAGGPSQPPGGGGPGIRKDAFADAVQRARQIAAKIGGDAATTVNNSTPDFGFGGQKRQLEDGDQPESKKLASQGDSISSQLGPIHPPPRTSMTEEYRVPDGMVGLIIGRGGEQINKIQQDSGCKVQISPDSGGLPERSVSLTGAPESVQKAKMMLDDIVSRGRGGPPGQFHDNANGGQNGTVQEIMIPAGKAGLVIGKGGETIKQLQERAGVKMILIQDGSQNTNVDKPLRIIGDPYKVQQACEMVMDILRERDQGGFGDRNEYGSRIGGGIDVPVPRHSVGVVIGRSGEMIKKIQNDAGVRIQFKQDDGTGPEKIAHIMGPPDRCEHAARIINDLLQSLRSGPPGPPGGPGMPPGGRGRGRGQGNWGPPGGEMTFSIPTHKCGLVIGRGGENVKAINQQTGAFVEISRQLPPNGDPNFKLFIIRGSPQQIDHAKQLIEEKIEGPLCPVGPGPGGPGPAGPMGPFNPGPFNQGPPGAPPHAGGPPPHQYPPQGWGNTYPQWQPPAPHDPSKAAAAAADPNAAWAAYYSHYYQQPPGPVPGPAPAPAAPPAQGEPPQPPPTGQSDYTKAWEEYYKKIGQQPQQPGAPPQQDYTKAWEEYYKKQAQVATGGGPGAPPGSQPDYSAAWAEYYRQQAAYYGQTPGPGGPQPPPTQQGQQQASGNCHPPPPPFSFQPPATVHPALVGSAGNPFPCGVCP

SEQ ID NO: 62984 - protein, 125 aa, Homo sapiens
MFPVAGGIRPPQGLMPMQQQGFPMVSVMQPNMQGIMGMNYSSQMSQGPIAMQAGIPMGPMPAAGMPYLGQAPFLGMRPPGPQYTPDMQKQFAEEQQKRFEQQQKLLEEERKRRQFEEQKQKLRLL

SEQ ID NO: 62985 - protein, 96 aa, Homo sapiens
MKKTQEISKGKRKEDSLTASQRKQSSGGQKSESKMSAGPHLPLKAPRENPCFPLPAAGGSRYYLAYGSITPISAFVFVVFFSVFFPSFYEDFCCWI

SEQ ID NO: 62986 - protein, 172 aa, Homo sapiens
MEDFNMESDSFEDFWKGEDLSNYSYSSTLPPFLLDAAPCEPESLEINKYFVVIIYALVFLLSLLGNSLVMLVILYSRVGRSVTDVYLLNLALADLLFALTLPIWAASKVNGWIFGTFLCKVVSLLKEVNFYSGILLLACISVDRYLAIVHATRTLTQKRYLVKFICLSIWGL

SEQ ID NO: 62987 - protein, 1014 aa, Homo sapiens
MPTAESEAKVKTKVRFEELLKTHSDLMREKKKLKKKLVRSEENISPDTIRSNLHYMKETTSDDPDTIRSNLPHIKETTSDDVSAANTNNLKKSTRVTKNKLRNTQLATENPNGDASVEEDKQGKPNKKVIKTVPQLTTQDLKPETPENKVDSTHQKTHTKPQPGVDHQKSEKANEGREETDLEEDEELMQAYQCHVTEEMAKEIKRKIRKKLKEQLTYFPSDTLFHDDKLSSEKRKKKKEVPVFSKAETSTLTISGDTVEGEQKKESSVRSVSSDSHQDDEISSMEQSTEDSMQDDTKPKPKKTKKKTKAVADNNEDVDGDGVHEITSRDSPVYPKCLLDDDLVLGVYIHRTDRLKSDFMISHPMVKIHVVDEHTGQYVKKDDSGRPVSSYYEKENVDYILPIMTQPYDFKQLKSRLPEWEEQIVFNENFPYLLRGSDESPKVILFFEILDFLSVDEIKNNSEVQNQECGFRKIAWAFLKLLGANGNANINSKLRLQLYYPPTKPRSPLSVVEAFEWWSKCPRNHYPSTLYVTVRGLKVPDCIKPSYRSMMALQEEKGKPVHCERHHESSSVDTEPGLEESKEVIKWKRLPGQACRIPNKHLFSLNAGERGCFCLDFSHNGRILAAACASRDGYPIILYEIPSGRFMRELCGHLNIIYDLSWSKDDHYILTSSSDGTARIWKNEINNTNTFRVLPHPSFVYTAKFHPAVRELVVTGCYDSMIRIWKVEMREDSAILVRQFDVHKSFINSLCFDTEGHHMYSGDCTGVIVVWNTYVKINDLEHSVHHWTINKEIKETEFKGIPISYLEIHPNGKRLLIHTKDSTLRIMDLRILVARKFVGAANYREKIHSTLTPCGTFLFAGSEDGIVYVWNPETGEQVAMYSDLPFKSPIRDISYHPFENMVAFCAFGQNEPILLYIYDFHVAQQEAEMFKRYNGTFPLPGIHQSQDALCTCPKLPHQGSFQIDEFVHTESSSTKMQLVKQRLETVTLESHSVAQAGVQWRNLGSLQPPPPRFK

SEQ ID NO: 62988 - protein, 211 aa, Homo sapiens
MEVHGKPKASPSCSSPTRDSSGVPVSKELLTAGSDGRGGIWDRLLINSQPKSRKTSTLQTVRIERSPLLDQVQTFLPQMARANEKLRKEMAAAPPGRFNIENIDGPHSKVIQMDVALFEMNQSDSKEVDSSEESSQDSSENSSESEDEDDSIPSEVTIDNIKLPNSEGGKVETGFHRVSQDGLNLLTSCSTLLDLPKCWDYRHEPPCPAGN

SEQ ID NO: 62989 - protein, 384 aa, Homo sapiens
MAIAYLGSSCPSQPPSSLALSLSPTPSDFEQESGIETAMRFSPDVALAVSTTPAVLPTTNIQPVGTPFEELPSERPTLEPATSPLVVTEVPEEPSQRATTVSTTMATTAATSTGDPTVATVPATVATATPSTPAAPPFTATTAVIRTTGVRRLLPLPLTTVATARATTPEAPSPPTTAAVLDTEAPTPRLVSTATSRPRALPRPATTQEPDIPERSTLPLGTTAPGPTEVAQTPTPETFLTTIRDEPEVPVSGGPSGDFELPEEETTQPDTANEVVAVGGAAAKASSPPGTLPKGARPGPGLLDNAIDSGSSAAQLPQKSILERKEVLVAVIVGGVVGALFAAFLVTLLIYRMKKKDEGSYTLEEPKQASVTYQKPDKQEEFYA

SEQ ID NO: 62990 - protein, 137 aa, Homo sapiens
MRLPWELLVLQSFILCLAGSQTDFWSLLGVLPALEADDSTLHGPIFIQEPSPVMFPLDSEEKKVKLNCEVKGNPKPHIRWKLNGTDVDTGMDFRYSVVEGSLLINNPNKTQDAGTYQCTATNSFGTIVSREAKLQFA

SEQ ID NO: 62991 - protein, 447 aa, Homo sapiens
MDHAEENEILAATQRYYVERPIFSHPVLQERLHTKDKVPDSIADKLKQAFTCTPKKIRNIIYMFLPITKWLPAYKFKEYVLGDLVSGISTGVLQLPQGLAFAMLAAVPPIFGLYSSFYPVIMYCFLGTSRHISIGPFAVISLMIGGVAVRLVPDDIVIPGGVNATNGTEARDALRVKVAMSVTLLSGIIQFCLGVCRFGFVAIYLTEPLVRGFTTAAAVHVFTSMLKYLFGVKTKRYSGIFSVVYSTVAVLQNVKNLNVCSLGVGLMVFGLLLGGKEFNERFKEKLPAPIPLEFFAVVMGTGISAGFNLKESYNVDVVGTLPLGLLPPANPDTSLFHLVYVDAIAIAIVGFSVTISMAKTLANKHGYQVDGNQELIALGLCNSIGSLFQTFSISCSLSRSLVQEGTGGKTQTIWLTTFVSSLFLGLDYGLITAVIIALLTVIYRTQR

SEQ ID NO: 62992 - protein, 132 aa, Homo sapiens
MLCSQPGLANSSRVRGRVGTIRPVRCPSSSLHMSQRERTWPPPAMSPYWRTWMTITQSWQVSVRVQPRGRAHLLPNPYQQDFLGLPEELRRLSGLSSVGHNWRKRMGTRRGRHEQSPTSRPRKVSSLPPRSC

SEQ ID NO: 62993 - protein, 63 aa, Homo sapiens
MLQFPHISQCEELRLSLERDYHSLCERQPIGRLLFREFCATRPELSRCVAFLDGVAEYEVTPD

SEQ ID NO: 62994 - protein, 83 aa, Homo sapiens
MLRLPTVFRQMRPVSRVLAPHLTRAYAKDVKFGADARALMLQGVDLLADAVAVTMGPKGRTVIIEQSWGSPKVTKDGVTVAKS

SEQ ID NO: 62995 - protein, 741 aa, Homo sapiens
MPTSARCDDLEALKKKGCPPDDIENPRGSKDIKKNKNVTNRSKGTAEKLKPEDITQIQPQQLVLRLRSGEPQTFTLKFKRAEDYPIDLYYLMDLSYSMKDDLENVKSLGTDLMNEMRRITSDFRIGFGSFVEKTVMPYISTTPAKLRNPCTSEQNCTSPFSYKNVLSLTNKGEVFNELVGKQRISGNLDSPEGGFDAIMQVAVCGSLIGWRNVTRLLVFSTDAGFHFAGDGKLGGIVLPNDGQCHLENNMYTMSHYYDYPSIAHLVQKLSENNIQTIFAVTEEFQPVYKELKNLIPKSAVGTLSANSSNVIQLIIDAYNSLSSEVILENGKLSEGVTISYKSYCKNGVNGTGENGRKCSNISIGDEVQFEISITSNKCPKKDSDSFKIRPLGFTEEVEVILQYICECECQSEGIPESPKCHEGNGTFECGACRCNEGRVGRHCECSTDEVNSEDMDAYCRKENSSEICSNNGECVCGQCVCRKRDNTNEIYSGKFCECDNFNCDRSNGLICGGNGVCKCRVCECNPNYTGSACDCSLDTSTCEASNGQICNGRGICECGVCKCTDPKFQGQTCEMCQTCLGVCAEHKECVQCRAFNKGEKKDTCTQECSYFNITKVESRDKLPQPVQPDPVSHCKEKDVDDCWFYFTYSVNGNNEVMVHVVENPECPTGPDIIPIVAGVVAGIVLIGLALLLIWKLLMIIHDRREFAKFEKEKMNAKWDTGENPIYKSAVTTVVNPKYEGK

SEQ ID NO: 62996 - protein, 182 aa, Homo sapiens
MAWPCISRLCCLARRWNQLDRSDVAVPLTLHGYSDLDSEEPGTGGAASRRGQPPAGARDSGRDVPLTQYQRDFGLWTTPAGPKDPPPGRGPGAGGRRGKSSAQSSAPPAPGARGVYVLPIGDADAAAAVTTSYRQEFQAWTGVKPSRSTKTKPARVITTHTSGWDSSPGAGFQASAPRILNV

SEQ ID NO: 62997 - protein, 339 aa, Homo sapiens
METRSPGLNNMKPQSLQLVLEEQVLALQQQMAENQAASWRKLKNSQEAQQRQATLVRKLQAKVLQYRSWCQELEKRLEATGGPIPQRWENVEEPNLDELLVRLEEEQQRCESLAEVNTQLRLHMEKADVVNKALREDVEKLTVDWSRARDELMRKESQWQMEQEFFKGYLKGEHGRLLSLWREVVTFRRHFLEMKSATDRDLMELKAEHVRLSGSLLTCCLRLTVGAQSREPNGSGRMDGREPAQLLLLLAKTQELEKEAHERSQELIQLKSQGDLEKAELQDRVTELSALLTQSQKQNEDYEKMIKALRETVEILVHDPLLWKGVGRGLVGSLCFMDR

SEQ ID NO: 62998 - protein, 188 aa, Homo sapiens
MNGPADGEVDYKKKYRNLKRKLKFLIYEHECFQEELRKAQRKLLKVSRDKSFLLDRLLQYENVDEDSSDSDATASSDNSETEGTPKLSDTPAPKRKRSPPLGGAPSPSSLSLPPSTGFPLQASGVPSPYLSSLASSRYPPFPSDYLALQLPEPSPLRPKREKRPRLPRKLKTLVVREQTERWSELGRE

SEQ ID NO: 62999 - protein, 438 aa, Homo sapiens
MSLTVVSMACVGFFLLQGAWPLMGGQDKPFLSARPSTVVPRGGHVALQCHYRRGFNNFMLYKEDRSHVPIFHGRIFQESFIMGPVTPAHAGTYRCRGSRPHSLTGWSAPSNPLVIMVTGNHRKPSLLAHPGPLLKSGETVILQCWSDVMFEHFFLHRDGISEDPSRLVGQIHDGVSKANFSIGPLMPVLAGTYRCYGSVPHSPYQLSAPSDPLDIVITGLYEKPSLSAQPGPTVQAGENVTLSCSSWSSYDIYHLSREGEAHERRLRAVPKVNRTFQADFPLGPATHGGTYRCFGSFRALPCVWSNSSDPLLVSVTGICRHLHVLIGTSVVIFLFILLLFFLLYRWCSNKKNAAVMDQEPAGDRTVNRQDSDEQDPQEVTYAQLDHCVFIQRKISRPSQRPKTPLTDTSVYTELPNAEPRSKVVSCPRAPQSGLEGVF

SEQ ID NO: 63000 - protein, 189 aa, Homo sapiens
  MOD_RES (1)..(1): Any amino acid
XGKTRTRKQVSSHIQVLARRKAREIQAKLKTGAELGTCGREDQAAKDKALQSMAAMSSAQIISATAFHSSMALARGPGRPAVSGFWQGALPGQAGTSHDVKPFSQQTYAVQPPLPLPGFESPAGPAPSPSAPPAPPWQGRSVASSKLWMLEFSAFLEQQQDPDTYNKHLFVHIGQSSPSYSDPYLEAVD

SEQ ID NO: 63001 - protein, 566 aa, Homo sapiens
MQWSSERGERLLTPGACSSEVPSAVPSRSGGTSAAMSKPHSEAGTAFIQTQQLHAAMADTFLEHMCRLDIDSPPITARNTGIICTIGPASRSVETLKEMIKSGMNVARLNFSHGTHEYHAETIKNVRTATESFASDPILYRPVAVALDTKGPEIRTGLIKGSGTAEVELKKGATLKITLDNAYMEKCDENILWLDYKNICKVVEVGSKIYVDDGLISLQVKQKGADFLVTEVENGGSLGSKKGVNLPGAAVDLPAVSEKDIQDLKFGVEQDVDMVFASFIRKASDVHEVRKVLGEKGKNIKIISKIENHEGVRRFDEILEASDGIMVARGDLGIEIPAEKVFLAQKMMIGRCNRAGKPVICATQMLESMIKKPRPTRAEGSDVANAVLDGADCIMLSGETAKGDYPLEAVRMQHLIAREAEAAMFHRKLFEELVRASSHSTDLMEAMAMGSVEASYKCLAAALIVLTESGRSAHQVARYRPRAPIIAVTRNPQTARQAHLYRGIFPVLCKDPVQEAWAEDVDLRVNFAMNVGKARGFFKKGDVVIVLTGWRPGSGFTNTMRVVPVP

SEQ ID NO: 63002 - protein, 84 aa, Homo sapiens
MTPQSLLQTTLFLLSLLFLVQGAHGRGHREDFRFCSQRNQTHRSSLHYKPTPDLRISIENSEEALTVHAPFPAAHPASRSFPDP

SEQ ID NO: 63003 - protein, 148 aa, Homo sapiens
MREIVHIQAGQCGNQIGAKFWEVISDEHGIDPSGNYVGDSDLQLERISVYYNEASSHKYVPRAILVDLEPGTMDSVRSGAFGHLFRPDNFIFAHPAGRCQLASSPQLPGILGWLFGLLALPVGRKVCWSRRADPFTQDPLRRQSLALL

SEQ ID NO: 63004 - protein, 35 aa, Homo sapiens
MAASGKTSKSEPNHVIFKKISRDKSMVSCWLILIL

SEQ ID NO: 63005 - protein, 1119 aa, Homo sapiens
MCGPAMFPAGPPWPRVRVVQVLWALLAVLLASWRLWAIKDFQECTWQVVLNEFKRVGESGVSDSFFEQEPVDTVSSLFHMLVDSPIDPSEKYLGFPYYLKINYSCEEKPSEDLVRMGHLTGLKPLVLVTFQSPVNFYRWKIEQLQIQMEAAPFRSKEPCMAEEVCSMSWYTPMPIKKGSVVMRVDISSNGLGTFIPDKRFQMNINGFLKRDRDNNIQFTVGEELFNLMPQYFVGVSSRPLWHTVDQSPVLILGGIPNEKYVLMTDTSFKDFSLVELSIDSCWVGSFYCPHSGFTATIYDTIATESTLFIRQNQLVYYFTGTYTTLYERNRGSGSWIRVLASECIKKLCPVYFHSNGSEYIMALTTGKHEGYVHFGTIRDGQVSFEMLPRQWSVCEQIGASDDLELLYHIPEFIPEARGLEFLMILGTESYTSTAMAPKGIFCNPYNNLIFIWGNFLLQSSNKENFIYLADFPKELSIKYMARSFRGAVAIVTETEEIWYLLEGSYRVYQLFPSKGWQVHISLKLMQQSSLYASNETMLTLFYEDSKLYQLVYLMNNQKGQLVKRLVPVEQLLMYQQHTSHYDLERKGGYLMLSFIDFCPFSVMRLRSLPSPQRYTRQERYRARPPRVLERSGFHNENSLAIYQGLVYYLLWLHSVYDKPYADPVHDPTWRWWANNKQDQDYYFFLASNWRSAGGVSIEMDSYEKIYNLESAYELPERIFLDKGTEYSFAIFLSAQGHSFRTQSELGTAFQLHSQVDVGVVLADPGCIEASVKQEVLINRNSVLFSITLKDKKLCYDQGISGHHLMETSMTVNVVGSSGLCFQETHLGPHMQGNLMVPVFIGCPPGKRLAFDITYTLEYSRLKNKHYFDCVNVNPEMPCFLFRDIFYPFFLIQDLVTGDSGSFQGSYVLLVVGGGPTLDSLKDYSEDEIYRFNSPLDKTNSLIWTTRTTRTTKDSAFHIMSHESPGIEWLCLENAPCYDNVPQGIFAPEFFFKVLVSNRGVDTSTYCNYQLTFLLHIHGLPLSPKRALFIIMVSASVFVGLVIFYIAFCLLWPLVVKGCTMIRWKINNLIASESYYTYASISGISSMPSLRHSRMGSMFSSRMTEDRAEPKEAVERQLMT

SEQ ID NO: 63006 - protein, 58 aa, Homo sapiens
MRRFLLLYATQQGQAKAIAEEICEQAVVHGFSADLHCISESDKVSVIQNTPTFAMGGR

SEQ ID NO: 63007 - protein, 84 aa, Homo sapiens
MDHLESFIAECDRRTELAKKRLAETQEEISAEVSAKAEKVHELNEEIGKLLAKAEQLGAEGNVDESQKILMEVEKVRAKKKEAE

SEQ ID NO: 63008 - protein, 194 aa, Homo sapiens
MEGGAAAATPTALPYYVAFSQLLGLTLVAMTGAWLGLYRGGIAWESDLQFNAHPLCMVIGLIFLQGNALLVYRVFRNEAKRTTKVLHGLLHIFALVIALVGEFPGAAFPATCLPLQAWWRCSTTTGRRATLTCTAYTAGAGSLSLSCTLCSGWWASASSCSPELHSPCGAATAHSTSSLVLPSSSFPWAPPCWA

SEQ ID NO: 63009 - protein, 710 aa, Homo sapiens
MDSARHHISHSTSAGPIPSQKEEEMTESQGTVTFKDVAIDFTQEEWKRLDPAQRKLYRNVMLENYNNLITVGYPFTKPDVIFKLEQEEEPWVMEEEVLRRHWQGEIWGVDEHQKNQDRLLRQVEVKFQKTLTEEKGNECQKKFANVFPLNSDFFPSRHNLYEYDLFGKCLEHNFDCHNNVKCLMRKEHCEYNEPVKSYGNSSSHFVITPFKCNHCGKGFNQTLDLIRHLRIHTGEKPYECSNCRKAFSHKEKLIKHYKIHSREQSYKCNECGKAFIKMSNLIRHQRIHTGEKPYACKECEKSFSQKSNLIDHEKIHTGEKPYECNECGKAFSQKQSLIAHQKVHTGEKPYACNECGKAFPRIASLALHMRSHTGEKPYKCDKCGKAFSQFSMLIIHVRIHTGEKPYECNECGKAFSQSSALTVHMRSHTGEKPYECKECRKAFSHKKNFITHQKIHTREKPYECNECGKAFIQMSNLVRHQRIHTGEKPYICKECGKAFSQKSNLIAHEKIHSGEKPYECNECGKAFSQKQNFITHQKVHTGEKPYDCNECGKAFSQIASLTLHLRSHTGEKPYECDKCGKAFSQCSLLNLHMRSHTGEKPYVCNECGKAFSQRTSLIVHMRGHTGEKPYECNKCGKAFSQSSSLTIHIRGHTGEKPFDCSKCGKAFSQISSLTLHMRKHTGEKPYHCIECGKAFSQKSHLVRHQRIHTH

SEQ ID NO: 63010 - protein, 446 aa, Homo sapiens
MNTLSLPLNIRRGGSDTNLNFDVPDGILDFHKVKLTADSLKQKILKVTEQIKIEQTSRDGNVAEYLKLVNNADKQQAGRIKQVFEKKNQKSAHSIAQLQKKLEQYHRKLREIEQNGASRSSKDISKDHLKDIHRSLKDAHVKSRTAPHCMESSKSGMPGVSLTPPVFVFNKSREFANLIRNKFGSADNIAHLKNSLEEFRPEASARAYGGSATIVNKPKYGSDDECSSGTSGSADSNGNQSFGAGGASTLDSQGKLAVILEELREIKDTQAQLAEDIEALKVQFKREYGFISQTLQEERYRYERLEDQLHDLTDLHQHETANLKQELASIEEKVAYQAYERSRDIQEALESCQTRISKLELHQQEQQALQTDTVNAKVLLGRCINVILAFMTVILVCVSTIAKFVSPMMKSRCHILGTFFAVTLLAIFCKNWDHILCAIERMIIPR

SEQ ID NO: 63011 - protein, 225 aa, Homo sapiens
MEFPDLGAHCSEPSCQRLDFLPLKCDACSGIFCADHVAYAQHHCGSAYQKDIQVPVCPLCNVPVPVARGEPPDRAVGEHIDRDCRSDPAQQKRKIFTNKCERAGCRQREMMKLTCERCSRNFCIKHRHPLDHDCSGEGHPTSRAGLAAISRAQAVASTSTVPSPSQTMPSCTSPSRATTRSPSWTAPPVIALQNGLVSWAEVGWTETNTQRVKSKDAGLLSPFVE

SEQ ID NO: 63012 - protein, 142 aa, Homo sapiens
KKTSYLTELIDRYKRWKAEQSHDDSSSEDSDAETDGQASGGSDSGDWIFTIREKDPKNLENGALQPSDLDRNKMKDIPKRPFSQCLSTIISPLFAELKEKSQACGGNLGSIEELRGAIYLAEEACPGISDTMVAQLVQRLQR

SEQ ID NO: 63013 - protein, 1679 aa, Homo sapiens
MSTPDPPLGGTPRPGPSPGPGPSPGAMLGPSPGPSPGSAHSMMGPSPGPPSAGHPIPTQGPGGYPQDNMHQMHKPMESMHEKGMSDDPRYNQMKGMGMRSGGHAGMGPPPSPMDQHSQGYPSPLGGSEHASSPVPASGPSSGPQMSSGPGGAPLDGADPQALGQQNRGPTPFNQNQLHQLRAQIMAYKMLARGQPLPDHLQMAVQGKRPMPGMQQQMPTLPPPSVSATGPGPGPGPGPGPGPGPAPPNYSRPHGMGGPNMPPPGPSGVPPGMPGQPPGGPPKPWPEGPMANAAAPTSTPQKLIPPQPTGRPSPAPPAVPPAASPVMPPQTQSPGQPAQPAPMVPLHQKQSRITPIQKPRGLDPVEILQEREYRLQARIAHRIQELENLPGSLAGDLRTKATIELKALRLLNFQRQLRQEVVVCMRRDTALETALNAKAYKRSKRQSLREARITEKLEKQQKIEQERKRRQKHQEYLNSILQHAKDFKEYHRSVTGKIQKLTKAVATYHANTEREQKKENERIEKERMRRLMAEDEEGYRKLIDQKKDKRLAYLLQQTDEYVANLTELVRQHKAAQVAKEKKKKKKKKKAENAEGQTPAIGPDGEPLDETSQMSDLPVKVIHVESGKILTGTDAPKAGQLEAWLEMNPGYEVAPRSDSEESGSEEEEEEEEEEQPQAAQPPTLPVEEKKKIPDPDSDDVSEVDARHIIENAKQDVDDEYGVSQALARGLQSYYAVAHAVTERVDKQSALMVNGVLKQYQIKGLEWLVSLYNNNLNGILADEMGLGKTIQTIALITYLMEHKRINGPFLIIVPLSTLSNWAYEFDKWAPSVVKVSYKGSPAARRAFVPQLRSGKFNVLLTTYEYIIKDKHILAKIRWKYMIVDEGHRMKNHHCKLTQVLNTHYVAPRRLLLTGTPLQNKLPELWALLNFLLPTIFKSCSTFEQWFNAPFAMTGEKVDLNEEETILIIRRLHKVLRPFLLRRLKKEVEAQLPEKVEYVIKCDMSALQRVLYRHMQAKGVLLTDGSEKDKKGKGGTKTLMNTIMQLRKICNHPYMFQHIEESFSEHLGFTGGIVQGLDLYRASGKFELLDRILPKLRATNHKVLLFCQMTSLMTIMEDYFAYRGFKYLRLDGTTKAEDRGMLLKTFNEPGSEYFIFLLSTRAGGLGLNLQSADTVIIFDSDWNPHQDLQAQDRAHRIGQQNEVRVLRLCTVNSVEEKILAAAKYKLNVDQKVIQAGMFDQKSSSHERRAFLQAILEHEEQDESRHCSTGSGSASFAHTAPPPAGVNPDLEEPPLKEEDEVPDDETVNQMIARHEEEFDLFMRMDLDRRREEARNPKRKPRLMEEDELPSWIIKDDAEVERLTCEEEEEKMFGRGSRHRKEVDYSDSLTEKQWLKKITGKDIHDTASSVARGLQFQRGLQFCTRASKAIEEGTLEEIEEEVRQKKSSRKRKRDSDAGSSTPTTSTRSRDKDDESKKQKKRGRPPAEKLSPNPPNLTKKMKKIVDAVIKYKDSSSGRQLSEVFIQLPSRKELPEYYELIRKPVDFKKIKERIRNHKYRSLNDLEKDVMLLCQNAQTFNLEGSLIYEDSIVLQSVFTSVRQKIEKEDDSEGEESEEEEEGEEEGSESESRSVKVKIKLGRKEKAQDRLKGGRRRPSRGSRAKPVVSDDDSEEEQEEDRSGSGSEED

SEQ ID NO: 63014 - protein, 120 aa, Homo sapiens
MMCSRVPSEQSSGTSLLPKDGAPFSWDSLDEDGLDDSLLELSEGEEDDGDVNYTEEEIDALLKEDDPSYEQSSGEDDGGHVEKGERGSQILLDTPREKNSSYSLGPVAETPDLFKLPQLS

SEQ ID NO: 63015 - protein, 112 aa, Homo sapiens
MMEELHSLDPRRQELLEARFTGVGVSKGPLNSESSNQSLCSVGSLSDKEVETPEKKQNDQRNRKRKAEPYETSQATSRTAPLWFRWQCCKGGNGGAVCSANPHVSDASKTSA

SEQ ID NO: 63016 - protein, 210 aa, Homo sapiens
MAVKVQTTKRGDPHELRNIFLQYASTEVDGERYMTPEDFVQRYLGLYNDPNSNPKIVQLLAGVADQTKDGLISYQEFLAFESVLCAPDSMFIVAFQLFDKSGNGEVTFGGVLWPHRWYSSSFQAHSWNRHGGSLGEECQPRSEKMSKKFLDRLLFIIISLLTGIVNLSDCILGITGRSILTTQNSRSFSRSCNWNMQDKPLHSKTKAKVA

SEQ ID NO: 63017 - protein, 1152 aa, Homo sapiens
MSSPMPDCTSKCRSLKHALDVLSVVTKGSENQIKAFLSSHCYNAATIKDVFGRNALHLVSSCGKKGVLDWLIQKGVDLLVKDKESGWTALHRSIFYGHIDCVWSLLKHGVSLYIQDKEGLSALDLVMKDRPTHVVFKNTDPTDVYTWGDNTNFTLGHGSQNSKHHPELVDLFSRSGIYIKQVVLCKFHSVFLSQKGQVYTCGHGPGGRLGHGDEQTCLVPRLVEGLNGHNCSQVAAAKDHTVVLTEDGCVYTFGLNIFHQLGIIPPPSSCNVPRQIQAKYLKGRTIIGVAAGRFHTVLWTREAVYTMGLNGGQLGCLLDPNGEKCVTAPRQVSALHHKDIALSLVAASDGATVCVTTRGDIYLLADYQCKKMASKQLNLKKVLVSGGHMEYKVDPEHLKENGGQKICILAMDGAGRVFCWRSVNSSLKQCRWAYPRQVFISDIALNRNEILFVTQDGEGFRGRWFEEKRKSSEKKEILSNLHNSSSDVSYVSDINSVYERIRLEKLTFAHRAVSVSTDPSGCNFAILQSDPKTRLDGVRFENEKINVIAKNTGNKLKLSQKKCSFLCDVTMKSVDGKEFPCHKCVLCARLEYFHSMLSSSWIEASSCAALEMPIHSDILKVILDYLYTDEAVVIKESQNVDFICSVLVVADQLLITRLKEICEVALTEKLTLKNAAMLLEFAAMYSAKQLKLSCLQFIGLNMAALLEARSLDVLSDGVLKDLSEFYRKMIPAMDRRVITPYQDGPDISYLEVEDGDIFLKEEINMEQNHSETMFKKAKTKAKKKPRKRSDSSGGYNLSDIIQSPSSTGLLKSGKTNSVESLPELLTSDSEGSYAGVGSPRDLQSPDFTTGFHSDKIEAKVKPYVNGTSPVYSREDLKPWEKSPILKISAPQPIPSNRIDTTSSASWVAGSFSPVSPPVVDLRTIMEIEESRQKCGATPKSHLGKTVSHGVKLSQKQRKMIALTTKENNSGMNSMETVLFTPSKAPKPVNAWASSLHSVSSKSFRDFLLEEKKSVTSHSSGDHVKKVSFKGIENSQAPKIVRCSTHGTPGPEGNHISDLPLLDSPNPWLSSSVTAPSMVAPVTFASIVEEELQQEAALIRSREKPLALIQIEEHAIQDLLVFYEAFGNPEEFVIVERTPQGPLAVPMWNKHGC

SEQ ID NO: 63018 - protein, 36 aa, Homo sapiens
MISVKRNTWRALSLVIGDCRKKGNFEYCQDKPHLKN

SEQ ID NO: 63019 - protein, 30 aa, Homo sapiens
HRDCVDPWLMLQQTCPLCKFNVLGNRYSDD

SEQ ID NO: 63020 - protein, 164 aa, Homo sapiens
  MOD_RES (1)..(1): Any amino acid
XTGLWSLAIISWERWMVVCKPFGNVRFDAKLAIVGIAFSWIWAAVWTAPPIFGWSRYWPHGLKTSCGPDVFSGSSYPGVQSYMIVLMVTCCITPLSIIVLCYLQVWLAIRAVAKQQKESESTQKAEKEFRNCILQLFGKKVDDGSELSSASKTEVSSVSSVSPA

SEQ ID NO: 63021 - protein, 264 aa, Homo sapiens
MHLEGRDGRRYPGAPAVELLQTSVPSGLAELVAGKRRLPRGAGGADPSHSCPRGAAGQSSWAPAGQEFASFLTKGRSHSSLPQMSSSRSKDSCFTENTPLLRNSLQEKGSRCIPVYHPEFITAEESWEDSSADWERRYLLSREVSGLSASASSEKGDLLDSPHIRLRLSKLRRCVQWLKVMGLFAFVVLCSILFSLYPDQGKLWQLLALSPLENYSVNLSSHVDSTLLQVDLAGALVASGPSRPGREEHIVVELTQADALGSRW

SEQ ID NO: 63022 - protein, 77 aa, Homo sapiens
MASSSGSKAEFIVGGKYKLVRKIGSGSFGDIYLAINITNGEEVAVKLESQKARHPQLLYESKLYKILQGGVGIPHIR

SEQ ID NO: 63023 - protein, 42 aa, Homo sapiens
MSRTAYTVGALLLLLGTLLPAAEGKKKGSQGAIPPPAKRPCM

SEQ ID NO: 63024 - protein, 67 aa, Homo sapiens
METSASATASEKQEAKSGILEAAGFPDPGKKASPLVVAAAAAAAVAAQGAQPSPSPTPSTPWPTSRF

SEQ ID NO: 63025 - protein, 50 aa, Homo sapiens
MGKESGWDSGRAAVAAVVGGGAAGLSVTSKVIGGFAGTALGAWLGSPPSS

SEQ ID NO: 63026 - protein, 145 aa, Homo sapiens
MRWGQSASGSSVKFTRLPACPAKYLAQIIVMGVQVVGRAFARALRQEFAASRAAADARGRAGHRSAAASNLSGLSLQEAQQILNVSKLSPEEVQKNYEHLFKVNDKSVGGSFYLQSKVVRAKERLDEELKIQAQEDREKGQMPHT

SEQ ID NO: 63027 - protein, 734 aa, Homo sapiens
MDIRHSEFLPCLHCPPFVGPLPVSHVSFSSACPVPLPGSPSLHRGLHPSREEKRDSRMAEEKKLKLSNTVLPSESMKVVAESMGIAQIQEETCQLLTDEVSYRIKEIAQDALKFMHMGKRQKLTTSDIDYALKLKNVEPLYGFHAQEFIPFRFASGGGRELYFYEEKEVDLSDIINTPLPRVPLDVCLKAHWLSIEGCQPAIPENPPPAPKEQQKAEATEPLKSAKPGQEEDGPLKGKGQGATTADGKGKEKKAPPLLEGAPLRLKPRSIHELSVEQQLYYKEITEACVGSCEAKRAEALQSIATDPGLYQMLPRFSTFISEGVRVNVVQNNLALLIYLMRMVKALMDNPTLYLEKYVHELIPAVMTCIVSRQLCLRPDVDNHWALRDFAARLVAQICKHFSTTTNNIQSRITKTFTKSWVDEKTPWTTRYGSIAGLAELGHDVIKTLILPRLQQEGERIRSVLDGPVLSNIDRIGADHVQSLLLKHCAPVLAKLRPPPDNQDAYRAEFGSLGPLLCSQVVKARAQAALQAQQVNRTTLTITQPRPTLTLSQAPQPGPRTPGLLKVPGSIALPVQTLVSARAAAPPQPSPPPTKFIVMSSSSSAPSTQQVLSLSTSAPGSGSTTTSPVTTTVPSVQPIVKLVSTATTAPPSTAPSGPGSVQKYIVVSLPPTGEGKGGPTSHPSPVPPPASSPSPLSGSALCGGKQEAGDSPPPAPGTPKANGSQPNSGSPQPAP

SEQ ID NO: 63028 - protein, 134 aa, Homo sapiens
  MOD_RES (1)..(1): Any amino acid
XMCSLLDNLLTIAPRDTAKAFRQAHLIELLCSIADATLIQTCVQELRALLPSSPPAEHTQAQVSFLLEYLSSLSRLLQSCLLVEPDLVIQDELVKPLITNIIGILTICTKDVLGLENEVCYDTQQSQFSASHQC

SEQ ID NO: 63029 - protein, 32 aa, Homo sapiens
MAVVLPAVVEELLSEMAAAVQESARSTGPRSS

SEQ ID NO: 63030 - protein, 287 aa, Homo sapiens
MAAKSDGGGVGVGFAQLHNLDEAVGSGGEEDGEPGGGGCGGGGDGSEPGESSSMHICHCCNTSSCYWGCRSACLRSLLGRKPRRSAAADGGDQPLQPPAAPGAGRQPPTPSAARPEPPPPQVERPWLDCLWIVLALLVFFGDVGTDLWLALDYYRKGDYVYFGLTLFFVLVPSLLVQSLSFRWFVQDYTGGGLGAVEGLTSRGPPMMGAGYVHGAARGGPGVRVSPTPGAQRLCRLSVWIWQSVIHLLQMGQVWSGQDPLVPSRKRRSRFNHMKLPHLVSSLLPPPI

SEQ ID NO: 63031 - protein, 499 aa, Homo sapiens
MFGDASTSLVVPEKVKTPMKSSKTDLQGSASPSKVEGVHTPRQKRSTPLKERQLSKPLSERTNSSDSERSPDLGHSTQIPRKVVYDQLNQILVSDAALPENVILVNTTDWQGQYVAELLQDQRKPVVCTCSTVEVQAVLSALLTRIQRYCNCNSSMPRPVKVAAVGGQSYLSSILRFFVKSLANKTSDWLGYMRFLIIPLGSHPVAKYLGSVDSKYSSSFLDSGWRDLFSRSEPPVSEQLDVAGRVMQYVNGAATTHQLPVAEAMLTCRHKFPDEDSYQKFIPFIGVVKVGLVEDSPSTAGDGDDSPVVSLTVPSTSPPSSSGLSRDATATPPSSPSMSSALAIVGSPNSPYGDVIGLQVDYWLGHPGERRREGDKRDASSKNTLKSVFRSVQVSRLPHSGEAQLSGTMAMTVVTKEKNKKVPTIFLSKKPREKEVDSKSQVIEGISRLICSAKQQQTMLRVSIDGVEWSDIKFFQLAAQWPTHVKHFPVGLFSGSKAT

SEQ ID NO: 63032 - protein, 483 aa, Homo sapiens
MFVLCNQNKELVSYRAINRPDITDTEMETVMDTIVDSLFCFFVTLGAVPIIRCSRGTAAEMVAVKLDKKLRENLRDARNSLFTGDTLGAGQFSFQRPLLVLVDRNIDLATPLHHTWTYQALVHDVLDFHLNRVNLEESSGVENSPAGARPKRKNKKSYDLTPVDKFWQKHKGSPFPEVAESVQQELESYRAQEDEVKRLKSIMGLEGEDEGAISMLSDNTAKLTSAVSSLPELLEKKRLIDLHTNVATAVLEHIKARKLDVYFEYEEKIMSKTTLDKSLLDIISDPDAGTPEDKMRLFLIYYISTQQAPSEADLEQYKKALTDAGCNLNPLQYIKQWKAFTKMASAPASYGSTTTKPMGLLSRVMNTGSQFVMEGVKNLVLKQQNLPVTRILDNLMEMKSNPETDDYRYFDPKMLRGNDSSVPRNKNPFQEAIVFVVGGGNYIEYQNLVDYIKGKQGKHILYGCSELFNATQFIKQLSQLGQK

SEQ ID NO: 63033 - protein, 362 aa, Homo sapiens
MRVTAPRTLLLLLWGAVALTETWAGSHSMRYFHTSVSRPGRGEPRFISVGYVDGTQFVRFDSDAASPRTEPRAPWIEQEGPEYWDRNTQISKTNTQTYRESLRNLRGYYNQSEAGSHTLQRMYGCDVGPDGRLLRGHDQSAYDGKDYIALNEDLSSWTAADTAAQITQRKWEAARVAEQLRAYLEGTCVEWLRRHLENGKETLQRADPPKTHVTHHPISDHEATLRCWALGFYPAEITLTWQRDGEDQTQDTELVETRPAGDRTFQKWAAVVVPSGEEQRYTCHVQHEGLPKPLTLRWEPSSQSTIPIVGIVAGLAVLAVVVIGAVVATVMCRRKSSGGKGGSYSQAASSDSAQGSDVSLTA

SEQ ID NO: 63034 - protein, 737 aa, Homo sapiens
MSEVLPADSGVDTLAVFMASSGTTDVTNRNSPATPPNTLNLRSSHNELLNAEIKHTETKNSTPPKCRKKYALTNIQAAMGLSDPAAQPLLGNGSANIKLVKNGENQLRKAAEQGQQDPNKNLSPTAVINITSEKLEGKEPHPQDSSSCEILPSQPRRTKSFLNYYADLETSARELEQNRGNHHGTAEEKSQPVQGQASTIIGNGDLLLQKPNRPQSSPEDGQVATVSSSPETKKDHPKTGAKTDCALHRIQNLAPSDEESSWTTLSQDSASPSSPDETDIWSDHSFQTDPDLPPGWKRVSDIAGTYYWHIPTGTTQWERPVSIPADLQGSRKGSLSSVTPSPTPENEDLHAATVNPDPSLKEFEGATLRYASLKLRNAPHPDDDDSCSINSDPEAKCFAVRSLGWVEMAEEDLAPGKSSVAVNNCIRQLSYCKNDIRDTVGIWGEGKDMYLILENDMLSLVDPMDRSVLHSQPIVSIRVWGVGRDNGRDFAYVARDKDTRILKCHVFRCDTPAKAIATSLHEICSKIMAERKNAKALACSSLQERANVNLDVPLQVDFPTPKTELVQKFHVQYLGMLPVDKPVGMDILNSAIENLMTSSNKEDWLSVNMNVADATVTVISEKNEEEVLVECRVRFLSFMGVGKDVHTFAFIMDTGNQRFECHVFWCEPNAGNVSEAVQAACMLRYQKCLVARPPSQKVRPPPPPADSVTRRVTTNVKRGVLSLIDTLKQKRPVTEMP

SEQ ID NO: 63035 - protein, 650 aa, Homo sapiens
MPTLQRDLPKENPYEDVDLKSRRAGRKSQQLSENSLDSLHRMWSPQDRKYNSPPTQLSLKPNSQSLRSGNWSERKSHRLPRLPKRHSHDDMLLLAQLSLPSSPSSLNEDSLSTTSELLSSRRARRIPKLVQRINSIYNAKRGKKRLKKLSMSSIETASLRDENSESESDSDDRFKAHTQRLVHIQSMLKRAPSYRTLELELLEWQERELFEYFVVVSLKKKPSRNTYLPEVSYQFPKLDRPTKQMREAEERLKAIPQFCFPDAKDWLPVSEYSSETFSFMLTGEDGSRRFGYCRRLLPSGKGPRLPEVYCVISRLGCFGLFSKVLDEVERRRGISAALVYPFMRSLMESPFPAPGKTIKVKTFLPGAGNEVLELRRPMDSRLEHVDFECLFTCLSVRQLIRIFASLLLERRVIFVADKLSTLSSCSHAVVALLYPFSWQHTFIPVLPASMIDIVCCPTPFLVGLLSSSLPKLKELPVEEALMVNLGSDRFIRQMDDEDTLLPRKLQAALEQALERKNELISQDSDSDSDDECNTLNGLVSEVFIRFFVETVGHYSLFLTQSEKGERAFQREAFRKSVASKSIRRFLEVFMESQMFAGFIQDRELRKCRAKGLFEQRVEQYLEELPDTEQSGMNKFLRGLGNKMKFLHKKN

SEQ ID NO: 63036 - protein, 672 aa, Homo sapiens
MQFLHKLILNHNPLTTVEDPYLFKLPALKYLDMGTTLVPLTTLKNILMMTVELEKLIVPSHMACCLCQFKNSIEAVCKTVKLHCNSACLTNTTHCPEEASVGNPEGAFMKVLQARKNYTSTELIIEPEEPSDSSGINLSGFGSEQLDTNDESDVTSTLSYILPYFSAVNLDVKSLLLPFIKLPTTGNSLAKIQTVGKNRQRLNRVLMGPRSIQKRHFKEVGRQSIRREQGAQASVENTAEEKRLGSPAPRELKQPHTQQGPEKLAGNAVYTKPSFTQEHKAAVSVLKPFSKGAPSTSSPAKALPQVRDRWKDLTHAISILESAKARVTNMKTSKPIVHSRKKYRFHKTRSRMTHRTPKVKKSPKVRKKSYLSRLMLSNRLPFSAAKSLINSPSQGAFSSLRDLSPQENPFLEVSAPSEHFIENNNTKDTTARNAFEENVFMENTNMPEGTISENTNYNHPPEADSAGTAFNLGPTVKQTETKWEYNNVGTDLSPEPKSFNYPLLSSPGDQFEIQLTQQLQSVIPNNNVRRLIAHVIRTLKMDCSGAHVQVTCAKLVSRTGHLMKLLSGQQEVKASKIEWDTDQWKTENYINESTEAQSEQKEKSLEFTKELPGYGYTKKLILALIVTGILTILIILLCLIEICCHRRSLQEDEEGFSRDSEAPTEEESEALP

SEQ ID NO: 63037 - protein, 106 aa, Homo sapiens
MAVFKTTLWRLISGTLGIICLSLMSTLGILLKNSFTKLSIEPAFTPGPNIELQKDSDCCSCQEKWVGYRCNCYFISSEQKTWNESRHLCASQKSSLLQLQNTDELA

SEQ ID NO: 63038 - protein, 66 aa, Homo sapiens
MKTKLNIYNMQFLLFVFLVWDPARLVLANIQEDEAKNNITIFTRILDRLLDGYDNRLRPGLGGIYN

SEQ ID NO: 63039 - protein, 386 aa, Homo sapiens
MYTEWGDSFGSMSVLIKNPRTHSGGKPYVCRECGRGFTWKSNLITHQRTHSGEKPYVCKDCGRGFTWKSNLFTHQRTHSGLKPYVCKECGQSFSLKSNLITHQRAHTGEKPYVCRECGRGFRQHSHLVRHKRTHSGEKPYICRECEQGFSQKSHLIRHLRTHTGEKPYVCTECGRHFSWKSNLKTHQRTHSGVKPYVCLECGQCFSLKSNLNKHQRSHTGEKPFVCTECGRGFTRKSTLSTHQRTHSGEKPFVCAECGRGFNDKSTLISHQRTHSGEKPFMCRECGRRFRQKPNLFRHKRAHSGAFVCRECGQGFCAKLTLIKHQRAHAGGKPHVCRECGQGFSRQSHLIRHQRTHSGEKPYICRKCGRGFSRKSNLIRHQRTHSG

SEQ ID NO: 63040 - protein, 101 aa, Homo sapiens
MSRSVALAVLALLSLSGLEAIQRTPKIQVYSRHPADIEVDLLKNGERIEKVEHSDLSFSKDWSFYLLYYTEFTPTEKDEYACRVNHVTLSQPKIVKWDRDM

SEQ ID NO: 63041 - protein, 231 aa, Homo sapiens
MTRDDLFNTNATIVATLTAACAQHCPEAMICVIANPVNSTIPITAEVFKKHGVYNPNKIFGVTTLDIVRANTFVAELKGLDPARVNVPVIGGHAGKTIIPLISQCTPKVDFPQDQLTALTGRIQEAGTEVVKAKAGAGSATLSMAYAGARFVFSLVDAMNGKEGVVECSFVKSQETECTYFSTPLLLGKKGIEKNLGIGKVSSFEEKMISDAIPELKASIKKGEDFVKTLK

SEQ ID NO: 63042 - protein, 152 aa, Homo sapiens
MAPKKAKKRAGGANSNVFSMFEQTQIQEFKELGVPECVFPTLGRVNVKNEEIDEMIKEAPGPINFTVFLTMFGEKLKGADPEETILNAFKVFDPEGKGVLKADYVREMLTTQAERFSKEEVDQMFAAFPPDVTGNLDYKNLVHIITHGEEKD

SEQ ID NO: 63043 - protein, 108 aa, Homo sapiens
MTRGNQRELARQKNMKKQSDSVKGKRRDDGLSAAARKQSAITSSRNFLYPAYVYFPSSVPSPPRKYTQTYYAAVPAGWWGSGGGPATQPAAGGRWRFLHILGTQPQSH

SEQ ID NO: 63044 - protein, 123 aa, Homo sapiens
MDHHIPMHALPEEIQKMLPEEKVCKYCGVSYLILHEFKAMEEKVKAMEKEMKFYQGSVDREKRLQEKLHSLSQELEQYKIDNKSKTESKIYFRLMLRLEVEHCQLKERMPDLQHSVTEPYIGL

SEQ ID NO: 63045 - protein, 73 aa, Homo sapiens
MADLANEEKPAIAPPVFVFQKDKGQKRSAGGSSPEGGEDSDREDGNYCPPVKRERTSSLTQFPPSQSGAFQAC

SEQ ID NO: 63046 - protein, 79 aa, Homo sapiens
MPACRLGPLAAALLLSLLLFGFTLVSGTGAEKTGVCPELQADQNCTQECVSDSECADNLKCCSAGCATFCSLPNGQLAE

SEQ ID NO: 63047 - protein, 285 aa, Homo sapiens
MMEAIKKKMQMLKLDKENALDRAEQAEAEQKQAEERSKQLEDELAAMQKKLKGTEDELDKYSEALKDAQEKLELAEKKAADAEAEVASLNRRIQLVEEELDRAQERLATALQKLEEAEKAADESERGMKVIENRALKDEEKMELQEIQLKEAKHIAEEADRKYEEVARKLVIIEGDLERTEERAELAESRCREMDEQIRLMDQNLKCLSAAEEKYSQKEDKYEEEIKILTDKLKEAETRAEFAERSVAKLEKTIDDLEDELYAQKLKYKAISEELDHALNDMTSI

SEQ ID NO: 63048 - protein, 258 aa, Homo sapiens
MMVLQVSAAPRTVALTALLMVLLTSVVQGRATPENYVYQLRQECYAFNGTQRFLERYIYNREEFVRFDSDVGEFRAVTELGRPDEDYWNSQKDLLEEKRAVPDRVCRHNYELDEAVTLQRRVQPKVNVSPSKKGPLQHHNLLVCHVTDFYPGSIQVRWFLNGQEETAGVVSTNLIRNGDWTFQILVMLEMTPQQGDVYICQVEHTSLDSPVTVEWKAQSDSARSKTLTGAGGFVLGLIICGVGIFMHRRSKKVQRGSA

SEQ ID NO: 63049 - protein, 710 aa, Homo sapiens
MDESALTLGTIDVSYLPHSSEYSVGRCKHTSEEWGECGFRPTIFRSATLKWKESLMSRKRPFVGRCCYSCTPQSWDKFFNPSIPSLGLRNVIYINETHTRHRGWLARRLSYVLFIQERDVHKGMFATNVTENVLNSSRVQEAIAEVAAELNPDGSAQQQSKAVNKVKKKAKRILQEMVATVSPAMIRLTGWVLLKLFNSFFWNIQIHKGQLEMVKAATETNLPLLFLPVHRSHIDYLLLTFILFCHNIKAPYIASGNNLNIPIFSTLIHKLGGFFIRRRLDETPDGRKDVLYRALLHGHIVELLRQQQFLEIFLEGTRSRSGKTSCARAGLLSVVVDTLSTNVIPDILIIPVGISYDRIIEGHYNGEQLGKPKKNESLWSVARGVIRMLRKNYGCVRVDFAQPFSLKEYLESQSQKPVSALLSLEQALLPAILPSRPSDAADEGRDTSINESRNATDESLRRRLIANLAEHILFTASKSCAIMSTHIVACLLLYRHRQGIDLSTLVEDFFVMKEEVLARDFDLGFSGNSEDVVMHAIQLLGNCVTITHTSRNDEFFITPSTTVPSVFELNFYSNGVLHVFIMEAIIACSLYAVLNKRGLGGPTSTPPNLISQEQLVRKAASLCYLLSNEGTISLPCQTFYQVCHETVGKFIQYGILTVAEHDDQEDISPSLAEQQWDKKLPEPLSWRSDEEDEDSDFGEEQRDCYLKVLG

SEQ ID NO: 63050 - protein, 114 aa, Homo sapiens
MTSQPVPNETIIVLPSNVINFSQAEKPEPTNQGQDSLKKHLHAEIKVIGVHSSLVGSILSALSALVGFIILSVKQATLNPASLQWNSLSDADLHSAGILPSCAHCCAAVETGLL

SEQ ID NO: 63051 - protein, 1467 aa, Homo sapiens
MRKDTDDIESPKRSIRDSGYIDCWDSERSDSLSPPRHGRDDSFDSLDSFGSRSRQTPSPDVVLRGSSDGRGSDSESDLPHRKLPDVKKDDMSARRTSHGEPKSAVPFNQYLPNKSNQTAYVPAPLRKKKAEREEYRKSWSTATSPLGGERPFSFPETIEEEGSEVGSAGEDNPAGQMNPGWKPSDGGCELPDGSGKEHPSSDGAVVAPAPKSEEKDAAEIQKRKRLEQAGIKVMPAAQRFASQKQLSEEKEAIRDIVLRKENSFLTHQHGNDSEAEGEVVCRLPDLEKDDFAARRARMNQTKPMVPLNQLLYGPYPKKGAEKSDGSKQLSKGISKKRSLEYKRNQGHTEEVKLIVTCNMRAQESEPVEGGLRKVPDLHKDDLAQQRIQGSLAPHREPPSFITLSNITEADLETWERLKVSEKARDGDVQHICASEPSPEIKAETAIRDDFANRKARASKKASSPRQKFVHFGPVTELDQQKWKRLSIGKAGPREDEEEVICHGSKIQMDSVSPVSAATSSLKGHQIFNRQNDCRTMNCGRGDYCRRASWLAPVPESQEEWVCSLGECPRGTEEVTSKQLPQDGKEETESAPRDSERLSKAERSEDSSQPLVCPLASECEASGTEEKLEKMTAPAWSGSGLKGQRKLDDSRKDDMMARRTGMSLRHTGSNPNQFLPVPFAKQQDVEESSKGLPMKDQRYGPRTPVSDDAESTSMFDMRCEEEAAVQPHSRARQEQLQLINNQLREEDDKWQDDLARWKSRRRSVSQDLIKKEEERKKMEKLLAGEDGTSERRKSIKTYREIVQEKERRERELHEAYKNARSQEEAEGILQQYIERFTISEAVLERLEMPKILERSHSTEPNLSSFLNDPNPMKYLRQQSLPPPKFTATVETTIARASVLDTSMSAGSGSPSKTVTPKAVPMLTPKPYSQPKNSQDVLKTFKVDGKVSVNGETVHREEEKERECPTVAPAHSLTKSQMFEGVARVHGSPLELKQDNGSIEINIKKPNSVPQELAATTEKTEPNSQEDKNDGGKSRKGNIELASSEPQHFTTTVTRCSPTVAFVEFPSSPQLKNDVSEEKDQKKPENEMSGKVELVLSQKVVKPKSPEPEATLTFPFLDKMPEANQLHLPNLNSQVDSPSSEKSPVMTPFKFWAWDPEEERRRQEKWQQEQERLLQERYQKEQDKLKEEWEKAQKEVEEEERRYYEEERKIIEDTVVPFTVSSSSADQLSTSSSMTEGSGTMNKIDLGNCQDEKQDRRWKKSFQGDDSDLLLKTRESDRLEEKGSLTEGALAHSGNPVSKGVHEDHQLDTEAGAPHCGTNPQLAQDPSQNQQTSNPTHSSEDVKPKTLPLDKSINHQIESPSERRKKSPREHFQAGPFSPCSPTPPGQSPNRSISGKKLCSSCGLPLGKGAAMIIETLNLYFHIQCFRCGICKGQLGDAVSGTDVRIRNGLLNCNDCYMRSRSAGQPTTL

SEQ ID NO: 63052 - protein, 177 aa, Homo sapiens
MWAPREQLLGWTAEALPAKDSAWPWEEKPRYLGPVTFEDVAVLFTEAEWKRLSLEQRNLYKEVMLENLRNLVSLESKPEVHTCPSCPLAFGSQQFLSQDELHNHPIPGFHAGNQLHPGNPCPEDQPQSQHPSDKNHRGAEAEDQRVEGGVRPLFWILELGSPRSGLLPLDLNLDLWL

SEQ ID NO: 63053 - protein, 634 aa, Homo sapiens
  MOD_RES (1)..(1): Any amino acid
XKSKEAEIKRINKELANIRSKFKGDKALDGYSKKKYVCKLLFIFLLGHDIDFGHMEAVNLLSSNRYTEKQIGYLFISVLVNSNSELIRLINNAIKNDLASRNPTFMGLALHCIASVGSREMAEAFAGEIPKVLVAGDTMDSVKQSAALCLLRLYRTSPDLVPMGDWTSRVVHLLNDQHLGVVTAATSLITTLAQKNPEEFKTSVSLAVSRLSRIVTSASTDLQDYTYYFVPAPWLSVKLLRLLQCYPPPEDPAVRGRLTECLETILNKAQEPPKSKKVQHSNAKNAVLFEAISLIIHHDSEPNLLVRACNQLGQFLQHRETNLRYLALESMCTLASSEFSHEAVKTHIETVINALKTERDVSVRQRAVDLLYAMCDRSNAPQIVAEMLSYLETADYSIREEIVLKVAILAEKYAVDYTWYVDTILNLIRIAGDYVSEEVWYRVIQIVINRDDVQGYAAKTVFEALQAPACHENLVKVGGYILGEFGNLIAGDPRSSPLIQFHLLHSKFHLCSVPTRALLLSTYIKFVNLFPEVKPTIQDVLRSDSQLRNADVELQQRAVEYLRLSTVASTDILATVLEEMPPFPERESSILAKLKKKKGPSTVTDLEDTKRDRSVDVNGGPEPAPASTSAVVCL

SEQ ID NO: 63054 - protein, 243 aa, Homo sapiens
MPKVKSGAIGRRRGRQEQRRELKSAGGLMFNTGIGQHILKNPLIINSIIDKAALRPTDVVLEVGPGTGNMTVKLLEKAKKVVACELDPRLVAELHKRVQGTPVASKLQVLVGDVLKTDLPFFDTCVANLPYQISSPFVFKLLLHRPFFRCAILMFQREFALRLVAKPGDKLYCRLSINTQLLARVDHLMKVGKNNFRPPPKVESSVVRIEPKNPPPPINFQEWDGLVRITFVRKNKTLSAAFK

SEQ ID NO: 63055 - protein, 162 aa, Homo sapiens
MAALTRDPQFQKLQQWYREHRSELNLRRLFDANKDRFNHFSLTLNTNHGHILVDYSKNLVTEDVMRMLVDLAKSRGVEAARERMFNGEKINYTERVRSGDWKGYTGKTITDVINIGIGGSDLGPLMVTEALKPYSSGGPRVWYVSNIDGTHIAKTLAQLNPE

SEQ ID NO: 63056 - protein, 709 aa, Homo sapiens
MGPRIGPAGEVPQVPDKETKATMGTENTPGGKASPDPQDVRPSVFHNIKLFVLCHSLLQLAQLMISGYLKSSISTVEKRFGLSSQTSGLLASFNEVGNTALIVFVSYFGSRVHRPRMIGYGAILVALAGLLMTLPHFISEPYRYDNTSPEDMPQDFKASLCLPTTSAPASAPSNGNCSSYTETQHLSVVGIMFVAQTLLGVGGVPIQPFGISYIDDFAHNSNSPLYLGILFAVTMMGPGLAFGLGSLMLRLYVDINQMPEGGISLTIKDPRWVGAWWLGFLIAAGAVALAAIPYFFFPKEMPKEKRELQFRRKVLAVTDSPARKGKDSPSKQSPGESTKKQDGLVQIAPNLTVIQFIKVFPRVLLQTLRHPIFLLVVLSQVCLSSMAAGMATFLPKFLERQFSITASYANLLIGCLSFPSVIVGIVVGGVLVKRLHLGPVGCGALCLLGMLLCLFFSLPLFFIGCSSHQIAGITHQTSAHPGLELSPSCMEACSCPLDGFNPVCDPSTRVEYITPCHAGCSSWVVQDALDNSQVFYTNCSCVVEGNPVLAGSCDSTCSHLVVPFLLLVSLGSALACLTHTPSFMLILRGVKKEDKTLAVGIQFMFLRILAWMPSPVIHGSAIDTTCVHWALSCGRRAVCRYYNNDLLRNRFIGLQFFFKTGSVICFALVLAVLRQQDKEARTKESRSSPAVEQQLLVSGPGKKPEDSRV

SEQ ID NO: 63057 - protein, 126 aa, Homo sapiens
MATRVRTASIWGPLSFMDVFVDFTWEEWQLLDPAQKCLYRSVMLENYSNLVSLGYQHTKPDIIFKLEQGEELCMVQAQVPNQTCPILKAGKSKAKVLAGLVSGEGLLCASKMTPCCCILWRHSLEN

SEQ ID NO: 63058 - protein, 112 aa, Homo sapiens
MPEAGFQATNAFTECKFTCTSGKCLYLGSLVCNQQNDCGDNSDEENCLLVTEHPPPGIFNSELEFAQIIIIVVVVTVMVVVIVCLLNHYKVSTRSFINRPNQSRRREDGLPQ

SEQ ID NO: 63059 - protein, 171 aa, Homo sapiens
MRALAVLSVTLVMACTEAFFPFISRGKELLWGKPEESRVSSVLEESKRLVDTAMYATMQRNLKKRGILSPAQLLSFSKLPEPTSGVIARAAEIMETSIQAMKRKVNLKTQQSQHPTDALSEDLLSIIANMSGCLPYMLPPKCPNTCLANKYRPITGACNNRDHPRWGASNT

SEQ ID NO: 63060 - protein, 99 aa, Homo sapiens
MEEDILQLQAEATAEVLGEVAQAQKVLRDSVQRLEVQLRSAWLGPAYREFEVLKAHADKQSHILWALTGHVQRQRREMVAQQHRLRQIQERLHTAALPA

SEQ ID NO: 63061 - protein, 306 aa, Homo sapiens
MSSPRAVVQLGKAQPAGEESNQTAQQPSSPAMRRLTVDDFEIGRPLGKGKFGNVYLARLKESHFIVALKVLFKSQIEKEGLEHQLRREIEIQAHLQHPNILRLYNYFHDARRVYLILEYAPRGELYKELQKSEKLDEQRTATIIEELADALTYCHDKKVIHRDIKPENLLLGFRGEVKIADFGWSVHTPSLRRKTMCGTLDYLPPEMIEGRTYDEKVDLWCIGVLCYELLVGYPPFESASHSETYRRILKVDVRFPLSMPLGARDLISRLLRYQPLERLPLAQILKHPWVQAHSRRVLPPCAQMAS

SEQ ID NO: 63062 - protein, 249 aa, Homo sapiens
MAATAAVSPSDYLQPAASTTQDSQPSPLALLAATCSKIGPPAVEAAVTPPAPPQPTPRKLVPIKPAPLPLSPGKNSFGILSSKGNILQIQGSQLSASYPGGQLVFAIQNPTMINKGTRSNANIQYQAVPQIQASNSQTIQVQPNLTNQIQIIPGTNQAIITPSPSSHKPVPIKPAPIQKSSTTTTPVQSGANVVKLTGGGGNVTLTLPVNNLVNASDTGAPTQLLTASCQTGMLNSTRMFLFLAFINVL

SEQ ID NO: 63063 - protein, 367 aa, Homo sapiens
MNRFRVSKFRHTEARPPRREDKQLRIFDPRTKPRASQSTQAHENSRDSRLAWMGTWEHLVSTGFNQMREREVKLWDTRFFSSALASLTLDTSLGCLVPLLDPDSGLLVLAGKGERQLYCYEVVPQQPALSPVTQCVLESVLRGAALVPRQALAVMSCEVLRVLQLSDTAIVPIGYHVPRKAVEFHEDLFPDTAGCVPATDPHSWWAGDNQQVQKVSLNPACRPHPSFTSCLVPPAEPLPDTAQPAVMETPVGDADASEGFSSPPSSLTSPSTPSSLGPSLSSTSGIGTSPSLRSLQSLLGPSSKFRHAQGTVLHRDSHITNLKGLNLTTPGESDGFCANKLRVAVPLLSSGGQVAVLEMREKRHREV

SEQ ID NO: 63064 - protein, 246 aa, Homo sapiens
MDLLRELKAMPITLHLLQSTRVGMSVNALRKQSSDEEVIALAKSLIKSWKKLLDASDAKARERGRGMPLPTSSRDASEAPDPSRKRPELPRAPSTPRITTFPPVPVTCDAVRNKCREMLTAALQTDHDHVAIGADCERLSAQIEECIFRDVGNTDMKYKNRVRSRISNLKDAKNPDLRRNVLCGAITPQQIAVMTSEEMASDELKEIRKAMTKEAIREHQMARTGGTQTDLFTCGKCRKKNCTYTQ

SEQ ID NO: 63065 - protein, 638 aa, Homo sapiens
MRTTKVYKLVIHKKGFGGSDDELVVNPKVFPHIKLGDIVEIAHPNDEYSPLLLQVKSLKEDLQKETISVDQTVTQVFRLRPYQDVYVNVVDPKDVTLDLVELTFKDQYIGRGDMWRLKKSLVSTCAYITQKVEFAGIRAQAGELWVKNEKVMCGYISEDTRVVFRSTSAMVYIFIQMSCEMWDFDIYGDLYFEKAVNGFLADLFTKWKEKNCSHEVTVVLFSRTFYDAKSVDEFPEINRASIRQDHKGRFYEDFYKVVVQNERREEWTSLLVTIKKLFIQYPVLVRLEQAEGFPQGDNSTSAQGNYLEAINLSFNVFDKHYINRNFDRTGQMSVVITPGVGVFEVDRLLMILTKQRMIDNGIGVDLVCMGEQPLHAVPLFKLHNRSAPRDSRLGDDYNIPHWINHSFYTSKSQLFCNSFTPRIKLAGKKPASEKAKNGRDTSLGSPKESENALPIQVDYDAYDAQVFRLPGPSRAQCLTTCRSVRERESHSRKSASSCDVSSSPSLPSRTLPTEEVRSQASDDSSLGKSANILMIPHPHLHQYEVSSSLGYTSTRDVLENMMEPPQRDSSAPGRFHVGSAESMLHVRPGGYTPQRALINPFAPSRMPMKLTSNRRRWMHTFPVENLAPSGFWLLTKNR

SEQ ID NO: 63066 - protein, 478 aa, Homo sapiens
MEAEEAQRGASPPISAIEEFSIIPEAPMRSSQVSALGLEAQEDEDPSYKWREEHRLSATQQSELRDVCDYAIETMPSFPKEGSADVEPNQESLVAEACDTPEHWEAVPQSLAGRQARTLAPPELWACPIQSEHLDMAPFSSDLGSEEEEVEFWPGLTSLTLGSGQAEEEEETSSDNSGQTRYYSPCEEHPAETNQNEGSESGTIRQGEELPPEELQESQGLLHPQEVQVLEEQGQQEAGFRGEGTLREDVCADGLLGEEQMIEQVNDEKGEQKQKQEQVQDVMLGRQGERMGLTGEPEGLNDGEWEQEDMERKAQGQGGPEQGEERKRELQVPEENRADSQDEKSQTFLGKSEEVTGKQEDHGIKEKGVPVIGQEAKEPESWDGGRLGAVGRARSREEENEHHGPSMPALIAPEDSPHCDLFPGASYLVTQIPGTQTESRAEELSPAALSPSLEPIRCSHQPISLLGSFLTEESPDKE

SEQ ID NO: 63067 - protein, 125 aa, Homo sapiens
  MOD_RES (1)..(1): Any amino acid
XKNETLALPAESKTPEVEKISARPTTVTPETVPRSTKPTTSSALDVSETTLAPKSLPEFPEAKTPFPFEKPRGTLASSEKPWIVPTAKISEDSKVLQPQTALTELQTLILKPVTSPSLEMTESQP

SEQ ID NO: 63068 - protein, 40 aa, Homo sapiens
MAGLQELRFPEEKPLLRGQDATELESSDAFLLAADTDWKA

SEQ ID NO: 63069 - protein, 125 aa, Homo sapiens
MPFTLHLRSRLPSAIRSLILQKKPNIRNTSSMAGELRPASLVVLPRSLAPAFERFCQVNTGPLPLLGQSEPEKWMLPPQGAISETRMGHPQFWKYEFGACTGSLASLEQYSEQLKDMVAFFLGCS

SEQ ID NO: 63070 - protein, 609 aa, Homo sapiens
MLTKFETKSARVKGLSFHPKRPWILTSLHNGVIQLWDYRMCTLIDKFDEHDGPVRGIDFHKQQPLFVSGGDDYKIKVWNYKLRRCLFTLLGHLDYIRTTFFHHEYPWILSASDDQTIRVWNWQSRTCVCVLTGHNHYVMCAQFHPTEDLVVSASLDQTVRVWDISGLRKKNLSPGAVESDVRGITGVDLFGTTDAVVKHVLEGHDRGVNWAAFHPTMPLIVSGADDRQVKIWRMNESKAWEVDTCRGHYNNVSCAVFHPRQELILSNSEDKSIRVWDMSKRTGVQTFRRDHDRFWVLAAHPNLNLFAAGHDGGMIVFKLERERPAYAVHGNMLHYVKDRFLRQLDFNSSKDVAVMQLRSGSKFPVFNMSYNPAENAVLLCTRASNLENSTYDLYTIPKDADSQNPDAPEGKRSSGLTAVWVARNRFAVLDRMHSLLIKNLKNEITKKVQVPNCDEIFYAGTGNLLLRDADSITLFDVQQKRTLASVKISKVKYVIWSADMSHVALLAKHAIVICNRKLDALCNIHENIRVKSGAWDESGVFIYTTSNHIKYAVTTGLLWKQPKHWMTRTAGKSWEKWPCCRGTTRLWKCAISVPKTLTNFPSCILSLAT

SEQ ID NO: 63071 - protein, 348 aa, Homo sapiens
MVVAELEKTLSGCPAVDSVVSLLDGVVEKLSVLKRKAVESIQAEDESAKLCKRRIEHLKEHSSDQPAAASVWKRKRMDRMMVEHLLRCGYYNTAVKLARQSGIEDLVNIEMFLTAKEVEESLERRETATCLAWCHDNKSRLRKMKSCLEFSLRIQEFIELIRQNKRLDAVRHARKHFSQAEGSQLDEVRQAMGMLAFPPDTHISPYKDLLDPARWRMLIQQFRYDNYRLHQLGNNSVFTLTLQAGLSAIKTPQCYKEDGSSKSPDCPVCSRSLNKLAQPLPMAHCANSRLVCKISGDVMNENNPPMMLPNGYVYGYNSLLSIRQDDKVVCPRTKEVFHFSQAEKVYIM

SEQ ID NO: 63072 - protein, 438 aa, Homo sapiens
MAHSPVAVQVPGMQNNIADPEELFTKLERIGKGSFGEVFKGIDNRTQQVVAIKIIDLEEAEDEIEDIQQEITVLSQCDSSYVTKYYGSYLKDHGISRHLKFQQMEVLLHSRKLGSKLWIIMEYLGGGSALDLLRAGPFDEFQIATMLKEILKGLDYLHSEKKIHRDIKAANVLLSEQGDVKLADFGVAGQLTDTQIKRNTFVGTPFWMAPEVIQQSAYDSKADIWSLGITAIELAKGEPPNSDMHPMRVLFLIPKNNPPTLVGDFTKSFKEFIDACLNKDPSFRPTAKELLKHKFIVKNSKKTSYLTELIDRFKRWKAEGHSDDESDSEGSDSESTSRENNTHPEWSFTTVRKKPDPKKVQNGAEQDLVQTLSCLSMIITPAFAELKQQDENNASRNQAIEELEKSIAVAEAACPGITDKMVKKLIEKFQKCSADESP

SEQ ID NO: 63073 - protein, 62 aa, Homo sapiens
MHLEDTTRFCPKEERESEQTSFSDQNPRQDQKGGFRSSFRKLFKKKNGNATGEDFCGPWGWW

SEQ ID NO: 63074 - protein, 240 aa, Homo sapiens
MLSWVPWRRVTGLHGVALPHGLDKIEEAQKELNGAEVSKKEILQAGVKGTSESLKGNLTKHMKSKAHSKKCVDLGVSVGLIDEQDTEESDEKQRFSYERSGYDLEESDGPDEDDNENEDDDEDSQAESVLSATPSVTASPQHLPSRSSLQDPVSTDEDVRITDCFSGVHTDPMDVLPRALLTRMTVLSTAQSDYNRKTLSPGKARQRAARDENDTIPSVDTSRSPCHQMSVDYPESEEIL

SEQ ID NO: 63075 - protein, 196 aa, Homo sapiens
MTQQPLRGVTSLRFNQDQSCFCCAMETGVRIYNVEPLMEKGHLGLCDLCPSLEKQLLVFPGHKCGSLQLVDLASTKPGTSSAPFTINAHQSDIACVSLNQPGTVVASASQKGTLIRLFDTQSKEKLVELRRGTDPATLYCINFSHDSSFLCASSDKGTVHIFALKDTRLNRRSALARVGKVGPMIGQYVDSQWSLA

SEQ ID NO: 63076 - protein, 140 aa, Homo sapiens
MAQGLIEVERKFLPGPGTEERLQELGGTLEYRVTFRDTYYDTPELSLMQADHWLRRREDSGWELKCPGAAGVLGPHTEYKELTAEPTIVAQLCVPAQETAPAKLIVYLQRFRPQDYQRLLEVNSSRERPQETEDPDHCLG

SEQ ID NO: 63077 - protein, 149 aa, Homo sapiens
VRELEAELDAEQKKHAEALKGVRKHERRVKELAYQAEEDRKNLARMQDLVDKLQSKVKSYKRQFEEAEQQANTNLAKYRKAQHELDDAEERADMAETQANKLRARTRDALGPKVRSGRGIALCAGGLWGLTGSTAHSAIPFSSAQGVTA

SEQ ID NO: 63078 - protein, 310 aa, Homo sapiens
MAMEIDSRPGGLPGSSCNLGAAREHMQAVTRNYITHPRVTYRTVCSVNGPLVVLDRVKFAQYAEIVHFTLPDGTQRSGQVLEVAGTKAIVQVFEGTSGIDARKTTCEFTGDILRTPVSEDMLGRVFNGSGKPIDKGPVVMAEDFLDINGQPINPHSRIYPEEMIQTGISPIDVMNSIARGQKIPIFSAAGLPHNEIAAQICRQAGLVKKSKAVLDYHDDNFAIVFAAMGVRRLSRLVNMETARFFKSDFEQNGTMGNVCLFLNLANDPTIERIITPRLALTTAEFLAYQCEKHVLVILTDMSSYAEALRE

SEQ ID NO: 63079 - protein, 105 aa, Homo sapiens
QQLESEIDELYIQYIKHNDSKNIFHAARTPATLFVVIFITYVIAGVTGFIGLDIIASLCNMIMGLTLITLCTWAYIRYSGEYRELGAVIDQVAAALWDQGSTNEI

SEQ ID NO: 63080 - protein, 22 aa, Homo sapiens
MVKLANPLYTEWILEAIQKIKK

SEQ ID NO: 63081 - protein, 15 aa, Homo sapiens
MQPPVPGPLGLLDPA

SEQ ID NO: 63082 - protein, 259 aa, Homo sapiens
MEPNDSTSTAVEEPDSLEVLVKTLDSQTRTFIVGAQMNVKEFKEHIAASVSIPSEKQRLIYQGRVLQDDKKLQEYNVGGKVIHLVERAPPQTHLPSGASSGTGSASATHGGGSPPGTRGPGASVHDRNANSYVMVGTFNLPSDGSAVDVHINMEQAPIQSEPRVRLVMAQHMIRDIQTLLSRMECRGGPQPQHSQPPPQPPAVTPEPVALSSQTSEPVESEAPPREPMEAEEVEERAPAQNPELTPGPAPAGPTPAPET

SEQ ID NO: 63083 - protein, 107 aa, Homo sapiens
MWSGWWLWPLVAVCTADFFRDEAERIMRDSPVIDGHNDLPWQLLDMFNNRLQDERANLTTLAGTHTNIPKLRAGFVGGQFWSVYTPCDTQNKDAVRRTLEQMDVVHR

SEQ ID NO: 63084 - protein, 576 aa, Homo sapiens
  MOD_RES (1)..(1): Any amino acid
XVKGRFAEMEKQRQEEQRKRTEEERKRRIEQDMLEKRKIQRELAKRAEQIEDINNTGTESASEEGDDSLLITVVPVKSYKTSGKMKKNFEDLEKEREEKERIKYEEDKRIRYEEQRPSLKEAKCLSLVMDDEIESEAKKESLSPGKLKLTFEELERQRQENRKKQAEEEARKRLEEEKRAFEEARRQMVNEDEENQDTAKIFKGYRPGKLKLSFEEMERQRREDEKRKAEEEARRRIEEEKKAFAEARRNMVVDDDSPEMYKTISQEFLTPGKLEINFEELLKQKMEEEKRRTEEERKHKLEMEKQEFEQLRQEMGEEEEENETFGLSREYEELIKLKRSGSIQAKNLKSKFEKIGQLSEKEIQKKIEEERARRRAIDLEIKEREAENFHEEDDVDVRPARKSEAPFTHKVNMKARFEQMAKAREEEEQRRIEEQKLLRMQFEQREIDAALQKKREEEEEEEGSIMNGSTAEDEEQTRSGAPWFKKPLKNTSVVDSEPVRFTVKVTGEPKPEITWWFEGEILQDGEDYQYIERGETYCLYLPETFPEDGGEYMCKAVNNKGSAASTCILTIETDDY

SEQ ID NO: 63085 - protein, 277 aa, Homo sapiens
MRYNEKELQALSRQPAEMAAELGMRGPKKGSVLKRRLVKLVVNFLFYFRTDEAEPVGALLLERCRVVREEPGTFSISFIEDPERKYHFECSSEEQCQEWMEALRRASYEFMRRSLIFYRNEIRKVTGKKHQGTHDRPAPHRRACCEPWTAEKYKSKCTCSTCPRRPHSTIAQHMASCVTAQAPSHARAQPTPRRVNSLGVHSAGVKVKSSGQAPGRSGRGSGRGEASEECGGDGPAFGTGAARRGSRPGGVSENGVRRCQRLVSTKRVEAGAGLGTR

SEQ ID NO: 63086 - protein, 224 aa, Homo sapiens
MAQQANVGELLAMLDSPMLGVRDDVTAVFKENLNSDRGPMLVNTLVDYYLETSSQPALHILTTLQEPHDKHLLDRINEYVGKAATRLSILSLLGHVIRLQPSWKHKLSQAPLLPSLLKCLKMDTDVVVLTTGVLVLITMLPMIPQSGKQHLLDFFDIFGRLSSWCLKKPGHVAEVYLVHLHASVYALFHRLYGMYPCNFVSFLRSHYSMKENLETFEEVVKPMM

SEQ ID NO: 63087 - protein, 164 aa, Homo sapiens
MFRNQYDNDVTVWSPQGRIHQIEYAMEAVKQGSATVGLKSKTHAVLVALKRAQSELAAHQKKILHVDNHIGISIAGLTADARLLCNFMRQECLDSRFVFDRPLPVSRLVSLIGSSILFMIWALTFSKPVHLLTILTAEPCPLEPVPNQLVLTWRDICLNLWSVI

SEQ ID NO: 63088 - protein, 93 aa, Homo sapiens
MTLNNVTMRQGTVGMQPQQQRWSIPADGRHLMVQKEPHQYSHRNRHSATPEDHCRRSWSSDSTDSVISSESGNTYYRVVLIGEQGVGKSTLAN

SEQ ID NO: 63089 - protein, 145 aa, Homo sapiens
MFKRHKSLASERKRALLSQRATRFILKDDMRNFHFLSKLVLSAGPLRPTPAVKHSKTTHFEIEIFDAQTRKQICILDKVTQSSTIHDVKQKFHKACPKWYPSRVGLQLECGGPFLKDYITIQSIAASSIVTLYATDLGQQVSWTT

SEQ ID NO: 63090 - protein, 99 aa, Homo sapiens
VGLLYEEGVRKAQSSDSSKRTFSVYSSSRQQGRYAPSYTPSAPMDTNLLSNIQKLFSERIDVFSPVEFNKMTALILYPSLLIWPRRLSASSQLLPSCRC

SEQ ID NO: 63091 - protein, 86 aa, Homo sapiens
MALSCTLNRYLLLMAQEHLEFRLPFASSQETYGKSPFWILSIPSEDIARNLMKRTVCAKSIFELWGHGQSPEELYSSLKNYPVEKM

SEQ ID NO: 63092 - protein, 136 aa, Homo sapiens
  MOD_RES (1)..(1): Any amino acid
XGRDDCLLFEAGTVATLAPEEKEVIKGQYGKLTDAYGCLGELRLKSGGTSLSFLVLVTGCTSVGRIPDAEIYKITATDFYPLQEEAKEEERLIALKKILSSGVFYFSWPNDGSRFDLTVRTQKQGDDSSEWGNSFF

SEQ ID NO: 63093 - protein, 86 aa, Homo sapiens
MCPSLYPRYLLQYQEPIPCEQLVTALCDIKQAYTQFGGKRPFGVSLLYIGWDKHYGFQLYQSDPSGNYGGWKATCIGNNSAWKLQH

SEQ ID NO: 63094 - protein, 149 aa, Homo sapiens
MCCQVCEAVRSGNEEVLADVRTIVNQISYTPQDPRDLCGRILTTCYMASKNSSQETCTRARELAQQIGSHHISLNIDPAVKAVMGIFSLVTGKSPLFAAHGGSSRENLALQNVQARIRMVLAYLFAQLSLWSRGVHGGLLVLGSANVDE

SEQ ID NO: 63095 - protein, 104 aa, Homo sapiens
MGSTWGSPGWVRLALCLTGLVLSLYALHVKAARARDRDYRALCDVGTAISCSRVFSSRAAATELNSWSVVLGSLQREGLSPGAEEVGVAALQLPRAYNHYSQGS

SEQ ID NO: 63096 - protein, 131 aa, Homo sapiens
  MOD_RES (1)..(1): Any amino acid
XEIQNKLLIIKKKAKHKKHKSGKKSVSKKAITKKRKTVIKSPTVPEFQLICTNLDELRELITKIENELKDLENSRKKSVSNVPSISRLPTPSPCHTPASVMLVLSYPSQITVAECSCSLVVRENGIIGGKL

SEQ ID NO: 63097 - protein, 77 aa, Homo sapiens
MGETKIIYHLDGQETPYLVKLPLPAERVTLADFKGVLQRPSYKFFFKSMDDDFGCLPSPLWAVVGVVTGTESLTPAE

SEQ ID NO: 63098 - protein, 171 aa, Homo sapiens
MAGQPGHMPHGGSSNNLCHTLGPVHPPDPQRHPNTLSFRCSLADFQIEKKIGRGQFSEVYKATCLLDRKTVALKKVQIFEMMDAKARQDCVKEIGLLKQLNHPNIIKYLDSFIEDNELNIVLELADAGDLSQMIKYFKKQKRLIPERTVWKYFVQLCSAVEHMHSRRVMHR

SEQ ID NO: 63099 - protein, 312 aa, Homo sapiens
MDEGTGLQPGAGEQLEAPATAEAVQERCEPETLRSKSLPVLSSASCRPSLSPTSGDANPAFGCVDSSGHQELKQGPNPLAPSPSAPSTSAGLGDCNHRVDLSKTFSVSSALAMLQERRCLYVVLTDSRCFLVCMCFLTFIQALMVSGYLSSVITTIERRYSLKSSESGLLVSCFDIGNLVVVVFVSYFGGRGRRPLWLAVGGLLIAFGAALFALPHFISPPYQIQELNASAPNDGLCQGGNSTATLEPPACPKDSGGNNHWVYVALFICAQILIGMGSTPIYTLGPTYLDDNVKKENSSLYLDLLSPCPIGI

SEQ ID NO: 63100 - protein, 552 aa, Homo sapiens
MVYRYCCKLNKKLKSYSLSRKKIVHYTCFDQRKRANAAFLIGAYAVIYLKKTPEEAYRALLSGSNPPYLPFRDASFGNCTYNLTILDCLQGIRKGLQHGFFDFETFDVDEYEHYERVENGDFNWIVPGKFLAFSGPHPKSKIENGYPLHAPEAYFPYFKKHNVTAVVRLNKKIYEAKRFTDAGFEHYDLFFIDGSTPSDNIVRRFLNICENTEGAIAVHCKAGLGRTGTLIACYVMKHYRFTHAEIIAWIRICRPGSIIGPQQHFLEEKQASLWVQGDIFRSKLKNRPSSEGSINKILSGLDDMSIGGNLSKTQNMERFGEDNLEDDDVEMKNGITQGDKLRALKSQRQPRTSPSCAFRSDDTKGHPRAVSQPFRLSSSLQGSAVTLKTSKMALSPSATAKRINRTSLSSGATVRSFSINSRLASSLGNLNAATDDPENKKTSSSSKAGFTASPFTNLLNGSSQPTTRNYPELNNNQYNRSSNSNGGNLNSPPGPHSAKTEEHTTILRPSYTGLSSSSARFLSRSIPCSCLLLVFRKPFLGSPLLSLPISHL

SEQ ID NO: 63101 - protein, 172 aa, Homo sapiens
MSRYLRPPNTSLFVRNVADDTRSEDLRREFGRYGPIVDVYVPLDFYTRRPRGFAYVQFEDVRDAEDALHNLDRKWICGRQIEIQFAQGDRKTPNQMKAKEGRNVYSSSRYDDYDRYRRSRSRSYERRRSRSRSFDYNYRRSYSPRNRPTGRPRRSRSHSDNDSQVSKKKNER

SEQ ID NO: 63102 - protein, 861 aa, Homo sapiens
MRELVNIPLVHILTLVAFSGTEKLPKAPVITTPLETVDALVEEVATFMCAVESYPQPEISWTRNKILIKLFDTRYSIRENGQLLTILSVEDSDDGIYCCTANNGVGGAVESCGALQVKMKPKITRPPINVKIIEGLKAVLPCTTMGNPKPSVSWIKGDSPLRENSRIAVLESGSLRIHNVQKEDAGQYRCVAKNSLGTAYSKVVKLEVEVFARILRAPESHNVTFGSFVTLHCTATGIPVPTITWIENGNAVSSGSIQESVKDRVIDSRLQLFITKPGLYTCIATNKHGEKFSTAKAAATISIAEWSKPQKDNKGYCAQYRGEVCNAVLAKDALVFLNTSYADPEEAQELLVHTAWNELKVVSPVCRPAAEALLCNHIFQECSPGVVPTPIPICREYCLAVKELFCAKEWLVMEEKTHRGLYRSEMHLLSVPECSKLPSMHWDPTACARLPHLAFPPMTSSKPSVDIPNLPSSSSSSFSVSPTYSMTVIISIMSSFAIFVLLTITTLYCCRRRKQWKNKKRESAAVTLTTLPSELLLDRLHPNPMYQRMPLLLNPKLLSLEYPRNNIEYVRDIGEGAFGRVFQARAPGLLPYEPFTMVAVKMLKEEASADMQADFQREAALMAEFDNPNIVKLLGVCAVGKPMCLLFEYMAYGDLNEFLRSMSPHTVCSLSHSDLSMRAQVSSPGPPPLSCAEQLCIARQVAAGMAYLSERKFVHRDLATRNCLVGENMVVKIADFGLSRNIYSADYYKANENDAIPIRWMPPESIFYNRYTTESDVWAYGVVLWEIFSYGLQPYYGMAHEEVIYYVRDGNILSCPENCPVELYNLMRLCWSKLPADRPSFTSIHRILERMCERAEGTVSV

SEQ ID NO: 63103 - protein, 138 aa, Homo sapiens
  MOD_RES (1)..(1): Any amino acid
XWLSYLLLFILDLVICLIACLGLAKRSKCLLASMLCCGALSLLLSWASLAADGSAAVATSDFCVAPDTFILNVTEGQISTEVTRYYLYCSQSGSSPFQQTLTTFQRALTTMQIQVAGLLQFAVPLFSTAETCLQSSSC

SEQ ID NO: 63104 - protein, 719 aa, Homo sapiens
MFRQFYLWTCLASGIILGSLFEICLGQYDDDCKLARGGPPATIVAIDEESRNGTILVDNMLIKGTAGGPDPTIELSLKDNVDYWVLMDPVKQMLFLNSTGRVLDRDPPMNIHSIVVQVQCINKKVGTIIYHEVRIVVRDRNDNSPTFKHESYYATVNELTPVGTTIFTGFSGDNGATDIDDGPNGQIEYVIQYNPDDPTSNDTFEIPLMLTGNIVLRKRLNYEDKTRYFVIIQANDRAQNLNERRTTTTTLTVDVLDGDDLGPMFLPCVLVPNTRDCRPLTYQAAIPELRTPEELNPIIVTPPIQAIDQDRNIQPPSDRPGILYSILVGTPEDYPRFFHMHPRTAELSLLEPVNRDFHQKFDLVIKAEQDNGHPLPAFAGLHIEILDENNQSPYFTMPSYQGYILESAPVGATISDSLNLTSPLRIVALDKDIEDEEPKKIKKPKVEIREPSEEEEVVVTIEKPPAAEPTYTTWKRARIFPMIFKKVRGLADKRGIVDLEGEEWQRRLEEEDKDYLKLTLDQEEATESTVESEEESSSDYTEYSEEESEFSESETTEEESESETPSEEEESSTPESEESESTESEGEKARKNIVLARRRPMVEEVKEVKGRKEEPQEEQKEPKMEEEEHSEEEESGPAPVEESTDPEAQDIPEEGSAESASVEGGVESEEESESGSSSSSSESQSGGPWGYQVPAYDRSKNANQKKSPGANSEGYNTAL

SEQ ID NO: 63105 - protein, 170 aa, Homo sapiens
MAAGGAVAAAPECRLLPYALHKWSSFSSTYLPENILVDKPNDQSSRWSSESNYPPQYLILKLERPAIVQNITFGKYEKTHVCNLKKFKVFGGMNEENMTELLSSGLKNDYNKETFTLKHKIDEQMFPCRFIKIVPLLSWGPSFNFSIWYVELSGIDDPDIVQPCLNWYSK

SEQ ID NO: 63106 - protein, 3112 aa, Homo sapiens
MGRNQRKAPQRLERPGRPASGEQESGSASADGAPSRERRSDRGQADRAKPAAEPATAGGQGTPGGRRKPTAEGNGGCRRPGAGLSPKAQERQSNAQRQGRGPRGGRGGRLEEGSLSGGEELGGRRRRKRKDKGPSARRGRRTPRSLNGDTSGGDGGSSCPDSETREAQESGSQRGTARELRPTPEPTDMGSEGTKTGPESALEPSSDGLDSDWPHADTRGREGSSGTGPLGASEHSGGDSDSSPLGTGPGRGSRAAMASRTFEDSSRAPRDTGPAKDASDNRAQRGAEPETMQASTARAPRHQVGKAVGQVPAAAGEGEAGAAAGAGPEDPAPLAALLVVRRLLARPPPGAASQAVGPRRAGLKERLLSVARALGLLRWLRRRLRLRRRPPEGEGQGTGPRASEGWGRRKPDEGRGHGRGSKGRGRGKADEGRGHERGDEGRGRGKADEGRGHERGYEGRGCGKADEGRGHERGDEGRDHQRGYEGWGREPGLRHRLALRLAGLAGLGGMPRASPGGRSPQVPTSPVPGDPFDQEDETPDPKFAVVFPRIHRAGRASSSRSSEEASADAPTGEGRGWPRAGVGGHSEGCRTSGEGVSGLRRGSLLAPTAPDGPSLDESGSSSEAELETLNDEPPVRWAQGSGPHEGPRLGAAVLLPRLSLETRLQQEGDPGLRGSLRELWEPEDEDEAVLERDLELSLRPGLEAPPFPGAKGRSLGDGLEDMEDLARLRLVCDSSVLLCLKKRFHLGRIYTFGGPVLLVLNPHRSLPLFSPEVQASYHPRKALSTTPHIFAIVASAYDLAQNTGQDPCILLCGHSGSGKTEAAKKIMQFLSSLEQDQTGNRECQVEDMLPILSSFGHAKTILNANASRFGQVFCLYLQQGVIVGASVSHYLLETSRVVFQAQAERSFHVFYKLLAGLDSIERERLSLQGPETYYYLNQGQACRLQGKEDAQDFEGLLKALQGLGLCPEELNAVWAVLAAILQLGNICFSSSERESQEVAAVSSWAEIHTAARLLRVPPECLEGAVTRRVTETPYGQVSRSLPVESAFDARDALAKALYSRLFHRLLRRTNARLAPPGEGGSIGTVTVVDAYGFEALRVNGLEQLCNNLASERLQLFSSQMLLAQEEEECRRELLSWVPVPQPPRESCLDLLVDQPHSLLSILDAQTWLSQATDHTFLQKSHYHHGDHPSYAKPRLPLPVFTVRHYAGTVTYQVHKFLNRNRDQLDPAVVEMLGQSQLQLVGSLFQEAEPQSRGGRGRPTLASRFQQALEDLIARLGRSHVYFIQCLTPNPGKLPGLFDVGHVTEQLHQAAILEAVGTRSANFPVRVPFEAFLASFQALGSEGQEDLSDREKCGAVLSQVLGAESPLYHLGATKVLLQEQGWQRLEELRDQQRSQALVDLHRSFHTCISRQRVLPRMQARMRGFQARSAGVGARAEVGGPVFTHSSNSCWLTVCLIYPWARCWKRYLRRRAALGQLNTILLVAQPLLQRRQRLQLGRWQGWHSSERALERVPSMELGRLEIPAELAVMLKTAESHRDALAGSITECLPPEVPARPSLTLPADIDLFPFSSFVAIGFQEPSLPRPGQPLAKPLTQLDGDNPQRALDINKVMLRLLGDGSLESWQRQIMGAYLVRQGQCRPGLRNELFSQLVAQLWQNPDEQQSQRGWALMAVLLSAFPPLPVLQKPLLKFVSDQAPRGMAALCQHKLLGALEQSQLASGATRAHPPTQLEWLAGWRRGRMALDVFTFSEECYSAEVESWTTGEQLAGWILQSRDAWQDLAGCDFVLDLISQTEDLGDPARPRSYPITPLGSAEAIPLAPGIQAPSLPPGPPPGPAPTLPSRDHTGEVQRSGSLDGFLDQIFQPVISSGLSDLEQSWALSSRMKGGGAIGPTQQGYPMVYPGMIQMPAYQPGMVPAPMPMMPAMGTVPAMPAMVVPPQPPLPSLDAGQLAVQQQNFIQQQALILAQQMTAQAMSLSLEQQMQQRQQQARASEAASQASPSAVTSKPRKPPTPPEKPQRDLGSEGGCLRETSEEAEDRPYQPKSFQQKRNYFQRMGQPQITVRTMKPPAKVHIPQGEAQEEEEEEEEEEEQEEQEVETRAVPSPPPPPIVKKPLKQGGAKAPKEAEAEPAKETAAKGHGQGPAQGRGTVVRSSDSKPKRPQPSREIGNIIRMYQSRPGPVPVPVQPSRPPKAFLRKIDPKDEALAKLGINGAHSSPPMLSPSPGKGPPPAVAPRPKAPLQLGPSSSIKEKQGPLLDLFGQKLPIAHTPPPPPAPPLPLPEDPGTLSAERRCLTQPVEDQGVSTQLLAPSGSVCFSYTGTPWKLFLRKEVFYPRENFSHPYYLRLLCEQILRDTFSESCIRISQNERRKMKDLLGGLEVDLDSLTTTEDSVKKRIVVAARDNWANYFSRFFPVSGESGSDVQLLAVSHRALAHDPGLEVGAGGKVTSVHARSLRSFAEVLGVECRGGSTLELSLKSEQLVLHTARARAIEALVELFLNELKKDSGYVIALRSYITDNCSLLSFHRGDLIKLLPVATLEPGWQFGSAGGRSGLFPADIVQPAAAPDFSFSKEQRSGWHKGQLSNGEPGLARWDRASERPAHPWSQAHSDDSEATSLSSVAYAFLPDSHSYTMQEFARRYFRRSQALLGQTDGGAAGKDTDSLVQYTKAPIQESLLSLSDDVSKLAVASFLALMRFMGDQSKPRGKDEMDLLYELLKLCQQEKLRDEIYCQVIKQVTGHPRPEHCTRGWSFLSLLTGFFPPSTRLMPYLTKFLQDSGPSQELARSSQEHLQRTVKYGGRRRMPPPGEMKAFLVAAEVQEELCRQMGITEPQEVQEFALFLIKEKSQLVRPLQPAEYLNSVVVDQDVSLHSRRLHWETPLHFDNSTYISTHYSQVLWDYLQGKLPVSAKADAQLARLAALQHLSKANRNTPSGQDLLAYVPKQLQRQVNTASIKNLMGQELRRLEGHSPQEAQISFIADLGDQAEQVPGPQQSDFLPAPSPPAEAMSQLPLFGYTVYGVLRVSMQALSGPTLLGLNRQHLILMDPSSQSLYCRIALKSLQRLHLLSPLEEKGPPGLEVNYGSADNPQTIWFELPQAQELLYTTVFLIDSSASCTEWPSIN

SEQ ID NO: 63107 - protein, 322 aa, Homo sapiens
  MOD_RES (1)..(1): Any amino acid
XGPDEDKPPSKSSSSEKTPDKTDQKSGAQFFTLEGRHPDRSVFPDTYFSYKVDEEFATPFKTVATKGLDFDPWSNNRGDDEVFDSKSREDETKPFGLAVEDRSPATTPDTTPARTPTDESTPTSEPNPFPFHEGKMFEMTRSGAIDMSKRDFVEERLQFFQIGPQSPCERTDIRMAIVADHLGLSWTELARELNFSVDEINQIRVENPNSLISQSFMLLKKWVTRDGKNATTDALTSVLTKINRIDIVTLLEGPIFDYGNISGTRSFADENNVFHDPVDGWQNETSSGNLESCAQARRVTGGLLDRLDDSPDQCRDSITSYL

SEQ ID NO: 63108 - protein, 562 aa, Homo sapiens
MHSKVTIICIRFLFWFLLLCMLIGKSHTEDDIIIATKNGKVRGMNLTVFGGTVTAFLGIPYAQPPLGRLRFKKPQSLTKWSDIWNATKYANSCCQNIDQSFPGFHGSEMWNPNTDLSEDCLYLNVWIPAPKPKNATVLIWIYGGGFQTGTSSLHVYDGKFLARVERVIVVSMNYRVGALGFLALPGNPEAPGNMGLFDQQLALQWVQKNIAAFGGNPKSVTLFGESAGAASVSLHLLSPGSHSLFTRAILQSGSFNAPWAVTSLYEARNRTLNLAKLTGCSRENETEIIKCLRNKDPQEILLNEAFVVPYGTPLSVNFGPTVDGDFLTDMPDILLELGQFKKTQILVGVNKDEGTAFLVYGAPGFSKDNNSIITRKEFQEGLKIFFPGVSEFGKESILFHYTDWVDDQRPENYREALGDVVGDYNFICPALEFTKKFSEWGNNAFFYYFEHRSSKLPWPEWMGVMHGYEIEFVFGLPLERRDNYTKAEEILSRSIVKRWANFAKYGNPNETQNNSTSWPVFKSTEQKYLTLNTESTRIMTKLRAQQCRFWTSFFPKVLEMTG

SEQ ID NO: 63109 - protein, 20 aa, Homo sapiens
MNVPFKRLSVVFGEHTLLVT

SEQ ID NO: 63110 - protein, 1656 aa, Homo sapiens
SLPLPSPQPPLPALFPAQGAGPPFPPPPPGRGEDMAAHRPVEWVQAVVSRFDEQLPIKTGQQNTHTKVSTEHNKECLINISKYKFSLVISGLTTILKNVNNMRIFGEAAEKNLYLSQLIILDTLEKCLAGQPKDTMRLDETMLVKQLLPEICHFLHTCREGNQHAAELRNSASGVLFSLSCNNFNAVFSRISTRLQELTVCSEDNVDVHDIELLQYINVDCAKLKRLLKETAFKFKALKKVAQLAVINSLEKAFWNWVENYPDEFTKLYQIPQTDMAECAEKLFDLVDGFAESTKRKAAVWPLQIILLILCPEIIQDISKDVVDENNMNKKLFLDSLRKALAGHGGSRQLTESAAIACVKLCKASTYINWEDNSVIFLLVQSMVVDLKNLLFNPSKPFSRGSQPADVDLMIDCLVSCFRISPHNNQHFKICLAQNSPSTFHYVLVNSLHRIITNSALDWWPKIDAVYCHSVELRNMFGETLHKAVQGCGAHPAIRMAPSLTFKEKVTSLKFKEKPTDLETRSYKYLLLSMVKLIHADPKLLLCNPRKQGPETQGSTAELITGLVQLVPQSHMPEIAQEAMEALLVLHQLDSIDLWNPDAPVETFWEISSQMLFYICKKLTSHQMLSSTEILKWLREILICRNKFLLKNKQADRSSCHFLLFYGVGCDIPSSGNTSQMSMDHEELLRTPGASLRKGKGNSSMDSAAGCSGTPPICRQAQTKLEVALYMFLWNPDTEAVLVAMSCFRHLCEEADIRCGVDEVSVHNLLPNYNTFMEFASVSNMMSTGRAALQKRVMALLRRIEHPTAGNTEAWEDTHAKWEQATKLILNYPKAKMEDGQAAESLHKTIVKRRMSHVSGGGSIDLSDTDSLQEWINMTGFLCALGGVCLQQRSNSGLATYSPPMGPVSERKGSMISVMSSEGNADTPVSKFMDRLLSLMVCNHEKVGLQIRTNVKDLVGLELSPALYPMLFNKLKNTISKFFDSQGQVLLTDTNTQFVEQTIAIMKNLLDNHTEGSSEHLGQASIETMMLNLVRYVRVLGNMVHAIQIKTKLCQLVEVMMARRDDLSFCQEMKFRNKMVEYLTDWVMGTSNQAADDDVKCLTRDLDQASMEAVVSLLAGLPLQPEEGDGVELMEAKSQLFLKYFTLFMNLLNDCSEVEDESAQTGGRKRGMSRRLASLRHCTVLAMSNLLNANVDSGLMHSIGLGYHKDLQTRATFMEVLTKILQQGTEFDTLAETVLADRFERLVELVTMMGDQGELPIAMALANVVPCSQWDELARVLVTLFDSRHLLYQLLWNMFSKEVELADSMQTLFRGNSLASKIMTFCFKVYGATYLQKLLDPLLRIVITSSDWQHVSFEVDPTRLEPSESLEENQRNLLQMTEKFFHAIISSSSEFPPQLRSVCHCLYQVVSQRFPQNSIGAVGSAMFLRFINPAIVSPYEAGILDKKPPPRIERGLKLMSKILQSIANHVLFTKEEHMRPFNDFVKSNFDAARRFFLDIASDCPTSDAVNHSLSFISDGNVLALHRLLWNNQEKIGQYLSSNRDHKAVGRRPFDKMATLLAYLGPPEHKPVADTHWSSLNLTSSKFEEFMTRHQVHEKEEFKALKTLSIFYQAGTSKAGNPIFYYVARRIYYPNIVKGITKHLPRNSYPTLISGFSFPLL

SEQ ID NO: 63111 - protein, 141 aa, Homo sapiens
MEERGDSEPTPGCSGLGPGGVRGFGDGGGAPSWAPEDAWMGTHPKYLEMMELDIGDATQVYVAFLVYLDLMESKSWHEVNCVGLPELQLICLVGTEIEGEGLQTVVPTPITASLSHNRRIYLNLSFPWLRRMKRQETWGTP

SEQ ID NO: 63112 - protein, 611 aa, Homo sapiens
  MOD_RES (1)..(1): Any amino acid
XRQARMDYSFDTTAEDPWVRISDCIKNLFSPIMSENHGHMPLQPNASLNEEEGTQGHPDGTPPKLDTANGTPKVYKSADSSTVKKGPPVAPKPAWFRQSLKGLRNRASDPRGLPDPALSTQPAPASREHLGSHIRASSSSSSIRQRISSFETFGSSQLPDKGAQRLSLQPSSGEAAKPLGKHEEGRFSGLLGRGAAPTLVPQQPEQVLSSGSPAASEARDPGVSESPPPGRQPNQKTLPPGPDPLLRLLSTQAEESQGPVLKMPSQRARSFPLTRSQSCETKLLDEKTSKLYSISSQVSSAVMKSLLCLPSSISCAQTPCIPKEGASPTSSSNEDSAANGSAETSALDTGFSLNLSELREYTEGLTEAKEDDDGDHSSLQSGQSVISLLSSEELKKLIEEVKVLDEATLKQLDGIHVTILHKEEGAGLGFSLAGGADLENKVITVHRVFPNGLASQEGTIQKGNEVLSINGKSLKGTTHHDALAILRQAREPRQAVIVTRKLTPEAMPDLNSSTDSAASASAASDVSVESTEATVCTVTLEKMSAGLGFSLEGGKGSLHGDKPLTINRIFKGVGCVWFFACSPVVGMWPGPQKASGHFLGYVVSHNSMSSS

SEQ ID NO: 63113 - protein, 124 aa, Homo sapiens
MFSLLVRRCTCLLKESAKAQLSSPEDQDDQDDIKVSSFVPDLKELLPSVKVWSDWMLGYPDTWNPPPTSLDLPSHVAVDVWSTLADFCNILTAVNQSEVPLYKDPDDDLTLLILEEDRLLSGFV

SEQ ID NO: 63114 - protein, 388 aa, Homo sapiens
MATAIQNPLKSLGEDFYREAIEHCRSYNARLCAERSLRLPFLDSQTGVAQNNCYIWMEKTHRGPGLAPGQIYTYPARCWRKKRRLNILEDPRLRPCEYKIDCEAPLKKEGGLPEGPVLEALLCAETGEKKIELKEEETIMDCQKQQLLEFPHDLEVEDLEDDIPRRKNRAKGKAYGIGGLRKRQDTASLEDRDKPYVCDICGKRYKNRPGLSYHYTHTHLAEEEGEENAERHALPFHRKNNHKQFYKELAWVPEAQRKHTAKKAPDGTVIPNGYCDFCLGGSKKTGCPEDLISCADCGRSGHPSCLQFTVNMTAAVRTYRWQCIECKSCSLCGTSENDDQLLFCDDCDRGYHMYCLSPPMAEPPEGSWSCHLCLRHLKEKASAYITLT

SEQ ID NO: 63115 - protein, 129 aa, Homo sapiens
MCCNYYGNSCGYGSSYGCGYGSGYGYGYGSSYGCGYGTGYSCGYGCGYGSGYGCGYGSSYGCGYGTGYSCGYGSGYSCGYGSGSGCGYGTGFGCGYGCGYGTGYGCGCGSGSGYCGYRPFCFRRCYSSC

SEQ ID NO: 63116 - protein, 22 aa, Homo sapiens
MTTSSIRRQMKNIVNNYSEAEI

SEQ ID NO: 63117 - protein, 1351 aa, Homo sapiens
MTAEPMSESKLNTLVQKLHDFLAHSSEESEETSSPPRLAMNQNTDKISGSGSNSDMMENSKEEGTSSSEKSKSSGSSRSKRKPSIVTKYVESDDEKPLDDETVNEDASNENSENDITMQSLPKDGLHGIVSCTACGQQVNHFQKDSIYRHPSLQVLICKNCFKYYMSDDISRDSDGMDEQCRWCAEGGNLICCDFCHNAFCKKCILRNLGRKELSTIMDENNQWYCYICHPEPLLDLVTACNSVFENLEQLLQQNKKKIKVDSEKSNKVYEHTSRFSPKKTSSNCNGEEKKLDDSCSGSVTYSYSALIVPKEMIKKAKKLIETTANMNSSYVKFLKQATDNSEISSATKLRQLKAFKSVLADIKKAHLALEEDLNSEFRAMDAVNKEKNTKEHKVIDAKFETKARKGEKPCALEKKDISKSEAKLSRKQVDSEHMHQNVPTEEQRTNKSTGGEHKKSDRKEEPQYEPANTSEDLDMDIVSVPSSVPEDIFENLETAMEVQSSVDHQGDGSSGTEQEVESSSVKLNISSKDNRGGADCQEVPQDKDGYKSCGLNPKLEKCGLGQENSDNEHLVENEVSLLLEESDLRRSPRVKTTPLRRPTETNPVTSNSDEECNETVKEKQKLSVPVRKKDKRNSSDSAIDNPKPNKLPKSKQSETVDQNSDSDEMLAILKEVSRMSHSSSSDTDINEIHTNHKTLYDLKTQAGKDDKGKRKRKSSTSGSDFDTKKGKSAKSSIISKKKRQTQSESSNYDSELEKEIKSMSKIGAARTTKKRIPNTKDFDSSEDEKHSKKGMDNQGHKNLKTSQEGSSDDAERKQERETFSSAEGTVDKDTTIMELRDRLPKKQQASASTDGVDKLSGKEESFTSLEVRKVAETKEKSKHLKTKTCKKVQDGLSDIAEKFLKKDQSDETSEDDKKQSKKGTEEKKKPSDFKKKVIKMEQQYESSSDGTEKLPEREEICHFPKGIKQIKNGTTDGEKKSKKIRDKTSKKKDELSDYAEKSTGKGDSCDSSEDKKSKNGAYGREKKRCKLLGKSSRKRQDCSSSDTEKYSMKEDGCNSSDKRLKRIELRERRNLSSKRNTKEIQSGSSSSDAEESSEDNKKKKQRTSSKKKAVIVKEKKRNSLRTSTKRKQADITSSSSSDIEDDDQNSIGEGSSDEQKIKPVTENLVLSSHTGFCQSSGDEALSKSVPVTVDDDDDDNDPENRIAKKMLLEEIKANLSSDEDGSSDDEPEEGKKRTGKQNEENPGDEEAKNQVNSESDSDSEESKKPRYRHRLLRHKLTVSDGESGEEKKTKPKEHKEVKGRNRRKVSSEDSEDSDFQESGVSEEVSESEDEQRPRTRSAKKAELEENQRSY

SEQ ID NO: 63118 - protein, 268 aa, Homo sapiens
MPSCGACTCGAAAVRLITSSLASAQRGISGGRIHMSVLGRLGTFETQILQRAPLRSFTETPAYFASKDGISKDGSGDGNKKSASEGSSKKSGSGNSGKGGNQLRCPKCGDLCTHVETFVSSTRFVKCEKCHHFFVVLSEADSKKSIIKEPESAAEAVKLAFQQKPPPPPKKIYNYLDKYVVGQSFAKKVLSVAVYNHYKRIYNNIPANLRQQAEVEKQTSLTPRELEIRRREDEYRFTKLLQIAGISPHGNALGASMQQQVKLCWHKP

SEQ ID NO: 63119 - protein, 293 aa, Homo sapiens
MAAGVDCGDGVGARQHVFLVSEYLKDASKKMKNGLMFVKLVNPCSGEGAIYLFNMCLQQLFEVKVFKEKHHSWFINQSVQSGGLLHFATPVDPLFLLLHYLIKADKEGKFQPLDQVVVDNVFPNCILLLKLPGLEKLLHHVTEEKGNPEIDNKKYYKYSKEKTLKWLEKKVNQTVAALKTNNVNVSSRVQSTAFFSGDQASTDKEEDYIRYAHGLISDYIPKELSDDLSKYLKLPEPSASLPNPPSKKIKLSDEPVEAKEDYTKFNTKDLKTEKLGLPTGHFVMAAQRQKRGK

SEQ ID NO: 63120 - protein, 189 aa, Homo sapiens
MGSKKKPKIIQQNKKETSPQVKGEEMPAGKDQEASRGSVPSGSKMDRRAPVPRTKASGTEHNKKGTKERTNGDIVPERGDIEHKKRKAKEAAPAPPTEEDIWFDDVDPADIEAAIGPEAAKIARKQLGQSEGSVSLSLVKEQAFGGLTRALALDCEMVGVGPKGEESMAARVSIVNQYGKCVYDKYVKP

SEQ ID NO: 63121 - protein, 148 aa, Homo sapiens
  MOD_RES (1)..(1): Any amino acid
XDKLEKQEKPVNGEDKGDSGVDTQNSEGNADEEDPLGPNCYYDKTKSFFDNISCDDNRERRPTWAEERRLNAETFGIPLRPNRGRGGYRGRGGLGFRGGRGRGGGRGGTFTAPRGFRGGFRGGRGGREFADFEYRVSVTVNKFFGVDM

SEQ ID NO: 63122 - protein, 96 aa, Homo sapiens
MPKVSGSRDTVSQLLSMLHQGQYQPRPSFRGNKYSRSYRYALQDMDKFSLKDSGRGDSEAGDSDYDLGRDSPIDRLLGEGFSDLFLTDGRIPAVQL

SEQ ID NO: 63123 - protein, 83 aa, Homo sapiens
  MOD_RES (1)..(1): Any amino acid
XFELDSCNGSGKVCLVYKSGKPALAEDTEIWFLDRALYWHFLTDTFTAYYRLLITHLGLPQWQYAFTSYGISPQAKVIKHNRL

SEQ ID NO: 63124 - protein, 195 aa, Homo sapiens
MTGDTDKYLGPQDLKELGDDSLPAEGYMGFSLGARSASLRSFSSDRSYTLNRSSYARDSMMIEELLVPSKEQHLTFTREFDSDSLRHYSWAADTLDNVNLVSSPIHSGFLVSFMVDARGGSMRGSRHHGMRIIIPPRKCTAPTRITCRLVKRHKLANPPPMVEGEGLASRLVEMGPAGAQFLGPVIVEIPHFGSM

SEQ ID NO: 63125 - protein, 169 aa, Homo sapiens
MGAYKYIQELWRKKQSDVMRFLLRVRCWQYRQLSALHRAPRPTRPDKARRLGYKAKQGYVIYRIRVRRGGRKRPVPKGATYGKPVHHGVNQLKFARSLQSVAEERAGRHCGALRVLNSYWVGEDSTYKFFEVILIDPFHKAIRRNPDTQWITKPVHKHREMRGLTSAGR

SEQ ID NO: 63126 - protein, 400 aa, Homo sapiens
MMYGGMRGMKGLVYETSVLDPDEGIRFRGFSIPECQKLLPKAKGGEEPLPEGLFWLLVTGHIPTEEQVSWLSKEWAKRAALPSHVVTMLDNFPTNLHPMSQLSAAVTALNSESNFARAYAQGISRTKYWELIYEDSMDLIAKLPCVAAKIYRNLYREGSGIGAIDSNLDWSHNFTNMLGYTDHQFTELTRLYLTIHSDHEGGNVSAHTSHLVGSALSDPYLSFAAAMNGLAGPLHGLANQEVLVWLTQLQKEVGKDVSDEKLRDYIWNTLNSGRVVPGYGHAVLRKTDPRYTCQREFALKHLPNDPMFKLVAQLYKIVPNVLLEQGKAKNPWPNVDAHSGVLLQYYGMTEMNYYTVLFGVSRALGVLAQLIWSRALGFPLERPKSMSTEGLMKFVDSKSG

SEQ ID NO: 63127 - protein, 235 aa, Homo sapiens
  MOD_RES (1)..(1): Any amino acid
XVSTGADGTVCFWQWDLESLKFSPRPLKFTEKPRPGVQMLCSSFSVGGMFLATGSTDHVIRMYFLGFEAPEKIAELESHTDKVDSIQFCNNGDRFLSGSRDGTARIWRFEQLEWRSILLDMATRISGDLSSEEERFMKPKVTMIAWNQNDSIVVTAVNDHVLKVWNSYTGQLLHNLMGHADEVFVLETHPFDSRIMLSAGHDGSIFIWDITKGTKMKHYFNMIEGQGHGAVFDYS

SEQ ID NO: 63128 - protein, 1441 aa, Homo sapiens
  MOD_RES (1)..(1): Any amino acid
XGRFYFLYGFVWIQDMMERAIIDTFVGHDVVEPGSYVQMFPYPCYTRDDFLFVIEHMMPLCMVISWVYSVAMTIQHIVAEKEHRLKEVMKTMGLNNAVHWVAWFITGFVQLSISVTALTAILKYGQVLMHSHVVIIWLFLAVYAVATIMFCFLVSVLYSKAKLASACGGIIYFLSYVPYMYVAIREEVAHDKITAFEKCIASLMSTTAFGLGSKYFALYEVAGVGIQWHTFSQSPVEGDDFNLLLAVTMLMVDAVVYGILTWYIEAVHPGMYGLPRPWYFPLQKSYWLGSGRTEAWEWSWPWARTPRLSVMEEDQACAMESRRFEETRGMEEEPTHLPLVVCVDKLTKVYKDDKKLALNKLSLNLYENQVVSFLGHNGAGKTTTMSILTGLFPPTSGSATIYGHDIRTEMDEIRKNLGMCPQHNVLFDRLTVEEHLWFYSRLKSMAQEEIRREMDKMIEDLELSNKRHSLVQTLSGGMKRKLSVAIAFVGGSRAIILDEPTAGVDPYARRAIWDLILKYKPGRTILLSTHHMDEADLLGDRIAIISHGKLKCCGSPLFLKGTYGDGYRLTLVKRPAEPGGPQEPGLASSPPGRAPLSSCSELQVSQFIRKHVASCLLVSDTSTELSYILPSEAAKKGAFERLFQHLERSLDALHLSSFGLMDTTLEEVFLKVSEEDQSLENSEADVKESRKDVLPGAEGPASGEGHAGNLARCSELTQSQASLQSASSVGSARGDEGAGYTDVYGDYRPLFDNPQDPDNVSLQEVEAEALSRVGQGSRKLDGGWLKVRQFHGLLVKRFHCARRNSKALFSQILLPAFFVCVAMTVALSVPEIGDLPPLVLSPSQYHNYTQPRGNFIPYANEERREYRLRLSPDASPQQLVSTFRLPSGVGATCVLKSPANGSLGPTLNLSSGESRLLAARFFDSMCLESFTQGLPLSNFVPPPPSPAPSDSPASPDEDLQAWNVSLPPTAGPEMWTSAPSLPRLVREPVRCTCSAQGTGFSCPSSVGGHPPQMRVVTGDILTDITGHNVSEYLLFTSDRFRLHRYGAITFGNVLKSIPASFGTRAPPMVRKIAVRRAAQVFYNNKGYHSMPTYLNSLNNAILRANLPKSKGNPAAYGITVTNHPMNKTSASLSLDYLLQGTDVVIAIFIIVAMSFVPASFVVFLVAEKSTKAKHLQFVSGCNPIIYWLANYVWDMLNYLVPATCCVIILFVFDLPAYTSPTNFPAVLSLFLLYGWSITPIMYPASFWFEVPSSAYVFLIVINLFIGITATVATFLLQLFEHDKDLKVVNSYLKSCFLIFPNYNLGHGLMEMAYNEYINEYYAKIGQFDKMKSPFEWDIVTRGLVAMAVEGVVGFLLTIMCQYNFLRRPQRMPVSTKPVEDDVDVASERQRVLRGDADNDMVKIENLTKVGSGHVGWGLGGVGQGQGGGAPAVEVEPGWAGP

SEQ ID NO: 63129 - protein, 182 aa, Homo sapiens
  MOD_RES (1)..(1): Any amino acid
XFKALFCCFRAQHVGQSSSSTELAAYKEEANTIAKSDLLQCLQYQFYQVRDSGLIPGTCLLPEVTEEDQGRICVVIDLDETLVHSSFKPINNADFIVPIEIEGTTHQVYVLKRPYVDEFLRRMGELFECVLFTASLAKYADPVTDLLDRCGVFRARLFRESCVFHQGCYVKDLSRLGRDLRK

SEQ ID NO: 63130 - protein, 160 aa, Homo sapiens
  MOD_RES (1)..(1): Any amino acid
XEAMRGVTNDLLSIQGNTGPSWINKTERAFFRGRDSREERLQLVQLSKENPQLLDAGITGYFFFQEKEKELGKAKLMGFFDFFKENDEEAKKIAKEGQLMARDLLQPHRLYCYYYQVLQKYAERQSSKPEVRDGMELVPQPEDSTAICQCHRKKPSREEL

SEQ ID NO: 63131 - protein, 188 aa, Homo sapiens
MSRQANRGTESKKMSSELFTLTYGALVTQLCKDYENDEDVNKQLDKILFSNFLPRGFNIGVRLIEDFLARSNVGRCHDFRETADVIAKVAFKMYLGITPSITNWSPAGDEFSLILENNPLVDFVELPDNHSSLIYSNLLCGVLRGALEMVQMAVEAKFVQDTLKGDGVTEIRMRFIRRIEDNLPAGEE

SEQ ID NO: 63132 - protein, 137 aa, Homo sapiens
  MOD_RES (1)..(1): Any amino acid
XPKDRNGTSDPFVRVRYKGRTRETSIVKKSCYPRWNETFEFELQEGAMEALCVEAWDWDLVSRNDFLGKVVIDVQRLRVVQQEEGWFRLQPDQSKSRRHDDWRCGCGTRRCCPPATTSHWCTCCATRSSWACRAQGS

SEQ ID NO: 63133 - protein, 444 aa, Homo sapiens
MPATLLRAVARSHHILSKAHQCRRIGHLMLKPLKEFENTTCSTLTIRQSLDLFLPDKTASGLNKSQILEMNQKKSDTSMLSPLNAARCQDEKAHLPTMKSFGTHRRVTHKPNLLGSKWFIKILKRHFSSVSTETFVPKQDFPQVKRPLKASRTRQPSRTNLPVLSVNEDLMHCTAFATADEYHLGNLSQDLASHGYVEVTSLPRDAANILVMGVENSAKEGDPGTIFFFREGAAVFWNVKDKTMKHVMKVLEKHEIQPYEIALVHWENEELNYIKIEGQSKLHRGEIKLNSELDLDDAILEKFAFSNALCLSVKLAIWEASLDKFIESIQSIPEALKAGKKVKLSHEEVMQKIGELFALRHRINLSSDFLITPDFYWDRENLEGLYDKTCQFLSIGRRVKVRSLAWPKVKMLIPLWRLRVESISSPFPVTGGHPYSLLMAPSSI

SEQ ID NO: 63134 - protein, 713 aa, Homo sapiens
MALLAMHSWRWAAAAAAFEKRRHSAILIRPLVSVSGSGPQWRPHQLGALGTARAYQQIPESLKSITWQRLGKGNSGQFLDAAKALQVWPLIEKRTCWHGHAGGGLHTDPKEGAMNIVVPFMFKYAVDSLNQMSGNMLNLSDAPNTVATMATAVLIGYGVSRAGAAFFNEVRNAVFGKVAQNSIRRIAKNVFLHLHNLDLGFHLSRQTGALSKAIDRGTRGISFVLSALVFNLLPIMFEVMLVSGVLYYKCGAQFALVTLGTLGTYTAFTVAVTRWRTRFRIEMNKADNDAGNAAIDSLLNYETVKYFNNERYEAQRYDGFLKTYETASLKSTSTLAMLNFGQSAIFSVGLTAIMVLASQGIVAGTLTVGDLVMVNGLLFQLSLPLNFLGTVYRETRQALIDMNTLFTLLKVDTQIKDKVMASPLQITPQTATVAFDNVHFEYIEGQKVLSGISFEVPAGKKVAIVGGSGSGKSTIVRLLFRFYEPQKGSIYLAGQNIQDVSLESLRRAVGVVPQDAVLFHNTIYYNLLYGNISASPEEVYAVAKLAGLHDAILRMPHGYDTQVGERGLKLSGGEKQRVAIARAILKDPPVILYDEATSSLDSITEETILGAMKDVVKHRTSIFIAHRLSTVVDADEIIVLDQGKVAERGTHHGLLANPHSIYSEMWHTQSSRVQNHDNPKWEAKKENISKEEERKKLQEEIVNSVKGCGNCSC

SEQ ID NO: 63135 - protein, 14 aa, Homo sapiens
MGKQNSKLRPEVMQ

SEQ ID NO: 63136 - protein, 518 aa, Homo sapiens
MGDEDWEAEINPHMSSYVPIFEKDRYSGENGDNFNRTPASSSEMDDGPSRRDHFMKSGFASGRNFGNRDAGECNKRDNTSTMGGFGVGKSFGNRGFSNSRFEDGDSSGFWRGYRDGNNSEASGPYRRGGRGSFRGCRGGFGLGSPNNDLDPDECMQRTGGLFGSRRPVLSGTGNGDTSQSRSGSGSERGGYKGLNEEVITGSGKNSWKSEAEGGESSDTQGPKVTYIPPPPPEDEDSIFAHYQTGINFDKYDTILVEVSGHDAPPAILTFEEANLCQTLNNNIAKAGYTKLTPVQKYSIPIILAGRDLMACAQTGSGKTAAFLLPILAHMMHDGITASRFKELQEPECIIVAPTRELVNQIYLEARKFSFGTCVRAVVIYGGTQLGHSIRQIVQGCNILCATPGRLMDIIGKEKIGLKQIKYLVLDEADRMLDMGFGPEMKKLISCPGMPSKEQRQTLMFSATFPEEIQRLAAEFLKSNYLFVAVGQVGGACRDVQQTVLQVGQFSKREKLVEILRNI

SEQ ID NO: 63137 - protein, 333 aa, Homo sapiens
MGDRERNKKRLLELLRAPDTGNAHCADCGAADPDWASYKLGIFICLNCCGVHRNFPDISRVKSVRLDFWDDSIVEFMIHNGNLRVKAKFEARVPAFYYIPQANDCLVLKEQWIRAKYERREFMADGETISLPGNREGFLWKRGRDNSQFLRRKFVLLAREGLLKYFTKEQGKSPKAVISIKDLNATFQTEKIGHPHGLQITYRRDGHTRNLFVYHESGKLVPFLTRNYLKQGFMEKTGPKQKEPFKKRWFALDCHERRLLYYKNPLDAFEQGQVFLGNKEQGYEAYEDLPKGIRGNRWKAGLTIVTPERRFVLTCPSEKEQQEWLESLRGVLS

SEQ ID NO: 63138 - protein, 985 aa, Homo sapiens
MVPWVRTMGQKLKQRLRLDVGREICRQYPLFCFLLLCLSAASLLLNRYIHILMIFWSFVAGVVTFYCSLGPDSLLPNIFFTIKYKPKQLGLQELFPQGHSCAVCGKVKCKRHRPSLLLENYQPWLDLKISSKVDASLSEVLELVLENFVYPWYRDVTDDESFVDELRITLRFFASVLIRRIHKVDIPSIITKKLLKAAMKHIEVIVKARQKVKNTEFLQQAALEEYGPELHVALRSRRDELHYLRKLTELLFPYILPPKATDCRSLTLLIREILSGSVFLPSLDFLADPDTVNHLLIIFIDDSPPEKATEPASPLVPFLQKFAEPRNKKPSVLKLELKQIREQQDLLFRFMNFLKQEGAVHVLQFCLTVEEFNDRILRPELSNDEMLSLHEELQKIYKTYCLDESIDKIRFDPFIVEEIQRIAEGPYIDVVKLQTMRCLFEAYEHVLSLLENVFTPMFCHSDEYFRQLLRGAESPTRNSKLNRGSLSLDDFRNTQKRGESFGISRIGSKIKGVFKSTTMEGAMLPNYGVAEGEDDFIEEGIVVMEDDSPVEAVSTPNTPRNLAAWKISIPYVDFFEDPSSERKEKKERIPVFCIDVERNDRRAVGHEPEHWSVYRRYLEFYVLESKLTEFHGAFPDAQLPSKRIIGPKNYEFLKSKREEFQEYLQKLLQHPELSNSQLLADFLSPNGGETQFLDKILPDVNLAKISLLHQSNKRLLHSKGNKQQSEETTCRMGGNIYGYFTWKIIKSVPGKLMKEKGQHLEPFIMNFINSCESPKPKPSRPELTILSPTSENNKKLFNDLFKNNANRAENTERKQNQNYFMEVMTVEGVYDYLMYVGRVVFQVPDWLHHLLMGTRILFKNTLEMYTDYYLQCKLEQLFQEHRLVSLITLLRDAIFCENTEPRSLQDKQKGAKQTFEEMMNYIPDLLVKCIGEETKYESIRLLFDGLQQPVLNKQLTYVLLDIVIQELFPELNKVQKEVTSVTSWM

SEQ ID NO: 63139 - protein, 16 aa, Homo sapiens
MDVIARQNFTEPTAIQ

SEQ ID NO: 63140 - protein, 37 aa, Homo sapiens
MKEPDDQDTDGEKSVTSKSDGKKSLRSSKSESRCSST

SEQ ID NO: 63141 - protein, 87 aa, Homo sapiens
EKVKRKEVEQKIKQKQEKQERRKGKEKEEKRTKQGKETNKEKEQFKGQEEKGENKDSTLTRTPLEPLLVAVNLFGPTGKCTYPRDCC

SEQ ID NO: 63142 - protein, 48 aa, Homo sapiens
MIRRVLPHGMGRGLLTRRPGTRRGGFSLVFTGLHWALSRWDLSAVLIA

SEQ ID NO: 63143 - protein, 101 aa, Homo sapiens
MAEGDNRSTNLLAAETASLEEQLQGWGEVMLMADKVLRWERAWFPPAIMAPRIFGSNKWTTEQQQRFHEICSNLVKTRRRAVGWWKRLFTLKEEKPKMYFM

SEQ ID NO: 63144 - protein, 68 aa, Homo sapiens
MTMGDMKTPDFDDLLAAFDIPDMVDPKAAIESGHDDHESHMKQNAHGEDDSHAPSSSDVGVSVIVKNV

SEQ ID NO: 63145 - protein, 182 aa, Homo sapiens
MTLRPSLLPLHLLLLLLLSAAVCRAEAGLETESPVRTLQVETLVEPPEPCAEPAAFGDTLHIHYTGSLVDGRIIDTSLTRDPLVIELGQKQVIPGLEQSLLDMCVGEKRRAIIPSHLAYGKRGFPPSVPDGVSLLLPRLECNSAIFTHHNLRHPGSSNSPVSASRVAGITGMRHHDRLILYF

SEQ ID NO: 63146 - protein, 790 aa, Homo sapiens
MPLPGGLWWLLCCRRGFTLLHRDYGDGELSGDGDEDEDEETFELRTPSPAGGGRGPLEVTLTQPVRSGPVSNRLQSWEETWSLIPEKGLPEDDPDIVVKGWLYREPRGGGARPWLPPRRAWFVLTRDSLDQFSSSGKGARRLGSLVLTSLCSVTGPERRRKETGLWSVTVSGRKHSVRLCSPRQAEAERWGVALREVIASKAPLETPTQLLLRDIQESCGDPEAVALIYLRNPILRHTSGALYAPLLPLPYGVSAPGPGYAPLREEAVRLFLALQALEGARRPGPLMQGVLQTCRDLPALRDELFLQLAKQTSGPAGPPGLPATQDPAALRYWQLLTCMSCTFRPGGAVRGHLLGHLERTEQALPDSELAEYARFIRKALGRTRGRELVPSLAEISALSQRQELLCTVHCPGAGACAVAIDSHTTAGEVARELVGRLGLARSRNAFALYEQRGAQERALAGGTLVADVLTSLAAEEAGLEDSPDSGWRLCLRLHGPLHPEGLSPDGHELPFLFEQAHALLLRGRPPPPDDTLRALAALRLQSLQRDFSPRVPLPRLDRLLPPPAPPREDPPRPTPRPPPSAALLAGALWSPGLAKRRAERARRGGAGRTAGSIAREGGGGAGTAAAVLGGWKRLRGMGRAEAMAAYLALAAQCPGFGAARYDVLELSTEPGRGAPQKLCLGLGAKAMSLSRPGETEPIHSVSYGHVAACQLMGPHTLALRVGESQLLLQSPQVEEIMQLVNAYLANPSPERPCSSSSPPCQDLPDTSPPSQRPGLDEPQGQSGCLGQLQD

SEQ ID NO: 63147 - protein, 83 aa, Homo sapiens
MLENYRNLVSLGICLPDLSIISMMKQRTEPWTVENEMKVAKNPDRWEGIKDINTGRSCAVRSKAGNKPITNQLGLTFQLPLPE

SEQ ID NO: 63148 - protein, 95 aa, Homo sapiens [sequence omitted]

SEQ ID NO: 63149 - protein, 173 aa, Homo sapiens
MVILEAPHLLRRKEPETPGLSSRIGPSLCPGFCRKRSVSCCFQNLCNNPMEKIISQCRFFVSMNDLGGDFKGVGKGSLAADKVVEEIRRRGGKAVANYDSVEEGEKVVKTALDAFGRIDVVVNNAGYNPQSSFAGFIPSDTGSMGTHEETEVWKDYYDFISFRNIWQLWPGQL

SEQ ID NO: 63150 - protein, 69 aa, Homo sapiens
MDSVAFEDVSVSFSQEEWALLAPSQKKLYRDVMQETFKNLASIEAIRERDSVKVKKVVNVQKTSVPISV

SEQ ID NO: 63151 - protein, 181 aa, Homo sapiens
MEVAEPSSPTEEEEEEEEHSAEPRPRTRSNPEGAEDRAVGAQASVGSRSEGEGEAASADDGSLNTSGAGPKSWQVPPPAPEVQIRTPRVNCPEKVIICLDLSEEMSLPKLESFNGSKTNALNVSQKMIEMFVRTKHKIDKSHEFALVVVNDDTAWLSGLTSDPRELCSCLYDLETASCSTF

SEQ ID NO: 63152 - protein, 415 aa, Homo sapiens
MPTTHQIHVEQSISLLLNFLLAAFDPEGHGKISVFAVKMALATLCGGKIMDKLRYIFSMISDSSGVMVYGRYDQFLREVLKLPTAVFEGPSFGYTEQSARSCFSQQKKVTLNGFLDTLMSDPPPQCLVWLPLLHRLANVENVFHPVECSYCHSESMMGFRYRCQQCHNYQLCQDCFWRGHAGGSHSNQHQMKEYTSWKSPAKKLTNALSKSLSCASSREPLHPMFPDQPEKPLNLAHIVPPRPVTSMNDTLFSHSVPSSGSPFITRSMLESSNRLDEEHRLIARYAARLAAESSSSQPPQQRSAPDISFTIDANKQQRQLIAELENKNREILQEIQRLRLEHEQASQPTPEKAQQNPTLLAELRLLRQRKDELEQRMSALQESRRELMVQLEGLMKLLKEEELKQGVSYVPYCRS

SEQ ID NO: 63153 - protein, 258 aa, Homo sapiens
  MOD_RES (1)..(1): Any amino acid
XHASLLGLKEADSPSPAKGCKPSSNPAGLRNIFPSNLVSAAFRSYSTTYEERNITGTRVKVPVGQEVEGMNILGLVVFAIVFGVALRKLGPEGELLIRFFNSFNEATMVLVSWIMWYAPVGIMFLVAGKIVEMEDVGLLFARLGKYILCCLLGHAIHGLLVLPLIYFLFTRKNPYRFLWGIVTPLATAFGTSSSSATLPLMMKCVEENNGVAKHISRFILPIGATVNMDGAALFQCVAAVFIAQLSQQSLDFVKIITI

SEQ ID NO: 63154 - protein, 41 aa, Homo sapiens
MEDPFEMGFYHVTQAGLELLDSSNPRLASQSAGIRGVSHCT

SEQ ID NO: 63155 - protein, 31 aa, Homo sapiens
MVMGLGVLLLVFVLGLGLTPPTLAQDNSRHL

SEQ ID NO: 63156 - protein, 114 aa, Homo sapiens
MKSLKAKFRKSDTNEWNKNDDRLLQAVENGDAEKVASLLGKKGASATKHDSEGKTAFHLAAAKGHVECLRVMITHGVDVTAQDTTGHSALHLAAKNSHHECIRKLLQSKCPAES

SEQ ID NO: 63157 - protein, 60 aa, Homo sapiens
MQALRVSQALIRSFSSTARNRFQNREDNDIPLYLKGGIVDNILYRVTMTLCLGGTVYSLY

SEQ ID NO: 63158 - protein, 549 aa, Homo sapiens
MDVVEVAGSWWAQEREDIIMKYEKGHRAGLPEDKGPKPFRSYNNNVDHLGIVHETELPPLTAREAKQIRREISRKSKWVDMLGDWEKYKSSRKLIDRAYKGMPMNIRGPMWSVLLNTEEMKLKNPGRYQIMKEKGKRSSEHIQRIDRDVSGTLRKHIFFRDRYGTKQRELLHILLAYEEYNPEVGYCRDLSHIAALFLLYLPEEDAFWALVQLLASERHSLQGFHSPNGGTVQGLQDQQEHVVATSQPKTMGHQDKKDLCGQCSPLGCLIRILIDGISLGLTLRLWDVYLVEGEQALMPITRIAFKVQQKRLTKTSRCGPWARFCNRFVDTWARDEDTVLKHLRASMKKLTRKQGDLPPPAKPEQGSSASRPVPASRGGKTLCKGDRQAPPGPPARFPRPIWSASPPRAPRSSTPCPGGAVREDTYPVGTQGVPSPALAQGGPQGSWRFLQWNSMPRLPTDLDVEGPWFRHYDFRQSCWVRAISQEDQLAPCWQAEHPAERVRSAFAAPSTDSDQGTPFRARDEQPCAPTSGPCLCGLHLESSQFPPGF

SEQ ID NO: 63159 - protein, 288 aa, Homo sapiens
MDLMVEASPRRIFANAHTYHINSISINSDYETYLSADDLRINLWHLEITDRSFNIVDIKPANMEELTEVITAAEFHPNSCNTFVYSSSKGTIRLCDMRASALCDRHSKLFEEPEDPSNRSFFSEIISSISDVKFSHSGRYMMTRDYLSVKIWDLNMENRPVETYQVHEYLRSKLCSLYENDCIFDKFECCWNGSDSVVMTGSYNNFFRMFDRNTKRDITLEASRENNKPRTVLKPRKVCASGKRKKDEISVDSLDFNKKILHTAWHPKENIIAVATTNNLYIFQDKVN

SEQ ID NO: 63160 - protein, 91 aa, Homo sapiens
  MOD_RES (1)..(1): Any amino acid
XNLHPDYIHGRLQSLGKNFALRVLLVQVDVKDPQQALKELAKMCILADCTLILAWSLWNSSSPHQEKIWPYAQAWALRKPGGCLMSCTSPS

SEQ ID NO: 63161 - protein, 287 aa, Homo sapiens
MAGLKRRASQVWPEEHGEQEHGLYSLHRMFDIVGTHLTHRDVRVLSFLFVDVIDDHERGLIRNGRDFLLALERQGRCDESNFRQVLQLLRIITRHDLLPYVTLKRRRAVCPDLVDKYLEETSIRYVTPRALSDPEPRPPQPSKTVPPHYPVVCCPTSGPQMCSKRPARGRATLGSQRKRRKSVTPDPKEKQTCDIRLRVRAEYCQHETALQGNVFSNKQDPLERQFERFNQANTILKSRDLGSIICDIKFSELTYLDAFWRDYINGSLLEALKGVFITDSLKQAVGH

SEQ ID NO: 63162 - protein, 56 aa, Homo sapiens
MEEPEEPADSGQSLVPVYIYSPEYVSMCDSLAKIPKRASMVHSLIEAYALHKQMRL

SEQ ID NO: 63163 - protein, 821 aa, Homo sapiens
MIFWSFVAGVVTFYCSLGPDSLLPNIFFTIKYKPKQLGLQELFPQGHSCAVCGKVKCKRHRPSLLLENYQPWLDLKISSKVDASLSEVLELVLENFVYPWYRDVTDDESFVDELRITLRFFASVLIRRIHKVDIPSIITKKLLKAAMKHIEVIVKARQKVKNTEFLQQAALEEYGPELHVALRSRRDELHYLRKLTELLFPYILPPKATDCRSLTLLIREILSGSVFLPSLDFLADPDTVNHLLIIFIDDSPPEKATEPASPLVPFLQKFAEPRNKKPSVLKLELKQIREQQDLLFRFMNFLKQEGAVHVLQFCLTVEEFNDRILRPELSNDEMLSLHEELQKIYKTYCLDESIDKIRFDPFIVEEIQRIAEGPYIDVVKLQTMRCLFEAYEHVLSLLENVFTPMFCHSDEIEEGIVVMEDDSPVEAVSTPNTPRNLAAWKISIPYVDFFEDPSSERKEKKERIPVFCIDVERNDRRAVGHEPEHWSVYRRYLEFYVLESKLTEFHGAFPDAQLPSKRIIGPKNYEFLKSKREEFQEYLQKLLQHPELSNSQLLADFLSPNGGETQFLDKILPDVNLGKIIKSVPGKLMKEKGQHLEPFIMNFINSCESPKPKPSRPELTILSPTSENNKKLFNDLFKNNANRAENTERKQNQNYFMEVMTVEGVYDYLMYVGRVVFQVPDWLHHLLMGTRILFKNTLEMYTDYYLQCKLEQLFQEHRLVSLITLLRDAIFCENTEPRSLQDKQKGAKQTFEEMMNYIPDLLVKCIGEETKYESIRLLFDGLQQPVLNKQLTYVLLDIVIQELFPELNKVQKEVTSVTSWM

SEQ ID NO: 63164 - protein, 213 aa, Homo sapiens
MAMTAGTTTTFPMSNHTRERVTVAKLTLENFYSNLILQHEERETRQKKLEVAMEEEGLADEEVRLVQKKDTGHIYAMKILRKSDMLEKEQVAHIRAERDILVEADGAWVVKMFYSFQDKRNLYLIMEFLPGGDMMTLLMKKDTLTEEETQFYISETVLAIDAIHQLGFIHRDIKPDNLLLDAKGHVKLSDFGLCTGLKKAHRTEFYRNLTHNP

SEQ ID NO: 63165 - protein, 43 aa, Homo sapiens
MRVRLGEHNLRKRDGPEQLRTTSRVIPHPRYEARSHRNDIMLL

SEQ ID NO: 63166 - protein, 41 aa, Homo sapiens
MASALWTVLPSRMSLRSLKWSLLLLSLLSFFVMWYLSLPHY

SEQ ID NO: 63167 - protein, 188 aa, Homo sapiens
  MOD_RES (1)..(1): Any amino acid
XAERHMISSWEQKNNCVMPEDVKNFYLMTNGFHMTWSVKLDEHIIPLGSMAINSISKLTQLTQSSMYSLPNAPTLADLEDDTHEASDDQPEKPHFDSRSVIFELDSCNGSGKVCLVYKSGKPALAEDTEIWFLDRALYWHFLTDTFTAYYRLLITHLGLPQWQYAFTSYGISPQAKAWGLATSKESAA

SEQ ID NO: 63168 - protein, 263 aa, Homo sapiens
MASNDYTQQATQSYGAYPTQPGQGYSQQSSQPYGQQSYSGYSQSTDTSGYGQSSYSSYGQSQNTGYGTQSTPQGYGSTGGYGSSQSSQSSYGQQSSYPGYGQQPAPSSTSGSYGSSSQSSSYGQPQSGSYSQQPSYGGQQQSYGQQQSYNPPQGYGQQNQYNSSSGGGGGGGGGGNYGQDQSSMSSGGGSGGGYGNQDQSGGGGSGGYGQQDRGGRGRGGSGGGGGGGGGGYNRSSGGYEPRGRGGGRGGRGGMGPSGPRITS

SEQ ID NO: 63169 - protein, 434 aa, Homo sapiens
MAVLAALLRSGARSRSPLLRRLVQEIRYVERSYVSKPTLKEVVIVSATRTPIGSFLGSLSLLPATKLGSIAIQGAIEKAGIPKEEVKEAYMGNVLQGGEGQAPTRQAVLGAGLPISTPCTTINKVCASGMKAIMMASQSLMCGHQDVMVAGGMESMSNVPYVMNRGSTPYGGVKLEDLIVKDGLTDVYNKIHMGSCAENTAKKLNIARNEQDAYAINSYTRSKAAWEAGKFGNEVIPVTVTVKGQPDVVVKEDEEYKRVDFSKVPKLKTVFQKENGTVTAANASTLNDGAAALVLMTADAAKRLNVTPLARIVAFADAAVEPIDFPIAPVYAASMVLKDVGLKKEDIAMWEVNEAFSLVVLANIKMLEIDPQKVNINGGAVSLGHPIGKCFLNFRMSGARIVGHLTHALKQGEYGLASICNGGGGASAMLIQKL

SEQ ID NO: 63170 - protein, 120 aa, Homo sapiens
MTLQELVHKAASCYMDRVAVCFDECNNQLPVYYTYKTVVNAASELSNFLLLHCDFQGIREIGLYCQPGIDLPSWILGILQVPAAYVPIEPDSPPSLSTHFMKKCNLKYILVEKKQINGTF

SEQ ID NO: 63171 - protein, 130 aa, Homo sapiens
MISPSLELLHSGLCKFPEVEGKMTTFKEAVTFKDVAVVFTEEELGLLDPAQRKLYRDVMLENFRNLLSVGNQPFHQDTFHFLGKEKFWKMKTTSQREGNSGGKIQIEMETVPEAGPHEEWSCQQIWEQIA

SEQ ID NO: 63172 - protein, 259 aa, Homo sapiens
MAQKEVQVSSADARLMVFDKTEGTWRLLCSSRSNARVAGLSCEEMGFLRRNRVLSRWRVFAGAVAQASPHGLQLGVQAVVYHGGYLPFRDPNSEENSNDIALVHLSSPLPLTEYIQPVCLPAAGQALVDGKICTVTGWGNTQYYGQQAGVLQEARVPIISNDVCNGADFYGNQIKPKMFCAGYPEGGIDACQGDSGGPFVCEDSISRTPRWRLCGIVSWGTGCALAQKPGVYTKVSDFREWIFQAIKTHSEASGMVTQL

SEQ ID NO: 63173 - protein, 163 aa, Homo sapiens
MRALWVLGLCCVLLTFGSVRADDEVDVDGTVEEDLGKSREGSRTDDEVVQREEEAIQLDGLNASQIRELREKSEKFAFQAEVNRMMKLIINSLYKNKEIFLRELISNASDALDKIRLISLTDENALSGNEELTVKIKQIRLLSLQNTTTIPSTSGSLTPMNFL

SEQ ID NO: 63174 - protein, 55 aa, Homo sapiens
MMLPKPGTYYLPWEVSAGQVPDGSTLRTFGRLCLYDMIQSRVTLMAQHGSDQHQV

SEQ ID NO: 63175 - protein, 79 aa, Homo sapiens
MTAHSFALPVIIFTTFWGLVGIAGPWFVPKGPNRGVIITMLVATAVCCYLFFQAAPYTHEITTLEICTWEFLLFMNAPR

SEQ ID NO: 63176 - protein, 81 aa, Homo sapiens
MAHIPSGGAPAAGAAPMGPQYCVCKVELSVSGQNLLDRDVTSKSDPFCVLFTENNGRWIEYDRTETAINNLNPAFSKKFVL

SEQ ID NO: 63177 - protein, 279 aa, Homo sapiens
MQPDPRPSGAGACCRFLPLQSQCPEGAGDAVMYASTECKAEVTPSQHGNRTFSYTLEDHTKQAFGIMNELRLSQQLCDVTLQVKYQDAPAAQFMAHKVVLASSSPVFKAMFTNGLREQGMEVVSIEGIHPKVMERLIEFAYTASISMGEKCVLHVMNGAVMYQIDSVVRACSDFLVQQLDPSNAIGIANFAEQIGCVELHQRAREYIYMHFGEVAKQEEFFNLSHCQLVTLISRDDLNVRCESEVFHACINWVKYDCEQRRFYVQALLRAVRCHSLTPN

SEQ ID NO: 63178 - protein, 148 aa, Homo sapiens
MPPSWSPLMCGRAAEAAASSRTPGREMGQAVTRRLGAGARAAPRRAMDGRTPRPQDAPARREIAGSWRKPKAKAPLPPAETKYTDVSSAADSVESTAFIMEQKENMIDKDVELSVVLPGDIIKSTTVHGSKPMMDLLIFLCAQYHLNP

SEQ ID NO: 63179 - protein, 21 aa, Homo sapiens
MQLGTVGIYDLPHLRNKLVIK

SEQ ID NO: 63180 - protein, 228 aa, Homo sapiens
MQVFGELNFFVFSSSKISWLSFAVPDPLMPDPSKQPKNQLNPIGSLQELAIHHGWRLPEYTLSQEGGPAHKREYTTICRLESFMETGKGASKKQAKRNAAEKFLAKFSNISPENHISLTNVVGHSLGCTWHSLRNSPGEKINLLKRSLLSIPNTDYIQLLSEIAKEQGFNITYLDIDELSANGQYQCLAELSTSPITVCHGSGISCGNAQSDAAHNALQYLKIIAERK

SEQ ID NO: 63181 - protein, 96 aa, Homo sapiens
MSGYSSDRDRGRDRGFGAPRFGGSRAGPLSGKKFGNPGEKLVKKKWNLDELPKFEKNFYQEHPDLARRTAQMSWMLLQDRISLNPLLFKLRDGQLL

SEQ ID NO: 63182 - protein, 45 aa, Homo sapiens
  MOD_RES (1)..(1): Any amino acid
XGPRVHTCSAAGGFSTSDYDVGWESPHNGSGTWAYSAPDLLGSWA

SEQ ID NO: 63183 - protein, 169 aa, Homo sapiens
MEIPNPPTSKCITYWKRKVKSEYMRLRQLKRLQANMGAKALYVANFAKVQEKTQILNEEWKKLRVQPVQSMKPVSGHPFLKKVEDETVLCNIPYMGDEVKEEDETFIEELINNYDGKVHGEEEMIPGSVLISDAVFLELVDALNQYSDEEEEGHNDTSDGKQDDSKEDL

SEQ ID NO: 63184 - protein, 51 aa, Homo sapiens
MASLQRSRVLRCCSCRLFQAHQVKKSVKWTCKACGEKQSFLQVSRRNCQCQ

SEQ ID NO: 63185 - protein, 22 aa, Homo sapiens
  MOD_RES (1)..(1): Any amino acid
XLENQSLKSVKFGSIKSDWLGC

SEQ ID NO: 63186 - protein, 128 aa, Homo sapiens
MLDFHEQPVGMPKMEKVYLHNPSSEETITLVSISATTSHFHASFFQNRKILPGGNTSFDVVFLARVVGNVENTLFINTSNHGVFTYQVFGVGVPNPYRLRPFLGARVPVNSSFSPIINIHNPHSEPLQ

SEQ ID NO: 63187 - protein, 2819 aa, Homo sapiens
MSEKSGQSTKAKDGKKYATLSLFNTYKGKSLETQKTTVAARHGLQSLGKVGISRRMPPPANLPSLKAENKGNDPNVNIVPKDGTGWASKQEQHEEEKTPEVPPAQPKPGVAAPPEVAPAPKSWASNKQGGQGDGIQVNSQFQQEFPSLQAAGDQEKKEKETNDDNYGPGPSLRPPNVACWRDGGKAAGSPSSSDQDEKLPGQDESTAGTSEQNDILKVVEKRIACGPPQAKLNGQQAALASQYRAMMPPYMFQQYPRMTYPPLHGPMRFPPSLSETNKGLRGRGPPPSWASEPERPSILSASELKELDKFDNLDAEADEGWAGAQMEVDYTEQLNFSDDDEQGSNSPKENNSEDQGSKASENNENKKETDEVSNTKSSSQIPAQPSVAKVPYGKGPSFNQERGTSSHLPPPPKLLAQQHPPPDRQAVPGRPGPFPSKQQVADEDEIWKQRRRQQSEISAAVERARKRREEEERRMEEQRKAACAEKLKRLDEKLGILEKQPSPEEIREREREKEREREKELEKEQEQEREKEREKDRERQQEKEKELEKEQEKQREMEKERKQEKEKELERQKEKEKELQKMKEQEKECELEKEREKLEEKIEPREPNLEPMVEKQESENSCNKEEEPVFTRQDSNRSEKEATPVVHETEPESGSQPRPAVLSGYFKQFQKSLPPRFQRQQEQMKQQQWQQQQQQGVLPQTVPSQPSSSTVPPPPHRPLYQPMQPHPQHLASMGFDPRWLMMQSYMDPRMMSGRPAMDIPPIHPGMIPPKPLMRRDQMEGSPNSSESFEHIARSARDHAISLSEPRMLWGSDPYPHAEPQQATTPKATEEPEDVRSEAALDQEQITAAYSVEHNQLEAHPKADFIRESSEAQVQKFLSRSVEDVRPHHTDANNQSACFEAPDQKTLSAPQEERISAVESQPSRKRSVSHGSNHTQKPDEQRSEPSAGIPKVTSRCIDSKEPIERPEEKPKKEGFIRSSEGPKPEKVYKSKSETRWGPRPSSNRREEVNDRPVRRSGPIKKPVLRDMKEEREQRKEKEGEKAEKVTEKVVVKPEKTEKKDLPPPPPPPQPPAPIQPQSVPPPIQPEAEKFPSTETATLAQKPSQDTEKPLEPVSTVQVEPAVKTVNQQTMAAPVVKEEKQPEKVISKDLVIERPRPDSRPAVKKESTLPPRTYWKEARERDWFPDQGYRGRGRGEYYSRGRSYRGSYGGRGRGGRGHTRDYPQYRDNKPRAEHIPSGPLRQREESETRSESSDFEVVPKRRRQRGSETDTDSEIHESASDKDSLSKGKLPKREERPENKKPVKPHSSFKPDNHVRIDNRLLEKPYVRDDDKAKPGFLPKGEPTRRGRGGTFRRGGRDPGGRPSRPSTLRRPAYRDNQWNPRQSEVPKPEDGEPPRRHEQFIPIAADKRPPKFERKFDPARERPRRQRPTRPPRQDKPPRFRRLREREAASKSNEVVAVPTNGTVNNVAQEPVNTLGDISGNKTPDLSNQNSSDQANEEWETASESSDFNERRERDEKKNADLNAQTVVKVGENVLPPKREIAKRSFSSQRPVDRQNRRGNNGPPKSGRNFSGPRNERRSGPPSKSGKRGPFDDQPAGTTGVDLINGSSAHHQEGVPNGTGQKNSKDSTGKKREDPKPGPKKPKEKVDALSQFDLNNYASVVIIDDHPEVTVIEDPQSNLNDDGFTEVVSKKQQKRLQDEERRKKEEQVIQVWNKKNANEKGRSQTSKLPPRFAKKQATGIQQAQSSASVPPLASAPLPPSTSASVPASTSAPLPATLTPVPASTSAPVPASTLAPVLASTSAPVPASPLAPVSASASVSASVPASTSAAAITSSSAPASAPAPTPILASVSTPASVTILASASIPILASALASTSAPTPAPAASSPAAPVITAPTIPASAPTASVPLAPASASAPAPAPTPVSAPNPAPPAPAQTQAQTHKPVQNPLQTTSQSSKQPPPSIRLPSAQTPNGTDYVASGKSIQTPQSHGTLTAELWDNKVAPPAVLNDISKKLGPISPPQPPSVSAWNKPLTSFGSAPSSEGAKNGQESGLEIGTDTIQFGAPASNGNENEVVPVLSEKSADKIPEPKEQRQKQPRAGPIKAQKLPDLSPVENKEHKPGPIGKERSLKNRKVKDAQQVEPEGQEKPSPATVRSTDPVTTKETKAVSEMSTEIGTMISVSSAEYGTNAKESVTDYTTPSSSLPNTVATNNTKMEDTLVNNVPLPNTLPLPKRETIQQSSSLTSVPPTTFSLTFKMESARKAWENSPNVREKGSPVTSTAPPIATGVSSSASGPSTANYNSFSSASMPQIPVASVTPTASLSGAGTYTTSSLSTKSTTTSDPPNICKVKPQQLQTSSLPSASHFSQLSCMPSLIAQQQQNPQVYVSQSAAAQIPAFYMDTSHLFNTQHARLAPPSLAQQQGFQPGLSQPTSVQQIPIPIYAPLQGQHQAQLSLGAGPAVSQAQELFSSSLQPYRSQPAFMQSSLSQPSVVLSGTAIHNFPTVQHQELAKAQSGLAFQQTSNTQPIPILYEHQLGQASGLGGSQLIDTHLLQARANLTQASNLYSGQVQQPGQTNFYNTAQSPSALQQVTVPLPASQLSLPNFGSTGQPLIALPQTLQPPLQHTTPQAQAQSLSRPAQVSQPFRGLIPAGTQHSMIATTGKMSEMELKAFGSGIDIKPGTPPIAGRSTTPTSSPFRATSTSPNSQSSKMNSIVYQKQFQSAPATVRMTQPFPTQFAPQAKQRAEVLQSTQRFFSEQQQSKQIGGGKAQKVDSDSSKPPETLTDPPGVCQEKVEEKPPPAPSIATKPVRTGPIKPQAIKTEETKS

SEQ ID NO: 63188 - protein, 94 aa, Homo sapiens
MEVLREKVEEEEEAEREEAAEWAEWARMEKMMRPVEVRKEEITLKQETLRDLEKKLSEIQITVSAELPAFTKDTIDISKLPISYKTNTPKEEHL

SEQ ID NO: 63189 - protein, 72 aa, Homo sapiens
MAYPGHPGAGGGYYPGGYGGAPGGPAFPGQTQDPLYGYFAAVAGQDGQIDADELQRCLTQSGIAGGYKLVRL

SEQ ID NO: 63190 - protein, 562 aa, Homo sapiens
MSGVLCSRNLFTFKFSLFQLDSGASGEPGHSLGLTLGFSYCGNCQTAVVSAQPEGMASNGAYPVLGPGVTANPGTSLSVFTALPFTTPAPGPAHGPLLVTAGAPPGGPLVLSTFPSTPLVTEQDGCGPSGAGASNVFVQMRTEVGPVKAAQAQTLVLTQAPLVWQAPGALCGGVVCPPPLLLAAAPVVPVMAAQVVGGTQACEGGWSQGLPLPPPPPPAAQLPPIVSQGNAGPWPQGAHGESSLASSQAKAPPDDSCNPRSVYENFRLWQHYKPLARRHLPQSPDTEALSCFLIPVLRSLARRKPTMTLEEGLWRAMREWQHTSNFDRMIFYEMAEKFLEFEAEEEMQIQKSQWMKGPQCLPPPATPRLEPRGPPAPEVVKQPVYLPSKAGPKAPTACLPPPRPQRPVTKARRPPPRPHRRAETKARLPPPRPQRPAETKVPEEIPPEVVQEYVDIMEELLGPSLGATGEPEKQREEGKVKQPQEEDWTPPDPGLLSYIDKLCSQKDFVTKVEAVIHPQFLEELLSPDPQMDFLALSQDLEQEEGLTLAQGAPSDAPGTDRC

SEQ ID NO: 63191 - protein, 115 aa, Homo sapiens
  MOD_RES (1)..(1): Any amino acid
XPSILLKGLSCQGRTHIHLAPGLPGDPGIISGMRSHCEIAVFIDGPLALADGIPFFRSANGVILTPGNTDGFLLPKYFKEALQLRPTRENHHPSPYSLFLKAVPFCPHLSPSFQP

SEQ ID NO: 63192 - protein, 120 aa, Homo sapiens
MDALPPGVTGAVQGAWDTSGTLIKESVGQPEEASPEEQPEEASAEEERPEDQQEEEAAAAAAYLDELPEPLLLRVLAALPAAELVQACRLVCLRWKELVDGAPLWLLKCQQEGLVPEGGV

SEQ ID NO: 63193 - protein, 491 aa, Homo sapiens
  MOD_RES (1)..(1): Any amino acid
XEEKVEKRSNSDSKENRETKLNGPGENVSEDEAQSSNQRKRANKHKWVPLHLDVVRSESQERPGSRNSSRCQPEANKPTHNNRRNDTRSWKRDREKRDDQDDVSSVRSEGGNIRGSFRGRGRGRGRGRGRGRGNPRLNFDYSYGYQEHGERTDQPFQTELNTSMMYYYDDGTGVQVYPVEEALLKEYIKRQIEYYFSVENLERDFFLRGKMDEQGFLPISLIAGFQRVQALTTNLNLILEALKDSTEVEIVDEKMRKKIEPEKWPIPGPPPRSVPPTDFSQLIDCPEFVPGQAFCSHTESAPNSPRIGSPLSPKKNSETSILQAMSRGLSTSLPDLDSEPWIEVKKRHQPAPVKLRESVSVPEGSLNQLCSSEEPEQEELDFLFDEEIEQIGRKNTFTDWSDNDSDYEIDDQDLNKILIVTQTPPYVKKHPGGDRTGTHMSRAKITSELAKVINDGLYYYEQDLWMEEDENKHTAIKVIVSGQHLSTDALF

SEQ ID NO: 63194 - protein, 91 aa, Homo sapiens
  MOD_RES (1)..(1): Any amino acid
XLYQIKEMMQLTRDNRASEIQPLQGTNENRENSPAGRAQPVPCETHSDPSRNQPSPDAAASQTQTSPAHPSVDPCTEESEEQQAQLAAGGH

SEQ ID NO: 63195 - protein, 1531 aa, Homo sapiens
EQEKKKQEESSLKQQVEQSSASQTGIKQLPSASTGIPTASTTSASVSTQVEPEEPEADQHQQLQYQQPSISVLSDGTVDSGQGSSVFTESRVSSQQTVSYGSQHEQAHSTGTVPGHIPSTVQAQSQPHGVYPPSSVQQGIQQTAPPQQTVQYSLSQTSTSSEATTAQPVSQPQAPQVLPQVSAGKQSTQGVSQVAPAEPVAVAQTQATQPTTLASSVDSAHSDVASGMSDGNENVPSSSGRHEGRTTKRHYRKSVRSRSRHEKTSRPKLRILNVSNKGDRVVECQLETHNRKMVTFKFDLDGDNPEEIATIMVNNDFILAIERESFVDQVREIIEKADEMLSEDVSVEPEGDQGLESLQGKDDYGFSGSQKLEGEFKQPIPASSMPQQIGIPTSSLTQVVHSAGRRFIVSPVPESRLRESKVFPSEITDTVAASTAQSPGMNLSHSASSLSLQQAFSELRRAQMTEGPNTAPPNFSHTGPTFPVVPPFLSSIAGVPTTAAATAPVPATSSPPNDISTSVIQSEVTVPTEEGIAGVATSTGVVTSGGLPIPPVSESPVLSSVVSSITIPAVVSISTTSPSLQVPTSTSEIVVSSTALYPSVTVSATSASAGGSTATPGPKPPAVVSQQAAGSTTVGATLTSVSTTTSFPSTASQLCIQLSSSTSTPTLAETVVVSAHSLDKTSHSSTTGLAFSLSAPSSSSSPGAGVSSYISQPGGLHPLVIPSVIASTPILPQAAGPTSTPLLPQVPSIPPLVQPVANVPAVQQTLIHSQPQPALLPNQPHTHCPEVDSDTQPKAPGIDDIKTLEEKLRSLFSEHSSSGAQHASVSLETSLVIESTVTPGIPTTAVAPSKLLTSTTSTCLPPTNLPLGTVALPVTPVVTPGQVSTPVSTTTSGVKPGTAPSKPPLTKAPVLPVGTELPAGTLPSEQLPPFPGPSLTQSQQPLEDLDAQLRRTLSPEMITVTSAVGPVSMAAPTAITEAGTQPQKGVSQVKEGPVLATSSGAGVFKMGRFQVSVAADGAQKEGKNKSEDAKSVHFESSTSESSVLSSSSPESTLVKPEPNGITIPGISSDVPESAHKTTASEAKSDTGQPTKVGRFQVTTTANKVGRFSVSKTEDKITDTKKEGPVASPPFMDLEQAVLPAVIPKKEKPELSEPSHLNGPSSDPEAAFLSRDVDDGSGSPHSPHQLSSKSLPSQNLSQSLSNSFNSSYMSSDNESDIEDEDLKLELRRLRDKHLKEIQDLQSRQKHEIESLYTKLGKVPPAVIIPPAAPLSGRRRRPTKSKGSKSSRSSSLGNKSPQLSGNLSGQSAASVLHPQQTLHPPGNIPESGQNQLLQPLKPSPSSDNLYSAFTSDGAISVPSLSAPGQGTSSTNTVGATVNSQAAQAQPPAMTSSRKGTFTDDLHKLVDNWARDAMNLSGRRGSKGHMNYEGPGMARKFSAPGQLCISMTSNLGGSAPISAASATSLGHFTKSMCPPQQYGFPATPFGAQWSGTGGPAPQPLGQFQPVGTASLQNFNISNLQKSISNPPGSNLRTT

SEQ ID NO: 63196 - protein, 17 aa, Homo sapiens
MAAGWLTTWSQNSVTFQ

SEQ ID NO: 63197 - protein, 77 aa, Homo sapiens
MALVLGSLLLLGLCGNSFSGGQPSSTDAPKAWNYELPATNYETQDSHKAGPIGILFELVHIFLYVVQPRDFPEDCLL

SEQ ID NO: 63198 - protein, 121 aa, Homo sapiens
  MOD_RES (1)..(1): Any amino acid
XKYVFTDISYSIPHRERFIVVREPSGTLRKASWEERDRMIQVYFPKEGRKILTPIIFKEENLRFEPDSTEYIKVHHKTYEDIDKRGKYDLLRSTRYFGGMVWYFVNNKKIDGLLIDQIQRD

SEQ ID NO: 63199 - protein, 156 aa, Homo sapiens
MSVDCLGQHAVLSGRRFLYIVNLDAPFEGHRKISRQSKWDIGAVQWNPHDSFAHYFAASSNQRVDLYKWKDGSGEVGTTLQGHTRVISDLDWAVFEPDLLVTSSVDTYIYIWDIKDTRKPTVALSAVAGASQVKWNKKNANCLATSHDGDVRIWDK

SEQ ID NO: 63200 - protein, 55 aa, Homo sapiens
MDELQLFRGDTVLLKGKKRREAVCIVLSDDTCSDEKIRMNRVVRNNLRVRLGDVI

SEQ ID NO: 63201 - protein, 175 aa, Homo sapiens
MNPAAEAEFNILLATDSYKVTHYKQYPPNTSKVYSYFECREKKTENSKLRKVKYEETVFYGLQYILNKYLKGKVVTKEKIQEAKDVYKEHFQDDVFNEKGWNYILEKYDGHLPIEIKAVPEGFVIPRGNVLFTVENTDPECYWLTNWIEHRHCIILAALFQTDLKLLQITIWFIK

SEQ ID NO: 63202 - protein, 73 aa, Homo sapiens
  MOD_RES (1)..(1): Any amino acid
XLSLQKQMEHANQQTGFSDSSSLRPMHPQALHPAPGLLASPQLPVQMQPAGKVRMVIEFTCQNPYTRDPEKQD

SEQ ID NO: 63203 - protein, 90 aa, Homo sapiens
MEDEVVRFAKKMDKMVQKKNAAGALDLLKELKNIPMTLELLQSTRIGMSVNAIRKQSTDEEVTSLAKSLIKSWKKLLGIIDLPLHIFMML

SEQ ID NO: 63204 - protein, 194 aa, Homo sapiens
SRAEVRTHYDPPRKLMAMQRPGPYDRPGAGRGYNSIGRGAGFERMRRGAYGGGYGGYDDYNGYNDGYGFGSDRFGRDLNYCFSGMSDHRYGDGGSTFQSTTGHCVHMRGLPYRATENDIYNFFSPLNPVRVHIEIGPDGRVTGEADVEFATHEDAVAAMSKDKANMQHRYVELFLNSTAGASGGAYGSQMMGGM

SEQ ID NO: 63205 - protein, 149 aa, Homo sapiens
MEEEVRLKKRKRRRNVDKDPAKEDVEKAKKRRGRPPAEKLSPNPPKLTKQMNAIIDTVINYKDSSGRQLSEVFIQLPSRKELPEYYELIRKPVDFKKIKERIRNHKYRSLGDLEKDVMLLCHNAQTFNLEGSQIYEDSIVLQSVFKSAR

SEQ ID NO: 63206 - protein, 148 aa, Homo sapiens
MFGVHGNFLGIESRPPLLSLSPSLLYTCEMFQDPVACEDVAVNFTQEEWALLDISQRKLYREVMLETFRNLTSIGKKWKDQNIEYEYQNPRRNFRSLIEGNVNEIKEDSHCGETFTQVPDDRLNFQEKKASPEAKSCDNFVCGEVGIG

SEQ ID NO: 63207 - protein, 44 aa, Homo sapiens
MAATLGSGERWTEGSRNAEITMKFWEFLEMLVTKSLRKLTENSP

SEQ ID NO: 63208 - protein, 169 aa, Homo sapiens
LHKQADMQEEKNRIERVLGATLLPDLIQKVLTFALSEEVRPQDTVSVIGGVAGGSKHGRKAAWKFIKDNWEELYNRYQGGFLISRLIKVQWLTPVIPALWDAELSVEGFAVDKMAGEVKAFFESHPAPSAERTIQQCCENILLNAAWLKRDAESIHQYLLQRKASPPTV

SEQ ID NO: 63209 - protein, 46 aa, Homo sapiens
MLDINALKRALKLQQKRQKEELEREQQREKEFEREKQLTARPAKRM

SEQ ID NO: 63210 - protein, 395 aa, Homo sapiens
MGHLPTGIHGARRLLPLLWLFVLFKNATAFHVTVQDDNNIVVSLEASDVISPASVYVVKITGESKNYFFEFEEFNSTLPPPVIFKASYHGLYYIITLVVVNGNVVTKPSRSITVLTKPLPVTSVSIYDYKPSPETGVLFEIHYPEKYNVFTRVNISYWEGKDFRTMLYKDFFKGKTVFNHWLPGMCYSNITFQLVSEATFNKSTLVEYSGVSHEPKQHRTAPYPPQNISVRIVNLNKNNWEEQSGNFPEESFMRSQDTIGKEKLFHFTEETPEIPSGNISSGWPDFNSSDYETTSQPYWWDSASAAPESEDEFVSVLPMEYENNSTLSETEKSTSGSFSFFPVQMILTWLPPKPPTAFDGFHIHIEREGCCSHQLMIMTSNEVISSRGWMDCEAM

SEQ ID NO: 63211 - protein, 135 aa, Homo sapiens
QISKKRKFVADGIFKAELNEFLTRELAEDGYSGVEVRVTPTRTEIIILATRTQNVLGEKGRRIRELTAVVQKRFGFPEGSVELYAEKVATRGLCAIAQAESLRYKLLGGLAVRRVGPKAARLWCLGNSEDRGLNP

SEQ ID NO: 63212 - protein, 692 aa, Homo sapiens
MDHHIPMHALPEEIQKMLPEEKVCKYCGVSYLILHEFKAMEEKVKAMEKEMKFYQGSVDREKRLQEKLHSLSQELEQYKIDNKSKTERIYDVGMQLKSQQNEFQKVKKQLSHLQDELKIKYRQSYIFSQRLSEYKYFWNKTLSLLTFTKRELTSIKNEVYDNYQNWTSLKGAVFLQIKSISETALTEIDILNKSLTVSQRNKVCLEKEMKNLKLLSDAAILRSQQIRTSRQQEVNLQTRCYDLQKEVLDLQCLVEALGLKLQKAVTEMDNYKEMLMNKSNEADDCQRELKKLKFESIISESQHTMLLKEKEDSLMTCQQIYKALQEELTVKEKQEEDIKRRINLAENELEITKTLLNQTREEVLTLKNERELMLISHQKSIEQLQETLRQKLLSDDNWKEKIEAELAKERAQHLVEFEEQALLFKEETKLQLDIEKEKHQDVIQKYKKEQEELQMKISDLITGATRDLRQEVTTLKEKLHKSHIRYTEESNSKEKEIENLKNLVAEFESRLKKEIDSNDSVSENLRKEMEQKSDELKRVMLAQTQLIEQFNQSQEENTFLQETVRRECEERFELTEALSQAREQLLELSKLRGSLPFSPCSLSKGSLTSPAAAVSNHGERSLARLNSEKGIQIPNLRGVSKPTTFPTSDKPKRVRSGVPILPQPHPPRGGASSANETRQRLAAILRRRRSQQ

SEQ ID NO: 63213 - protein, 230 aa, Homo sapiens
MGRLHCTEDPVPEAVGGDMQQLNQLGAQFSALTEVLFHFLTEPKEVERFLAQLSEFATTNQISLGSLRSIVKSLLLVPNGALKKSLTAKQVQADFITLGLSEEKATYFSEKWKQNAPTLARWAIGQTLMINQLIDMEWKFGVTSGSSELEKVGSIFLQLKLVVKKGNQTENVYIDWGPLKGRVNLRFILVPSWGLVQDPASSRCSTNVNIGIQVPSSPHSRDPRLPLPLP

SEQ ID NO: 63214 - protein, 151 aa, Homo sapiens
  MOD_RES (1)..(1): Any amino acid
XLEQNNKTEVWERSLKEKWNAKSVYVVGNATASLVSKIGLDTEGETCGNAEKLAEYICSRESSALPLLFPCGNLKREILPKALKDKGIAMESITVYQTVAHPGIQGNLNSYYSQQGVPASITFFSPSGLTYSLKHIQELSGDNIDQIKKHP

SEQ ID NO: 63215 - protein, 79 aa, Homo sapiens
  MOD_RES (1)..(1): Any amino acid
XDEDTLQDPAPLETPMNASSSHSCALETSPYVSTPMEATGAGPTRSAVGATSPTRMAQPAWKEPCYLVSAISLENRMLL

SEQ ID NO: 63216 - protein, 217 aa, Homo sapiens
MAVFLQLLPLLLSRAQGNPGASLDGRPGDRVNLSCGGVSHPIRWVWAPSFPACKGLSKGRRPILWASSSGTPTVPPLQPFVGRLRSLDSGIRRLELLLSAGDSGTFFCKGRHEDESRTVLHVLGDRTYCKAPGPTHGACPRNRLDHSLDLLCPPHIAPLVKTEPQRPVKEEEPKIPGDLDQEPSLLYADLDHLALSRPRRLSTADPADASTIYAVVV

SEQ ID NO: 63217 - protein, 92 aa, Homo sapiens
LMVNSNYYVMDLVLIKNTDVQAARLGNIIHAMIMYRRKLDREEIKPVMALGIVPMCSYQMERMFNTTRIPGKDTGLLVLREREWKHPAQGLV

SEQ ID NO: 63218 - protein, 181 aa, Homo sapiens
LLSDYDILSLSNIQQHSVRKRDLQTSTHVETLLTFSALKRHFKLYLTSSTERFSQNFKVVVVDGKNESEYTVKWQDFFTGHVVGEPDSRVLAHIRDDDVIIRINTDGAEYNIERWGFTVLVRLFSNSWTQVICPPWPPQSAEITGVSHRARQFSYIDGVVQTPPHSILEHFYHLKKKRCIL

SEQ ID NO: 63219 - protein, 395 aa, Homo sapiens
MDAPARLLAPLLLLCAQQLRGTRAMNDIGDYVGSNLEISWLPNLDGLIAGYARNFRPGIGGPPVNVALALEVASIDHISEANMVGATSLCLRHGVHHDGVPAPELAGQQALLQPHQRDPGSGQPLRGQAVAARHLHRERQVGLVPRRDGGEQAHPAAARRRDPVQHPNHLHCGLRHGPGQIPHGRAGVHAGPGELRLLIGGHRLLLVGEPGAHPRAGQAAAGAVHHHQLPLHHGADELQVRWPVPTAQPALPPAEEPRRVHHPILHALRPAGRHVLGLLLDQPGGGARQGVSRHHHGADDDHAHGQCPLLPATGISHQGTGRLLLDLLCLRVCRPGGVRLCSFQRRLQEEAEGQGQGLQAEGRDGREERHCPLLPLCCRRHAGAGHLPPAAPRPG

SEQ ID NO: 63220 - protein, 265 aa, Homo sapiens
MKVLLKQDNTTQLVQDDQVKGPLRVGAIVETRTSDGSFQEAIISKLTDASWYTVVFDDGDERTLRRTSLCLKGERHFAESETLDQLPLTNPEHFGTPVIAKKTNRGRRSSLPVTEDEKEEESSEEEDEDKRRLNDELLGKVVSVVSATERTEWYPALVISPSCNDDITVKKDQCLVRSFIDSKFYSIARKDIKEVDILNLPESELSTKPGLQKASIFLKTRVVPDNWKMDISEILESSSSDDEDGPAEENDEEKEKEAKKTEEEV

SEQ ID NO: 63221 - protein, 186 aa, Homo sapiens
MSPKPRASGPPAKAKEAGKRKSSSQPSPSDPKKKTTKVAKKGKAVRRGRRGKKGAATKMAAVTAPEAESGPAAPGPSDQPSQELPQHELPPEEPVSEGTQHDPLSQESELEEPLSQESEVEEPLSQESQVEEPLSQESEVEEPLSQESQVEEPLSQESEVEEPLSQESEVEEPLSQESEMEELPSV

SEQ ID NO: 63222 - protein, 87 aa, Homo sapiens
MSMFLNTLTPKFYVALTGTSSLISGLILIFEWWYFRKYGTSFIEQVSVSHLRPLLGGVDNNSSNNSNSSNGDSDSNRQSVSECKVWR

SEQ ID NO: 63223 - protein, 326 aa, Homo sapiens
  MOD_RES (1)..(1): Any amino acid
XAALPLLGELPRLLLLVLLCLPAVWESSRVEHTMLQTCMSSLSGDCGLPPDVPNAQPALEGRTSFPEDTVITYKCEESFVKIPGEKDSVICLKGSQWSDIEEFCNRSCEVPTRLNSASLKQPYITQNYFPVGTVVEYECRPGYRREPSLSPKLTCLQNLKWSTAVEFCKKKSCPNPGEIRNGQIDVPGGILFGATISFSCNTGYKLFGSTSSFCLISGSSVQWSDPLPECREIYCPAPPQIDNGIIQGERDHYGYRQSVTYACNKGFTMIGEHSIYCTVNNDEGEWSGPPPECRGKSLTSKVPPTVQKPTTVNVPTTEVSPTSQKT

SEQ ID NO: 63224 - protein, 97 aa, Homo sapiens
  MOD_RES (1)..(1): Any amino acid
XLVPKLFYKCDQGQADPVVAVARDQSSVYLKLLMHETQPPSHFSVSTITSLYIFVIRIYRGYNLLPSITDVTMENNLSRVIAAVSHELITSTTRALT

SEQ ID NO: 63225 - protein, 36 aa, Homo sapiens
MSLKMDNRDVAESQMHTTLPAFPTSLPTMVASCSSF

SEQ ID NO: 63226 - protein, 190 aa, Homo sapiens
  MOD_RES (1)..(1): Any amino acid
XASYRFRQERSVPTFKDGTRRSDYQLTIEPLLEQEADGAAPQLTASRLLQRRQIFSQKLVEHVKEHHKAFLASLSPAMVVPEDQLTRWHPRFNVDEVPDIEPAALPQPPATEKLTTAQEMEKALSQLALRSAAPSSPGSPRPALPATPPATPPAASPSALKGVSQDLLERIRAKEAQKQLAQMTRCPEQE

SEQ ID NO: 63227 - protein, 501 aa, Homo sapiens
MDLGAITKYSALHAKPNGLILQYGTAGFRTKAEHLDHVMFRMGLLAVLRSKQTKSTIGVMVTASHNPEEDNGVKLVDPLGEMLAPSWEEHATCLANAEEQDMQRVLIDISEKEAVNLQQDAFVVIGRDTRPSSEKLSQSVIDGVTVLGGQFHDYGLLTTPQLHYMVYCRNTGGRYGKATIEGYYQKLSKAFVELTKQASCSGDEYRSLKVDCANGIGALKLREMEHYFSQGLSVQLFNDGSKGKLNHLCGADFVKSHQKPPQGMEIKSNERCCSFDGDADRIVYYYHDADGHFHLIDGDKIATLISSFLKELLVEIGESLNIGVVQTAYANGSSTRYLEEVMKVPVYCTKTGVKHLHHKAQEFDIGVYFEANGHGTALFSTAVEMKIKQSAEQLEDKKRKAAKMLENIIDLFNQVADRRVISTTDAERQAVTPPGLQEAINDLVKKYKLSRAFVRPSGTEDVVRVYAEADSQESADHLAHEVSLAVFQLAGGIGERPQPGF

SEQ ID NO: 63228 - protein, 1842 aa, Homo sapiens
MQRPAELSVFRSKEVRRKGACLQKQKSLTNLSLTSDGERRPTVRISNWFGNAAKASQREANYAERRSLSKFLSRSVQSLYHTSSSAWNLLPAGGSQSDSEDLEELSARRGLEGESDEDSRSEDENVSSKPSSISRSWAEEEGESCLREGTAHLDEEVILTMLGDLEQALYTDLLGEDPETRRMRTVKNIADLRQNLEETMSSLRGTQISHSTLETTFDSTVTTEVNGRTIPNLTSRPTPMTWRLGQACPRLQAGDAPSLGAGYPRSGTSRFIHTDPSRFMYTTPLRRAAVSRLGNMSQIDMSEKASSDLDMSSEVDVGGYMSDGDILGKSLRTDDINSGYMTDGGLNLYTRSLNRIPDTATSRDIIQRGVHDVTVDADSWDDSSSVSSGLSDTLDNISTDDLNTTSSVSSYSNITVPSRKNTQLRTDSEKRSTTDETWDSPEELKKPEEDFDSHGDAGGKWKTVSSGLPEDPEKAGQKASLSVSQTGSWRRGMSAQGGAPSRQKAGTSALKTPGKTDDAKASEKGKAPLKGSSLQRSPSDAGKSSGDEGKKPPSGIGRSTATSSFGFKKPSGVGSSAMITSSGATITSGSATLGKIPKSAAIGGKSNAGRKTSLDGSQNQDDVVLHVSSKTTLQYRSLPRPSKSSTSGIPGRGGHRSSTSSIDSNVSSKSAGATTSKLREPTKIGSGRSSPVTVNQTDKEKEKVAVSDSESVSLSGSPKSSPTSASACGAQGLRQPGSKYPDIASPTFRRLFGAKAGGKSASAPNTEGVKSSSVMPSPSTTLARQGSLESPSSGTGSMGSAGGLSGSSSPLFNKPSDLTTDVISLSHSLASSPASVHSFTSGGLVWAANMSSSSAGSKDTPSYQSMTSLHTSSESIDLPLSHHGSLSGLTTGTHEVQSLLMRTGSVRSTLSERYTPSSRQANQEEGKEWLRSHSTGGLQDTGNQSPLVSPSAMSSSAAGKYHFSNLVSPTNLSQFNLPGPSMMRSNSIPAQDSSFDLYDDSQLCGSATSLEERPRAISHSGSFRDSMEEVHGSSLSLVSSTSSLYSTAEEKAHSEQIHKLRRELVASQEKVATLTSQLSANAHLVAAFEKSLGNMTGRLQSLTMTAEQKESELIELRETIEMLKAQNSAAQAAIQGALNGPDHPPKDLRIRRQHSSESVSSINSATSHSSIGSGNDADSKKKKKKNWLRSSFKQAFGKKKSTKPPSSHSDIEELTDSSLPASPKLPHNAGDCGSASMKPSQSASAICECTEAEAEIILQLKSELREKELKLTDIRLEALSSAHHLDQIREAMNRMQNEIEILKAENDRLKAETGNTAKPTRPPSESSSSTSSSSSRQSLGLSLNNLNITEAVSSDILLDDAGDATGHKDGRSVKIIVSISKGYGRAKDQKSQAYLIGSIGVSGKTKWDVLDGVIRRLFKEYVFRIDTSTSLGLSSDCIASYCIGDLIRSHNLEVPELLPCGYLVGDNNIITVNLKGVEENSLDSFVFDTLIPKPITQRYFNLLMEHHRIILSGPSGTGKTYLANKLAEYVITKSGRKKTEDAIATFNVDHKSSKELQQYLANLAEQCSADNNGVELPVVIILDNLHHVGSLSDIFNGFLNCKYNKCPYIIGTMNQGVSSSPNLELHHNFRWVLCANHTEPVKGFLGRYLRRKLIEIEIERNIRNNDLVKIIDWIPKTWHHLNSFLETHSSSDVTIGPRLFLPCPMDVEGSRVWFMDLWNYSLVPYILEAVREGLQMYGKRTPWEDPSKWVLDTYPWSSATLPQESPALLQLRPEDVGYESCTSTKEATTSKHIPQTDTEGDPLMNMLMKLQEAANYSSTQSCDSESTSHHEDILDSSLESTL

SEQ ID NO: 63229 - protein, 224 aa, Homo sapiens
MSHVVVKNDPELDQQLANLDLNSEKQSGGASTASKGRYIPPHLRNREASKGFHDKDSSGWSCSKDKDAYSSFGSRDSRGKPGYFSERGSGSRGRFDDRGRSDYDGIGNRERPGFGRFERSGHSRWCDKSVEDDWSKPLPPSERLEQELFSGGNTGINFEKYDDIPVEATGSNCPPHIENFSDIDMGEIIMGNIELTRYTRPTPVQKHAIPIIKGKRDLMACAQT

SEQ ID NO: 63230 - protein, 405 aa, Homo sapiens
MSRINKNVVLALLTLTSSAFLLFQLYYYKHYLSTKNGAGLSKSKGSRIGFDSTQWRAVKKFIMLTSNQNVPVFLIDPLILELINKNFEQVKNTSHGSTSQCKFFCVPRDFTAFALQYHLWKNEEGWFRIAENMGFQCLKIESKDPRLDGIDSLSGTEIPLHYICKLATHAIHLVVFHERSGNYLWHGHLRLKEHIDRKFVPFRKLQFGRYPGAFDRPELQQVTVDGLEVLIPKDPMHFVEEVPHSRFIECRYKEARAFFQQYLDDNTVEAVAFRKSAKELLQLAAKTLNKLGVPFWLSSGTCLGWYRQCNIIPYSKDVDLGIFIQDYKSDIILAFQDAGLPLKHKFGKVEDSLELSFQGKDDVKLDVFFFYEETDHMWNGGTQAKTGKKFKYESNKYLFIKVLQK

SEQ ID NO: 63231 - protein, 109 aa, Homo sapiens
  MOD_RES (1)..(1): Any amino acid
XVKDKLRAIVVTLSYSLQTPRLRRQAPGQGLPPVAPILNAHQPSTQRAEIHFLKQGCGEDKICQSNLQLVRARFCTRVSDTEFQPLPMRSHSACPMRMPPMLSVSWGTP

SEQ ID NO: 63232 - protein, 1606 aa, Homo sapiens
MSSTQGNGEHWKSLESVGISRKELAMAEALQMEYDALSRLRHDKEENRAKQNADPSLISWDEPGVDFYSKPAGRRTDLKLLRGLSGSDPTLNYNSLSPQEGPPNHSTSQGPQPGSDPWPKGSLSGDYLYIFDGSDGGVSSSPGPGDIEGSCKKLSPPPLPPRASIWDTPPLPPRKGSPSSSKISQPSDINTFSLVEQLPGKLLEHRILEEEEVLGGGGQGRLLGSVDYDGINDAITRLNLKSTYDAEMLRDATRGWKEGRGPLDFSKDTSGKPVARSKTMPPQVPPRTYASRYGNRKNATPGKNRRISAAPVGSRPHTVANGHELFEVSEERDEEVAAFCHMLDILRSGSDIQDYFLTGYVWSAVTPSPEHLGDEVNLKVTVLCDRLQEALTFTCNCSSTVDLLIYQTLCYTHDDLRNVDVGDFVLKPCGLEEFLQNKHALGSHEYIQYCRKFDIDIRLQLMEQKVVRSDLARTVNDDQSPSTLNYLVHLQERPVKQTISRQALSLLFDTYHNEVDAFLLADGDFPLKADRVVQSVKAICNALAAVETPEITSALNQLPPCPSRMQPKIQKDPSVLAVRENREKVVEALTAAILDLVELYCNTFNADFQTAVPGSRKHDLVQEACHFARSLAFTVYATHRIPIIWATSYEDFYLSCSLSHGGKELCSPLQTRRAHFSKYLFHLIVWDQQICFPVQVNRLPRETLLCATLYALPIPPPGSSSEANKQRRVPEALGWVTTPLFNFRQVLTCGRKLLGLWPATQENPSARWSAPNFHQPDSVILQIDFPTSAFDIKFTSPPGDKFSPRYEFGSLREEDQRKLKDIMQKESLYWLTDADKKRLWEKRYYCHSEWTHMNHQDALGLLHATFPDQEVRRMAVQWIGSLSDAELLDYLPQLVQALKYECYLDSPLVRFLLKRAVSDLRVTHYFFWLLKDGLKDSQFSIRYQYLLAALLCCCGKGLREEFNRQCWLVNALAKLAQQVREAAPSARQGILRTGLEEVKQFFALNGSCRLPLSPSLLVKGIVPRDCSYFNSNAVPLKLSFQNVDPLGENIRVIFKCGDDLRQDMLTLQMIRIMSKIWVQEGLDMRMVIFRCFSTGRGRGMVEMIPNAETLRKIQVEHGVTGSFKDRPLADWLQKHNPGEDEYEKAVENFIYSCAGCCVATYVLGICDRHNDNIMLKTTGHMFHIDFGRFLGHAQMFGNIKRDRAPFVFTSDMAYVINGGDKPSSRFHDFVDLCCQAYNLIRKHTHLFLNLLGLMLSCGIPELSDLEDLKYVYDALRPQDTEANATTYFTRLIESSLGSVATKLNFFIHNLAQMKFTGSDDRLTLSFASRTHTLKSSGRISDVFLCRHEKIFHPNKGYIYVVKVMRENTHEATYIQRTFEEFQELHNKLRLLFPSSHLPSFPSRFVIGRSRGEAVAERRREELNGYIWHLIHAPPEVAECDLVYTFFHPLPRDEKAMGTSPAPKSSDGTWARPVGKVGGEVKLSISYKNNKLFIMVMHIRGLQLLQDGNDPDPYVKIYLLPDPQKTTKRKTKVARKTCNPTYNEMLVYDGIPKGDLQQRELQLSVLSEQGFWENVLLGEVNIRLRELDLAQEKTGWFALGSRSHGTL

SEQ ID NO: 63233 - protein, 492 aa, Homo sapiens
MSTLCPPPSPAVAKTEIALSGKSPLLAATFAYWDNILGPRVRHIWAPKTEQVLLSDGEITFLANHTLNGEILRNAESGAIDVKFFVLSEKGVIIVSLIFDGNWNGDRSTYGLSIILPQTELSFYLPLHRVCVDRLTHIIRKGRIWMHKERQENVQKIILEGTERMEDQGQSIIPMLTGEVIPVMELLSSMKSHSVPEEIDIADTVLNDDDIGDSCHEGFLLNAISSHLQTCGCSVVVGSSAEKVNKIVRTLCLFLTPAERKCSRLCEAESSFKYESGLFVQGLLKDSTGSFVLPFRQVMYAPYPTTHIDVDVNTVKQMPPCHEHIYNQRRYMRSELTAFWRATSEEDMAQDTIIYTDESFTPDLFMCTCAGVLYRNIFQDVLHRDTLVKAFLDQVFQLKPGLSLRSTFLAQFLLVLHRKALTLIKYIEDDTQKGKKPFKSLRNLKIDLDLTAEGDLNIIMALAEKIKPGLHSFIFGRPFYTSVQERDVLMTF

SEQ ID NO: 63234 - protein, 128 aa, Homo sapiens
MGAFLDKPKMEKHNAQGQGNGLRYGLSSMQGWRVEMEDAHTAVIGLPSGLESWSFFAVYDGHAGSQVAKYCCEHLLDHITNNQDFKGSAGAPSVENVKNGIRTGFLEIDEHMRVMSEKKHGADRSGST

SEQ ID NO: 63235 - protein, 39 aa, Homo sapiens
MEPAAALHFSLPASLLLLLLLLLLSLCALVSVLPRSVCV

SEQ ID NO: 63236 - protein, 580 aa, Homo sapiens
GNNRASHRKELRSSVTCEKRRTRGLSRIVPKSKEFIETESSSSSSSSDSDLESEQEEYPLSKAQTVAASASSGNDQRLKEAAANGGSGPRAPVGSINARTTSDIAKELEEQFYTLVPFGRNELLSPLKDSDEIRSLWVKIDLTLLSRIPEHLPQEPGVLSAPATKDSESAPPSHTSDTPAEKALPKSKRKRKCDNEDDYREIKKSQGEKDSSSRLATSTSNTLSANHCNMNINSVAIPINKNEKMLRSPISPLSDASKHKYTSEDLTSSSRPNGNSLFTSASSSKKPKADSQLQPHGGDLTKAAHNNSENIPLHKSRPQTKPWSPGSNGHRDCKRQKLVFDDMPRSADYFMQEAKRMKHKADAMVEKFGKALNYAEAALSFIECGNAMEQGPMESKSPYTMYSETVELIRYAMRLKTHSGPNATPEDKQLAALCYRCLALLYWRMFRLKRDHAVKYSKALIDYFKNSSKAAQAPSPWGASGNSVGSQGSLSNASALSPSTIVSIPQRIHQMAANHVSITNSILHSYDYWEMADNLAKENREFFNDLDLLMGPVTLHSSMEHLVQYSQQGLHWLRNSAHLS

SEQ ID NO: 63237 - protein, 106 aa, Homo sapiens
MFTELRSKLSPPRGRAGAVRAGFGERRDVDGSVHLQIPYRAFIHSFIDNECGVPLCNQTWIKTPASPDSATAHFSFCRTLLEHTVSAESIPCHLPRTPGTSLTWHD

SEQ ID NO: 63238 - protein, 197 aa, Homo sapiens
MADKQISLPAKLINGGIAGLIGVTCVFPIDLAKTRLQNQQNGQRVYTSMSDCLIKTVRSEGYFGMYRGAAVNLTLVTPEKAIKLAANDFFRHQLSKDGQKLTLLKEMLAGCGAGTCQVIVTTPMEMLKIQLQDAGRIAAQRKILAAQGQLSAQGGAQPSVEAPAAPRPTATQLTRDLLRSRGIAGLYKGLGATLLRD

SEQ ID NO: 63239 - protein, 89 aa, Homo sapiens
  MOD_RES (1)..(1): Any amino acid
XKYGSGNSRDWAAKGPYLLGVKAVLAESYEKIHKDHLIGIGIAPLQFLPGENADSLGLSGRETFSLTFPEELSPGITLNIQVSLNFSNI

SEQ ID NO: 63240 - protein, 73 aa, Homo sapiens
MPERDSEPFSNPLAPDGHDVDDPHSFHQLECSGAISAHHNLRLPGSSNSPASAFRVAGITDQNSPMKTSGNFS

SEQ ID NO: 63241 - protein, 2367 aa, Homo sapiens
MGTRGAVMPPPMWGLLGCCFVCAWALGGPRPIRSLPPLSSQVKPGSVPMQVPLEGAEAALAYLYSGDAQQLSQVNCSERYEARGAGAMPGLPPSLQGAAGTLAQAANFLNMLLQANDIRESSVEEDVEWYQALVRSVAEGDPRVYRALLTFNPPPGASHLQLALQATRTGEETILQDLSGNWVQEENPPGDLDTPALKKRVLTNDLGSLGSPKWPQADGYVGDTQQVRLSPPFLECQEGRLRPGWLITLSATFYGLKPDLSPEVRGQVQMDVDLQSVDINQCASGPGWYSNTHLCDLNSTQCVPLESQGFVLGRYLCRCRPGFYGASPSGGLEESDFQTTGQFGFPEGRSGRLLQCLPCPEGCTSCMDATPCLVEEAAVLRAAVLACQACCMLAIFLSMLVSYRCRRNKRIWASGVVLLETVLFGFLLLYFPVFILYFKPSVFRCIALRWVRLLGFAIVYGTIILKLYRVLQLFLSRTAQRSALLSSGRLLRHLGLLLLPVLGFLAVWTVGALERGIQHAPLVIRGHTPSGRHFYLCHHDRWDYIMVVAELLLLCWGSFLCYATRAVLSAFHEPRYMGIALHNELLLSAAFHTARFVLVPSLHPDWTLLLFFFHTHSTVTTTLALIFIPKFWKLGAPPREEMVDEVCEDELDLQHSGSYLGSSIASAWSEHSLDPGDIRDELKKLYAQLEVHKTKEMAANNPHLPKKRGSSCQGLGRSFMRYLAEFPEALARQHSRDSGSPGHGSLPGSSRRRLLSSSLQEPEGTPALHKSRSTYDQRREQDPPLLDSLLRRKLAKKASRTESRESVEGPPALGFRSASAHNLTVGERLPRARPASLQKSLSVASSREKALLMASQAYLEETYRQAKEREERKKAKAAMASLVRRPSARRLERPRGAPLSAPPSPAKSSSVDSSHTSGRLHEEARRRLPHPPIRHQVSTPILALSGGLGEPRMLSPTSTLAPALLPALAPTPAPALAPVPVSPQSPNLLTYICPWENAELPAKQENVPQEGPSGPERGHHSPAPARARLWRALSVAVEKSRAGENEMDAEDAHHQREANDVDEDRPKIFPKSHSLKAPVQQGSMRSLGLAIKALTRSRSTYREKESVEESPEGQNSGTAGESMGAPSRSPRLGRPKAVSKQAALIPSDDKESLQNQQNAHTSRMLQVCQREGSREQEDRGRRMTQGLGERKAERAGKTGLAMLRQVSRDKNIKQSKETPVGWQELPKAGLQSLGSADHRVAEVCPWEVTESETRQPDSGNKAEICPWETSEGAPESRALRQDPGDSQKKRGEARGKSEPIDVVPMMRKKPERLVREQEAVCPWESADRGGLSPGSAPQDPGRIRDKSEAGDSVEARKVEKPGWEAAGPEAHTPDITKAEPCPWEASEGGEDGKPAQEAVKDLPQEKQKTRKATFWKEQKPGGDLESLCPWESTDFRGPSAVSIQAPGSSECSGSLGSGIAEVCLWEAGDAPAIQKAEICPWELDDNVMGQEMLSLGTGRESLQEKEKASRKGSFGEMGEQTVKAVQKLSQQQESVCPRESTVPGHSSPCLDNSSSKAGSQFLCNGGSRATQVCPQEDLRPEAQEATPAKTEICPWEVNERTREEWTSAQVPRGGESQKDKEKMPGKSEIEDVTAWEKPEGQIQKQEAVGPWESVDPGSFSPQPRPQDTERPQTLLQMSGSVGSKAADICPLDVEENLTAGKAEICPWEVGAGAGEERALGAEAIRKSPNDTGKVSADLGPRERAVTAPEKPQKPTPEWEVACPWGSVGPGACSQHPGTLDADGPKAGFQELDHMGCRPGEVCPWEAQEAATSEKAKICPWEVSEGTTGKGLDQKAGSESAEQREKALEKGRLTSLGEDVSKGMAKLCQQQETICIWENKDLRESPAQAPKISDLPSSMSSEVAEGHSLEATEKGDLRQDPKTGSFPEHITQEKAPAADTEEFTTEDGEKTSHELQSVCPWETTAPADSVSHLDRQRPDQPKASSQRLVSTGGRAADVCPWDVPDAGVYKSDSSAKAETCPWEVTERIPVKGVSRQDGKGDSQEEKGRAPEKSEPKGVPVQKKPEMADFRQQEAVCPWESQDGKGLSPQPAPDASDRSRGSSEAAGSVETRVAEVCLWEVVEAPSAKKAEICPWEAGGGAAEEGEQERESQGQGEMFLQKAGPGGTEEHFSKAAAKPREQEAVCPGEGTGSGGLLPQSGALDPELKVSPKEAGSMGSRMAELCQWEITDPEGNKIKGTMADICPGEETGVPSEESGLLALTATRREFFPTAPEKPLCLLVHGPLDHFFPESKIPCPKVSRPASTFTLEGVRELQGPSGLEPRTSLAPEPSLQEAESQSSSLTEDSGQVAFEAQYEEFTPPTVYPWDWE

SEQ ID NO: 63242 - protein, 253 aa, Homo sapiens
MNWRRKSVIGLSFDFVALNLTGFVAYSVFNIGLLWVPYIKEQFLLKYPNGVNPVNSNDVFFSLHAVVLTLIIIVQCCLYERGGQRVSWPAIGFLVLAWLFAFVTMIVAAVGVTTWLQFLFCFSYIKLAVTLVKYFPQAYMNFYYKSTEGWSIGNVLLDFTGGSFSLLQMFLQSYNNDQWTLIFGDPTKFGLGVFSIVFDVVFFIQHFCLYRKRPGLQAARTGSGSRLRQDWAPSLQPKALPQTTSVSASSLKG

SEQ ID NO: 63243 - protein, 188 aa, Homo sapiens
  MOD_RES (1)..(1): Any amino acid
XLPRGTRRRRRSGATGRRVPRAQRAAPAEAVEPRDEDEWKELEQKEVDYSGLRVQAMQISSEKEEDDNEKRQDPGDNWEEGGGGGGGMEKSSGPWNKTAPVQAPPAPVIVTETPEPAMTSGVYRPPGARLTTTRKTPQGPPEIYSDTQFPSLQSTAKHVESRKDKEMEKSFEVVRHKNRGRDEVSKNQ

SEQ ID NO: 63244 - protein, 164 aa, Homo sapiens
  MOD_RES (1)..(1): Any amino acid
XADTLKERYQKIGDTKRATPIEVLCENFPEEMATYLRYVRRLDFFEKPDYDYLRKLFTDLFDRKGYMFDYEYDWIGKQLPTPVGAVQQDPALSSNREAHQHRDKMQQSKNQVVSSTNGELNTDDPTAGRSNAPITAPTEVEVMDETKCCCFFKRRKRKTIQRHK

SEQ ID NO: 63245 - protein, 1915 aa, Homo sapiens
MIEDKGPRVADYFVVAGLTDVSKPLEEEIHFNDACHKVAKPKEPITDVSVIIKSLGEEVPQDYICIDVTPTGLSADLNNGSLVGPQIYLCYRRGRDKPPLTDLGVLYDWKERLKQGCEIIQSTPYGRPANISGSTSSQRIYITYRRASENMTQNTLAVTDICIIIPSKGESPPHTFCKVDKNLNNSMWGSAVYLCYKKSVAKTNTVSYKAGLICRYPQEDYESFSLPESVPLFCLPMGATIECWPSNSKYPLPVFSTFVLTGASAEKVYGAAIQFYEPYSEENLTEKQRLLLGLTSADGKSDSSKTIHTNKCICLLSHWPFFDAFRKFLTFLYRYSISGPHVLPIEKHISHFMHKVPFPSPQRPRILVQLSPHDNLILSQPVSSPLPLSGGKFSTLLQNLGPENAVTLLVFAVTEHKILIHSLRPSVLTSVTEALVSMIFPFHWPCPYVPLCPLALADVLSAPCPFIVGIDSRYFDLYDPPPDVSCVDVDTNTISQIGDKKNVAWKILPKKPCKNLMNTLNNLHQQLAKLQQRPRDDGLMDLAINDYDFNSGKRLHMIDLEIQEAFLFFMASILKGYRSYLRPITQAPSETATDAASLFALQAFLRSRDRSHQKFYNMMTKTQMFIRFIEECSFVSDKDASLAFFDDCVDKVDMDKSGEVRLIELDESFKSEHTVFVTPPEIPHLPNGEEPPLQYSYNGFPVLRNNLFERPEGFLQAKKNKLPSKSSSPNSPLPMFRRTKQEIKSAHKIAKRYSSIPQMWSRCLLRHCYGLWFICLPAYVKVCHSKVRALKTAYDVLKKMQSKKMDPPDEVCYRILMQLCGQYDQPVLAVRVLFEMQKAGIDPNAITYGYYNKAVLESTWPSRSRSGYFLWTKVRNVVLGVTQFKRALKKHAHLSQTTLSDGSDLDAVSHGSMDSGHGTHTVEQAPFNTGLIKVYATDDRSSTGGQSDLGYNSLSKDEVRRGDTSTEDIQEEKDKKGSDCSSLSESESTKGSADCLPKLSYQNSSSIVRLTGTSNNSAGKISGESMESTPELLLISSLEDTNETRNIQSRCFRKRHKSDNETNLQQQVVWGNRNRNLSGGVLMGFMLNRINQEATPGDIVEKLGADAKILSNVISKSTRPNTLDIGKPPLRSKRDSLEKESSDDDTPFDGSNYLADKVDSPVIFDLEDLDSETDVSKAGCVATQNPKRIQRMNSSFSVKPFEKTDVATGFDPLSLLVAETEQQQKEEEEEDEDDSKSISTPSARRDLAEEIVMYMNNMSSPLTSRTPSIDLQRACDDKLNKKSPPLVKACRRSSLPPNSPKPVRLTKSKSYTKSEEKPRDRLWSSPAFSPTCPFREESQDTLTHSSPSFNLDTLLVPKLDVLRNSMFTAGKGVAEKASKWYSRFTMYTTSSKDQSSDRTSLSSVGAQDSESTSLTDEDVCHELEGPISSQETSATSGTKRIDLSRISLESSASLEGSLSKFALPGKSEVTSSFNASNTNIFQNYAMEVLISSCSRCRTCDCLVHDEEIMAGWTADDSNLNTTCPFCGNIFLPFLNIEIRDLRRPGRYFLKSSPSTENMHFPSSISSQTRQSCISTSASGLDTSALSVQGNFDLNSKSKLQENFCTRSIQIPANRSKTAMSKCPIFPMARSISTSGPLDKEDTGRQKLISTGSLPATLQGATDSLGLEWHLPSPDPVTVPYLSPLVVWKELESLLENEGDHAITVADFVDHHPIVFWNLVWYFRRLDLPSNLPGLILSSEHCNKYSKIPRHCMSEDSKYVLIQMLWDNMKLHQDPGQPLYILWNAHSQSRTLLFETQKYPMVHLLQKSDNSFNQELLKSMVKSIKMNDVYGPMSQILETLNKCPHFKRQRSLYREILFLSLVALGRENIDIDAFDKEYKMAYDRLTPSQVKSTHNCDRPPSTGVMECRKTFGEPYL

SEQ ID NO: 63246 - protein, 51 aa, Homo sapiens
MEKKLLIKSKELQDSQDKCHKVFISAAGLLPCSRILPSVYAKGSARGRCWL

SEQ ID NO: 63247 - protein, 39 aa, Homo sapiens
MAERQEEQRGSPPLRAEGKADAEVKLILYHWTHSFSSQK

SEQ ID NO: 63248 - protein, 65 aa, Homo sapiens
MDEPMGEEEINPQTEEVSIKEIAITHHVKEGHEKADPSQFELLKVLGQGSFGKVFLVKKISGSDA

SEQ ID NO: 63249 - protein, 276 aa, Homo sapiens
MALHPRRVRLKPWLVAQVDSGLYPGLIWLHRDSKRFQIPWKHATRHSPQQEEENTIFKAWAVETGKYQEGVDDPDPAKWKAQLRCALNKSREFNLMYDGTKEVPMNPVKIYQVCDIPQPQGSIINPGSTGSAPWDEKDNDVDEEDEEDELDQSQHHVPIQDTFPFLNINGSPMAPASVGNCSVGNCSPEAVWPKTEPLEMEVPQAPIQPFYSSPELWISSLPMTDLDIKFQYRGKEYGQTMTVSNPQGCRLFYGDLGPMPDQEELFGPVSLEQVKF

SEQ ID NO: 63250 - protein, 613 aa, Homo sapiens
MAKTPSDHLLSTLEELVPYDFEKFKFKLQNTSVQKEHSRIPRSQIQRARPVKMATLLVTYYGEEYAVQLTLQVLRAINQRLLAEELHRAAIQEYSTQENGTDDSAASSSLGENKPRSLKTPDHPEGNEGNGPRPYGGGAASLRCSQPEAGRGLSRKPLSKRREKASEGLDAQGKPRTRSPALPGGRSPGPCRALEGGQAEVRLRRNASSAGRLQGLAGGAPGQKECRPFEVYLPSGKMRPRSLEVTISTGEKAPANPEILLTLEEKTAANLDSATEPRARPTPDGGASADLKEGPGNPEHSVTGRPPDTAASPRCHAQEGDPVDGTCVRDSCSFPEAVSGHPQASGSRSPGCPRCQDSHERKSPGSLSPQPLPQCKRHLKQVQLLFCEDHDEPICLICSLSQEHQGHRVRPIEEVALEHKKKIQKQLEHLKKLRKSGEEQRSYGEEKAVSFLKQTEALKQRVQRKLEQVYYFLEQQEHFFVASLEDVGQMVGQIRKAYDTRVSQDIALLDALIGELEAKECQSEWELLQDIGDILHRAKTVPVPEKWTTPQEIKQKIQLLHQKSEFVEKSTKYFSETLRSEMEMFNGESSGNGVCWPGVVAVFPCAVDLRGPI

SEQ ID NO: 63251 - protein, 131 aa, Homo sapiens
MNPCVLGTVPACRLTWPTDAGPDDAAVDTSSEITTKDLKEKKEVVEEAENGRDAPANGNANEENGEQEADNEVDEEEEEGGEEEEEEEEGDGEEEDGDEDEEAESATGKRAAEDDEDDDVDTKKQKTDEDD

SEQ ID NO: 63252 - protein, 176 aa, Homo sapiens
MGNLALGRKLWADTTCGQNATELYCFYSENTDLTCRQPKCDKCNAAYPHLAHLPSAMADSSFRFPRTWWQSAEDVHREKIQLDLEAEFYFTHLIVMFKSPRPAAMVLDRSQDFGKTWKPYKYFATNCSATFGLEDDVVKKGAICTSKYSSPFPCTGGEVIFKALSPPYDTENPYSA

SEQ ID NO: 63253 - protein, 71 aa, Homo sapiens
MHTLLAATKDSLAMDPPVVNRPKKSKTKKAPIKTITKAAPAAPPVPAANEIATNKPKITWQALNLPVITQI

SEQ ID NO: 63254 - protein, 144 aa, Homo sapiens
MPAEKTVQVKNVMDKNGDAYGFYNNSVKTTGWGILEIRAGYGSQTLSNEIIMFVAGFLEGYLTAPHMNDHYTNLYPQLITKPSIMDKVQDFMEKQDKWTRKNIKEYKTDSFWRHTGYVMAQIDGLYVGAKKRAILEGTKPMTLF

SEQ ID NO: 63255 - protein, 559 aa, Homo sapiens
MKRTPTAEEREREAKKLRLLEELEDTWLPYLTPKDDEFYQQWQLKYPKLILREASSVSEELHKEVQEAFLTLHKHGCLFRDLVRIQGKDLLTPVSRILIGNPGCTYKYLNTRLFTVPWPVKGSNIKHTEAEIAAACETFLKLNDYLQIETIQALEELAAKEKANEDAVPLCMSADFPRVGMGSSYNGQDEVDIKSRAAYNVTLLNFMDPQKMPYLKEEPYFGMGKMAVSWHHDENLVDRSAVAVYSYSCEGPEEESEDDSHLEGRDPDIWHVGFKISWDIETPGLAIPLHQGDCYFMLDDLNATHQHCVLAGSQPRFSSTHRVAECSTGTLDYILQRCQLALQNVCDDVDNDDVSLKSFEPAVLKQGEEIHNEVEFEWLRQFWFQGNRYRKCTDWWCQPMAQLEALWKKMEGVTNAVLHEVKREGLPVEQRNEILTAILASLTARQNLRREWHARCQSRIARTLPADQKPECRPYWEKDDASMPLPFDLTDIVSELREYQSTINTVLPGGISCFKFASQICCRVKSHYVAQAGLEFLASNSWPQAILLPQPPKALGLQV

SEQ ID NO: 63256 - protein, 1262 aa, Homo sapiens
MTPGTQSPFFLLLLLTVLTVVTGSGHASSTPGGEKETSATQRSSVPSSTEKNAVSMTSSVLSSHSPGSGSSTTQGQDVTLAPATEPASGSAATWGQDVTSVPVTRPALGSTTPPAHDVTSAPDNKPAPGSTAPPAHGVTSAPDTRPAPGSTAPQAHGVTSAPDTRPAPGSTAPPAHGVTSAPDTRPAPGSTAPPAHGVTSAPDTRSAPGSTAPAAHGVTSAPDTRSVPGSTAPQAHGVTSAPDTRPAPGSTAPPAHGVTSAPDTRPVPGSTAPPAHGVTSAPDTRPAPGSTAPPAHGVTSAPDTRPAPGSTAPQAHGVTSAPDTRPAPGSTAPPAHGVTSAPDTRPAPGSTAPPAHGVTSAPDTRPAPGSTAPAAHGVTSAPDTRPAPGSTAPQAHGVTSAPDTRPAPGSTAPPAHGVTSAPDTRPAPGSTAPPAHGVTSAPDTRPAPGSTAPPAHGVTSAPDTRPAPGSTAPAAHGVTSAPDTRPAPGSTAPQAHGVTSAPDTRPAPGSTAPPAHGVTSAPDTRPAPGSTAPPAHGVTSAPDTRPAPGSTAPPTHGVTSAPDTSPAPGSTAPPAHGVTSAPDTRPAPGYTAPAAHGVTSAPDTRPAPGSTAPQAHGVTSAPDTRPAPGSTAPPAHGVTSAPDTRPAPGSTAPPAHGVTSAPDTRPAPGSTAPPAHGVTSAPESRPAPGSTARAAHGVTSAPESRPAPGSTAPPAHGVTSAPDTRPAPGSTAPPAHGVTSAPDTRPAPGSTAPPAHGVTSAPDTRPAPGSTAPPAHGVTSAPDTRPAPGSTAPPAHGVTSAPDTRPSPPGSTAPPAHGVTSAPDTRPAPGSTAPPVHGVTSAPDTRPAPGSTAPPAHGVTSAPDTRPAPGSTAPPAHGVTSAPDTRPAPGSTAPPAHGVTSAPDTRRAPGSTPAPGSTAPPAHGVTSAPDTRPAPGSTAPPAHGVTSAPDNRPALGSTAPPVHNVTSASGSASGSASTLVHNGTSARATTTPASKSTPFSIPSHHSDTPTTLASHSTKTDASSTHHSTVPPLTSSNHSTSPQLSTGVSFFFLSFHISNLQFNSSLEDPSTDYYQELQRDISEMFLQIYKQGGFLGLSNIKFRPGSVVVQLTLAFREGTINVHDVETQFNQYKTEAASRYNLTISDVSVSDVPFPFSAQSGAGVPGWGIALLVLVCVLVALAIVYLIALAVCQCRRKNYGQLDIFPARDTYHPMSEYPTYHTHGRYVPPSSTDRSPYEKVSAGNGGSSLSYTNPAVAATSANL

SEQ ID NO: 63257 - protein, 150 aa, Homo sapiens
MSRDVCIHTWPCTYYLEPKRRWVTGQLSLTSLSLRFMTDSTGEILVSFPLSSIVEIKKEASHFIFSSITILEKGHAKHWFSSLRPSRNVVFSIIEHFWRELLLSQPGAVADASVPRTRGEELTGLMAGSQKRLEDTARVLHHQGQQLDSV

SEQ ID NO: 63258 - protein, 163 aa, Homo sapiens
  MOD_RES (1)..(1): Any amino acid
XTCHIDNSSEADVEAATDLFLCPFLGSTGPMYLKGNVYGSDPFETYHTGCSPDPRTVLMDHYEPSYIKKKECYPCSHPSEESCERSFSNISWPSHVRKLLNTSYSHNEGPGMKNLCLNKSSLDFSANPEPASVASSNSFMGKFIKLSGTSSEDPYSKLCVREQ

SEQ ID NO: 63259 - protein, 82 aa, Homo sapiens
  MOD_RES (1)..(1): Any amino acid
XNAKLYISNWILIYFTRTLQLPAPFNTCTSSKSRGEPGCDSKSLTLLPRLECSGTILAHCSLRLPGSSDPPASASQVAEITA

SEQ ID NO: 63260 - protein, 66 aa, Homo sapiens
MAWKSGGASHSELIHNLRKNGIIKTDKVFEVMLATDRSHYAKCNPYMDSPQSIGFAELLSLGSGRL

SEQ ID NO: 63261 - protein, 218 aa, Homo sapiens
  MOD_RES (1)..(1): Any amino acid
XFNRFFDNVTNKDSPLPSNVQQGSNVSDEKTSHTRVDITDLIRESNELRVVSQDVKLSLQELDELYVIFKKELFLSCYWCLGCPVLKHHDPSLPYLEQYQIDCQQFRALYHLLSPWAHSANKDSLALWTFRLLDENSDCLINFKEFSSAIDIMYNGSFTEKLKLLFKLHIPPAYTEVKSKDASKGDELSKEELLYFSQLHVSKPANEKEAESAKHSPE

SEQ ID NO: 63262 - protein, 101 aa, Homo sapiens
MGGSALNQGVLEGDDAPGQSLYERLSQRMLDISGDRGVLKDVIREGAGDLVAPDASVLVKYSGYLEHMDRPFDSNYFRKTPRLMKLGEGRFRVGAGEEGIV

SEQ ID NO: 63263 - protein, 353 aa, Homo sapiens
MSQEPTTYSLFLFLFLSHGVSSYTVPNSRQDLHPLLQNMAEEIIDGSYLNALLDLIQFQSSHVWTDDLSHRVLAYLNSRNVAFTIPSLQAAVENHLEQRLHQPQKLLEDLRKTDAQQFRTAMKCLLEDKKDGLDLKDIIIDLGEIRERALQSPGVNRSLFLITLERCFQMLNSLECVEILGKVLRGSSGSFLQPDITERLPRDLREDAFKNLSAVFKDLYDKTSAHSQRALYSWMTGILQTSSNATDDSASWVSAEHLWVLGRYMVHLSFEEITKISPIEIGLFISYDNATKQLDMVYDITPELAQAFLERISSSNFNMRNTSTIHSSKQNSWTLPWRTRPSMRPWVLCRMQL

SEQ ID NO: 63264 - protein, 152 aa, Homo sapiens
  MOD_RES (1)..(1): Any amino acid
XQASTQVPRTVPHTQRVANIGTQTTGPSGVGCCTPGRPLLPCKCSSAAHSTYRVQEPAVHIPGQEPLTASMLAAAPLHEQKQMIGERLYPLIHDVHTQLAGKITGMLLEIDNSELLLMLESPESLHAKAQRRKVQRLVKYILALKELSTQNL

SEQ ID NO: 63265 - protein, 444 aa, Homo sapiens
  MOD_RES (1)..(1): Any amino acid
XVLILRNHGLVSVGESVEEAFYYIHNLVVACEIQVRTLASAGGPDNLVLLNPEKYKAKSRSPGSPVGEGTGSPPKWQIGEQEFEALMRMLDNLGYRTGYPYRYPALREKSKKYSDVEVPASVTGYSFASDGDSGTCSPLRHSFQKQQREKTRWLNSGRGDEASEEGQNGSSPKSKTKVWTNITHDHVKPLLQSLSSGVCVPSCITNCLWTKEDGHRTSTSAVPNLFVPLNTNPKEVQEMRNKIREQNLQDIKTAGPQSQVLCGVVMDRSLVQGELVTASKAIIEKEYQPHVIVSTTGPNPFTTLTDRELEEYRREVERKQKGSEENLDEAREQKEKSPPDQPAVPHPPPSTPIKLEEDLVPEPTTGDDSDAATFKPTLPDLSPDEPSEALGFPMLEKEEEAHRPPSPTEAPTEASPEPAPDPAPVAEEAAPSAVEEGAAADPGS

SEQ ID NO: 63266 - protein, 200 aa, Homo sapiens
MLGLWGQRLPAAWVLLLLPFLPLLLLAAPAPHRASYKPVIVVHGLFDSSYSFRHLLEYINETHPGTVVTVLDLFDGRESLRPLWEQVQGFREAVVPIMAKAPQGVHLICYSQGGLVCRALLSVMDDHNVDSFISLSSPQMGQYGDTDYLKWLFPTSMRSNLYRICYSPWGQEFSICNYWHDPHHDDLYLNASSFLALING

SEQ ID NO: 63267 - protein, 96 aa, Homo sapiens
MIQAKLLKADLHGAIISVTKSKCPSYVGITGILLQETKHIFKIITKEDRLKVIPKLNCVFTVETDGFISYIYGSKFQLRSSERSAKKFKAKGTIDL

SEQ ID NO: 63268 - protein, 120 aa, Homo sapiens
GSAAPPGLEAARQKLALRRKKVLSTEEMELYELAQAAGGAIDPDVFKEKQRQRCPRGSIGPGGTQQPRRIQPEDATPAQRYQAAQGGRAWEEPYTGQHLGWGRDLLHLCPQQRLHVTSFN

SEQ ID NO: 63269 - protein, 94 aa, Homo sapiens
MGLAWGLGVLFLMHVCGTNRIPESGGDNSVFDIFELTGAARKGSGRRLVKGPDPSSPAFRIEDANLIPPVPDDKFQDLVDAVRAEKGFLLLASL

SEQ ID NO: 63270 - protein, 635 aa, Homo sapiens
MVPRLLLRAWPRGPAVGPGAPSRPLSAGSGPGQYLQRSIVPTMHYQDSLPRLPIPKLEDTIRRYLSAQKPLLNDGQFRKTEQFCKSFENGIGKELHEQLVALDKQNKHTSYISGPWFDMYLSARDSVVLNFNPFMAFNPDPKSEYNDQLTRATNMTVSAIRFLKTLRAGLLEPEVFHLNPAKSDTITFKRLIRFVPSSLSWYGAYLVNAYPLDMSQYFRLFNSTRLPKPSRDELFTDDKARHLLVLRKGNFYIFDVLDQDGNIVSPSEIQAHLKYILSDSSPAPEFPLAYLTSENRDIWAELRQKLMSSGNEESLRKVDSAVFCLCLDDFPIKDLVHLSHNMLHGDGTNRWFDKSFNLIIAKDGSTAVHFEHSWGDGVAVLRFFNEVFKDSTQTPAVTPQSQPATTDSTVTVQKLNFELTDALKTGITAAKEKFDATMKTLTIDCVQFQRGGKEFLKKQKLSPDAVAQLAFQMAFLRQYGQTVATYESCSTAAFKHGRTETIRPASVYTKRCSEAFVREPSRHSAGQGFDRHLFALRHLAAAKGIILPELYLDPAYGQINHNVLSTSTLSSPAVNLGGFAPVVSDGFGVGYAVHDNWIGCNVSSYPGRNAREFLQCVEKALEDMFDALEGKSIKS

SEQ ID NO: 63271 - protein, 88 aa, Homo sapiens
MSDILRELLCVSEKAANIARACRQQEALFQLLIEEKKEGEKNKKFAVDFKTLADVLVQEVIKQNMENKFPGLEKNIFGEESNEFTNDW

SEQ ID NO: 63272 - protein, 1168 aa, Homo sapiens
MPTAESEAKVKTKVRFEELLKTHSDLMREKKKLKKKLVRSEENISPDTIRSNLHYMKETTSDDPDTIRSNLPHIKETTSDDVSAANTNNLKKSTRVTKNKLRNTQLATENPNGDASVEEDKQGKPNKKVIKTVPQLTTQDLKPETPENKVDSTHQKTHTKPQPGVDHQKSEKANEGREETDLEEDEELMQAYQCHVTEEMAKEIKRKIRKKLKEQLTYFPSDTLFHDDKLSSEKRKKKKEVPVFSKAETSTLTISGDTVEGEQKKESSVRSVSSDSHQDDEISSMEQSTEDSMQDDTKPKPKKTKKKTKAVADNNEDVDGDGVHEITSRDSPVYPKCLLDDDLVLGVYIHRTDRLKSDFMISHPMVKIHVVDEHTGQYVKKDDSGRPVSSYYEKENVDYILPIMTQPYDFKQLKSRLPEWEEQIVFNENFPYLLRGSDESPKVILFFEILDFLSVDEIKNNSEVQNQECGFRKIAWAFLKLLGANGNANINSKLRLQLYYPPTKPRSPLSVVEAFEWWSKCPRNHYPSTLYVTVRGLKVPDCIKPSYRSMMALQEEKGKPVHCERHHESSSVDTEPGLEESKEVIKWKRLPGQACRIPNKHLFSLNAGERGCFCLDFSHNGRILAAACASRDGYPIILYEIPSGRFMRELCGHLNIIYDLSWSKDDHYILTSSSDGTARIWKNEINNTNTFRVLPHPSFVYTAKFHPAVRELVVTGCYDSMIRIWKVEMREDSAILVRQFDVHKSFINSLCFDTEGHHMYSGDCTGVIVVWNTYVKINDLEHSVHHWTINKEIKETEFKGIPISYLEIHPNGKRLLIHTKDSTLRIMDLRILVARKFVGAANYREKIHSTLTPCGTFLFAGSEDGIVYVWNPETGEQVAMYSDLPFKSPIRDISYHPFENMVAFCAFGQNEPILLYIYDFHVAQQEAEMFKRYNGTFPLPGIHQSQDALCTCPKLPHQGSFQIDEFVHTESSSTKMQLVKQRLETVTEVIRSCAAKVNKNLSFTSPPAVSSQQSKLKQSNMLTAQEILHQFGFTQTGIISIERKPCNHQVDTAPTVVALYDYTANRSDELTIHRGDIIRVFFKDNEDWWYGSIGKGQEGYFPANHVASETLYQELPPEIKERSPPLSPEEKTKIEKSPAPQKQSINKNKSQDFRLGSESMTHKELKKS

SEQ ID NO: 63273 - protein, 73 aa, Homo sapiens
MATPYVPVPMPIGNSASSFTTNRNQRSSSFGSVSTSSNSSKGQLEDSNMGTASSIEYSTRPRDTEEQNPETVN

SEQ ID NO: 63274 - protein, 80 aa, Homo sapiens
MEQSNDSLRVNHNDGEESKTSAQVFEMIVASPTENGQVLRVIPPTQTGMAQVIIPQGQLVDVNSPRDVPEEKPSNRNLPT

SEQ ID NO: 63275 - protein, 435 aa, Homo sapiens
MGRTVVVLGGGISGLAASYHLSRAPCPPKVVLVESSERLGGWIRSVRGPNGAIFELGPRGIRPAGALGARTLLLVSELGLDSEVLPVRGDHPAAQNRFLYVGGALHALPTGLRGLLRPSPPFSKPLFWAGLRELTKPRGKEPDETVHSFAQRRLGPEVASLAMDSLCRGVFAGNSRELSIRSCFPSLFQAEQTHRSILLGLLLGAGRTPQPDSALIRQALAERWSQWSLRGGLEMLPQALETHLTSRGVSVLRGQPVCGLSLQAEGRWKVSLRDSSLEADHVISAIPASVLSELLPAEAAPLARALSAITAVSVAVVNLQYQGAHLPVQVMLGGSWLQTLEASGCVLSQELFQQRAQEAAATQLGLKEMPSHCLVHLHKNCIPQYTLGHWQKLESARQFLTAHRLPLTLAGASYEGVAVNDCIESGRQAAVSVLG

SEQ ID NO: 63276 - protein, 78 aa, Homo sapiens
MENNIQMIQADTFRHLHHLEVLQLGRNSIRQIEVGAFNGLASLNTLELFDNWLTVIPSGAFEYLSKLRELWLRNNPIE

SEQ ID NO: 63277 - protein, 201 aa, Homo sapiens
  MOD_RES (1)..(1): Any amino acid
XVDSEALVGCLRGKSKEEILAINKPFKMIPGVVDGVFLPRHPQELLASADFQPVPSIVGVNNNEFGWLIPKVMRIYDTQKEMDREASQAALQKMLTLLMLPPTFGDLLREEYIGDNGDPQTLQAQFQEMMADSMFVIPALQVAHFQCSRAPVYFYEFQHQPSWLKNIRPPHMKADHVKFTEEEEQLSRKMMKYWANFARNG

SEQ ID NO: 63278 - protein, 136 aa, Homo sapiens
  MOD_RES (1)..(1): Any amino acid
XYQPAQDRLQPHLLEMLIQLPANSVTKVSIQFERALLKWTEYTPDPNHGFYVRFPVSDGSNYFVRLYTEPLLVNLPTPDFSMPYNVICLTCTVVAVCYGSFYNLLTRTFHIEEPRTGGLAKRLANLIRRARGVPPL

SEQ ID NO: 63279 - protein, 495 aa, Homo sapiens
MALSVPGYSPGFRKPPEVVRLRRKRARSRGAAASPPRELTEPAARRAALVAGLPLRPFPAAGGRGGGSGGGPAAARRNPFARLDNRPRVAAEPPDGPAREQPEAPVPFLDSNQENDLLWEEKFPERTTVTELPQTSHVSFSEPDIPSSKSTELPVDWSIKTRLLFTSSQPFTWADHLKAQEEAQGLVQHCRATEVTLPKSIQDPKLSSELRCTFQQSLIYWLHPALSWLPLFPRIGADRKMAGKTSPWSNDATLQHVLMSDWSVSFTSLYNLLKTKLCPYFYVCTYQFTVLFRAAGLAGSDLITALISPTTRGLREAMRNEGIEFSLPLIKESGHKKETASGTSLGYGEEQAISDEDEEESFSWLEEMGVQDKIKKPDILSIKLRKEKHEVQMDHRPESVVLVKGINTFTLLNFLINSKSLVATSGPQAGLPPTLLSPVAFRGATMQMLKEVVHKELTNCGLHPNTLEQLSQIPLLGKSSLRNVVLRDYIYNWRS

SEQ ID NO: 63280 - protein, 39 aa, Homo sapiens
MGPRSRERRAGAVQNTNDSSALSKRSLAARGRTPAGGKY

SEQ ID NO: 63281 - protein, 44 aa, Homo sapiens
MPGIKRILTVTILALCLPSPGNAQAQCTNGFDLDRQSGQCLASL

SEQ ID NO: 63282 - protein, 138 aa, Homo sapiens
MAENGKNCDQRRVAMNKEHHNGNFTDPSSVNEKKRREREERQNIVLWRQPLITLQYFSLEILVILKEWTSKLWHRQSIVVSFLLLLAVLIATYYVEGVHQQYVQRIEKQFLLYAYWIGLGILSSVGLGTGLHTFLLYL

SEQ ID NO: 63283 - protein, 58 aa, Homo sapiens
MASALWTVLPSRMSLRSLKWSLLLLSLLSFFVMWYLSLPHYNVIERVNWMYFYEYEPI

SEQ ID NO: 63284 - protein, 199 aa, Homo sapiens
MRTDGARSHLAPVESSQEEQSLCEGSNSAVSMELSEPIVENGETEMSPEESWEHKEEISEAEPGGGSLGDGRPPEESAHEMMEEEEEIPKPKSVVAPPGAPKKEHVNVVFIGHVDAGKSTIGGQIMYLTGMVDKRTLEKYEREAKEKNRETWYLSWALDTNQEERDKGKTVEVGRAYFETEKKHFTILDAPGHKSFVPN

SEQ ID NO: 63285 - protein, 418 aa, Homo sapiens
MNRHLWKSQLCEMVQPSGGPAADQDVLGEESPLGKPAMLHLPSEQGAPETLQRCLEENQELRDAIRQSNQILRERCEELLHFQASQREEKEFLMCKFQEARKLVERLGLEKLDLKRQKEQALREVEHLKRCQQMAEDKASVKAQVTSLLGELQESQSRLEAATKECQALEGRARAASEQARQLESEREALQQQHSVQVDQLRMQGQSVEAALRMERQAASEEKRKLAQLQVAYHQLFQEYDNHIKSSVVGSERKRGMQLEDLKQQLQQAEEALVAKQEVIDKLKEEAEQHKIVMETVPVLKAQADIYKADFQAERQAREKLAEKKELLQEQLEQLQREYSKLKASCQESARIEDMRKRHVEVSQAPLPPAPAYLSSPLALPSQRRSPPEEPPDFCCPKCQYQAPDMDTLQIHVMECIE

SEQ ID NO: 63286 - protein, 158 aa, Homo sapiens
MDNITRQNQFYDTQVIKQENESGYERRPLEMEQQQAYRPEMKTEMKQGAPTSFLPPEASQLKPDRQQFQSRKRPYEENRGRGYFEHREDRRGRSPQPPAEEDEDDFDDTLVAIDTYNCDLHFKVARDRSSGYPLTIEGFAYLWSGARASYGVRRGRVC

SEQ ID NO: 63287 - protein, 190 aa, Homo sapiens
  MOD_RES (1)..(1): Any amino acid
XKRWRTIKLLLRRGADPNLCCVPMQVLFLAVKAGDVDGVRLLLEHGARTDICFPPQLSTLTPLHIAAALPGEEGVQIVELLLHAITDVDAKASDEDDTYKPGKCARDIVRLLLSHGANPNLLWSGHSPLSLSIASGNELVVKELLTQGADPNLPLTKGLGSALCVACDLTYEHQRNMDSKLALIDRLISH

SEQ ID NO: 63288 - protein, 157 aa, Homo sapiens
MPVPPPPAPPPPPTFALANTEKPTLNKTEQAGRNALLSDISKGKKLKKTVTNDRSAPILDRAGAGGGGGGFGGGGGFGGGGGGGGGGSFGGGGPPGLGGLFQAGMPKLRSTANRDNDSGGSRPPLLPPGGRSTSAKPFSPPSGPGRFPVPSPGHRSG

SEQ ID NO: 63289 - protein, 162 aa, Homo sapiens
MCPVPPACPEPKYRGPLHCLATVAREEGLCGLYKGSSALVLRDGHSFATYFLSYAVLCEWLSPAGHSRPDVPGVLVAGGCAGVLAWAVATPMDVIKSRLQADGQGQRRYRGLLHCMVTSVREEGPRVLFKGLVLNCCRAFPVNMVVFVAYEAVLRLARGLLT

SEQ ID NO: 63290 - protein, 456 aa, Homo sapiens
MSPGNRMPMAGLQVGPPAGSPFGAAAPLRPGMPPTMMDPFRKRLLVPQAQPPMPAQRRGLKRRKMADKVLPQRIRELVPESQAYMDLLAFERKLDQTIARKRMEIQEAIKKPLTQKRKLRIYISNTFSPSKAEGDSAGTAGTPGGTPAGDKVASWELRVEGKLLDDPSKQKRKFSSFFKSLVIELDKELYGPDNHLVEWHRMPTTQETDGFQVKRPGDLNVKCTLLLMLDHQPPQYKLDPRLARLLGVHTQTRAAIMQALWLYIKHNQLQDGHEREYINCNRYFRQIFSCGRLRFSEIPMKLAGLLQHPDPIVINHVISVDPNDQKKTACYDIDVEVDDPLKAQMSNFLASTTNQQEIASLDVKIHETIESINQLKTQRDFMLSFSTDPQDFIQEWLRSQRRDLKIITDVIGNPEEERRAAFYHQPWAQEAVGRHIFAKVQQRRQELEQVLGIRLT

SEQ ID NO: 63291 - protein, 293 aa, Homo sapiens
MVNRAKRKAGVDPLVPLRSLGLSLSGGDQEDAGRILIEELRDRFPYLSESYLITTDAAGSIATATPDGGVVLISGTGSNCRLINPDGSESGCGGWGHMMGDEGSAYWIAHQAVKIVFDSIDNLEAAPHDIGYVKQAMFHYFQVPDRLGILTHLYRDFDKCRFAGFCRKIAEGAQQGDPLSRYIFRKAGEMLGRHIVAVLPEIDPVLFQGKIGLPILCVGSVWKSWELLKEGFLLALTQGREIQAQNFFSSFTLMKLRHSSALGGASLGARHIGHLLPMDYSANAIAFYSYTFS

SEQ ID NO: 63292 - protein, 154 aa, Homo sapiens
MVSKAKVIVNGWLFPACLGFCLSESFFMVKGAALFLQQGSSPQGQRSLQHPHKHAGDLPQHLQVMINLLRCEDRIKLAVRLESAWADRVRYMVVVYSSGRQDTEENILLGVDFSSKESKSCTIGMVLRLWSDTKIHLDGDGGFSVSTAGRMHIF

SEQ ID NO: 63293 - protein, 432 aa, Homo sapiens
DYVTVQLQNGEIWELSRCSRNKRENTSSLGYEYTGSKKEFPCVDGYIYDQNTWKSTAVTQWNLVCDRKWLAMLIQPLFMFGVLLGSVTFGYFSDRLGRRVVLWATSSSMFLFGIAAAFAVDYYTFMAARFFLAMVASGYLVVGFVYVMEFIGMKSRTWASVHLHSFFAVGTLLVALTGYLVRTWWLYQMILSTVTVPFILCCWVLPETPFWLLSEGRYEEAQKIVDIMAKWNRASSCKLSELLSLDLQGPVSNSPTEVQKHNLSYLFYNWSITKRTLTVWLIWFTGSLGFYSFSLNSVNLGGNEYLNLFLLGVVEIPAYTFVCIAMDKVGRRTVLAYSLFCSALACGVVMVIPQKHYILGVVTAMVGKFAIGAAFGLIYLYTAELYPTIVRSLAVGSGSMVCRLASILAPFSVDLSSIWIFIPQLLGQHLQE

SEQ ID NO: 63294 - protein, 77 aa, Homo sapiens
MGLLTFRDVAIEFSLEEWQCLDTAQRNLYKNVILENYRNLVFLGIAVSKQDLITCLEQEKEPLTVKRHEMVNEPPGK

SEQ ID NO: 63295 - protein, 382 aa, Homo sapiens
MTPALTALLCLGLSLGPRTRVQAGPFPKPTLWAEPGSVISWGSPVTIWCQGSLEAQEYQLDKEGSPEPLDRNNPLEPKNKARFSIPSMTQHHAGRYRCHYYSSAGWSEPSDPLELVMTGFYNKPTLSALPSPVVASGGNMTLRCGSQKGYHHFVLMKEGEHQLPRTLDSQQLHSGGFQALFPVGPVTPSHRWRFTCYYYYTNTPQVWSHPSDPLEILPSGQIYDTVSLSAQPGPTVASGENVTLLCQSRGYFDTFLLTKEGAAHPPLRLRSMYGAHKYQAEFPMSPVTSAHAGTYRCYGSRSSNPHLLSHPSEPLELMVSGHSGGSSLPPTGPPSTPASHAKDYTVENLIRMGMAGLVLVFLGILLFEAQHSQRNPQDAAGR

SEQ ID NO: 63296 - protein, 2720 aa, Homo sapiens
MEPALGPGVQKDLGYLQQWLKAFVGAFKKSISLSSLEPRRPEEAGAEVPLLPLDELHVLAEQLHQADLEQALLLLKLFIILCRNLENIEAGRGQVLVPRVLALLTKLVAELKGCPPPQGRGTQLENVALHALLLCEGLFDPYQTWRRQRSGEVISSKEKSKYKFPPAALPQEFSAFFQESLQNADHLPPILLLRLIHLFCAVLAGGKENGQMAVSDGSVKGLLSVVRGWSRGPAPDPCLVPLALEALVGAVHVLHASRAPPRGPELRALLESYFHVLNADWPAGLSSGPEEALVTLRVSMLDAIPMMLACEDRPVLQATFLSNNCFEHLTRLIQNSKVLDQDTDAIAVHVVRVLTCIMSDSPSAKEVFKERIGYPHLQEVLQSHGPPTHRLLQELLNMAVEGDHSMCPPPPIRNEQPVLVLAQWLPSLPTAELRLFLAQRLRWLCDSCPASRATCVQAGLVGCLLETLSTGLALEARCQEQLLALLQALGRVSIRPMELRHLLRPRPGLDSEPGGAEAGKARHAGAVIRTLSGMARHQGPARALRYFDLTPSMAGIMVPPVQRWPGPGFTFHAWLCLHPMDTAPTPAPTRPLQRKQLYSFFTSSGSGFEAFFTAAGTLVVAVCTRKEYLTMSLPEVSFADSAWHCVAIVHVPGRRPFSQNLVHVYKDGHLVKTAPLRCPSLSEPFSSCCIGSAGYRTTTTTTGLPTPPVPATLAYTHPALTRSQSVPASTGLGWGSGLVAPLQEGSIDSTLAGTQDTRWGSPTSLEGELGAVAIFHEALQATALRTLCTLGPNETAPFKPEGELHELSTRLLLHYSPQACKNNICLDLSPSHGLDGRLTGHRVETWDVKDVVNCVGGMGALLPLLERVAAQPKEAEAGPAETHDLVGPELTSGHNTQGLVLPLGKSSEERMERNAVAAFLLMLRNFLQGHMVNQESLVQCQGPAIIGALLRKVPSWAMDMNVLMSAQLLMEQVAAEGSGPLLYLLYQHLLFNFHLWTLSDFAVRLGHIQYMSSIVREHRQKLRKKYGVQFILDALRTHYSPQRERPLAADDLRTVQTSLLGLAREFLVRSLSADDVQVTQTMLSFLAATGDDGQAVGALDLLLALLHGSLVQESLAVFLLEPGNLEVLLALLVRPGSLPLLPDRVCKILRRLQQNERLPERSRQRLRLRECGLQGLVACLPEGTVSPQLCQGLYKLFLGADCLNLSDLLAVVQLSLQADLSVRLDICRQLFHLIYGQPDVVRLLARQAGWQDVLTRLYVLEAATAGSPPPSSPESPTSPKPAPPKPPTESPAEPSDVFLPSEAPCPDPDGFYHALSPFCTPFDLGLERSSVGSGNTAGGGGSSGTLTPASQPGTPSPLDGPRPFPAAPGRHSSSLSNVLEDGSLPEPTISGDDTSNTSNPQQTSEEELCNLLTNVLFSVTWRGVEGSDEAAWRERGQVFSVLTQLGASATLVRPPDCIKRSLLEMMLESALTDIKEAPVGVLASLTQQALWLLRLLQDFLCAEGHGNQELWSEKLFEGVCSLLDRLGAWPHLANGTADLREMAQIGLRLVLGYILLEDPQLHAQAYVRLHMLLQTAVPARREEACYVLSKLEAALGRVLNTSSLESATDEAGSPLAAAAAAAAAERCSWLVPLVRTLLDRAYEPLGLQWGLPSLPPTNGSPTFFEDFQAFCATPEWRHFIDKQVQPTMSQFEMDTYAKSHDLMSGFWNACYDMLMSSGQRRQWERAQSRRAFQELVLEPAQRRARLEGLRYTAVLKQQATQHSMALLHWGALWRQLASPCGAWALRDTPIPRWKLSSAETYSRMRLKLVPNHHFDPHLEASALRDNLGEVPLTPTEEASLPLAVTKEAKVSTPPELLQEDQLGEDELAELETPMEAAELDEQREKLVLSAECQLVTVVAVVPGLLEVTTQNVYFYDGSTERVETEEGIGYDFRRPLAQLREVHLRRFNLRRSALELFFIDQANYFLNFPCKVGTTPVSSPSQTPRPQPGPIPPHTQVRNQVYSWLLRLRPPSQGYLSSRSPQEMLRASGLTQKWVQREISNFEYLMQLNTIAGRTYNDLSQYPVFPWVLQDYVSPTLDLSNPAVFRDLSKPIGVVNPKHAQLVREKYESFEDPAGTIDKFHYGTHYSNAAGVMHYLIRVEPFTSLHVQLQSGRFDCSDRQFHSVAAAWQARLESPADVKELIPEFFYFPDFLENQNGFDLGCLQLTNEKVGDVVLPPWASSPEDFIQQHRQALESEYVSAHLHEWIDLIFGYKQRGPAAEEALNVFYYCTYEGAVDLDHVTDERERKALEGIISNFGQTPCQLLKEPHPTRLSAEEAAHRLARLDTNSPSIFQHLDELKAFFAEVVSDGVPLVLALVPHRQPHSFITQGSPDLLVTVSASGLLGTHSWLPYDRNISNYFSFSKDPTMGSHKTQRLLSGPWVPGSGVSGQALAVAPDGKLLFSGGHWDGSLRVTALPRGKLLSQLSCHLDVVTCLALDTCGIYLISGSRDTTCMVWRLLHQGGLSVGLAPKPVQVLYGHGAAVSCVAISTELDMAVSGSEDGTVIIHTVRRGQFVAALRPLGATFPGPIFHLALGSEGQIVVQSSAWERPGAQVTYSLHLYSVNGKLRASLPLAEQPTALTVTEDFVLLGTAQCALHILQLNTLLPAAPPLPMKVAIRSVAVTKERSHVLVGLEDGKLIVVVAGQPSEVRSSQFARKLWRSSRRISQVSSGETEYNPTEAR

SEQ ID NO: 63297 - protein, 116 aa, Homo sapiens
MAAGGLSRSERKAAERVRRLREEQQRERLRQVSRILRKAAAERSAEEGRLLAESADLVTELQGRSRRREGLKRRQEEVCDDPEELRGKVRELASAVRNAKYLVVYTGAGISTVERE

SEQ ID NO: 63298 - protein, 27 aa, Homo sapiens
MDGGDDGNLIIKKRFVSEAELDERRKR

SEQ ID NO: 63299 - protein, 313 aa, Homo sapiens
  MOD_RES (1)..(1): Any amino acid
XEKAAEPQLSEHRVGSRDPSRAGSWDRNLGGPGPTQLTCAGHQHPRNPEARALKVTPLGRKAMAPARTMARARLAPAGIPAVALWLLCTLGLQGTQAGPPPAPPGLPAGADCLNSFTAGVPGFVLDTNASVSNGATFLESPTVRRGWDCVRACCTTQNCNLALVELQPDRGEDAIAACFLINCLYEQNFVCKFAPREGFINYLTREVYRSYRQLRTQGFGGSGIPKAWAGIDLKVQPQEPLVLKDVENTDWRLLRGDTDVRVELTVTSSDHPEDTANVTVTVLSTKQTEDYCLASNKVGRCRGSFPRWYYDPT

SEQ ID NO: 63300 - protein, 295 aa, Homo sapiens
MRSLLLLSAFCLLEAALAAEVKKPAAAAAPGTAEKLSPKAATLAERSAGLAFSLYQAMAKDQAVENILVSPVVVASSLGLVSLGGKATTASQAKAVLSAEQLRDEEVHAGLGELLRSLSNSTARNVTWKLGSRLYGPSSVSFADDFVRSSKQHYNCEHSKINFRDKRSALQSINEWAAQTTDGKLPEVTKDVERTDGALLVNAMFFKPHWDEKFHHKMVDNRGFMVTRSYTVGVMMMHRTGLYNYYDDEKEKLQIVEMPLAHKLSSLIILMPHHVEPLERLEKLLTKEQLKIWMG

SEQ ID NO: 63301 - protein, 129 aa, Homo sapiens
MCSRDARTKQLRQLLEKVQNMSQSIEVLDRRTQRDLQYVEKMENQMKGLESKFKQVEESHKQHLARQFKAIKAKMDELRPLIPVLEEYKADAKLVLQFKEEVQNLTSVLNELQEEIGAYDYDELQSRVS

SEQ ID NO: 63302 - protein, 538 aa, Homo sapiens
SGNGGREGDYCSCDGYTNSIYTISVSSATENGYKPWYLEECASTLATTYSSGAFYERKIVTTDLRQRCTDGHTGTSVSAPMVAGIIALALEANSQLTWRDVQHLLVKTSRPAHLKASDWKVNGAGHKVSHFYGFGLVDAEALVVEAKKWTAVPSQHMCVAASDKRPRSIPLVQVLRTTALTSACAEHSDQRVVYLEHVVVRTSISHPRRGDLQIYLVSPSGTKSQLLAKRLLDLSNEGFTNWEFMTVHCWGEKAEGQWTLEIQDLPSQVRNPEKQGKLKEWSLILYGTAEHPYHTFSAHQSRSRMLELSAPELEPPKAALSPSQVEVPEDEEDYTAQSTPGSANILQTSVCHPECGDKGCDGPNADQCLNCVHFSLGSVKTSRKCVSVCPLGYFGDTAARRCRRCHKGCETCSSRAATQCLSCRRGFYHHQEMNTCVTLCPAGFYADESQKNCLKCHPSCKKCVDEPEKCTVCKEGFSLARGSCIPDCEPGTYFDSELIRCGECHHTCGTCVGEFTACGGLGPASPKRRLAALNPRKP

SEQ ID NO: 63303 - protein, 165 aa, Homo sapiens
MDSFDLALLQEWDLESLWGEDILNQRNDSLVVEFQSSASRCRSVYEPDRNALRRKERERRNQETQQDDGTFNSSYSLFSEPYKTNKGDELSNRIQNTLGNYDEMKDFLTDRSNQSHLVGVPKPGVPQTPVNKIDEHFVADSRAQNQPSSICSTTTSTPAAVPVQQ

SEQ ID NO: 63304 - protein, 263 aa, Homo sapiens
MASSRCPAPRGCRCLPGASLAWLGTVLLLLADWVLLRTALPRIFSLLVTALVGPNGSGKSTVAALLQNLYQPTGGQLLLDGKPLPQYEHRYLHRQVAAVGQEPQVFGRSLQENIAYGLTQKPTMEEITAAAVKSGAHSFISGLPQGYDTEVDEAGSQLSGGQRQAVALARALIRKPCVLILDDATSALDANSQLQVEQLLYESPERYSRSVLLITQHLSLVEQADHILFLEGGAIREGGTHQQLMEKKGCYWAMVQAPADAPE

SEQ ID NO: 63305 - protein, 75 aa, Homo sapiens
MELSQMSELMGLSVLLGLLALMATAAVARGWLRAGEERSGRPAWPRSFFPVGIGEHLQSFTTCQLCDSIKYLLQK

SEQ ID NO: 63306 - protein, 48 aa, Homo sapiens
MDNKISPEAQVAELELDAVIGFNVGQFEYGNWIFQIEKSGQLSAKQDS

SEQ ID NO: 63307 - protein, 149 aa, Homo sapiens
MGSRNSSSAGSGSGDPSEGLPRRGAGLRRSEEEEEEDEDVDLAQALLDSEEENDRAWDGRLGDRYNPPVDATPDTRELEFNEIKTQVELATGQLGLRRAAQKHSFPRMLHQRERGLCHRGSFSLGEQSRVISHFLPNDLGFTDSYSQKA

SEQ ID NO: 63308 - protein, 4859 aa, Homo sapiens
MAEGGEGGEDEIQFLRTEDEVVLQCIATIHKEQRKFCLAAEGLGNRLCFLEPTSEAKYIPPDLCVCNFVLEQSLSVRALQEMLANTGENGGEGAAQGGGHRTLLYGHAVLLRHSFSGMYLTCLTTSRSQTDKLAFDVGLREHATGEACWWTIHPASKQRSEGEKVRIGDDLILVSVSSERYLHLSVSNGNIQVDASFMQTLWNVHPTCSGSSIEEGYLLGGHVVRLFHGHDECLTIPSTDQNDSQHRRIFYEAGGAGTRARSLWRVEPLRISWSGSNIRWGQAFRLRHLTTGHYLALTEDQGLILQDRAKSDTKSTAFSFRASKELKEKLDSSHKRDIEGMGVPEIKYGDSVCFVQHIASGLWVTYKAQDAKTSRLGPLKRKVILHQEGHMDDGLTLQRCQREESQAARIIRNTTALFSQFVSGNNRTAAPITLPIEEVLQTLQDLIAYFQPPEEEMRHEDKQNKLRSLKNRQNLFKEEGMLALVLNCIDRLNVYNSVAHFAGIAREESGMAWKEILNLLYKLLAALIRGNRNNCAQFSNNLDWLISKLDRLESSSGILEVLHCILTESPEALNLIAEGHIKSIISLLDKHGRNHKVLDILCSLCLCNGVAVRANQNLICDNLLPRRNLLLQTRLINDVTSIRPNIFLGVAEGSAQYKKWYFELIIDQVDPFLTAEPTHLRVGWASSSGYAPYPGGGEGWGGNGVGDDLYSYGFDGLHLWSGRIPRAVASINQHLLRSDDVVSCCLDLGVPSISFRINGQPVQGMFENFNTDGLFFPVMSFSAGVKVRFLMGGRHGEFKFLPPSGYAPCYEALLPKEKMRLEPVKEYKRDADGIRDLLGTTQFLSQASFIPCPVDTSQVILPPHLEKIRDRLAENIHELWGMNKIELGWTFGKIRDDNKRQHPCLVEFSKLPETEKNYNLQMSTETLKTLLALGCHIAHVNPAAEEDLKKVKLPKNYMMSNGYKPAPLDLSDVKLLPPQEILVDKLAENAHNVWAKDRIKQGWTYGIQQDLKNKRNPRLVPYALLDERTKKSNRDSLREAVRTFVGYGYNIEPSDQELADSAVEKVSIDKIRFFRVERSYAVRSGKWYFEFEVVTGGDMRVGWARPGCRPDVELGADDQAFVFEGNRGQRWHQGSGYFGRTWQPGDVVGCMINLDDASMIFTLNGELLITNKGSELAFADYEIENGFVPICCLGLSQIGRMNLGTDASTFKFYTMCGLQEGFEPFAVNMNRDVAMWFSKRLPTFVNVPKDHPHIEVMRIDGTMDSPPCLKVTHKTFGTQNSNADMIYCRLSMPVECHSSFSHSPCLDSEAFQKRKQMQEILSHTTTQCYYAIRIFAGQDPSCVWVGWVTPDYHLYSEKFDLNKNCTVTVTLGDERGRVHESVKRSNCYMVWGGDIVASSQRSNRSNVDLEIGCLVDLAMGMLSFSANGKELGTCYQVEPNTKVFPAVFLQPTSTSLFQFELGKLKNAMPLSAAIFRSEEKNPVPQCPPRLDVQTIQPVLWSRMPNSFLKVETERVSERHGWVVQCLEPLQMMALHIPEENRCVDILELCEQEDLMRFHYHTLRLYSAVCALGNSRVAYALCSHVDLSQLFYAIDNKYLPGLLRSGFYDLLISIHLASAKERKLMMKNEYIIPITSTTRNIRLFPDESKRHGLPGVGLRTCLKPGFRFSTPCFVVTGEDHQKQSPEIPLESLRTKALSMLTEAVQCSGAHIRDPVGGSVEFQFVPVLKLIGTLLVMGVFDDDDVRQILLLIDPSVFGEHSAGTEEGAEKEEVTQVEEKAVEAGEKAGKEAPVKGLLQTRLPESVKLQMCELLSYLCDCELQHRVEAIVAFGDIYVSKLQANQKFRYNELMQALNMSAALTARKTKEFRSPPQEQINMLLNFQLGENCPCPEEIREELYDFHEDLLLHCGVPLEEEEEEEEDTSWTGKLCALVYKIKGPPKPEKEQPTEEEERCPTTLKELISQTMICWAQEDQIQDSELVRMMFNLLRRQYDSIGELLQALRKTYTISHTSVSDTINLLAALGQIRSLLSVRMGKEEELLMINGLGDIMNNKVFYQHPNLMRVLGMHETVMEVMVNVLGTEKSQIAFPKMVASCCRFLCYFCRISRQNQKAMFEHLSYLLENSSVGLASPSMRGSTPLDVAASSVMDNNELALSLEEPDLEKVVTYLAGCGLQSCPMLLAKGYPDVGWNPIEGERYLSFLRFAVFVNSESVEENASVVVKLLIRRPECFGPALRGEGGNGLLAAMQGAIKISENPALDLPSQGYKREVTGDDEEEEEIVHMGNAIMSFYSALIDLLGRCAPEMHLIQTGKGEAIRIRSILRSLVPTEDLVGIISIPLKLPSLNKDGSVSEPDMAANFCPDHKAPMVLFLDRVYGIKDQTFLLHLLEVGFLPDLRASASLDTVSLSTTEAALALNRYICSAVLPLLTRCAPLFAGTEHCTSLIDSTLQTIYRLSKGRSLTKAQRDTIEECLLAICNHLRPSMLQQLLRRLVFDVPQLNEYCKMPLKLLTNHYEQCWKYYCLPSGWGSYGLAVEEELHLTEKLFWGIFDSLSHKKYDPDLFRMALPCLSAIAGALPPDYLDTRITATLEKQISVDADGNFDPKPINTMNFSLPEKLEYIVTKYAEHSHDKWACDKSQSGWKYGISLDENVKTHPLIRPFKTLTEKEKEIYRWPARESLKTMLAVGWTVERTKEGEALVQQRENEKLRSVSQANQGNSYSPAPLDLSNVVLSRELQGMVEVVAENYHNIWAKKKKLELESKGGGSHPLLVPYDTLTAKEKFKDREKAQDLFKFLQVNGIIVSRGMKDMELDASSMEKRFAYKFLKKILKYVDSAQEFIAHLEAIVSSGKTEKSPRDQEIKFFAKVLLPLVDQYFTSHCLYFLSSPLKPLSSSGYASHKEKEMVAGLFCKLAALVRHRISLFGSDSTTMVSCLHILAQTLDTRTVMKSGSELVKAGLRAFFENAAEDLEKTSENLKLGKFTHSRTQIKGVSQNINYTTVALLPILTSIFEHVTQHQFGMDLLLGDVQISCYHILCSLYSLGTGKNIYVERQRPALGECLASLAAAIPVAFLEPTLNRYNPLSVFNTKTPRERSILGMPDTVEDMCPDIPQLEGLMKEINDLAESGARYTEMPHVIEVILPMLCNYLSYWWERGPENLPPSTGPCCTKVTSEHLSLILGNILKIINNNLGIDEASWMKRIAVYAQPIISKARPDLLRSHFIPTLEKLKKKAVKTVQEEEQLKADGKGDTQEAELLILDEFAVLCRDLYAFYPMLIRYVDNNRSNWLKSPDADSDQLFRMVAEVFILWCKSHNFKREEQNFVIQNEINNLAFLTGDSKSKMSKSGGQDQERKKTKRRGDLYSIQTSLIVAALKKMLPIGLNMCTPGDQELISLAKSRYSHRDTDEEVREHLRNNLHLQEKSDDPAVKWQLNLYKDVLKSEEPFNPEKTVERVQRISAAVFHLEQVEQPLRSKKAVWHKLLSKQRKRAVVACFRMAPLYNLPRHKINNFFLSTFQQVWLEKVNEKTQYDRLIPILMKSPKVEEEEEEETEKQPDPLHQIILYFSRNALTERSKLEDDPLYTSYSSMMAKSCQSGEDEEEDEDKEKTFEEKEMEKQKTLYQQARLHERGAAEMVLQMISASKGEMSPMVVETLKLGIAILNGGNAGVQQKMLDYLKEKKDAGFFQSLSGLMQSCSVLDLNAFERQNKAEGLGMVTEEGTREKVLQNDEFTRDLFRFLQLLCEGHNSDFQNFLRTQMGNTTTVNVIISTVDYLLRLQESISDFYWYYSGKDIIDESGQHNFSKALAVTKQIFNSLTEYIQGPCIGNQQSLAHSRLWDAVVGFLHVFANMQMKLSQDSSQIELLKELLDLLQDMVVMLLSLLEGNVVNGTIGKQMVDTLVESSTNVEMILKFFDMFLKLKDLTSSDTFKEYDPDGKGIISKKEFQKAMEGQKQYTQSEIDFLLSCAEADENDMFNYVDFVDRFHEPAKDIGFNVAVLLTNLSEHMPNDSRLKCLLDPAESVLNYFEPYLGRIEIMGGAKKIERVYFEISESSRTQWEKPQVKESKRQFIFDVVNEGGEQEKMELFVNFCEDTIFEMQLASQISESDSADRPEEEEEDEDSSYVLEIAGEEEEDGSLEPASAFAMACASVKRNVTDFLKRATLKNLRKQYRNVKKMTAKELVKVLFSFFWMLFVGLFQLLFTILGGIFQILWSTVFGGGLVEGAKNIRVTKILGDMPDPTQFGIHDDTMEAERAEVMEPGITTELVHFIKGEKGDTDIMSDLFGLHPKKEGSLKHGPEVGLGDLSEIIGKDEPPTLESTVQKKRKAQAAEMKAANEAEGKVESEKADMEDGEKEDKDKEEEQAEYLWTEVTKKKKRRCGQKVEKPEAFTANFFKGLEIYQTKLLHYLARNFYNLRFLALFVAFAINFILLFYKVTEEPLEEETEDVANLWNSFNDEEEEEAMVFFVLQESTGYMAPTLRALAIIHTIISLVCVVGYYCLKVPLVVFKREKEIARKLEFDGLYITEQPSEDDIKGQWDRLVINTPSFPNNYWDKFVKRKVINKYGDLYGAERIAELLGLDKNALDFSPVEETKAEAASLVSWLSSIDMKYHIWKLGVVFTDNSFLYLAWYTTMSVLGHYNNFFFAAHLLDIAMGFKTLRTILSSVTHNGKQLVLTVGLLAVVVYLYTVVAFNFFRKFYNKSEDDDEPDMKCDDMMTCYLFHMYVGVRAGGGIGDEIEDPAGDPYEMYRIVFDITFFFFVIVILLAIIQGLIIDAFGELRDQQEQVREDMETKCFICGIGNDYFDTTPHGFETHTLQEHNLANYLFFLMYLINKDETEHTGQESYVWKMYQERCWDFFPAGDCFRKQYEDQLG

SEQ ID NO: 63309 - protein, 44 aa, Homo sapiens
SFLNGLASLVMLCRYRTFVPASSPMYHTCVAFAWMRKLRHSKAK

SEQ ID NO: 63310 - protein, 175 aa, Homo sapiens
MSPSLGFPAQMNHQKGPSPSFGVQPCGPHDSARGGMIPHPQSRGPFPTCQLKSELDMLVGKCREEPLEGDMSSPNSTGIQDPLLGMLDGREDLEREEKREPESVYETDCRWDGCSQEFDSQEQLVHHINSEHIHGERKEFVCHWGGCSRELRPFKAQYMLVVHMRRHTGEKPHKC

SEQ ID NO: 63311 - protein, 208 aa, Homo sapiens
MSQSIEVLDRRTQRDLQYVEKMENQMKGLESKFKQVEESHKQHLARQFKAIKAKMDELRPLIPVLEEYKADAKLVLQFKEEVQNLTSVLNELQEEIGAYDYDELQSRVSNLEERLRACMQKLACGKLTGISDPVTVKTSGSRFGSWMTDPLAPEGDNRVWYMDGYHNNRFVREYKSMVDFMNTDNFTSHRLPHPWSGTGQVVYNGSIY

SEQ ID NO: 63312 - protein, 75 aa, Homo sapiens
GELLVPHMPTIRVPRSGDRVYKNECAFSYDSPNSEGGLYVCMNTFLAFGREHVERHFRKTGQSVYMHLKRHVREI

SEQ ID NO: 63313 - protein, 327 aa, Homo sapiens
MTPILTVLICLGLSLGPRTHVQAGHLPKPTLWAEPGSVIIQGSPVTLRCQGSLQAEEYHLYRENKSASWVRRIQEPGKNGQFPIPSITWEHAGRYHCQYYSHNHSSEYSDPLELVVTGAYSKPTLSALPSPVVTSGGNVTLQCVSQVAFDGFILCKEGEDEHPQRLNSHSHARGWSWAIFSVGPVSPSRRWSYRCYAYDSNSPYVWSLPSDLLELLVPGVSKKPSLSVQPGPMVAPGESLTLQCVSDVGYDRFVLYKEGERDFLQRPGWQPQAGLSQANFTLGPVSPSHGGQYRCYSAHNLSSEWSAPSDPLDILITGQFYDRPSLS

SEQ ID NO: 63314 - protein, 36 aa, Homo sapiens
MAASSLTVTLGRLASACSHSILRPSGPGADMFLKHP

SEQ ID NO: 63315 - protein, 1038 aa, Homo sapiens
MESLLENPVRAVLYLKELTAIVQNQQSLIHTQRERIDELERRLDELSAENRSLWEHQQLLQAQPPPGLVPPSSAPLPAAPATAPAAAARAQEPLQDQGQRSAAAPHPAPDRPPRQHHGQLLEQPQRGPGSRAHTPQSPHKHLGTQGAVTDKEKERPPSCCAAAGALLQHKSPSALGKGVLSRRPENETVLHQFCCPAADACSDLASQSDGSCTQAGGGMEDSVVAAAAVAAGRPSAHAPKAQAQELQEEEERPGAGAASPRAGPQHKASPGRQQPALATALCPHAPAASDYELSLDLKNKQIEMLEHKYGGHLVSRRAACTIQTAFRQYQLSKNFEKIRNSLLESRLPRRISLRKVRSPTAESLAAEKALMEGYGLVGLPLVRSPSLPPTFAGTLTELEDSFTEQVQSLAKSIDDALSTWSLKTMCSLRESGAYQLHQALQAAAGPPGLEAEGRAPESAGPGPGDDAAETPGLPPAHSGTLMMAFRDVTVQIANQNISVSSSTALSVANCLGAQTVQAPAEPAAGKAEQGETSGREAPEAPAVGREDASAEDSCAEAAASGAADGATAPKTEEEEEEEETAEVGRGAEAEAGDLEQLSSSSTSTKSAKSGSEASASASKDALQAMILSLPRYHCENPASCKSPTLSTDTLRKRLYRIGLNLFNINPDKGIQFLISRGFIPDTPIGVAHFLLQRKGLSRQMIGEFLGNSKKQFNRDVLDCVVDEMDFSSMELDEALRKFQAHIRVQGEAQKVERLIEAFSQRYCMCNPEVVQQFHNPDTIFILAFAIILLNTDMYSPNIKPDRKMMLEDFIRNLRGVDDGADIPRELVVGIYERIQQKELKSNEDHVTYVTKVEKSIVGMKTVLSVPHRRLVCCSRLFEVTDVNKLQKQAAHQREVFLFNDLLVILKLCPKKKSSSTYTFCKSVGLLGMQFQLFENEYYSHGITLVTPLSGSEKKQVLHFCALGSDEMQKFVEDLKESIAEVTELEQIRIEWELEKQQGTKTLSFKPCGAQGDPQSKQGSPTAKREAALRERPAESTVE

SEQ ID NO: 63316 - protein, 55 aa, Homo sapiens
MGTVRSPMPSMTPRFPVKPRSTSHRPKICCFRRMSLTDKIPSALTQSPICLREHP

SEQ ID NO: 63317 - protein, 229 aa, Homo sapiens
MGKSCKVVVCGQASVGKTSILEQLLYGNHVVGSEMIETQEDIYVGSIETDRGVREQVRFYDTRGLRDGAELPRHCFSCTDGYVLVYSTDSRESFQRVELLKKEIDKSKDKKEGLTLPPRLECSGMITAHCSLNLPRLRWSSCLSPLLRLQVTIVVLGNKCDLQEQRRVDPDVAQHWAKSEKVKLWEVSVADRRSLLEPFVYLASKMTQPQSKSAFPLSRKNKGSGSLDG

SEQ ID NO: 63318 - protein, 275 aa, Homo sapiens
  MOD_RES (1)..(1): Any amino acid
XDPQKMPYLKEEPYFGMGKMAVSWHHDENLVDRSAVAVYSYSCEGPEEESEDDSHLEGRDPDIWHVGFKISWDIETPGLAIPLHQGDCYFMLDDLNATHQHCVLAGSQPRFSSTHRVAECSTGTLDYILQRCQLALQNVCDDVDNDDVSLKSFEPAVLKQGEEIHNEVEFEWLRQFWFQGNRYRKCTDWWCQPMAQLEALWKKMEGVTNAVLHEVKREGLPVEQRNEILTAILASLTARQNLRREWHARVDIEGWKKEAKILCFLQEAIEIKKET

SEQ ID NO: 63319 - protein, 271 aa, Homo sapiens
MSGLVLGQRDEPAGHRLSQEEILGSTRLVSQGLEALRSEHQAVLQSLSQTIECLQQGGHEEGLVHEKARQLRRSMENIELGLSEAQVRRLCQENQWLRDELAGTQQRLQRSEQAVAQLEEEKKHLEFLGQLRQYDEDGHTSEEKEGDATKDSLDDLFPNEEEEDPSNGLSRGQGATAAQQGGYEIPARLRTLHNLVIQYAAQGRYEVAVPLCKQALEDLERTSGRGHPDVATMLNILALVYRDQNKYKEAAHLLNDALSIRESTLGPDHPA

SEQ ID NO: 63320 - protein, 41 aa, Homo sapiens
MARTAGDTLDVFTMIDIFKYVIYGIAAAFFVYGILLMVEGF

SEQ ID NO: 63321 - protein, 59 aa, Homo sapiens
MAAPGALLVMGVSGSGNWDGNSMMLMIITRRKIEGRWEKAYRSMTRTGFHGSVTCMTFY

SEQ ID NO: 63322 - protein, 44 aa, Homo sapiens
MCMYLFFLDFSIVSVTVLLDFMTRDRERKVVWPDRLTSKQTWPY

SEQ ID NO: 63323 - protein, 1249 aa, Homo sapiens
MNWLCRNQDPNPPPQPEELTSSLHAFKNKAFKKSKVCGVCKQIIDGQGISCRACKYSCHKKCEAKVVIPCGVQVRLEQAPGSSTLSSSLCRDKPLRPVILSPTMEEGHGLDLTYITERIIAVSFPAGCSEESYLHNLQEVTRMLKSKHGDNYLVLNLSEKRYDLTKLNPKIMDVGWPELHAPPLDKMCTICKAQESWLNSNLQHVVVIHCRGGKGRIGVVISSYMHFTNVSASADQALDRFAMKKFYDDKVSALMQPSQKRYVQFLSGLLSGSVKMNASPLFLHFVILHGTPNFDTGGVCRPFLKLYQAMQPVYTSGIYNVGPENPSRICIVIEPAQLLKGDVMVKCYHKKYRSATRDVIFRLQFHTGAVQGYGLVFGKEDLDNASKDDRFPDYGKVELVFSATPEKIQGSEHLYNDHGVIVDYNTTDPLIRWDSYENLSADGEVLHTQGPVDGSLYAKVRKKSSSDPGIPGGPQAIPATNSPDHSDHTLSVSSDSGHSTASARTDKTEERLAPGTRRGLSAQEKAELDQLLSGFGLEDPGSSLKEMTDARSKYSGTRHVVPAQVHVNGDAALKDRETDILDDEMPHHDLHSVDSLGTLSSSEGPQSAHLGPFTCHKSSQNSLLSDGFGSNVGEDPQGTLVPDLGLGMDGPYERERTFGSREPKQPQPLLRKPSVSAQMQAYGQSSYSTQTWVRQQQMVVAHQYSFAPDGEARLVSRCPADNPGLVQAQPRVPLTPTRGTSSRVAVQRGVGSGPHPPDTQQPSPSKAFKPRFPGDQVVNGAGPELSTGPSPGSPTLDIDQSIEQLNRLILELDPTFEPIPTHMNALGSQANGSVSPDSVGGGLRASSRLPDTGEGPSRATGRQGSSAEQPLGGRLRKLSLGQYDNDAGGQLPFSKCAWGKAGVDYAPNLPPFPSPADVKETMTPGYPQDLDIIDGRILSSKESMCSTPAFPVSPETPYVKTALRHPPFSPPEPPLSSPASQHKGGREPRSCPETLTHAVGMSESPIGPKSTMLRADASSTPSFQQAFASSCTISSNGPGQRRESSSSAERQWVESSPKPMVSLLGSGRPTGSPLSAEFSGTRKDSPVLSCFPPSELQAPFHSHELSLAEPPDSLAPPSSQAFLGFGTAPVGSGLPPEEDLGALLANSHGASPTPSIPLTATGAADNGFLSHNFLTVAPGHSSHHSPGLQGQGVTLPGQPPLPEKKRASEGDRSLGSVSPSSSGFSSPHSGSTISIPFPNVLPDFSKASE

SEQ ID NO: 63324 - protein, 113 aa, Homo sapiens
MQEQEIGFISKYNEGLCVNTDPVSILTSILDMSLHRQMGSDRDLQSSASSVSLPSVKKAPKKRRISIGSLFRRKKDNKRKSRELNGGVDGIASIESIHSEMCTDKNSIFSTNT

SEQ ID NO: 63325 - protein, 160 aa, Homo sapiens
MIGGLFIYNHKGEVLISRVYRDDIGNRRNAVDAFRVNVIHARQQVRSPVTNIARTSFFHVKRSNIWLAAVTKQNVNAAMVFEFLYKMCDVMAAYFGKISEENIKNNFVLIYELLDEILDFGYPQNSETGALKTFITQQGIKSQHQTKEEQSQITSQVTGQ

SEQ ID NO: 63326 - protein, 54 aa, Homo sapiens
MGILSVDLLITLQILPVFFSNCLFLALYDSVILLKHVVLLLSRSKSTRGEWRRM

SEQ ID NO: 63327 - protein, 93 aa, Homo sapiens
MCAQYCISFADVEKAHINIRDSIHLTPVLTSSILNQLTGRNLFFKCELFQKTGSFKIRGALNAVRSLVPDALERKPKAVVTHSSGNHGQALTY

SEQ ID NO: 63328 - protein, 1198 aa, Homo sapiens
  MOD_RES (1)..(1): Any amino acid
XSSNIHANHLSLDASSSSSSSSSSSSSSSSSSSSSSVHEPKMDALIIPVTMEVPCDSRGQRMWWAFLASSMVTFFGGLFIILLWRTLKYLWTVCCHCGGKTKEAQKINNGSSQADGTLKPVDEKEEAVAAEVGWMTSVKDWAGVMISAQTLTGRVLVVLVFALSIGALVIYFIDSSNPIESCQNFYKDFTLQIDMAFNVFFLLYFGLRFIAANDKLWFWLEVNSVVDFFTVPPVFVSVYLNRSWLGLRFLRALRLIQFSEILQFLNILKTSNSIKLVNLLSIFISTWLTAAGFIHLVENSGDPWENFQNNQALTYWECVYLLMVTMSTVGYGDVYAKTTLGRLFMVFFILGGLAMFASYVPEIIELIGNRKKYGGSYSAVSGRKHIVVCGHITLESVSNFLKDFLHKDRDDVNVEIVFLHNISPNLELEALFKRHFTQVEFYQGSVLNPHDLARVKIESADACLILANKYCADPDAEDASNIMRVISIKNYHPKIRIITQMLQYHNKAHLLNIPSWNWKEGDDAICLAELKLGFIAQSCLAQGLSTMLANLFSMRSFIKIEEDTWQKYYLEGVSNEMYTEYLSSAFVGLSFPTVCELCFVKLKLLMIAIEYKSANRESRSRKRILINPGNHLKIQEGTLGFFIASDAKEVKRAFFYCKACHDDITDPKRIKKCGCKRLIYFEDEQPSTLSPKKKQRNGGMRNSPNTSPKLMRHDPLLIPGNDQIDNMDSNVKKYDSTGMFHWCAPKEIEKVILTRSEAAMTVLSGHVVVCIFGDVSSALIGLRNLVMPLRASNFHYHELKHIVFVGSIEYLKREWETLHNFPKVSILPGTPLSRADLRAVNINLCDMCVILSANQNNIDDTSLQDKECILASLNIKSMQFDDSIGVLQANSQGFTPPGMDRSSPDNSPVHGMLRQPSITTGVNIPIITELAKPGKLPLVSVNQEKNSGTHILMITELVNDTNVQFLDQDDDDDPDTELYLTQPFACGTAFAVSVLDSLMSATYFNDNILTLIRTLVTGGATPELEALIAEENALRGGYSTPQTLANRDRCRVAQLALLDGPFADLGDGGCYGDLFCKALKTYNMLCFGIYRLRDAHLSTPSQCTKRYVITNPPYEFELVPTDLIFCLMQFDHNAGQSRASLSHSSHSSQSSSKKSSSVHSIPSTANRQNRPKSRESRDKQNATRMNRMGQGMTINGSA

SEQ ID NO: 63329 - protein, 242 aa, Homo sapiens
MARRGPGWRPLLLLVLLAGAAQGGLYFRRGQTCYRPLRGDGLAPLGRSTYPRPHEYLSPADLPKSWDWRNVDGVNYASITRNQHIPQYCGSCWAHASTSAMADRINIKRKGAWPSTLLSVQNVIDCGNAGSCEGGNDLSVWDYAHQHGIPDETCNNYQAKDQECDKFNQCGTCNEFKECHAIRNYTLWRVGDYGSLSGREKMMAEIYANGPIRLECSGMIFAHCSLDRPGSSYPPASAPSTE

SEQ ID NO: 63330 - protein, 45 aa, Homo sapiens
MVDYYEVLGVQRHASPEDIKKAYRKLALKWHPDKNPENKEEAERK

SEQ ID NO: 63331 - protein, 282 aa, Homo sapiens
ALGMWIPLYLHRAQVVQKTAETCNSPPCGAKDSLIFGAITCFTGFLGVVTGAGATRWCRLKTQRADPLVCAVGMLGSAIFICLIFVAAKSSIVGAYICIFVGETLLFSNWAITADILMYVVIPTRRATAVALQSFTSHLLGDAGSPYLIGFGEPAGDAARICESLRWCHWDNEEPTLPPRLGGVLQRPGPAGLPQSFLCDPRLGTHPLWPRPAEWPWHQEEAVSSVTLEGCVCWSHTVGQVPSPRFGPQGPWGQGRRQPQVGVRGEPGLPPAYVILGKSLPS

SEQ ID NO: 63332 - protein, 128 aa, Homo sapiens
MNPESSIFIEDYLKYFQDQVSRENLLQLLTDDEAWNGFVAAAELPRDEADELRKALNKLASHMVMKDKNRHDKDQQHRQWFLKEFPRLKRELEDHIRKLRALAEEVEQVHRGTTIANVVSNSVGTTSG

SEQ ID NO: 63333 - protein, 29 aa, Homo sapiens
DLPGVSIADEGETGMFSLSTIRGHQYATY

SEQ ID NO: 63334 - protein, 215 aa, Homo sapiens
MADIDNKEQSELDQDLDDVEEVEEEETGEETKLKARQLTVQMMQNPQILAALQERLDGLVETPTGYIESLPRVVKRRVNALKNLQVKCAQIEAKFYEEVHDLERKYAVLYQPLFDKAEDCCHFQVKTWRLLSDLPTMNNGRAVTHIQCCEELKEKAKIEDEKKDEEKEDPKGIPEFWLTVFKNVDLLSDMVQEHDEPILKHLKDIKVKFSDAGQP

SEQ ID NO: 63335 - protein, 170 aa, Homo sapiens [sequence omitted]

SEQ ID NO: 63336 - protein, 148 aa, Homo sapiens
MDQSRVLLWVKAEPFIVGALQVPPPSKFSLHYLRKISTYVQIRATEGAYPRLYWSTWRHIACGKLQLAKDLAWLYFEIFDSLSMKTPEERLEWSEVLSNCMSEEEVEKQRNQLNKVSLRTSLIGEEWPSPRNKSQSPDLTEKSNCHNK

SEQ ID NO: 63337 - protein, 800 aa, Homo sapiens
MEFSIKQSPLSVQSVVKCIKMKQAPEILGSANGKTPSCEVNRECSVFLSKAQLSSSLQEGVMQKFNGHDALPFIPADKLKDLTSRVFNGEPGAHDAKLRFESQEMKGIGTPPNTTPIKNGSPEIKLKITKTYMNGKPLFESSICGDSAADVSQSEENGQKPENKARRNRKRSIKYDSLLEQGLVEAALVSKISSPSDKKIPAKKESCPNTGRDKDHLLKYNVGDLVWSKVSGYPWWPCMVSADPLLHSYTKLKGQKKSARQYHVQFFGDAPERAWIFEKSLVAFEGEGQFEKLCQESAKQAPTKAEKIKLLKPISGKLRAQWEMGIVQAEEAASMSVEERKAKFTFLYVGDQLHLNPQVAKEAGIAAESLGEMAESSGVSEEAAENPKSVREECIPMKRRRRAKLCSSAETLESHPDIGKSTPQKTAEADPRRGVGSPPGRKKTTVSMPRSRKGDAASQFLVFCQKHRDEVVAEHPDASGEEIEELLRSQWSLLSEKQRARYNTKFALVAPVQAEEDSGNVNGKKRNHTKRIQDPTEDAEAEDTPRKRLRTDKHSLRKRDTITDKTARTSSYKAMEAASSLKSQAATKNLSDACKPLKKRNRASTAASSALGFSKSSSPSASLTENEVSDSPGDEPSESPYESADETQTEVSVSSKKSERGVTAKKEYVCQLCEKPGSLLLCEGPCCGAFHLACLGLSRRPEGRFTCSECASGIHSCFVCKESKTDVKRCVVTQCGKFYHEACVKKYPLTVFESRGFRCPLHSCVSCHASNPSNPRPSKEIESCSVTQAGVQCSHSSLHP

SEQ ID NO: 63338 - protein, 137 aa, Homo sapiens
MLENYRNLVSLGLTVSKPELISRLEQRQEPWNVKRHETIAKPPAMSSHYTEDLLPEQCMQDSFQKVILRRYGSCGLEDLHLRKDGENVGECKDQKEIYNGLNQCLSTLPSKIFPYNKCVKVFSKSSNLNRENIRHTT

SEQ ID NO: 63339 - protein, 145 aa, Homo sapiens
MSISSDEVNFLVYRYLQESGFSHSAFTFGIESHISQSNINGALVPPAALISIIQKGLQYVEAEVSINEDGTLFDGRPIESLSLIDAVMPDVVQTRQQAYRDKLAQQQAAAAAAAAAAASQQGSAKNGENTANGEENGAHTIANNH

SEQ ID NO: 63340 - protein, 989 aa, Homo sapiens
MPVRGDRGFPPRRELSGWLRAPGMEELIWEQYTVTLQKDSKRGFGIAVSGGRDNPHFENGETSIVISDVLPGGPADGLLQENDRVVMVNGTPMEDVLHSFAVQQLRKSGKVAAIVVKRPRKVQVAALQASPPLDQDDRAFEVMDEFDGRSFRSGYSERSRLNSHGGRSRSWEDSPERGRPHERARSRERDLSRDRSRGRSLERGLDQDHARTRDRSRGRSLERGLDHDFGPSRDRDRDRSRGRSIDQDYERAYHRAYDPDYERAYSPEYRRGARHDARSRGPRSRSREHPHSRSPSPEPRGRPGPIGVLLMKSRANEEYGLRLGSQIFVKEMTRTGLATKDGNLHEGDIILKINGTVTENMSLTDARKLIEKSRGKLQLVVLRDSQQTLINIPSLNDSDSEIEDISEIESNRSFSPEERRHQYSDYDYHSSSEKLKERPSSREDTPSRLSRMGATPTPFKSTGDIAGTVVPETNKEPRYQEDPPAPQPKAAPRTFLRPSPEDEAIYGPNTKMVRFKKGDSVGLRLAGGNDVGIFVAGIQEGTSAEQEGLQEGDQILKVNTQDFRGLVREDAVLYLLEIPKGEMVTILAQSRADVYRDILACGRGDSFFIRSHFECEKETPQSLAFTRGEVFRVVDTLYDGKLGNWLAVRIGNELEKGLIPNKSRAEQMASVQNAQRDNAGDRADFWRMRGQRSGVKKNLRKSREDLTAVVSVSTKFPAYERVLLREAGFKRPVVLFGPIADIAMEKLANELPDWFQTAKTEPKDAGSEKSTGVVRLNTVRQIIEQDKHALLDVTPKAVDLLNYTQWFPIVIFFNPDSRQGVKTMRQRLNPTSNKSSRKLFDQANKLKKTCAHLFTATINLNSANDSWFGSLKDTIQHQQGEAVWVSEGKMEGMDDDPEDRMSYLTAMGADYLSCDSRLISDFEDTDGEGGAYTDNELDEPAEEPLVSSITRSSEPVQHEEIEIAQKHPDIYAVPIKTHKPDPGTPQHTR

SEQ ID NO: 63341 - protein, 90 aa, Homo sapiens
MAETVWSTDTGEAVYRSRDPVRNLRLRVHLQRITSSNFLHYQPAAELGKDLIDLATFRPQPTASGHRPEEDEEEEIVIGWQEKLFSQAWL

SEQ ID NO: 63342 - protein, 645 aa, Homo sapiens
MVQKSRNGGVYPGPSGEKKLKVGFVGLDPGAPDSTRDGALLIAGSEAPKRGSILSKPRAGGAGAGKPPKRNAFYRKLQNFLYNVLERPRGWAFIYHAYVFLLVFSCLVLSVFSTIKEYEKSSEGALYILEIVTIVVFGVEYFVRIWAAGCCCRYRGWRGRLKFARKPFCVIDIMVLIASIAVLAAGSQGNVFATSALRSLRFLQILRMIRMDRRGGTWKLLGSVVYAHSKELVTAWYIGFLCLILASFLVYLAEKGENDHFDTYADALWWGLITLTTIGYGDKYPQTWNGRLLAATFTLIGVSFFALPAGILGSGFALKVQEQHRQKHFEKRRNPAAGLIQSAWRFYATNLSRTDLHSTWQYYERTVTVPMYRLIPPLNQLELLRNLKSKSGLAFRKDPPPEPSPSQKVSLKDRVFSSPRGVAAKGKGSPQAQTVRRSPSADQSLEDSPSKVPKSWSFGDRSRARQAFRIKGAASRQNSEEASLPGEDIVDDKSCPCEFVTEDLTPGLKVSIRAVCVMRFLVSKRKFKESLRPYDVMDVIEQYSAGHLDMLSRIKSLQSRDGLQRHAQGRRGLTEGSRTEAPRAGGPAGRHPSARDPHGPRVPAMPAPHAIAVCHPLAVTVAAASPFAPLPLAVCTFVHAPKNIS

SEQ ID NO: 63343 - protein, 144 aa, Homo sapiens
MAEDDPYLGRPEQMFHLDPSLTHTIFNPEVFQPQMALPTADGPYLQILEQPKQRGFRFRYVCEGPSHGGLPGASSEKNKKSYPQVKICNYVGPAKVIVQLVTNGKNIHLHAHSLVGKHCEDGICTVTAGPKDMVVGFANLGILH

SEQ ID NO: 63344 - protein, 417 aa, Homo sapiens
MNSEVIVDPIQGQVNFEDVFVYFSQEEWVLLDEAQRLLYRDVMLENFALMASLGHTSFMSHIVASLVMGSEPWVPDWVDMTLAVATETPGGSCWHGMEDEEIPFEQSFSIGIANLHQHQKQHSGEKPFRSDKSRPFLLNNCAVQSMEMSFVTGEACKDFLASSSIFEHHAPHNEWKPHSNTKCEEASHCGKRHYKCSECGKTFSRKDSLVQHQRVHTGERPYECGECGKTFSRKPILAQHQRIHTGEMPYECGICGKVFNHSSNLIVHQRVHTGARPYKCSECGKAYSHKSTLVQHESIHTGERPYECSECGKYFGHKYRLIKHWSVHTGARPYECIACGKFFSQSSDLIAHQRVHNGEKPYVCSECGKAFSHKHVLVQHHRIHTGERPYKCSECGKAFRQRASLIRHWKIHTGERP

SEQ ID NO: 63345 - protein, 49 aa, Homo sapiens
MDFSKLPKILDEDKESTFGYVHGVSGPAFTPCIIATLRTYLNPTSGYSL

SEQ ID NO: 63346 - protein, 161 aa, Homo sapiens
  MOD_RES (1)..(1): Any amino acid
XSPSLPDGDRDISGPASPLPEPSLEDSSAQFEGPEKSCLSPGREEKGRLPPRLSAGNPKSAKPLSMEPSSPLGEWTDPALPLENQVWYHGAISRTDAENLLRLCKEASYLLSYSRSLNCKIKEAFPRKVFVKNLIYITSEMCIALKIIKFMEHTKQPVYHF

SEQ ID NO: 63347 - protein, 161 aa, Homo sapiens
  MOD_RES (1)..(1): Any amino acid
XFYAFILSLSFLTAFIFACVVTHLTLRAQGSNFLSTLKETPASVLELVICFFSIWSILGLSGFHTYLVASNLTTNEDIKGSWSSKRGGEASVNPYSHKSIITNCCAVLCGPLPPSLIDRRGFVQSDTVLPSPIRSDEPACRAKPDASMEDTCQDFAISCTA

SEQ ID NO: 63348 - protein, 133 aa, Homo sapiens
  MOD_RES (1)..(1): Any amino acid
XAAEPNKTEIQTLFKRLRAVPTNKACFDCGAKNPSWASITYGVFLCIDCSGVHRSLGVHLSFIRSTELDSNWNWFQLRCMQVGGNANATAFFRQHGCTANDANTKYNSRAAQMYREKIRQLGSAALARHGTDN

SEQ ID NO: 63349 - protein, 159 aa, Homo sapiens
MEGAALLRVSVLCIWMSALFLGVGVRAEEAGARVQQNVPSGTDTGDPQSKPLGDWAAGTMDPESSIFIEDAIKYFKEKVSTQNLLLLLTDNEAWNGFVAAAELPRNEADELRKALDNLARQMIMKDKNWHDKGQQYRNWFLKEFPRLKSELEDNIRRLR

SEQ ID NO: 63350 - protein, 81 aa, Homo sapiens
MKRNTCDLLSRSKSASEETLHSSNEEEDPFRGMEPYLVRRLSCRNIQLPPLAFRQLEQADLKSESENIQRPTSLPLKILPL

SEQ ID NO: 63351 - protein, 191 aa, Homo sapiens
MSEEIITPVYCTGVSAQVQKQRARELGLGRHENAIKYLGQDYEQLRVRCLQSGTLFRDEAFPPVPQSLGYKDLGPNSSKTYGIKWKRPTELLSNPQFIVDGATRTDICQGALGDCWLLAAIASLTLNDTLLHRVVPHGQSFQNGYAGIFHFQLWQFGEWVDVVVDDLLPIKDGKLVFVHSAEGNEFWSALL

SEQ ID NO: 63352 - protein, 331 aa, Homo sapiens
  MOD_RES (1)..(1): Any amino acid
XESQRQLEETRNKAAQVHAESLQQVVQSQREVTEVLQEATCKIAAQQSETARLTTDAARQICEMAELTRTHISDAVVASGAPLAILYDHQRQHLPDFVKQLRTRTETDRKSPSVSLSQSKEGTLDSKHQKYSASYDSYSESSGYKNHDRRSSSGSSRQESPSVPSCKENEKKLNGEKIESSIDEQVQTAADDSLRSDSVPSLPDEKETGSCSVTQAGLELLASRDPPTLASQNAGITDSTSIATEYSLKFDESMTEDEIEEQSFRSLLPSESHRRFNMEKRRGHHDDSDEEASPEKTTLSTAKELNMPFSGGQDSFSKFTMEMVRQYMKEE

SEQ ID NO: 63353 - protein, 138 aa, Homo sapiens
KNVANINEEMESLTANIDYINDSISDCQANIMQMEEAKEEGETLDVTAVINACTLTEARYLLDHFLSMGINKGLQAAQKEAQIKVLEGRLKQTEITSATQNQLLFHMLKEKAELNPELDALLGHALQDLDSVPLGKYV

SEQ ID NO: 63354 - protein, 704 aa, Homo sapiens
TEANLTGHEEKVSVENFELLKVLGTGAYGKVFLVRKAGGHDAGKLYAMKVLRKAALVQRAKTQEHTRTERSVLELVRQAPFLVTLHYAFQTDAKLHLILDYVSGGEMFTHLYQRQYFKEAEVRVYGGEIVLALEHLHKLGIIYRDLKLENVLLDSEGHIVLTDFGLSKEFLTEEKERTFSFCGTIEYMAPEIIRSKTGHGKAVDWWSLGILLFELLTGASPFTLEGERNTQAEVSRRILKCSPPFPPRIGPVAQDLLQRLLCKDPKKRLGAGPQGAQEVRNHPFFQGLDWVALAARKIPAPFRPQIRSELDVGNFAEEFTRLEPVYSPPGSPPPGDPRIFQGYSFVAPSILFDHNNAVMTDGLEAPGAGDRPGRAAVARSAMMQQYELDLREPALGQGSFSVCRRCRQRQSGQEFAVKILSRRLEANTQREVAALRLCQSHPNVVNLHEVHHDQLHTYLVLELLRGGELLEHIRKKRHFSESEASQILRSLVSAVSFMHEEAGVVHRDLKPENILYADDTPGAPVKIIDFGFARLRPQSPGVPMQTPCFTLQYAAPELLAQQGYDESCDLWSLGVILYMMLSGQVPFQGASGQGGQSQAAEIMCKIREGRFSLDGEAWQGVSEEAKELVRGLLTVDPAKRLKLEGLRGSSWLQDGSARSSPPLRTPDVLESSGPAVRSGLNATFMAFNRGKREGFFLKSVENAP

SEQ ID NO: 63355 - protein, 176 aa, Homo sapiens [sequence omitted]

SEQ ID NO: 63356 - protein, 171 aa, Homo sapiens
MACARPLISVYSEKGESSGKNVTLPAVFKAPIRPDIVNFVHTNLRKNNRQPYAVSELAGHQTSAESWGTGRAVARIPRVRGGGTHRSGQGAFGNMCRGGRMFAPTKTWRRWHRRKNPLKNLRIMLKLNPYAKTMRRNTILRQARNHKLRVDKAAAAAAALQAKSDEKAAVA

SEQ ID NO: 63357 - protein, 48 aa, Homo sapiens
MGSSEPLPIADGDRRRKKKRRGRATDSLPGKFEDVILPSAIPGGAAER

SEQ ID NO: 63358 - protein, 86 aa, Homo sapiens
MDGSRRVRATSVLPRYGPPCLFKGHLSTKSNAFCTDSSSLRLSTLQLVKNHMAVHYNKILSAKAAVDCSVPVSMQTNNEERNSKRN

SEQ ID NO: 63359 - protein, 45 aa, Homo sapiens
MDGHGVRVLWCQCSWAAGIVQGPHLDALSAHCGPGLEQLPMGVTY

SEQ ID NO: 63360 - protein, 500 aa, Homo sapiens
MQLPRWWELGDPCAWTGQGRGTRRMSPATTGTFLLTAFLLSCADGINGTVNWKTRQANNFIISRKMAAGMKDVYSIFSKVHSDRNVYPSAGVLFVHVLEREYFKGEFPPYPKPGEISNDPITFNTNLMGYPDRPGWLRYIQRTPYSDGVLYGSPTAENVGKPTIIEITAYNRRTFETARHNLIINIMSAEDFPLPYQAEFFIKNMNVEEMLASEVLGDFLGAVKNVWQPERLNAINITSALDRGGRVPLPINDLKEGVYVMVGADVPFSSCLREVENPQNQLRCSQEMEPVITCDKKFRTQFYIDWCKISLVDKTKQVSTYQEVIRGEGILPDGGEYKPPSDSLKSRDYYTDFLITLAVPSAVALVLFLILAYIMCCRREGVEKRNMQTPDIQLVHHSAIQKSTKELRDMSKNREIAWPLSTLPVFHPVTGEIIPPLHTDNYDSTNMPLMQTQQWSFAPVAQAGVQWSDLGSLQPPPPRFKNLPHQTQIPQQQTTGKWYP

SEQ ID NO: 63361 - protein, 146 aa, Homo sapiens
MSVLNKTKWKGGTLQIQLAKESFLHRLAQEREAAKAKKEESTTGNANLLEKTGGVDFHMKAVPGTEVPGHKNWVVSKFGRVLPVLHLKNQHKRKIIKYDPSKYCHNLKKIGEDFSNTIPISSLTWELEGGNDPMSKKRRGEFSDFH

SEQ ID NO: 63362 - protein, 107 aa, Homo sapiens
MDTMMLNVRNLFEQLVRRVEILSEGNEVQFIQLAKDFEDFRKKWQRTDHELGKYKDLLMKAETERSALDVKLKHARNQVDVEIKRRQRAEADCEKLERQIQLIREML

SEQ ID NO: 63363 - protein, 218 aa, Homo sapiens
MGKKVAIIGAGVSGLASIRSCLEEGLEPTCFEKSNDIGGLWKFSDHAEEGRASIYKSVFSNSSKEMMCFPDFPFPDDFPNFMHNSKIQEYIIAFAKEKNLLKYIQFKTFVSSVNKHPDFATTGQWDVTTERDGKKESAVFDAVMVCSGHHVYPNLPDYKEPGVFNGKRVLVVGLGNSGCDIATELSRTAEQVMISSRSGSWVMSRVWDNGYPWDMLLV

SEQ ID NO: 63364 - protein, 47 aa, Homo sapiens
MDAKSLTAWSRTLVTFKDVFVDFTREEWKLLDTAQQIVYRNVMLENY

SEQ ID NO: 63365 - protein, 317 aa, Homo sapiens
MEDSGKTFSSEEEEANYWKDLAMTYKQRAENTQEELREFQEGSREYEAELETQLQQIETRNRDLLSENNRLRMELETIKEKFEVQHSEGYRQISALEDDLAQTKAIKDQLQKYIRELEQANDDLERAKRATIMSLEDFEQRLNQAIERNAFLESELDEKENLLESVQRLKDEARDLRQELAVQQKQEKPRTPMPSSVEAERTDTAVQATGSVPSTPIAHRGPSSSLNTPGSFRRGLDDSTGGTPLTPAARISALNIVGDLLRKVGFIISGRLLLVLLGEVLDLLLEPLLPLFQSFHGAGKVLQLLLRVGELQGQRPG

SEQ ID NO: 63366 - protein, 315 aa, Homo sapiens
MKANYSAEERFLLLGFSDWPSLQPVLFALVLLCYLLTLTGNSALVLLAVRDPRLHTPMYYFLCHLALVDAGFTTSVVPPLLANLRGPALWLPRSHCTAQLCASLALGSAECVLLAVMALDRAAAVCRPLRYAGLVSPRLCRTLASASWLSGLTNSVAQTALLAERPLCAPRLLDHFICELPALLKLACGGDGDTTENQMFAARVVILLLPFAVILASYGAVARAVCCMRFSGGRRRAVGTCGSHLTAVCLFYGSAIYTYLQPAQRYNQARGKFVSLFYTVVTPALNPLIYTLRNKKVKGAARRLLRSLGRGQAGQ

SEQ ID NO: 63367 - protein, 547 aa, Homo sapiens
MTVLEITLAVILTLLGLAILAILLTRWARRKQSEMHISRYSSEQSARLLDYEDGRGSRHAYSTQSERSKRDYTPSTNSLALSRSSIALPQGSMSSIKCLQTTEELPSRTAGAMMQFTAPIPGATGPIKLSQKTIVQTPGPIVQYPGPNAGPPSAPRGPPMAPIIISQRTASQLAAPIRIPQVHTMDSSGKITLTPVVILTGYMDEELAKKPCSKIQILKCGGTARSQNSREENKEALKNDIIFTNSVESLKSAHIKEPEREGKGTDLEKDKIGMEVKVDSDAGIPKRQETQLKISEMSIPQGQGAQIKKSVSDVPRGQESQVKKSESGVPKGQEAQVTKSGLVVLKGQEAQVEKSEMGVPRRQESQVKKSQSGVSKGQEAQVKKRESVVLKGQEAQVEKSELKVPKGQEGQVEKTEADVPKEQEVQEKKSEAGVLKGPESQVKNTEVSVPETLESQVKKSESGVLKGQEAQEKKESFEDKGNNDKEKERDAEKDPNKKEKGDKNTKGDKGKDKVKGKRESEINGEKSKGSKRAKANTGRKYNKKVEE

SEQ ID NO: 63368 - protein, 160 aa, Homo sapiens
ASSSSASSSSSSSSSASSGPALLRVGPGFDAALQVSAAIGTNLRRFRAVFGESGGGGGSGELTTQIPCSWRTKGHIHDKKTEPFRLLAWSWCLNDEQFLGFGSDEEVRVRSPTRSPSGSMLAQADKLPMTDKRVASLLKKAKAQLCKIEKSKSLKQTDQP

SEQ ID NO: 63369 - protein, 72 aa, Homo sapiens
MVMIFTLVTAVQEKLNEIVDQIKTRREEEKKQKEKEAEEAEKQLFHGTPVTIENFLNWKAKFDAELLEIKKK

SEQ ID NO: 63370 - protein, 44 aa, Homo sapiens
MEDPQSKEPAGEAVALALLESPRPEGGEEPPRPSPECPSLPCVL

SEQ ID NO: 63371 - protein, 130 aa, Homo sapiens
MLRPRFLPPDDRTVREGERKAAKLHFSQLGNSENFLLEVEKSSREKTMKNCVTGESSASKVSANVDSRIEMDSNKGLFIPFPNREIKDSLSTSATQGNGTRDQKLDTFPLGTQICMPQPISTVTLLYLSM

SEQ ID NO: 63372 - protein, 334 aa, Homo sapiens
MTDVPHVTQLLNMTKLRQTEIKFGGHPLRSAESDQFINRGTSITRNSKNQDVCHIAFGSKVLGPPPLSGRRNNMKISSETVRSVGSKNNRSCQPSTVEKCVNGTEMSALLIPESEEQGNKENIHQIKQTVPIHEPSADKNNNRRRLRLKSTSRERTETPSGSSSGNNRIEDKASTILTTVSQQGAELLNSGTLGPQSPDQSDEWIFPENADHISYLASSRQSLLLGDDSCNPSHLWLEASKESEHDQQAEESQSVPKDIFTFSSRPRSAPHGKTQTMSPEELSFILDLKEDNSVTSRDTQSEDDFYGGDSSEEVHCLISEVVLKHSCFLSSNKH

SEQ ID NO: 63373 - protein, 156 aa, Homo sapiens
MHHQQRMAALGTDKELSDLLDFSAMFSPPVSSGKNGPTSLASGHFTGSNVEDRSSSGSWGNGGHPSPSRNYGDGTPYDHMTSRDLGSHDNLSPPFVNSRIQSKTERGSYSSYGRESNLQGCHQSLLGGDMDMGNPGTLSPTKPGSQYYQYSSNNPR

SEQ ID NO: 63374 - protein, 209 aa, Homo sapiens
MDPGKDKEGVPQPSGPPARKKFVIPLDEDEVPPGVRGNPVLKFVRNVPWEFGDVIPDYVLGQSTCALFLSLRYHNLHPDYIHGRLQSLGKNFALRVLLVQVDVKDPQQALKELAKMCILADCTLILAWSPEEAGRYLETYKAYEQKPADLLMEKLEQDFVSRVTECLTTVKSVNKTDSQTLLTTFGSLEQLIAASREDLALCPGLGPQK

SEQ ID NO: 63375 - protein, 103 aa, Homo sapiens
MSETVICSSRATVMLYDDGNKRWLPAGTGPQAFSRVQIYHNPTANSFRVVGRKMQPDQQVVINCAIVRGVNWGPRPGRSYCWSQTQESQQAGGGLRGAHSPQS

SEQ ID NO: 63376 - protein, 63 aa, Homo sapiens
MPCCSHRSCREDPGTSESREMAGVQWRDLNSLQLLPPEFKGFSCLSLQSSWDYRTLWPVRMLL

SEQ ID NO: 63377 - protein, 213 aa, Homo sapiens
MRVRGPARLIASGARLLLRMLSALPGWGPAHLQRPLLGPASCLGILRPAMTAHSFALPVIIFTTFWGLVGIAGPWFVPKGPNRGVIITMLVATAVCCYLLCPALGMTVAPLSLTTPSSGPSPTQLCLVTSSLLLAPRDPDPQGLPGSWKSSQSSQPARALGSPGHSSGRGDVLLQYPHCSGVCPLSQGDAAGELVWVGSFPLQTGQMPGLSPS

SEQ ID NO: 63378 - protein, 262 aa, Homo sapiens
YDFSCELYRMSTYSTFPAGVPVSERSLARAGFYYTGVNDKVKCFCCGLMLDNWKLGDSPIQKHKQLYPSCSFIQNLVSASLGSTSKNTSPMRNSFAHSLSPTLEHSSLFSGSYSSLSPNPLNSRAVEDISSSRTNPYSYAMSTEEARFLTYHMWPLTFLSPSELARAGFYYIGPGDRVACFACGGKLSNWEPKDDAMSEHRRHFPNCPFLENSLETLRFSISNLSMQTHAARMRTFMYWPSSVPVQPEQLASAGFYYVGVSS

SEQ ID NO: 63379 - protein, 136 aa, Homo sapiens
MAHYITFLCMVLVLLLQNSVLAEDGEVRSSCRTAPTDLVFILDGSYSVGPENFEIVKKWLVNITKNFDIGPKFIQVGVVQYSDYPVLEIPLGSYDSGEHLTAAVESILYLGGNTKTGKAIQFALDYLFAKSSRFLT

SEQ ID NO: 63380 - protein, 168 aa, Homo sapiens
MALPPGPAALRHTLLLLPALLSSGWGELEPQIDGQTWAERALRENERHAFTCRVAGGPGTPRLAWYLDGQLQEASTSRLLSVGGEAFSGGTSTFTVTAHRAQHELNCSLQDPRSGRSANASVILNVQCPSRHPSLISSDSNNLKLNNVRLPRENMSLPSNLQLNDLTP

SEQ ID NO: 63381 - protein, 98 aa, Homo sapiens
MVLLKEYRVILPVSVDEYQVGQLYSVAEASKNETGGGEGVEVLVNEPYEKDGEKGQYTHKIYHLQSKVPTFVRMLAPEGALNIHEKAWNAYPYCRTGA

SEQ ID NO: 63382 - protein, 363 aa, Homo sapiens
MDVVARGTTTRRSRLKRSDGSTTSTSFILRQGSADSYTSRPSDSDVSLEEDREAIRQEREQQAAIQLERAKSKPVAFAVKTNVSYCGALDEDVPVPSTAISFDAKDFLHIKEKYNNDWWIGRLVKEGCEIGFIPSPLRLENIRIQQEQKRGRFHGGKSSGNSSSSLGEMVSGTFRATPTSTAKQKQKVTEHIPPYDVVPSMRPVVLVGPSLKGYEEMFDVILDENQLEDACEHLGEYLEAYWRATHTTSSTPMTPLLGRNLGSTALSPYPTAISGLQSQRMRHSNHSTENSPIERRSLMTSDENYHNERARKSRNRLSSSSQHSRDHYPLVEEDYPDSYQDTYKPHRNRGSPGGYSHDSRHRL

SEQ ID NO: 63383 - protein, 206 aa, Homo sapiens
DNSEDDLEFWNKPCLFTPESRLETLRHMEKQRKKQEKLSEKKKKVKPPRTLITEDGKALNVNEPKYMDTSLIDVDVQPTYVRVMIKGKPFQLVLPAEVKPDSSSAKRSQTTGHLVICMPKVGEVITGGQRAFKSMKTTSDRSREQTNTRSKHMEKLEVDPSKHSFPDVTNIVQEKKHTPRRRPEPKIIPSEEDPTFEDNPEVPPLI

SEQ ID NO: 63384 - protein, 174 aa, Homo sapiens
AGRLRAERAEKAAGMSSPGAQSHPEELPRGASTPSEKLYRCSMLDFSFDGSEEFDINAFEDIIAFYESKKKSKGIKQKQIIPKNLLDSKSLKLIISMTLHDRTTKSLLHLHKKKKPPSISAQFQTSLNKLLEALGKAEPFFIRCIRSNAEKKELCFDDELVLQQLRYTGMLETV

SEQ ID NO: 63385 - protein, 1136 aa, Homo sapiens
MDVASYLYTGDSHQLKRANCSGRYELAGLPGKWPALASAHPSLHRALDTLTHATNFLNVMLQSNKSREQNLQDDLDWYQALVWSLLEGEPSISRAAITFSTDSLSAPAPQVFLQATREESRILLQDLSSSAPHLANATLETEWFHGLRRKWRPHLHRRGPNQGPRGLGHSWRRKDGLGGDKSHFKWSPPYLECENGSYKPGWLVTLSSAIYGLQPNLVPEFRGVMKVDINLQKVDIDQCSSDGWFSGTHKCHLNNSECMPIKGLGFVLGAYECICKAGFYHPGVLPVNNFRRRGPDQHISGSTKDVSEEAYVCLPCREGCPFCADDSPCFVQEDKYLRLAIISFQALCMLLDFVSMLVVYHFRKAKSIRASGLILLETILFGSLLLYFPVVILYFEPSTFRCILLRWARLLGFATVYGTVTLKLHRVLKVFLSRTAQRIPYMTGGRVMRMLAVILLVVFWFLIGWTSSVCQNLEKQISLIGQGKTSDHLIFNMCLIDRWDYMTAVAEFLFLLWGVYLCYAVRTVPSAFHEPRYMAVAVHNELIISAIFHTIRFVLASRLQSDWMLMLYFAHTHLTVTVTIGLLLIPKFSHSSNNPRDDIATEAYEDELDMGRSGSYLNSSINSAWSEHSLDPEDIRDELKKLYAQLEIYKRKKMITNNPHLQKKRCSKKGLGRSIMRRITEIPETVSRQCSKEDKEGADHGTAKGTALIRKNPPESSGNTGKSKEETLKNRVFSLKKSHSTYDHVRDQTEESSSLPTESQEEETTENSTLESLSGKKLTQKLKEDSEAESTESVPLVCKSASAHNLSSEKKTGHPRTSMLQKSLSVIASAKEKTLGLAGKTQTAGVEERTKSQKPLPKDKETNRNHSNSDNTETKDPAPQNSNPAEEPRKPQKSGIMKQQRVNPTTANSDLNPGTTQMKDNFDIGEVCPWEVYDLTPGPVPSESKVQKHVSIVASEMEKNPTFSLKEKSHHKPKAAEVCQQSNQKRIDKAEVCLWESQGQSILEDEKLLISKTPVLPERAKEENGGQPRAANVCAGQSEELPPKAVASKTENENLNQIGHQEKKTSSSEENVRGSYNSSNNFQQPLTSRAEVCPWEFETPAQPNAGRSVALPASSALSANKIAGPRKEEIWDSFKV

SEQ ID NO: 63386 - protein, 124 aa, Homo sapiens
MAAVVQQNDLVFEFASNVMEDERQLGDPAIFPAVIVEHVPGADILNSYAGLACVEEPNDMITESSLDVAEEEIIDDDDDDITLTVETGFLHVGQSQTPDLKQSACLGFPKCGITGMSHCASQVC

SEQ ID NO: 63387 - protein, 71 aa, Homo sapiens
MVLLRVLILLLSWAAGMGDRDFDDGVLGLAWVGAPSGSSGGICEKSKLYSDVPTMGKLHSKEKPIKSSSPN

SEQ ID NO: 63388 - protein, 148 aa, Homo sapiens
MANINLKEITLIVGVVTACYWNSLFCGFVFDDVSAILDNKDLHPSTPLKTLFQNDFWGTPMSEERSHKSYRPLTVLTFRLNYLLSELKPMSYHLLNMIFHAVVSVIFLKVCKLFLDNKSSVIASLLFAVHPIHTEAVTGVVGRAELLS

SEQ ID NO: 63389 - protein, 41 aa, Homo sapiens
  MOD_RES (1)..(1): Any amino acid
XIPRAQATPYHPCHVTSQTFRFQESMGLHRAQGAPDAPFHM

SEQ ID NO: 63390 - protein, 102 aa, Homo sapiens
MQFLEEVQPYRALKHSNLLQCLAQCAEVTPYLLVMEFCPLGDLKGYLRSCRVAESMAPDPRTLQRMACEVACGVLHLHRNNFVHSDLALRNCLLTADLTVKI

SEQ ID NO: 63391 - protein, 191 aa, Homo sapiens
  MOD_RES (1)..(1): Any amino acid
XFPDGHVMMLTTPEEPQSIVPRLRTRNTRTDAILLGHYRLSQDTDNQTKVFAVITKKKEETGQSFICESYHLVATCCWRLHFPLMGSWSLGSSSLRDRESCFDCDCRFPEKPLDYKYRYFRRVPVQEADQSFHVGLQLCSSGHQRFNKLIWIHHSCHITYKSTGETAVSAFEIDKMYTPLFFARVRSYTAF

SEQ ID NO: 63392 - protein, 375 aa, Homo sapiens
MSWSPSLTTQTCGAWEMKERLGTGGFGNVIRWHNQETGEQIAIKQCRQELSPRNRERWCLEIQIMRRLTHPNVVAARDVPEGMQNLAPNDLPLLAMEYCQGGDLRKYLNQFENCCGLREGAILTLLSDIASALRYLHENRIIHRDLKPENIVLQQGEQRLIHKIIDLGYAKELDQGSLCTSFVGTLQYLAPELLEQQKYTVTVDYWSFGTLAFECITGFRPFLPNWQPVQWHSKVRQKSEVDIVVSEDLNGTVKFSSSLPYPNNLNSVLAERLEKWLQLMLMWHPRQRGTDPTYGPNGCFKALDDILNLKLVHILNMVTGTIHTYPVTEDESLQSLKARIQQDTGIPEEDQELLQEAGLALIPDKPATQCISDGK

SEQ ID NO: 63393 - protein, 88 aa, Homo sapiens
MDVNIAPLRAWDDFFPGSDRFARPDFRDISKWNNRVVSNLLYYQTNYLVVAAMMISIVGFLSPFNPPIVSEVSRVFMKSNGKWITRFL

SEQ ID NO: 63394 - protein, 112 aa, Homo sapiens
MHTRKRLTQLFCFPDLTEERLGDGKSADNTEVFSDKDTDQRSSPDVAKSKGCFTPESPEIVSVEEGGYAVQKNGGNPESRPDSPKCHAEQNHLLIEGPSGTVSLPFSLKANR

SEQ ID NO: 63395 - protein, 328 aa, Homo sapiens
MTTPGKENFRLKSYKNKSLNPDEMRRRREEEGLQLRKQKREEQLFKRRNVATAEEETEEEVMSDGGFHEAQISNMEMAPGGVITSDMIEMIFSKSPEQQLSATQKFRKLLSKEPNPPIDEVISTPGVVARFVEFLKRKENCTLQFESAWVLTNIASGNSLQTRIVIQAGAVPIFIELLSSEFEDVQEQAVWALGNIAGDSTMCRDYVLDCNILPPLLQLFSKQNRLTMTRNAVWALSNLCRGKSPPPEFAKVSPCLNVLSWLLFVSDTDVLADACWALSYLSDGPNDKIQAVIDAGVCRRLVELLMHNDYKVVSPALRAVGNIVTGDD

SEQ ID NO: 63396 - protein, 153 aa, Homo sapiens
MCSSQKPASQREDSLTCVAATTFQKVLDECQNQRACHLLVNSRVFGPDLCPGSSKYLLVSFKCQPNELKNKTVCEDQELKLHCHESKFLNIYSATYGRRTQERDICSSKAERLPPFDCLSYSALQVLSRRCYGKQRCKIIVNNHHFGSPCLPG

SEQ ID NO: 63397 - protein, 176 aa, Homo sapiens
MATTSTTGSTLLQPLSNAVQLPIDQAARHMIPGCLSPSVCLTYLAESTGEKYALHFLVQSGISYCIMIIIGVENMHNYCFVFALGYLTVCQVTRVYIFDYGQYSADFSGPMMIITQKITSLACEIHDGMFRKDEELTSSQRDLAVRRMPSLLEYLSYNCNFMGILAGPLCSYKDYI

SEQ ID NO: 63398 - protein, 184 aa, Homo sapiens
MEPAAALHFSLPASLLLLLLLLLLSLCALVSGLGSKPLIEIKAQEDGSIWLECISGGWYPEPLTVWRDPYGEVVPALKEVSIADADGLFMVTTAVIIRDKYVRNVSCSVNNTLLGQEKETVIFIPESFMPSASPWMVALAVILTASPWMVSMTVILAVFIIFMAVSICCIKKLQREKKILSGEK

SEQ ID NO: 63399 - protein, 92 aa, Homo sapiens
MFFDDSASAASSMEVTDRIASLEQRVQMQEDDIQLLKSALADVVRRLNITEEQQAVLNRKGPTKARPLMQTLPLRTTVNNGTVLPKKPTGSL

SEQ ID NO: 63400 - protein, 270 aa, Homo sapiens
MLGICRGRRKFLAASLSLLCIPAITWIYLFSGSFEDGKPVSLSPLESQAHSPRYTASSQRERESLEVRMREVEEENRALRRQLSLAQGRAPSHRRGNHSKTYSMEEGTGDSENLRAGIVAGNSSECGQQPVVEKCETIHVAIVCAGYNASRDVVTLVKSVLFHRRNPLHFHLIADSIAEQILATLFQTWMVPAVRVDFYNADELKSEVSWIPNKHYSGIYGLMKLVLTKTLPANLERVIVLDTDITFATDIAELWAVFHKFKDENGGRMY

SEQ ID NO: 63401 - protein, 155 aa, Homo sapiens
IAHVIRGQDGSPQIENIQPFSAKDLSIRSLGDRIRDLAQLKNLYPKKPKDEAFRSHYKPEQMGKDGRGYVPATIKMTVERDQPLPTPELQMPTMVPSYDLGMAPDSSMSMQLGPDMVCTHHTLTPSPRIKASPQKNQSTCCQPSRSLTCRCPPAW

SEQ ID NO: 63402 - protein, 282 aa, Homo sapiens
MAVTITLKTLQQQTFKIRMEPDETVKVLKEKIEAEKGRDAFPVAGQKLIYAGKILSDDVPIRDYRIDEKNFVVVMVTKTKAGQGTSAPPEASPTAAPESSTSFPPAPTSGMSHPPPAAREDKSPSEESAPTTSPESVSGSVPSSGSSGREEDAASTLVTGSEYETMLTEIMSMGYERERVVAALRASYNNPHRAVEYLLTGIPGSPEPEHGSVQESQVSEQPATEAAGENPLEFLRDQPQFQNMRQVIQQNPALLPALLQQLGQENPQLLQAGVQWRDLSSP

SEQ ID NO: 63403 - protein, 935 aa, Homo sapiens
MKVTVCFGRTGIVVPCKEGQLRVGELTQQALQRYLKTREKGPGYWVKIHHLEYTDGGILDPDDVLADVVEDKDKLIAVFEEQEPLHKIESPSGNPADRQSPDAFETEVAAQLAAFKPIGGEIEVTPSALKLGTPLLVRRSSDPVPGPPADTQPSASHPGGQSLKLVVPDSTQNLEDREVLNGVQTELLTSPRTKDTLSDMTRTVEISGEGGPLGIHVVPFFSSLSGRILGLFIRGIEDNSRSKREGLFHENECIVKINNVDLVDKTFAQAQDVFRQAMKSPSVLLHVLPPQNREQYEKSVIGSLNIFGNNDGVLKTKVPPPVHGKSGLKTANLTGTDSPETDASASLQQNKSPRVPRLGGKPSSPSLSPLMGFGSNKNAKKIKIDLKKGPEGLGFTVVTRDSSIHGPGPIFVKNILPKGAAIKDGRLQSGDRILEVNGRDVTGRTQEELVAMLRSTKQGETASLVIARQEGHFLPRELKGEPDCCALSLETSEQLTFEIPLNDSGSAGLGVSLKGNKSRETGTDLGIFIKSIIHGGAAFKDGRLRMNDQLIAVNGESLLGKSNHEAMETLRRSMSMEGNIRGMIQLVILRRPERPMEDPAECGAFSKPCFENCQNAVTTSRRNDNSILHPLGTCSPQDKQKGLLLPNDGWAESEVPPSPTPHSALGLGLEDYSHSSGVDSAVYFPDQHINFRSVTPARQPESINLKASKSMDLVPDESKVHSLAGQKSESPSKDFGPTLGLKKSSSLESLQTAVAEVRKNDLPFHRPRPHMVRGRGCNESFRAAIDKSYDGPEEIEADGLSDKSSHSGQGALNCESAPQGNSELEDMENKARKVKKTKEKEKKKEKGKLKVKEKKRKEENEDPERKIKKKGFGAMLRYGPALKAKLVLILSLLKKAHAFPRLQPNAYGSQFCARSLSAEAEELFGESYSDDRTLS

SEQ ID NO: 63404 - protein, 736 aa, Homo sapiens
YGLASRLRDTRRLSFLVSYIASKKIHTEPQLSAALEYVRSHPLDPIDTVDFERECGVGVIVTPEQIEEAVEAAINRHRPQLLVERYHFNMGLLMGEARAVLKWADGKMIKNEVDMQVLHLLGPKLEADLEKKFKVAKARLEETDRRTAKDVVENGETADQTLSLMEQLRGEALKFHKPGENYKTPGYVVTPHTMNLLKQHLEITGGQVRTRFPPEPNGILHIGHAKAINFNFGYAKANNGICFLRFDDTNPEKEEAKFFTAICDMVAWLGYTPYKVTYASDYFDQLYAWAVELIRRGLAYVCHQRGEELKGHNTLPSPWRDRPMEESLLLFEAMRKGKFSEGEATLRMKLVMEDGKMDPVAYRVKYTPHHRTGDKWCIYPTYDYTHCLCDSIEHITHSLCTKEFQARRSSYFWLCNALDVYCPVQWEYGRLNLHYAVVSKRKILQLVATGAVRDWDDPRLFTLTALRRRGFPPEAINNFCARVGVTVAQTTMEPHLLEACVRDVLNDTAPRAMAVLESLRVIITNFPAAKSLDIQVPNFPADETKGFHQVPFAPIVFIERTDFKEEPEPGFKRLAWGQPVGLRHTGYVIELQHVVKGPSGCVESLEVTCRRADAGEKPKAFIHWVSQPLMCEVRLYERLFQHKNPEDPTEVPGGFLSDLNLASLHVVDAALVDCSVALAKPFDKFQFERLGYFSVDPDSHQGKRRGLTLAQGGVKWCNHSSLWPQTTGLKLFSCLS

SEQ ID NO: 63405 - protein, 67 aa, Homo sapiens
MKRESKHARMSMKANSSGEAMSLGSHSPQSDSLTQLVQQPDMMYFILFLWLLVYCLLLFPQLDVSRL

SEQ ID NO: 63406 - protein, 346 aa, Homo sapiens
MSRDPGSGGWEEAPRAAAALCTLYHEAGQRLRRLQDQLAARDALIARLRARLAALEGDAAPSLVDALLEQVARFREQLRRQEGGAAEAQMRQEIERLTERLEEKEREMQQLLSQPQHEREKEVVLLRRSMAEGERARAASDVLCRSLANETHQLRRTLTATAHMCQHLAKCLDERQHAQRNVGERSPDQSEHTDGHTSVQSVIEKLQEENRLLKQKVTHILAYKDDFMSERADRERAQSRIQELEEKVASLLHQVSWRQDSREPDAGRIHAGSKTAKYLAADALELMVPGGWRPGTGSQQPEPPAEGGHPGAAQRGQGDLQCPHCLQCFSDEQGEELLRHVAECCQ

SEQ ID NO: 63407 - protein, 77 aa, Homo sapiens
  MOD_RES (1)..(1): Any amino acid
XQLYGVHPHGSYSRLPFTALGSGQDAALAVLEDRFQPNMTVSGLCPRLCGRWWDVHPGAGGAQDPGPVRVAKACRRR

SEQ ID NO: 63408 - protein, 221 aa, Homo sapiens
HVITALRVKKKNNEYLLPESVDLECVKYCVVYDNNSSTLEILLKDDDDDSDSDGDGKDLVPQAAIEYGRILTRLTHHPVYILKGGYERFSGTYHFLRTQKIIWMPQELDAFQPYPIEIVPGKVFVGNFSQACDPKIQKDLKIKAHVNVSMDTGPFFAGDADKLLHIRIEDSPEAQILPFLRHMCHFIEVLGLCQEVQKQHVSKSGIGEPAAGMGEDYPWRF

SEQ ID NO: 63409 - protein, 137 aa, Homo sapiens
MTSPEIASLSWGQMKVKGSNTTYKDCKVWPGGSRTWDWRETGTEHSPGVQPADVKEVVEKGVQTLVIGRGMSEALKAPTQQLPSGVHVRAVVQFHLATASWHILERCKTDQELEQLGVFSTLLWTGEGSWTEHQTCL

SEQ ID NO: 63410 - protein, 69 aa, Homo sapiens
RRLRDLLTRRESPLALWGCVALSCCYSRCRTGRAIRGHEGPESPKFRGLTGSNYPGLSISLRLTGSSAQ

SEQ ID NO: 63411 - protein, 54 aa, Homo sapiens
MELEVRRVRQAFLSGRSRPLRFRLQQLEALRRMVQEREKDILTAIAADLCKEML

SEQ ID NO: 63412 - protein, 236 aa, Homo sapiens
MAPSTPLLTVRGSEGLYMVNGPPHFTESTVFPRESGKNCKVCIFSKDGTLFAWGNGEKVNIISVTNKGLLHSFDLLKAVCLEFSPKNTVLATWQPYTTSKDGTAGIPNLQLYDVKTGTCLKSFIQKKMQNWCPSWSEDETLCARNVNNEVHFFENNNFIGSRVSASGSFLDTIANKLHLQKINDFVLSPGPQPYKVAVYVPGSKGAPSFVRLYQYPNFAGPHAALANKSFFKADKV

SEQ ID NO: 63413 - protein, 439 aa, Homo sapiens
MLRRALLCLAVAALVRADAPEEEDHVLVLRKSNFAEALAAHKYLLVEFSGREADDIVNWLKKRTGPAATTLPDGAAAESLVESSEVAVIGFFKDVESDSAKQFLQAAEAIDDIPFGITSNSDVFSKYQLDKDGVVLFKKFDEGRNNFEGEVTKENLLDFIKHNQLPLVIEFTEQTAPKIFGGEIKTHILLFLPKSVSDYDGKLSNFKTAAESFKGKILFIFIDSDHTDNQRILEFFGLKKEECPAVRLITLEEEMTKYKPESEELTAERITEFCHRFLEGKIKPHLMSQELPEDWDKQPVKVLVGKNFEDVAFDEKKNVFVEFYAPWCGHCKQLAPIWDKLGETYKDHENIVIAKMDSTANEVEAVKVHSFPTLKFFPASADRTVIDYNGERTLDGFKKFLESGGQDGAGDDDDLEDLEEAEEPDMEEDDDQKAVKDEL

SEQ ID NO: 63414 - protein, 131 aa, Homo sapiens
MSKRYLQKATKGKLLIIIFIVTLWGKVVSSANHHKAHHVKTGTCEVVALHRCCNKNKIEERSQTVKCSCFPGQVAGTTRAAPSCVDASIVEQKWWCHMQPCLEGEECKVLPDRKGWSCSSGNKVKTTRANV

SEQ ID NO: 63415 - protein, 232 aa, Homo sapiens
MIITKAGRRMFPAMRVKISGLDPHQQYYIAMDIVPVDNKRYRYVYHSSKWMVAGNADSPVPPRVYIHPDSPASGETWMRQVISFDKLKLTNNELDDQGHIILHSMHKYQPRVHVIRKDCGDDLSPIKPVPSGEGVKAFSFPETVFTTVTAYQNQQITRLKIDRNPFAKGFRDSGRNRMGLEALVESYAFWRPSLRTLTFEDIPGIPKQEYRDLKTDYIFPERDNLVSRETKL

SEQ ID NO: 63416 - protein, 119 aa, Homo sapiens
MVYTLWAAVWVTWNVFIICFYLEVGGLLKDSELLTFSLSRHRSWWRERWPGCLHEEVPAVGLGAPHGQALVSGAGCALEPSYVEALHSCLQILIALLGFVCGCQVVSVFTEEEDSCLRK

SEQ ID NO: 63417 - protein, 193 aa, Homo sapiens
  MOD_RES (1)..(1): Any amino acid
XNVTYLEPSLRIAASTLKSGISYRARVRAWAQCYNTTWSEWSPSTKWHNSYREPFEQHLLLGVSVSCIVILAVCLLCYVSITKIKKEWWDQIPNPARSRLVAIIIQDAQGSQWEKRSRGQEPAKCPLQGTAGGGVFWKRGLLAKPPEFHWCVRHWKNCLTKLLPCFLEHNMKRDEDPHKAAKEMPFQGSGKSA

SEQ ID NO: 63418 - protein, 162 aa, Homo sapiens
MYEPEAKKSKTAAKKNDKEAAGEGPALYEDPPDQKTSPSGKPATLKICSWNVDGLRAWIKKKGLDWVKEEAPDILCLQETKCSENKLPAELQELPGLSHQYWSAPSDKEGYSGVGLLSRQCPLKVSYGIGDEEHDQEGRVIVAEFDSFVLVTAYVPNAGRGL

SEQ ID NO: 63419 - protein, 599 aa, Homo sapiens
LLVLGLLVAGAADGCELVPRHLRGRRATGSAATAASSPAAAAGDSPALMTDPCMSLSPPCFTEEDRFSLEALQTIHKQMDDDKDGGIEVEESDEFIREDMKYKDATNKHSHLHREDKHITIEDLWKRWKTSEVHNWTLEDTLQWLIEFVELPQYEKNFRDNNVKGTTLPRIAVHEPSFMISQLKISDRSHRQKLQLKALDVVLFGPLTRPPHNWMKDFILTVSIVIGVGGCWFAYTQNKTSKEHVAKMMKDLESLQTAEQSLMDLQERLEKAQEENRNVAVEKQNLERKMMDEINYAKEEACRLRELREGAECELSRRQYAEQELEQVRMALKKAEKEFELRSSWSVPDALQKWLQLTHEVEVQYYNIKRQNAEMQLAIAKDEAEKIKKKRSTVFGTLHVAHSSSLDEVDHKILEAKKALSELTTCLRERLFRWQQIEKICGFQIAHNSGLPSLTSSLYSDHSWVVMPRVSIPPYPIAGGVDDLDEDTPPIVSQFPGTMAKPPGSLARSSSLCRSRRSIVPSSPQPQRAQLAPHAPHPSHPRHPHHPQHTPHSLPSPDPDILSVSSCPALYRNEEEEEAIYFSAEKQCIHLGLGACKSE

SEQ ID NO: 63420 - protein, 154 aa, Homo sapiens
MSEESDSLRTSPSVASLSENELPPPPEPPGYVCSLTEDLVTKAREELQEKPEWRLRDVQALRDMVRKEYPNLSTSLDDAFLLRFLRARKFDYDRALQLLVNYHSCRRSWPEVFNNLKPSALKDVLASGFLTVLPHTDPRGCHVVCIRPVLPPWV

SEQ ID NO: 63421 - protein, 163 aa, Homo sapiens
MNLQPIFWIGLISSVCCVFAQTDENRCLKANAKSCGECIQAGPNCGWCTNSTFLQEGMPTSARCDDLEALKKKGCPPDDIENPRGSKDIKKNKNVTNRSKGTAEKLKPEDITQIQPQQLVLRLRSGEPQTFTLKFKRAEDYPIDLYYLMDLSYSMKDDLENVK

SEQ ID NO: 63422 - protein, 871 aa, Homo sapiens [sequence omitted]

SEQ ID NO: 63423 - protein, 130 aa, Homo sapiens
MDASGPSDSDMPSRTRPKSPRKHNYRNESARESLCDSPHQNLSRPLLENKLKAFSIGKMSTAKRTLSKKEQEELKKKEDEKAAAEIYEEFLAAFEGSDGNKVKTFVRGGVVNAAKEEHETDEKRGKIYKP

SEQ ID NO: 63424 - protein, 281 aa, Homo sapiens
MVLLHVLFEHAVGYALLALKEVEEISLLQPQVEESVLNLGKFHSIVRLVAFCPFASSQVALENANAVSEGVVHEDLRLLLETHLPSKKKKVLLGVGDPKIGAAIQEELGYNCQTGGVIAEILRGVRLHFHNLVKGLTDLSACKAQLGLGHSYSRAKVKFNVNRVDNMIIQSISLLDQLDKDINTFSMRVRQSRCGEGKAVALWFLMKQLGQGVTVALCREWYGYHFPELVKIINDNATYCRLAQFIGNRRELNEDKLEKLEELTMDGAKAKAILDASRSSM

SEQ ID NO: 63425 - protein, 206 aa, Homo sapiens
  MOD_RES (1)..(1): Any amino acid
XPAMNMGPGVRGPWASPSGNSIPYSSSSPGSYTGPPGGGGPPGTPIMPSPGDSTNSSENMYTIMNPIGQGAGRANFPLGPGPEGPMAAMSAMEPHHVNGSLGSGDMDGLPKSSPGAVAGLSNAPGTPRDDGEMAAAGTFLHPFPSESVSDCVDSPPAAASGRRGWRAGPGGAAGGPEQDRDRGGPVLARDDHERVMGRQPRASLRA

SEQ ID NO: 63426 - protein, 167 aa, Homo sapiens
MAPLCSLARWNYFFLYDGSKVKEEGDPTRAGICYFYPSQTLLDQQELLCGQIAGVVRCVSDISDSPPTLVRLRKLKFAIKVDGDYLWVLGCAVELPDVSCKRFLDQLVGFFNFYNGPVSLAYENCSQEELSTEWDTFIEQILKNTSDLHKIFNSLWNLDQTKGLLGP

SEQ ID NO: 63427 - protein, 68 aa, Homo sapiens
MGELFRSEEMTLAQLFLQSEAAYCCVSELGELGKVQFRDLNPDVNVFQRKFVNEVRRCEEMDRKLRQF

SEQ ID NO: 63428 - protein, 226 aa, Homo sapiens
MGGGWQQEQFEHYKINFDDSKNGLSAWELIELIGNGQFSKGMDRQTVSMAINEVFNELILDVLKQGYMMKKGHRRKNWTERWFVLKPNIISYYVSEDLKDKKGDILLDENCCVESLPDKDGKKCLFLVKCFDKTFEISASDKKKKQEWIQAIHSTIHLLKLGSPPPHKEARQRRKELRKKQLAEQEELERQMKELQAANESKQQELEAVRKKLEEAASRAAEEEKK

SEQ ID NO: 63429 - protein, 254 aa, Homo sapiens
  MOD_RES (1)..(1): Any amino acid
XLEKLDLLEQEYNKLTTMQALAEKKMQELEAKLHEEEQERKRMQAKAAELQTGLETNRLIFEDKATPCVPNARRIKKKKSKPPEKSTSPSHAVVANVQLVLHLMKQHSKALCNDRVINSIPLAKQVSSRGGKSKKLSVTPPSSNGINEELSEVLQTLQDEFGQMSFDHQQLAKLIQESPTVELKDKLECELEALVGRMEAKANQITKVRKYQAQLEKQKLEKQKKELKATKKTLDEERNSSSRSGITGTTNKKD

SEQ ID NO: 63430 - protein, 164 aa, Homo sapiens
MAFWTQLMLLLWKNFMYRRRQPVQLLVELLWPLFLFFILVAVRHSHPPLEHHECHFPNKPLPSAGTVPWLQGLICNVNNTCFPQLTPGEEPGRLSNFNDSLVSRLLADARTVLGGASAHRTLAGLGKLIATLRAARSTAQPQPTKQSPLEPPMLDVAELLTSLL

SEQ ID NO: 63431 - protein, 167 aa, Homo sapiens
MGADGFVPLGTLLQLPQFRGFSAEDVQRVVDTNRKQRFALQLGDPSTGLLIRANQGHSLQVPKLELMPLETPQALPPMLVHGTFWKHWPSILLKGLSCQGRTHIHLAPGLPGDPGIISGMRSHCEIAVFIDGPLALAGKPLSLAGDEETECQSSPKHSSRERRRIQQ

SEQ ID NO: 63432 - protein, 384 aa, Homo sapiens
  MOD_RES (1)..(1): Any amino acid
XLIYDSVMLKHQCSCGDNSRHPEHAGRIQSIWSRLQERGLRSQCECLRGRKASLEELQSVHSERHVLLYGTNPLSRLKLDNGKLAGLLAQRMFVMLPCGGVGVDTDTIWNELHSSNAARWAAGSVTDLAFKVASRELKDVHHGNGTQQTFYQDPSVLYISLHRHDDGNFFPGSGAVDEVGAGSGEGFNVNVAWAGGLDPPMGDPEYLAAFRIVVMPIAREFSPDLVLVSAGFDAAEGHPAPLGGYHVSAKCFGYMTQQLMNLAGGAVVLALEGGHDLTAICDASEACVAALLGNRVDPLSEEGWKQKPNLNAIRSLEAVIRVHSKYWGCMQRLASCPDSWVPRVPGADKEEVEAVTALASLSVGILAEDRPSEQLVEEEEPMNL

SEQ ID NO: 63433 - protein, 42 aa, Homo sapiens
MQMPQGNPLLLSHTLQELLARDTVQVELIPEKKGLFLKHVEY

SEQ ID NO: 63434 - protein, 138 aa, Homo sapiens
MGPGRCLLTALLLLALAPPPEASQYCGRLEYWNPDNKCCSSCLQRFGPPPCPDYEFRENCGLNDHGDFVTPPFRKCSSGQCNPDGAELCSPCGGGAVTPTPAAGGGRTPWRCRERPVPAKGHCPLTPGNPGAPSSQER

SEQ ID NO: 63435 - protein, 32 aa, Homo sapiens
MDAFTRFTNQTQGRDRLFRVQTRQCGTCYTGN

SEQ ID NO: 63436 - protein, 337 aa, Homo sapiens
MSTGLRYKSKLATPEDKQDIDKQYVGFATLPNQVHRKSVKKGFDFTLMVAGESGLGKSTLVHSLFLTDLYKDRKLLSAEERISQTVEILKHTVDIEEKGVKLKLTIVDTPGFGDAVNNTECWKPITDYVDQQFEQYFRDESGLNRKNIQDNRVHCCLYFISPFGHGLRPVDVGFMKALHEKVNIVPLIAKADCLVPSEIRKLKERIREEIDKFGIHVYQFPECDSDEDEDFKQQDRELKESAPFAVIGSNTVVEAKGQRVRGRLYPWGIVEGALRLREAAQHAHPHAYARPQGRDVRRALRELPRALHPADDQQTDPGQPHGEPHPDPAAAHPGRRD

SEQ ID NO: 63437 - protein, 340 aa, Homo sapiens
MKAIKKSLTEEEYLYLDFSHQTEGCIFPLHTSVTLFLLSYCDCKIFKICLVVTKEVSQWTRLCELTIPLAIENFLRESSDQPPTIPVEILQLEKKLSEPVRVHNDDKLRRQKLKQQKADGVGPPLTKGKAKSKVHTQETSEGLDSSSKSLELKVAFSKLTVQEEPATTNREPSHIRKAKASDLPPLEHVFAEGLYFTLADIVLLPCIHHFLVIISRKFSEKLVEFPLLASWYQRIQEVPGVKTAASKCGIQFLHLPKLLTTSTEQHPNLCEVPGVEEQSDPLFIGGPRPTMAKLMEKGIEVMFSPHPCPTWTLDWNVLPAAVSPKEDGVLLCHSGWNAVV

SEQ ID NO: 63438 - protein, 184 aa, Homo sapiens
MSDKSELKAELERKKQRLAQIREEKKRKEEERKKKETDQKKEAVAPVQEESDLEKKRREAEALLQSMGLTPESPIVPPPMSPSSKSVSTPSEAGSQDSGDGAVGSRTLHWDTDPSVLQLHSDSDLGRGPIKLGMAKITQVDFPPREIVTYTKETQTPVMAQPKEDEEEDDDVVAPKPPIEPEEE

SEQ ID NO: 63439 - protein, 482 aa, Homo sapiens
MSRLLWRKVAGATVGPGPVPAPGRWVSSSVPASDPSDGQRRRQQQQQQQQQQQQQPQQPQVLSSEGGQLRHNPLDIQMLSRGLHEQIFGQGGEMPGEAAVRRSVEHLQKHGLWGQPAVPLPDVELRLPPLYGDNLDQHFRLLAQKQSLPYLEAANLLLQAQLPPKPPAWAWAEGWTRYGPEGEAVPVAIPEERALVFDVEVCLAEGTCPTLAVAISPSAWYSWCSQRLVEERYSWTSQLSPADLIPLEVPTGASSPTQRDWQEQLVVGHNVSFDRAHIREQYLIQGSRMRFLDTMSMHMAISGLSSFQRSLWIAAKQGKHKVQPPTKQGQKSQRKARRGPAISSWDWLDISSVNSLAEVHRLYVGGPPLEKEPRELFVKGTMKDIRENFQDLMQYCAQDVWATHEVFQQQLPLFLERCPHPVTLAGMLEMGVSYLPVNQNWERYLAEAQGTYEELQREMKKSLMDLANDACQLLSGESGLAL

SEQ ID NO: 63440 - protein, 134 aa, Homo sapiens
MPLRHWGMARGSKPVGDGAQPMAAMGGLKVLLHWAGPGGGEPWVTFSESSLTAEEVCIHIAHKVVETGFHHVSQDGLDLLTSWSAHLSLPKCWDYRREPLRPADRYHSSLLQSLCPLRCSGPSLVAPKPHPRDP

SEQ ID NO: 63441 - protein, 79 aa, Homo sapiens
MEGFMDSGTQTDAVVVLSLAQAAVLGLVSENELFGATISAEAFYPDLGPELSGAAMGEPEPPGPDVYQLACNGRALEEP

SEQ ID NO: 63442 - protein, 29 aa, Homo sapiens
MSPQKRVKNVQAQNRTSQGSSSFQTTLSA

SEQ ID NO: 63443 - protein, 121 aa, Homo sapiens
VEEQLQRHYAGHNDDVKCLAVHPDRITIATGQVAGTSKDGKQLPPHVRIWDSVTLNTLHVIGIGFFDRAVTCIAFSKSNGGTNLCAVDDSNDHVLSVWDWQKEEKLADVKRCEASESLFFL

SEQ ID NO: 63444 - protein, 49 aa, Homo sapiens
MWSLHIVLMRCSFRLTKSLATGPWSHFQRVLTVPSTMRTTQGVQHTLLG

SEQ ID NO: 63445 - protein, 384 aa, Homo sapiens
MAVAAAAAAGPVFWRRLLGLLPGRPGLAALLGRLSDRLGRNRDRQRRRSPWLLLAPLLSPAVPQVTSPPCCLCPEGVHRFQWIRNLVPEFGVSSSHVRVLSSPAEFFELMKVDCLESTLEKSLQAKFPSNLKVSILLDFTRGSRGRKNSRTMLLPLLRRFPEQVRVSLFHTPHLRGLLRLLIPERFNETIGLQHIKVYLFDNSVILSGANLSDSYFTNRQDRYVFLQDCAEIADFFTELVDAVGDVSLQLQGDDTVQVVDGMVHPYKGDRAEYCKAANKRVMDVINSARTRQQMLHAQTFHSNSLLTQEDAAAAGDRRPAPDTWIYPLIQMKPFEIQIDEIVTETLLTEAERGAKVYLTTGYFNLTQAYMDLVLGTRAEYQILL

SEQ ID NO: 63446 - protein, 134 aa, Homo sapiens
MGRAGAGSPGRRRQRCQSRGRRRPRAPRRRKAPACRRRRARRRRKKPCPRSLRPEIHECPKSQDPCASRDDWRCARSMHEFSAKDIDGHMVNLDKGFVCIVTNVASQCGKTEVNYTQLVDLHARYAECGLRILA

SEQ ID NO: 63447 - protein, 27 aa, Homo sapiens
VFKWTGSNSFFVKGDLDSLMMGSGRIL

SEQ ID NO: 63448 - protein, 52 aa, Homo sapiens
MSGTLEKVLCLRNNTIFKQAFSLLRFRTSGEKPIYSVERDGLACGPGLSTVA

SEQ ID NO: 63449 - protein, 1226 aa, Homo sapiens
MGDKKDDKDSPKKNKGKERRDLDDLKKEVAMTEHKMSVEEVCRKYNTDCVQGLTHSKAQEILARDGPNALTPPPTTPEWVKFCRQLFGGFSILLWIGAILCFLAYGIQAGTEDDPSGDNLYLGIVLAAVVIITGCFSYYQEAKSSKIMESFKNMVPQQALVIREGEKMQVNAEEVVVGDLVEIKGGDRVPADLRIISAHGCKVDNSSLTGESEPQTRSPDCTHDNPLETRNITFFSTNCVEGTARGVVVATGDRTVMGRIATLASGLEVGKTPIAIEIEHFIQLITGVAVFLGVSFFILSLILGYTWLEAVIFLIGIIVANVPEGLLATVTVCLTLTAKRMARKNCLVKNLEAVETLGSTSTICSDKTGTLTQNRMTVAHMWFDNQIHEADTTEDQSGTSFDKSSHTWVALSHIAGLCNRAVFKGGQDNIPVLKRDVAGDASESALLKCIELSSGSVKLMRERNKKVAEIPFNSTNKYQLSIHETEDPNDNRYLLVMKGAPERILDRCSTILLQGKEQPLDEEMKEAFQNAYLELGGLGERVLGFCHYYLPEEQFPKGFAFDCDDVNFTTDNLCFVGLMSMIDPPRAAVPDAVGKCRSAGIKVIMVTGDHPITAKAIAKGVGIISEGNETVEDIAARLNIPVSQVNPRDAKACVIHGTDLKDFTSEQIDEILQNHTEIVFARTSPQQKLIIVEGCQRQGAIVAVTGDGVNDSPALKKADIGVAMGIAGSDVSKQAADMILLDDNFASIVTGVEEGRLIFDNLKKSIAYTLTSNIPEITPFLLFIMANIPLPLGTITILCIDLGTDMVPAISLAYEAAESDIMKRQPRNPRTDKLVNERLISMAYGQIGMIQALGGFFSYFVILAENGFLPGNLVGIRLNWDDRTVNDLEDSYGQQWTYEQRKVVEFTCHTAFFVSIVVVQWADLIICKTRRNSVFQQGMKNKILIFGLFEETALAAFLSYCPGMDVALRMYPLKPSWWFCAFPYSFLIFVYDEIRKLILRRNPGGEGARQGSRGGRGAAGSQAAGPRLPSPCWMALPPGSHSSLSSHLSGHPLCLLTGLCLCGFLVSLPLCPSLCWAARLACLSPSLTLSLSFLLCLSRLGGEGNLLLTSAPPHRPSLPRPPGPGPPLSVPPILYSGGRSPLFLWPHLGPHPLHYLLPPPLWLASLPCPKPLSSLFSVSVSLPLLTPLSIPPAPATSLGSFLLPFSPPADAISGSGQLSNISVGRE

SEQ ID NO: 63450 - protein, 927 aa, Homo sapiens
MADDDVLFEDVYELCEVIGKGPFSVVRRCINRETGQQFAVKIVDVAKFTSSPGLSTEGKRWISNLKREASICHMLKHPHIVELLETYSSDGMLYMVFEFMDGADLCFEIVKRADAGFVYSEAVASHYMRQILEALRYCHDNNIIHRDVKPHCVLLASKENSAPVKLGGFGVAIQLGESGLVAGGRVGTPHFMAPEVVKREPYGKPVDVWGCGVILFILLSGCLPFYGTKERLFEGIIKGKYKMNPRQWSHISESAKDLVRRMLMLDPAERITVYEALNHPWLKERDRYAYKIHLPETVEQLRKFNARRKLKGAVLAAVSSHKFNSFYGDPPEELPDFSEDPTSSGLLAAERAVSQVLDSLEEIHALTDCSEKDLDFLHSVFQDQHLHTLLDLYDKINTKSSPQIRNPPSDAVQRAKEVLEEISCYPENNDAKELKRILTQPHFMALLQTHDVVAHEVYSDEALRVTPPPTSPYLNGDSPESANGDMDMENVTRVRLVQFQKNTDEPMGITLKMNELNHCIVARIMHGGMIHRQGTLHVGDEIREINGISVANQTVEQLQKMLREMRGSITFKIVPSYRTQSSSCERDSPSTSRQSPANGHSSTNNSVSDLPSTTQPKGRQIYVRAQFEYDPAKDDLIPCKEAGIRFRVGDIIQIISKDDHNWWQGKLENSKNGTAGLIPSPELQEWRVACIAMEKTKQEQQASCTWFGKKKKQYKDKYLAKHNADLVTYEEVVKLPAFKRKTLVLLGAHGVGRRHIKNTLITKHPDRFAYPIPHTTRPPKKDEENGKNYYFVSHDQMMQDISNNEYLEYGSHEDAMYGTKLETIRKIHEQGLIAILDVEPQALKVLRTAEFAPFVVFIAAPTITPGLNEDESLQRLQKESDILQRTYAHYFDLTIINNEIDETIRHLEEAVELVCTAPQWVPVSWVY

SEQ ID NO: 63451 - protein, 87 aa, Homo sapiens
  MOD_RES (1)..(1): Any amino acid
XAPGFFLDLEPIPGALDAVREMNDLPDTQVFICTSPLLKYHHCVGEKARRRPQAGSTSCSPAATIGTWSCPRQGDGCSPGVTTGGRS

SEQ ID NO: 63452 - protein, 380 aa, Homo sapiens
  MOD_RES (1)..(1): Any amino acid
XLGSKFRYSGRTQAQTRQASTLIDRPAPHFERTSSKRVSRSLDGAPIGVMDQSLMKDFPGAAGEISAYGPGLVSIAVVQDGDGRREVRSPTKAPHLQLIEGKKNSLRVEGDNIYVRHSNLMLEELDKAQEDILKHQASISELKRNFMESTPEPRPNEWEKRRITPLSLQTQGRKGDHLFKDILSVKEKYLMPTIWTVEEKAQETDKTRAPESEGPCTGARDAVKSSHETLNIVEEKKRAEVGKDERVITEEMNGKEISPGSGPGEIRKVEPVTQKDSTSLSSESSSSSSESEEEDVGEYRPHHRVTEGTIREEQEYEEEVEEEPRPAAKVVEREEAVPEASPVTQAGASVITVETVIQENVGAQKIPGEKSVHEGALKQD

SEQ ID NO: 63453 - protein, 169 aa, Homo sapiens
MGFSSELCSPQGHGVLQQMQEAELRLLEGMRKWMAQRVKSDREYAGLLHHMSLQDSGGQSRAISPDSPISQSWAEITSQTEGLSRLLRQHAEDLNSGPLSKLSLLIRERQQLRKTYSEQWQQLQQELTKTHSQDIEKLKSQYRALARDSAQAKRKYQEASKDKDRDKAK

SEQ ID NO: 63454 - protein, 140 aa, Homo sapiens
FSDENRTYQASSPDEVALVQWTESVGLTLVSRDLTSMQLKTPSGQVLSFCILQLFPFTSESKRMGVIVRDESTAEITFYMKGADVAMSPIVQYNDWLEEEETGRDTAVGCIKKGARPTPLLQPFLPSLQPPVQRQIQSTG

SEQ ID NO: 63455 - protein, 129 aa, Homo sapiens
MQPPVVNMTDCSFFLRSFKQSKAAVRLKEDMKKIVAVPLNEQKDFTYQKLFGVSLQELERQGLTENGIPAVVWNIVEYLTQHGLTQEGLFRVNGNVKVVEQLRLKFESGVPVELGKDGDVCSAASLLKL

SEQ ID NO: 63456 - protein, 173 aa, Homo sapiens
MLQCYRCRQWFHEACTQCLNEPMMFGDRFYLFFCSVCNQGPEYIERLPLRWVDVVHLALYNLGVQSKKKYFDFEEILAFVNHHWELLQLGKLTSTPVTDRGPHLLNALNSYKSRFLCGKEIKKKKCIFRLRIRVPPNPPGKLLPDKGLLPNENSASSELRKRGKSKPGLLPHE

SEQ ID NO: 63457 - protein, 78 aa, Homo sapiens
  MOD_RES (1)..(1): Any amino acid
XIHTTSNCQHFVSQVDTQVPTDSRLQIQPGDEVVQINEQVVVGWPRKNMVRELLREPAGLSLVLKKIPIPETPPQGPI

SEQ ID NO: 63458 - protein, 381 aa, Homo sapiens
MVTEVCSMPAASAVKKPFDLRSKMGKWFHHRFPCCKGSGKSNMGTSGDHDDSFMKMLRSKMGKCCHHCFPCCRGSGTSNVGTSGDHDNSFMKTLRSKMGKWCCHCFPCCRGSGKSNVGAWGDYDDSAFMEPRYHVRREDLDKLHRAAWWGKVPRKDLIVMLRDTDMNKRDKQKRTALHLASANGNSEVVQLLLDRRCQLNVLDNKKRTALIKAVQCQEDECVLMLLEHGADQNIPDEYGNTTLHYAVHNEDKLMAKALLLYGADIESKNKCGLTPLLLGVHEQKQQVVKFLIKKKANLNALDRYGRTALILAVCCGSASIVNLLLEQNVDVSSQDLSGQTAREYAVSSHHHVICELLSDYKEKQMLKISSENSNPGKEAEE

SEQ ID NO: 63459 - protein, 76 aa, Homo sapiens
  MOD_RES (1)..(1): Any amino acid
XQKRMHFNSNGLEPKENEPPSPLVSGIIDYNMPLTSTYLKQMKLRVMNSQEQPSSLSPAPGFVNTVITVLICAHEE

SEQ ID NO: 63460 - protein, 61 aa, Homo sapiens
SVPVVRNAALFWWNLHRSGEGDSDTLHAGCPVLVGDKWVANKWIHEYGQEFRRPCSSSPED

SEQ ID NO: 63461 - protein, 199 aa, Homo sapiens
  MOD_RES (1)..(1): Any amino acid
XGEGSAGASGAPEKVPENDGYMEPYEAQKMMAEIRGSKETATQPLPLYDTPYEPEEDGATAEGEGAPWPRESRLPEDDERPPEEYDQPWEWKKERISKAFAAQFEGPEKSCLSPGREEKGRLPPRLSAGNPKSAKPLSMEPSSPLGEWTDPALPLENQVWYHGAISRTDAENLLRLCKEASYLVRNSETSKNDFSLSLK

SEQ ID NO: 63462 - protein, 102 aa, Homo sapiens
MTRSCSAVGCSTRDTVLSRERGLSFHQFPTDTIQRSKWIRAVNRVDPRSKKIWIPGPGAILCSKHFQESDFESYGIRRKLKKGAVPSVSLYKMRTQGIVELM

SEQ ID NO: 63463 - protein, 99 aa, Homo sapiens
RTFSSRLILEKHVQVRHGLQLGAQSPGRGTTLARGSSARAQFLPLFFRGQVGNAASLLTLAVRSLTARHRQPSPPGADLDLEAMALCATGAAAPQNRAS

SEQ ID NO: 63464 - protein, 645 aa, Homo sapiens [sequence omitted]

SEQ ID NO: 63465 - protein, 237 aa, Homo sapiens
MMSEGKPPDKKRPRRSLSISKNKKKASNSIISCFNNAPPAKLACPVCSKMVPRYDLNRHLDEMCANNDFVQVDPGQVGLINSNVSMVDLTSVTLEDVTPKKSPPPKTNLTPGQSDSAKREVKQKISPYFKSNDVVCKNQDELRNRSVKVICLGSLASKLSRKYVKAKKSIDKDEEFAGSSPQSSKSTVVKSLIDNSSEIEDEDQILENSSQKENVFKCDSLKEECIPEHMLLVRSYM

SEQ ID NO: 63466 - protein, 1038 aa, Homo sapiens
MGGSQSLQPAPASDLNLEASEAMSSDSEEAFETPESTTPVKAPPAPPPPPPEVIPEPEVSTQPPPEEPGCGSETVPVPDGPRSDSVEGSPFRPPSHSFSAVFDEDKPIASSGTYNLDFDNIELVDTFQTLEPRASDAKNQEGKVNTRRKSTDSVPISKSTLSRSLSLQASDFDGASSSGNPEAVALAPDAYSTGSSSASSTLKRTKKPRPPSLKKKQTTKKPTETPPVKETQQEPDEESLVPSGENLASETKTESAKTEGPSPALLEETPLEPAVGPKAACPLDSESAEGVVPPASGGGRVQNSPPVGRKTLPLTTAPEAGEVTPSDSGGQEDSPAKGLSVRLEFDYSEDKSSWDNQQENPPPTKKIGKKPVAKMPLRRPKMKKTPEKLDNTPASPPRSPAEPNDIPIAKGTYTFDIDKWDDPNFNPFSSTSKMQESPKLPQQSYNFDPDTCDESVDPFKTSSKTPSSPSKSPASFEIPASAMEANGVDGDGLNKPAKKKKTPLKTMVEDVMSVCSLFDTFRVKKSPKRSPLSDPPSQDPTPAATPETPPVISAVVHATDEEKLAVTNQKWTCMTVDLEADKQDYPQPSDLSTFVNETKFSSPTEELDYRNSYEIEYMEKIGSSLPQDDDAPKKQALYLMFDTSQESPVKSSPVRMSESPTPCSGSSFEETEALVNTAAKNQHPVPRGLAPNQESHLQVPEKSSQKELEAMGLGTPSEAIEITAPEGSFASADALLSRLAHPVSLCGALDYLEPDLAEKNPPLFAQKLQEELEFAIMRIEALKLARQIALASRSHQDAKREAAHPTDVSISKTALYSRIGTAEVEKPAGLLFQQPDLDSALQIARAEIITKEREVSEWKDKYEESRREVMEMRKIVAEYEKTIAQMIEDEQREKSVSHQTVQQLVLEKEQALADLNSVEKSLADLFRRYEKMKEVLEGFRKNEEVLKRCAQEYLSRVKKEEQRYQALKVHAEEKLDRANAEIAQVRGKAQQEQAAHQASLRKEQLRVDALERTLEQKNKEIEELTKICDELIAKMGKS

SEQ ID NO: 63467 - protein, 188 aa, Homo sapiens
MAKTYDYLFKLLLIGDSGVGKTCLLFRFSEDAFNTTFISTIGIDFKIRTIELDGKKIKLQIWDTAGQERFRTITTAYYRGAMGIMLVYDITNEKSFDNIKNWIRNIEEHASSDVERMILGNKCDMNDKRQVSKERGEKLAIDYGIKFLETSAKSSANVEEAFFTLARDIMTKLNRKMVCITYNFYFHY

SEQ ID NO: 63468 - protein, 85 aa, Homo sapiens
MSVDMNSQGSDSNEEDYDPNCEEEEEEEEDDPGDIEDYYVGVASDVEQQGADAFDPEEYQFTCLTYKESEGALNEHMTSLASVLK

SEQ ID NO: 63469 - protein, 45 aa, Homo sapiens
ALSQSHPSGIQAHTQLQLPEWLSRPAASLLTEVRCSPARGSSCLA

SEQ ID NO: 63470 - protein, 623 aa, Homo sapiens
MIVASPTENGQVLRVIPPTQTGMAQVIIPQGQLVDVNSPRDVPEEKPSNRNLPTVRVDTLADNTSNYILHPQTSFPLPKKSVTGMLEEPLLGPLQPLSSNTPIWACRLRSCEKIGDSYRGYCVSETELESVLTFHKQQTQSVWGTRQSPSPAKPATRLMWKSQYVPYDGIPFVNAGSRAVVMECQYGPRRKGFQLKKVSEQESRSCQLYKATCPARIYIKKVQKFPEYRVPTDPKIDKKIIRMEQEKAFNMLKKNLVDAGGVLRWYVQLPTQQAHQYHELETPCLTLSPSPFPVSSLEEEETAVRDENCALPSRLHPQVAHKIQELVSQGIEQVYAVRKQLRKFVERELFKPDEVPERHNLSFFPTVNDIKNHIHEVQKSLRNGDTVYNSEIIPATLQWTTDSGNILKETMTVTFAEGNSPGESITTKVETNQTRGSLSPEPTHLLSSLSSFQPKIFTQLQGLQLQPRYTSPDESPAVVSVNNQPSSSPSGLLDTIGSAVMNNNSLLLGQSHSLQRDTCLTQNNSTASTMGNLPEPDQNLVAMDELVEVGDVEDTGNLEGTVHRILLGDVQTIPIQIIDNHSALIEENPESTISVSQVKQEPKEPALSMEAKKTVDYKKLSAT

SEQ ID NO: 63471 - protein, 460 aa, Homo sapiens
MAKPAQGAKYRGSIHDFPGFDPNQDAEALYTAMKGFGSDKEAILDIITSRSNRQRQEVCQSYKSLYGKDLIADLNELDMLDIREIFRTKYEKSLYSMIKNDTSGEYKKTLLKLSGGDDDAAGQFFPEAAQVAYQMWELSAVARVELKGTVRPANDFNPDADAKALRKAMKGLGTDEDTIIDIITHRSNVQRQQIRQTFKSHFGRDLMTDLKSEISGDLARLILGLMMPPAHYDAKQLKKAMEGAGTDEKALIEILATRTNAEIRAINEAYKEDYHKSLEDALSSDTSGHFRRILISLATGHREEGGENLDQAREDAQEIADTPSGDKTSLETRFMTILCTRSYPHLRRVFQEFIKMTNYDVEHTIKKEMSGDVRDAFVAIVQSVKNKPLFFADKLYKSMKGAGTDEKTLTRIMVSRSEIDLLNIRREFIEKYDKSLHQAIEGDTSGDFLKALLALCGGED

SEQ ID NO: 63472 - protein, 73 aa, Homo sapiens
MILNSLSLCYHNKLILAPMVRVGTLPMRLLALDYGADIVYCEELIDLKMIQCKRVVNEVLSTVDFVAPDDRVV

SEQ ID NO: 63473 - protein, 185 aa, Homo sapiens
  MOD_RES (1)..(1): Any amino acid
XSKDGQNWTSLYTHVDDCSLNEPGSTATWPLDPPKDEKQGWRHVRIKQMGKNASGQTHYLSLSGFELYGTVNGVCEDQLGKAAKEAEANLRRQRRLVRSQVLKYMVPGARVIRGLDWKWRDQDGSPQGEGTVTGELHNASPLMGAQSFPNLTTPGTTSTVTMSTSSVTSSSNVATATTVLSVGQS

SEQ ID NO: 63474 - protein, 37 aa, Homo sapiens
MKKKLVVLGLLAVVLVLVIVGLCLWLPSASKEPDNHV

SEQ ID NO: 63475 - protein, 47 aa, Homo sapiens
MVLELYVSDREGSDATGDGTKEKPFKTGLKYCTMFKNCLFSPPYPRL

SEQ ID NO: 63476 - protein, 280 aa, Homo sapiens
MSKRKAPQETLNGGITDMLTELANFEKNVSQAIHKYNAYRKAASVIAKYPHKIKSGAEAKKLPGVGTKIAEKIDEFLATGKLRKLEKIRQDDTSSSINFLTRVSGIGPSAARKFVDEGIKTLEGSQLDSCPVKGHLNGTESLLDLIWDVMTILKLKNADLRKNEDKLNHHQRIGLKYFGDFEKRIPREEMLQMQDIVLNEVKKVDSEYIATVCGSFRRGAESSGDMDVLLTHPSFTSESTKQPKLLHQVVEQLQKVHFITDTLSKGETKFMGVCQLPSKN

SEQ ID NO: 63477 - protein, 41 aa, Homo sapiens
MSFRDLRNMSPRLTSRLTWILNRTEFSSLRQLPSSWPPRHI

SEQ ID NO: 63478 - protein, 336 aa, Homo sapiens
RKKCCKGYKFVLGQCIPEDYDVCAEAPCEQQCTDNFGRVLCTCYPGYRYDRERHRKREKPYCLDIDECASSNGTLCAHICINTLGSYRCECREGYIREDDGKTCTRGDKYPNDTGHEKSENMVKAGTCCATCKEFYQMKQTVLQLKQKIALLPNNAADLGKYITGDKVLASNTYLPGPPGLPGGQGPPGSPGPKGSPGFPGMPGPPGQPGPRGSMGPMGPSPDLSHIKQGRRGPVGPPGAPGRDGSKGERGAPGPRGSPGPPGSFDFLLLMLADIRNDITELQEKVFGHRTHSSAEEFPLPQEFPSYPEAMDLGSGDDHPRRTETRDLRAPRDFYP

SEQ ID NO: 63479 - protein, 82 aa, Homo sapiens
MSRMRPVCQPWPSPHAPTTVKREGSTVSNSIQPPPPEYQLGSRTWLEAETPGQKRQCSAFMEFTEESRRASHFSSILKIEPV

SEQ ID NO: 63480 - protein, 28 aa, Homo sapiens
MVLVHVGYLVLPVFGSVRNRGISVWMLA

SEQ ID NO: 63481 - protein, 126 aa, Homo sapiens
MLSLFPSPGPGSSRCKDKLNALAISVMNQWPGVKLRVTEGWDEDGHHSEESLHYEGRAVDITTSDRDRSKYGMLARLAVEAGFDWVYYESKAHIHCSVKAGGQQVPGWCLQSRRKCDGFCSFDSSV

SEQ ID NO: 63482 - protein, 131 aa, Homo sapiens
MRCSQCRVAKYCSAKCQKKAWPDHKRECKCLKSCKPRYPPDSVRLLGRVVFKLMDGAPSESEKLYSFYDLESNINKLTEDKKEGLRQLVMTFQHFMREEIQDASQLPPAFDLFEAFAKVICNSFTICNAEM

SEQ ID NO: 63483 - protein, 194 aa, Homo sapiens
MKTERVTGGGSPEKNFDRNVPKKPAVPLKTDHPVMGIQSGKNFINTNAADIIMGVAKKPKPIYVDKRTGDKHDLEPSGLVPKYINKKDYGVTPEYICKRNEEIKKAQEDYDRYIQENLKKAAMKRLSDEEREAVLQGLKKNWEEVHKEFQSLSVFIDSIPKKIRKQRLEEEMKQLEHDIGIIEKHKIIYIANNA

SEQ ID NO: 63484 - protein, 406 aa, Homo sapiens
MKQRKGQGSGGSRGRKKRGLSDISPSTSLPPLVEGQLRCFLKLTVNRVIWKIAKPPTCVLVRVRWWGETSDGTLFCPRDALQTEPKAVRTTTRYAIRCGPKQFTSYLTDMAVLVLEVITKLDGLPIGRVQINGLAQLSPTHQINGFFTIVSSTSKKLGELQVSLALEPLSETYDSYHPLPTTDMTENVLLSKQGFRENTEPSSTQFQVPSRPRDIHTIKIDGKELAANSSRSTTPRGKDHVCFAENPDTIKDSSFGLQHSLNSGQSLESVTLKGRAPRKQMSLLNSSEFQPQIRTVAKSHSDSCILSSNNLPTKDLLSALLEQGNKLRNAMVISAMKSSPETSMLLDQVHPPINEDSLRASTQIRAFSRNRFKDHIEDHLLPSTENTFWRHDTKADTRAIQLLLGR

SEQ ID NO: 63485 - protein, 40 aa, Homo sapiens
MDRYQGNQDRVLRQVTVISRETLTDEMGSKYSAFGKMFNR

SEQ ID NO: 63486 - protein, 120 aa, Homo sapiens
  MOD_RES (1)..(1): Any amino acid
XLAPEDHGSSYEGSVSFRDVAIDFSREEWRHLDPSQRNLYRDVMLETYSHLLSVGYQVPEAEVVMLEQGKEPWALQGERPRQSCPVTHRLPLPSTMTKSFLDLTRSQADTSAMLVQPPEA

SEQ ID NO: 63487 - protein, 180 aa, Homo sapiens [sequence omitted]

SEQ ID NO: 63488 - protein, 365 aa, Homo sapiens
MFPDQPEKPLNLAHIVPPRPVTSMNDTLFSHSVPSSGSPFITRSMLESSNRLDEEHRLIARYAARLAAESSSSQPPQQRSAPDISFTIDANKQQRQLIAELENKNREILQEIQRLRLEHEQASQPTPEKAQQNPTLLAELRLLRQRKDELEQRMSALQESRRELMVQLEGLMKLLKTQGAGSPRSSPSHTISRPIPMPIRSASACSTPTHTPQDSLTGVGGDVQEAFAQSSRRNLRNDLLVAADSITNTMSSLVKELNSEVGSETESNVDSEFARTQFEDLVPSPTSEKAFLAQIHARKPGYIHSGATTSTMRGDMVTEDADPYVQPEDENYENDSVRQLENELQMEEYLKQKLQDEAYQVSLQG

SEQ ID NO: 63489 - protein, 243 aa, Homo sapiens
MESTLGAGIVIAEALQNQLAWLENVWLWITFLGDPKILFLFYFPAAYYASRRVGIAVLWISLITEWLNLIFKWFLFGDRPFWWVHESGYYSQAPAQVATRARSRWVRVMPSLAYCTFLLAVGLSRIFILAHFPHQVLAGLITGAVLGWLMTPRVPMERELSFYGLTALALMLGTSLIYWTLFTLGLDLSWSISLAFKWCERPEWIHVDSRPFASLSRDSGAALGLGIALHSPCYAQVRRAQLG

SEQ ID NO: 63490 - protein, 233 aa, Homo sapiens
MELEVRRVRQAFLSGRSRPLRFRLQQLEALRRMVQEREKDILTAIAADLCKSEFNVYSQEVITVLGEIDFMLENLPEWVTAKPVKKNVLTMLDEAYIQPQPLGVVLIIGAWNYPFVLTIQPLIGAIAAGNAVIIKPSELSENTAKILAKLLPQYLDQDLYIVINGGVEETTELLKQRFDHIFYTGNTAVGKIVMEAAAKHLTPVTLELGGKSPCYIDKDCDLDIVCRNFMEKI

SEQ ID NO: 63491 - protein, 30 aa, Homo sapiens
ISYRAQSIHPAKDGWIQNLQALMERFFRRS

SEQ ID NO: 63492 - protein, 198 aa, Homo sapiens
  MOD_RES (1)..(1): Any amino acid
XCGHCLIINNVNFCRESGLRTRTGSNIDCEKLRRRFSSLHFMVEVKGDLTAKKMVLALLELAQQDHGALDCCVVVILSHGCQASHLQFPGAVYGTDGCPVSVEKIVNIFNGTSCPSLGGKPKLFFIQACGGGFVSWRDPKSGSWYVETLDDIFEQWAHSEDLQSLLLRVANAVSVKGIYKQMPGCFNFLRKKLFFKTS

SEQ ID NO: 63493 - protein, 1080 aa, Homo sapiens
  MOD_RES (1)..(1): Any amino acid
XRYTKPLTFADCISDELPLGWEEAYDPQVGDYFIDHNTKTTQIEDPRVQWRREQEHMLKDYLVVAQEALSAQKEIYQVKQQRLELAQQEYQQLHAVWEHKLGSQVSLVSGSSSSSKYDPEILKAEIATAKSRVNKLKREMVHLQHELQFKERGFQTLKKIDKKMSDAQGSYKLDEAQAVLRETKAIKKAITCGEKEKQDLIKSLAMLKDGFRTDRGSHSDLWSSSSSLESSSFPLPKQYLDVSSQTDISGSFGINSNNQLAEKVRLRLRYEEAKRRIANLKIQLAKLDSEAWPGVLDSERDRLILINEKEELLKEMRFISPRKWTQGEVEQLEMARKRLEKDLQAARDTQSKALTERLKLNSKRNQLVRELEEATRQVATLHSQLKSLSSSMQSLSSGSSPGSLTSSRGSLVASSLDSSTSASFTDLYYDPFEQLDSELQSKVEFLLLEGATGFRPSGCITTIHEDEVAKTQKAEGGGRLQALRSLSGTPKSMTSLSPRSSLSSPSPPCSPLMADPLLAGDAFLNSLEFEDPELSATLCELSLGNSAQERYRLEEPGTEGKQLGQAVNTAQGCGLKVACVSAAVSDESVAGDSGVYEASVQRLGASEAAAFDSDESEAVGATRIQIALKYDEKNKQFAILIIQLSNLSALLQQQDQKVNIRVAVLPCSESTTCLFRTRPLDASDTLVFNEVFWVSMSYPALHQKTLRVDVCTTDRSHLEECLGGAQISLAEVCRSGERSTRWYNLLSYKYLKKQSRELKPVGVMAPASGPASTDAVSALLEQTAVELEKRQEGRSSTQTLEDSWRYEETSENEAVAEEEEEEVEEEEGEEDVFTEKASPDMDGYPALKVDKETNTETPAPSPTVVRPKDRRVGTPSQGPFLRGSTIIRSKTFSPGPQSQYVCRLNRSDSDSSTLSKKPPFVRNSLERRSVRMKRPSPPPQPSSVKSLRSERLIRTSLDLELDLQATRTWHSQLTQEISVLKELKEQLEQAKSHGEKELPQWLREDERFRLLLRMLEKRMDRAEHKGELQTDKMMRAAAKDVHRLRGQSCKEPPEVQSFREKMAFFTRPRMNIPALSADDV

SEQ ID NO: 63494 - protein, 572 aa, Homo sapiens
MVVSADPLSSERAEMNILEINQELRSQLAESNQQFRDLKEKFLITQATAYSLANQLKKYKCEEYKDIIDSVLRDELQSMEKLAEKLRQAEELRQYKALVHSQAKELTQLREKLREGRDASRWLNKHLKTLLTPDDPDKSQGQDLREQLAEGHRLAEHLVHKLSPENDEDEDEDEDDKDEEVEKVQESPAPREVQKTEEKEVPQDSLEECAVTCSNSHNPSNSNQPHRSTKITFKEHEVDSALVVESEHPHDEEEEALNIPPENQNDHEEEEGKAPVPPRNRQSLEPGELTNLRDFLISPVVSHVANPGHHDKSNSYRHREVSFLALDEQKVCSAQDVARDYSNPKWDETSLGFLEKQSDLEEVKGQETVAPRLSRGPLRVDKHEIPQESLDGCCLTPSILPDLTPSYHPYWSTLYSFEDKQVSLALVDKIKKDQEEIEDQSPPCPRLSQELPEVKEQEVPEDSVNEVYLTPSVHHDVSDCHQPYSSTLSSLEDQLACSALDVASPTEAACPQGTWSGDLSHHRSEVQISQAQLEPSTLVPSCLRLQLDQGFHCGNGLAQRGLSSTTCSFSAN

SEQ ID NO: 63495 - protein, 49 aa, Homo sapiens
MAKNKLVGTPNPSTPLPNTVPQFIAREPYELTVPALYPSSPEVWAPYPL

SEQ ID NO: 63496 - protein, 599 aa, Homo sapiens
MLGICRGRRKFLAASLSLLCIPAITWIYLFSGSFEDGKPVSLSPLESQAHSPRYTASSQRERESLEVRMREVEEENRALRRQLSLAQGRAPSHRRGNHSKTYSMEEGTGDSENLRAGIVAGNSSECGQQPVVEKCETIHVAIVCAGYNASRDVVTLVKSVLFHRRNPLHFHLIADSIAEQILATLFQTWMVPAVRVDFYNADELKSEVSWIPNKHYSGIYGLMKLVLTKTLPANLERVIVLDTDITFATDIAELWAVFHKFKGQQVLGLVENQSDWYLGNLWKNHRPWPALGRGYNTGVILLLLDKLRKMKWEQMWRLTAERELMGMLSTSLADQDIFNAVIKQNPFLVYQLPCFWNVQLSDHTRSEQCYRDVSDLKVIHWNSPKKLRVKNKHVEFFRNLYLTFLEYDGNLLRRELFGCPSEADVNSENLQKQLSELDEDDLCYEFRRERFTVHRTHLYFLHYEYEPAADSTDVTLVAQLSMDRLQMLEAICKHWEGPISLALYLSDAEAQQFLRYAQGSEVLMSRHNVGYHIVYKEGQFYPVNLLRNVAMKHISTPYMFLSDIDFLPMYGLYEYLSFDFSQTLSPIISCKTTVPNTCL

SEQ ID NO: 63497 - protein, 288 aa, Homo sapiens
LQLHRPVLRKIEEVRAILRTLLEARRPHVCPGDPVCSYVDALIQQGQGDDPEGLFAEANAVACTLDMVMAGTETTSATLQWAALLMGRHPDVQGRVQEELDRVLGPGRTPRLEDQQALPYTSAVLHEVQRFITLLPHVPRCTAADTQLGGFLLPKGTPVIPLLTSVLLDETQWQTPGQFNPGHFLDANGHFVKREAFLPFSAGSEGGCGGCSCAPLGRSPPLPSRSRPGAAHSVPGHPPQAAASVLGSAWPGPSSSCCLPASCRGTACCPRLASVRPPWTPRPPGLLP

SEQ ID NO: 63498 - protein, 175 aa, Homo sapiens
MAAPRVFPLSCAVQQYAWGKMGSNSEVARLLASSDPLAQIAEDKPYAELWMGTHPRGDAKILDNRISQKTLSQWIAENQDSLGSKVKDTFNGNLPFLFKVLSVETPLSIQAPQHYPDANHKPEMAIALTPFQGLCGFRPVEEIVTFLKKVPEFQFLIGDEAATHLKQTMSHDSQA

SEQ ID NO: 63499 - protein, 101 aa, Homo sapiens
MSILKIHAREIFDSRGNPTVEVDLFTSKGLFRAAVPSGASTGIYEALELRDNDKTRYMGKGVSRPIKYINEFLAPALCTQVSQRLLSTSIKLLRLPWLARN

SEQ ID NO: 63500 - protein, 214 aa, Homo sapiens
MTFITPVTEIITYCSLQLQWPSKLFFPRMLLLNYLGKIGSKTPLMAAATFSVGWNTFACSESLEKPLNWLLFNYYLTTCLQSSVNKHRHMFVKQVDMDHVMKAKSIREFDKRFTSVMFGYQTIDDYYTDASPSPRLKSVGIPVLCLNSVDDVFSPSHAIPIETAKQNPNVALVLTSYGGHIGFLEGIWPRQSTYMDRVFKQFVQAMVEHGHELS

SEQ ID NO: 63501 - protein, 34 aa, Homo sapiens
MKENVASATVFTLLLFLNTCLLNGQLPPGKPEIF

SEQ ID NO: 63502 - protein, 334 aa, Homo sapiens
MVYRYCCKLNKKLKSYSLSRKKIVHYTCFDQRKRANAAFLIGAYAVIYLKKTPEEAYRALLSGSNPPYLPFRDASFGNCTYNLTILDCLQGIRKGLQHGFFDFETFDVDEYEHYERVENGDFNWIVPGKFLAFSGPHPKSKIENGYPLHAPEAYFPYFKKHNVTAVVRLNKKIYEAKRFTDAGFEHYDLFFIDGSTPSDNIVRRFLNICENTEGAIAVHCKAGLGRTGTLIACYVMKHYRFTHAEIIAWIRICRPGSIIGPQQHFLEENSLNIFLVNLPLVPQHLKNSLNTCCLPAPCILVTASHLSSFDSKKTSIVVGPRRHFPIQTEKSTIQ

SEQ ID NO: 63503 - protein, 373 aa, Homo sapiens
MGFPVLCRGWRRTWPGCASWLGAPPPQKPLLSPLLLNHRSSKSSRPKLQAACSSIQEVRWCTRLEMPDNLYTFVLKVKDRTDIIFEVGDEQQLNSWMAELSECTGRGLESTEAEMHIPSALEPSTSSSPRGSTDSLNQGASPGGLLDPACQKTDHFLSCYPWFHGPISRVKAAQLVQLQGPDAHGVFLVRQSETRRGEYVLTFNFQGIAKHLRLSLTERGQCRVQHLHFPSVVDMLHHFQRSPIPLECGAACDVRLSSYVVVVSQPPGSCNTVLFPFSLPHWDSESLPHWGSELGLPHLSSSGCPRGLSPEGLPGRSSPPEQIFHLVPSPEELANSLQHLEHEPVNRARDSDYEMDSSSRSHLRAIDNQYTPL

SEQ ID NO: 63504 - protein, 68 aa, Homo sapiens
MTRTRARYDQASLQRPEIKLESLKEDIKEFFKISGWEKKLQNAVYSELSVFPLPSHPAAPPEHLKEPL

SEQ ID NO: 63505 - protein, 44 aa, Homo sapiens
MDSVAFEDVAINFTCEEWALLGPSQKSLYRDVMQETIRNLDCID

SEQ ID NO: 63506 - protein, 141 aa, Homo sapiens
MGSLSGLRLAAGSCFRLCERDVSSSLRLTRSSDLKRINGFCTKPQESPGAPSRTYNRVPLHKPTDWQKKILIWSGRFKKEDEIPETVSLEMLDAAKNKMRVKISYLMIALTVVGCIFMVIEGKKVRRGFFSIQYVCSPPRT

SEQ ID NO: 63507 - protein, 1545 aa, Homo sapiens
MSLVLNDLLICCRQLEHDRATERKKEVEKFKRLIRDPETIKHLDRHSDSKQGKYLNWDAVFRFLQKYIQKETECLRIAKPNVSASTQASRQKKMQEISSLVKYFIKCANRRAPRLKCQELLNYIMDTVKDSSNGAIYGADCSNILLKDILSVRKYWCEISQQQWLELFSVYFRLYLKPSQDVHRVLVARIIHAVTKGCCSQTDGLNSKFLDFFSKAIQCARQEKSSSGLNHILAALTIFLKTLAVNFRIRVCELGDEILPTLLYIWTQHRLNDSLKEVIIELFQLQIYIHHPKGAKTQEKGAYESTKWRSILYNLYDLLVNEISHIGSRGKYSSGFRNIAVKENLIELMADICHQVFNEDTRSLEISQSYTTTQRESSDYSVPCKRKKIELGWEVIKDHLQKSQNDFDLVPWLQIATQLISKYPASLPNCELSPLLMILSQLLPQQRHGERTPYVLRCLTEVALCQDKRSNLESSQKSDLLKLWNKIWCITFRGISSEQIQAENFGLLGAIIQGSLVEVDREFWKLFTGSACRPSCPAVCCLTLALTTSIVPGTVKMGIEQNMCEVNRSFSLKESIMKWLLFYQLEGDLENSTEVPPILHSNFPHLVLEKILVSLTMKNCKAAMNFFQSVPECEHHQKDKEELSFSEVEELFLQTTFDKMDFLTIVRECGIEKHQSSIGFSVHQNLKESLDRCLLGLSEQLLNNYSSEITNSETLVRCSRLLVGVLGCYCYMGVIAEEEAYKSELFQKAKSLMQCAGESITLFKNKTNEEFRIGSLRNMMQLCTRCLSNCTKKSPNKIASGFFLRLLTSKLMNDIADICKSLASFIKKPFDRGEVESMEDDTNGNLMEVEDQSSMNLFNDYPDSSVSDANEPGESQSTIGAINPLAEEYLSKQDLLFLDMLKFLCLCVTTAQTNTVSFRAADIRRKLLMLIDSSTLEPTKSLHLHMYLMLLKELPGEEYPLPMEDVLELLKPLSNVCSLYRRDQDVCKTILNHVLHVVKNLGQSNMDSENTRDAQGQFLTVIGAFWHLTKERKYIFSVRMALVNCLKTLLEADPYSKWAILNVMGKDFPVNEVFTQFLADNHHQVRMLAAESINRLFQDTKGDSSRLLKALPLKLQQTAFENAYLKAQEGMREMSHSAENPETLDEIYNRKSVLLTLIAVVLSCSPICEKQALFALCKSVKENGLEPHLVKKVLEKVSETFGYRRLEDFMASHLDYLVLEWLNLQDTEYNLSSFPFILLNYTNIEDFYRSCYKVLIPHLVIRSHFDEVKSIANQIQEDWKSLLTDCFPKILVNILPYFAYEGTRDSGMAQQRETATKVYDMLKSENLLGKQIDHLFISNLPEIVVELLMTLHEPANSSASQSTDLCDFSGDLDPAPNPPHFPSHVIKATFAYISNCHKTKLKSILEILSKSPDSYQKILLAICEQAAETNNVYKKHRILKIYHLFVSLLLKDIKSGLGGAWAFVLRDVIYTLIHYINQRPSCIMDVSLRSFSLCCDLLSQVCQTAVTYCKDALENHLHVIVGTLIPLVYEQVEVQKQIIRKMGLW

SEQ ID NO: 63508 - protein, 53 aa, Homo sapiens
MAVAAVKWVMSKRTILKHLFPVQNSGVHVQMELYIVFVINLRILLYQMTIIAT

SEQ ID NO: 63509 - protein, 94 aa, Homo sapiens
MGEVEISALAYVKMCLHAARYPHAAVNGLFLAPAPRSGECLCLTDCVPLFHSHLALSVMLEVALNQVDVWGAQAGLVVAGYYHANAAVNDQSNI

SEQ ID NO: 63510 - protein, 91 aa, Homo sapiens
MGPGEGNCWFCWCLCPWLLSGSWVHLISGKSPSLTRPVMGGGGGVEMFLQFCLPWQNLDPGKGKQGRSPSEKGLCSPLTRSLAQATSAPRA

SEQ ID NO: 63511 - protein, 278 aa, Homo sapiens
MSADGGGIQDTQDKETPPEVPDRGHPHQEMPSKLGEAVPSGDTQESLHIKMEPEEPHSEGASQEDGAQGAWGWAPLSHGSKEKALFLPGGALPSPRIPVLSREGRTRDRQMAAALLTAWSQMPVTFEDVALYLSREEWGRLDHTQQNFYRDVLQKKNGLSLGFPFSRPFWAPQAHGKGEASGSSRQAGDEKEWRGACTGAVEVGQRVQTSSVAALGNVKPFRTRAGRVQWGVPQCAQEAACGRSSGPAKDSGQPAEPDRTPDAAPPDPSPTEPQEYRV

SEQ ID NO: 63512 - protein, 87 aa, Homo sapiens
QQVDGFEKPKLLLEQYPTRPHIAACMLYTIHNTYDDIENKVVADLGCGCGVLSIGTAMLGAGDRYGFSKDCFGNGKNSSIFLTQILN

SEQ ID NO: 63513 - protein, 59 aa, Homo sapiens
  MOD_RES (1)..(1): Any amino acid
XMREYGVERDLAVYNQLLNIFPKEVFRPRNIIQRIFVHYPRQQECGIAVLEQMENHAQV

SEQ ID NO: 63514 - protein, 386 aa, Homo sapiens
MLTFLQQLRVDWPAASERASSHTLRSHALEELTSANDGRTLSPGILGRLCLKELVEEQGRTAGYDPNLDNCLVTEDLLSVLAELQEALWHWPEDSHPGLAGASDTGTGGCLVVHVVSCEEEFQQQKLDLLWQKLVDKAPLRQKHLICGPVKVAGAPGTLMTAPEYYEFRHTQVCKASALKHGGDLAQDPAWTEIFGVLSVATIKFEMLSTAPQSQLFLALADSSISTKGTKSGTFVMYNCARLATLFESYKCSMEQGLYPTFPPVSSLDFSLLHDEGEWLLLFNSILPFPDLLSRTAVLDCTAPGLHIAVRTEMVRHRQPGHSTLYSLFWPGAQEQRDGPVTQSLSLDMQVPGTAQHGFQLLLQPGASTTPLWSDVRPPAASESCA

SEQ ID NO: 63515 - protein, 115 aa, Homo sapiens
DEKYNHIDESEMKKVEKSVNEVMEWMNNVMNAQAKKSLDQDPVVRAQEIKTKIKELNNTCEPVVTQPKPKIESPKLERTPNGPNIDKKEEDLEDKNNFGAEPPHQNDSCGIVNSY

SEQ ID NO: 63516 - protein, 42 aa, Homo sapiens
MEHVTEGSWESLPVPLHPQVLGALRELGFPYMTPVQGFGSHL

SEQ ID NO: 63517 - protein, 190 aa, Homo sapiens [sequence omitted]

SEQ ID NO: 63518 - protein, 73 aa, Homo sapiens
MGPSVTACIRPRREVDWFSLASVIFLLLFAPFIVYYFIMACDQYSCALTGPVVDIVTGHARLSDIWAKTPPIT

SEQ ID NO: 63519 - protein, 498 aa, Homo sapiens
MAFMEKPPAGKVLLDDTVPLTAAIEASQSLQSHTIVRRYSDFDLLNNSLQIAGLSLPLPPKKLIGNMDREFIAERQKGLQNYLNVITTNHILSNCELVKKFLDPNNYSANYTEIALQQVSMFFRSEPKWEVVEPLKDIGWRIRKKYFLMKIKNQPKERLVLSWADLGPDKYLSDKDFQCLIKLLPSCLHPYIYRVTFATANESSALLIRMFNEKGTLKDLIYKAKPKDPFLKKYCNPKKIQGLELQQIKTYGRQILEVLKFLHDKGFPYGHLHASNVMLDGDTCRLLDLENSLLGLPSFYRSYFSQFRKINTLESVDVHCFGHLLYEMTYGRPPDSVPVDSFPPAPSMAVVAVLESTLSCEACKNGMPTISRLLQMPLFSDVLLTTSEKPQFKIPTKLKEALRIAKECIEKRLIEEQKQIHQHRRLTRAQSHHGSEEERKKRKILARKKSKRSALENSEEHSAKYSNSNNSAGSGASSPLTSPSSPTPPSTSVEHAPF

SEQ ID NO: 63520 - protein, 10 aa, Homo sapiens
MTLAESYAQY

SEQ ID NO: 63521 - protein, 456 aa, Homo sapiens
  MOD_RES (1)..(1): Any amino acid
XAKAAKASNTSTPTKGNTETSASASQTNHVKDVKKIKIEHAPSPSSGGTLKNDKAKTKPPLQVTKVENNLIVDKATKKAVIVGKESKSAATKEESVSLKEKTKPLTPSIGAKEKEQHVALVTSTLPPLPLPPMLPEDKEADSLRGNISVKAVKKEVEKKLRCLLADLPLPPELPGGDDLSKSPEEKKTATQLHSKRRPKICGPRYGETKEKDIDWGKRCVDKFDIIGIIGEGTYGQVYKARDKDTGEMVALKKVRLDNEKEGFPITAIREIKILRQLTHQSIINMKEIVTDKEDALDFKKDKGAFYLVFEYMDHDLMGLLESGLVHFNENHIKSFMRQLMEGLDYCHKKNFLHRDIKCSNILLNNRGQIKLADFGLARLYSSEESRPYTNKVITLWYRPPELLLGEERYTPAIDVWSCGCILGELFTKKPIFQANQELAQLELIRHEENEVSDKQI

SEQ ID NO: 63522 - protein, 38 aa, Homo sapiens
MSTAIREVGVWRQTRTLLLKNYLIKCRTKKSSVQEILF

SEQ ID NO: 63523 - protein, 409 aa, Homo sapiens
MQLPRWWELGDPCAWTGQGRGTRRMSPATTGTFLLTVYSIFSKVHSDRNVYPSAGVLFVHVLEREYFKGEFPPYPKPGEISNDPITFNTNLMGYPDRPGWLRYIQRTPYSDGVLYGSPTAENVGKPTIIEITAYNRRTFETARHNLIINIMSAEDFPLPYQAEFFIKNMNVEEMLASEVLGDFLGAVKNVWQPERLNAINITSALDRGGRVPLPINDLKEGVYVMVGADVPFSSCLREVENPQNQLRCSQEMEPVITCDKKFRTQFYIDWCKISLVDKTKQVSTYQEVIRGEGILPDGGEYKPPSDSLKSRDYYTDFLITLAVPSAVALVLFLILAYIMCCRREGVIQLVHHSAIQKSTKELRDMSKNREIAWPLSTLPVFHPVTGEIIPPLHTDNYDSTNMPLMQTQQ

SEQ ID NO: 63524 - protein, 323 aa, Homo sapiens
MDFRTACEEVQVLRNAGEEVTLTVSFLKRAPAFLKLPLNEDCACAPSDQSSGTSSPLCDSGLHLNYHPNNTDTLSCSSWPTSPGLRWEKRWCDLRLIPLLHSRFSQYVPGTDLSRQNAFQVIAVDGVCTGIIQCLSAEDCVDWLQAIATNISNLTKHNIKKINRNFPVNQQIVYMGWCEAREQDPLQDRVYSPTFLALRGSCLYKFLAPPVTTWDWTRAEKTFSVYEIMCKILKDSDLLDRRKQCFTVQSESGEDLYFSVELESDLAQWERAFQTATFLEVERIQCKTYACVLESHLMGLTIDFSTGFICFDAATKVMCSGQL

SEQ ID NO: 63525 - protein, 157 aa, Homo sapiens
MLDHEQVTPEDPGAQFLIRTGSVGRNRAEASLERAQNLNPMVDVKVDTEDIEKKPESFFTQFDAVCLTCCSRDVIVKVDQICHKNSIKFFTGDVFGYHGYTFANLGEHEFVEEKTKVAKVSQGVEDGPDTKRAKLDSSETTMVKKKVVFCPVKEALE

SEQ ID NO: 63526 - protein, 106 aa, Homo sapiens
LQQFKVTRAQLQQIQASLLGSMEQALRGQASPAPAVRMLPTYVGSTPHGTDFAGLRNLGSGQRALVLPAAWLSVTCLPSRARRLRGAGAGGHRGLTACFVGDSNWH

SEQ ID NO: 63527 - protein, 56 aa, Homo sapiens
MANLLKTVVTGCSCPLLSNLGSCKGLRVKKDFLRTFYTHQELWCKAPVKPGASPYG

SEQ ID NO: 63528 - protein, 850 aa, Homo sapiens
MKKWSSTDLGAAADPLQKDTCPDPLDGDPNSRPPPAKPQLSTAKSRTRLFGKGDSEEAFPVDCPHEEGELDSCPTITVSPVITIQRPGDGPTGARLLSQDSVAASTEKTLRLYDRRSIFEAVAQNNCQDLESLLLFLQKSKKHLTDNEFKDPETGKTCLLKAMLNLHDGQNTTIPLLLEIARQTDSLKELVNASYTDSYYKGQTALHIAIERRNMALVTLLVENGADVQAAAHGDFFKKTKGRPGFYFGELPLSLAACTNQLGIVKFLLQNSWQTADISARDSVGNTVLHALVEVADNTADNTKFVTSMYNEILMLGAKLHPTLKLEELTNKKGMTPLALAAGTGKIGVIENGPPLSFMVLAYILQREIQEPECRHLSRKFTEWAYGPVHSSLYDLSCIDTCEKNSVLEVIAYSSSETPNRHDMLLVEPLNRLLQDKWDRFVKRIFYFNFLVYCLYMIIFTMAAYYRPVDGLPPFKMEKTGDYFRVTGEILSVLGGVYFFFRGIQYFLQRRPSMKTLFVDSYSEMLFFLQSLFMLATVVLYFSHLKEYVASMVFSLALGWTNMLYYTRGFQQMGIYAVMIEKMILRDLCRFMFVYIVFLFGFSTAVVTLIEDGKNDSLPSESTSHRWRGPACRPPDSSYNSLYSTCLELFKFTIGMGDLEFTENYDFKAVFIILLLAYVILTYILLLNMLIALMGETVNKIAQESKNIWKLQRAITILDTEKSFLKCMRKAFRSGKLLQVGYTPDGKDDYRWCFRVDEVNWTTWNTNVGIINEDPGNCEGVKRTLSFSLRSSRVSGRHWKNFALVPLLREASARDRQSAQPEEVYLRQFSGSLKPEDAEVFKSPAASGEK

SEQ ID NO: 63529 - protein, 183 aa, Homo sapiens
MKKEHVLHCQFSAWYPFFRGVTIKSVILPLPQNVKDYLLDDGTLVVSGRDDPPTHSQPDSDDEAEEIQWSDDENTATLTDAYWIAMNSSLKCKTLSDIFLLFKSSDFITRDFTQPFIHCTDDSPDPCIEYELVLRKWCELIPGAEFRCFVKENKLIGISQRDYTQYYDHISKQKEEIRRCIQD

SEQ ID NO: 63530 - protein, 177 aa, Homo sapiens
MAPGQTPSLCSWLLPLPSTWATTGHVCFSDILQTPDGGQLLLDWAKQPDSSQDPDPTTQPIVLLLPGITGSSQETYVLHLVNQALRDGYQAVVFNNRGCRGEELRTHRAFCASNTEDLETVVNHIKHRYPQAPLLAVGISFGGILVLNHLAQARQAAGLVAALTLSACWDSFETTRS

SEQ ID NO: 63531 - protein, 362 aa, Homo sapiens
MKPILLQGHERSITQIKYNREGDLLFTVAKDPIVNVWYSVNGERLGTYMGHTGAVWCVDADWDTKHVLTGSADNSCRLWDCETGKQLALLKTNSAVRTCGFDFGGNIIMFSTDKQMGYQCFVSFFDLRDPSQIDNNEPYMKIPCNDSKITSAVWGPLGECIIAGHESGELNQYSAKSGEVLVNVKEHSRQINDIQLSRDMTMFVTASKDNTAKLFDSTTLEHQKTFRTERPVNSAALSPNYDHVVLGGGQEAMDVTTTSTRIGKFEARVSLCCPGWSAVAPSLLTATSWAQAILLPQLLSSWDYRFFHLAFEEEFGRVKGHFGPINSVAFHPDGKSYSSGGEDGYVRIHYFDPQYFEFEFEA

SEQ ID NO: 63532 - protein, 126 aa, Homo sapiens
METPSQRRATRSGAQASSTPLSPTRITRLQEKEDLQELNDRLAVYIDRVRSLETENAGLRLRITESEEVVSREVSGIKAAYEAELGDARKTLDSVAKERARLQLELSKVREEFKELKARFASDGKS

SEQ ID NO: 63533 - protein, 1202 aa, Homo sapiens
MSPALQDLSQPEGLKKTLRDEINAILQKRIMVLDGGMGTMIQREKLNEEHFRGQEFKDHARPLKGNNDILSITQPDVIYQIHKEYLLAGADIIETNTFSSTSIAQADYGLEHLAYRMNMCSAGVARKAAEEVTLQTGIKRFVAGALGPTNKTLSVSPSVERPDYRNITFDELVEAYQEQAKGLLDGGVDILLIETIFDTANAKAALFALQNLFEEKYAPRPIFISGTIVDKSGRTLSGQTGEGFVISVSHGEPLCIGLNCALGAAEMRPFIEIIGKCTTAYVLCYPNAGLPNTFGDYDETPSMMAKHLKDFAMDGLVNIVGGCCGSTPDHIREIAEAVKNCKPRVPPATAFEGHMLLSGLEPFRIGPYTNFVNIGERCNVAGSRKFAKLIMAGNYEEALCVAKVQVEMGAQVLDVNMDDGMLDGPSAMTRFCNLIASEPDIAKVPLCIDSSNFAVIEAGLKCCQGKCIVNSISLKEGEDDFLEKARKIKKYGAAMVVMAFDEEGQATETDTKIRVCTRAYHLLVKKLGFNPNDIIFDPNILTIGTGMEEHNLYAINFIHATKVIKETLPGARISGGLSNLSFSFRGMEAIREAMHGVFLYHAIKSGMDMGIVNAGNLPVYDDIHKELLQLCEDLIWNKDPEATEKLLRYAQTQGTGGKKVIQTDEWRNGPVEERLEYALVKGIEKHIIEDTEEARLNQKKYPRPLNIIEGPLMNGMKIVGDLFGAGKMFLPQVIKSARVMKKAVGHLIPFMEKEREETRVLNGTVEEEDPYQGTIVLATVKGDVHDIGKNIVGVVLGCNNFRTHTAVKIAPRYSAPVIHVLDASKSVVVCSQLLDENLKDEYFEEIMEEYEDIRQDHYESLKERRYLPLSQARKSGFQMDWLSEPHPVKPTFIGTQVFEDYDLQKLVDYIDWKPFFDVWQLRGKYPNRGFPKIFNDKTVGGEARKVYDDAHNMLNTLISQKKLRARGVVGFWPAQSIQDDIHLYAEAAVPQAAEPIATFYGLRQQAEKDSASTEPYYCLSDFIAPLHSGIRDYLGLFAVACFGVEELSKAYEDDGDDYSSIMVKALGDRLAEAFAEELHERVRRELWAYCGSEQLDVADLRRLRYKGIRPAPGYPSQPDHTEKLTMWRLADIEQSTGIRLTESLAMAPASAVSGLYFSNLKSKYFAVGKISKDQVEDYALRKNISVAEVEKWLGPILGYDTD

SEQ ID NO: 63534 - protein, 74 aa, Homo sapiens
MIHTNLKKKFSCCVLVFLLFAVICVWKEKKKGSYYDSFKLQTKEFQVLKSLGKLAMGSDSQSVSSSSTQDPHRG

SEQ ID NO: 63535 - protein, 203 aa, Homo sapiens
MSFLKSFPPPGPAEGLLRQQPDTEAVLNGKGLGTGTLYIAESRLSWLDGSGLGFSLEYPTISLHALSRDRSDCLGEHLYVMVNAKFEVEAMFTAMCECQALHPDPEDEDSDDYDGEEYDVEAHEQGQGDIPTFYTYEEGLSHLTAEGQATLERLEGMLSQSVSSQYNMAGVRTEDSIRDYEDGMEVDTTPTVAGQFEDADVDH

SEQ ID NO: 63536 - protein, 88 aa, Homo sapiens
  MOD_RES (1)..(1): Any amino acid
XRLEFFDHKGSSSGGGRGSSRRLDCKVIRLAECVSVAPVTVETPPEPGATAFRLDTAQRSHLLAADAPSSAAWVQTLCRNAFPDPNSG

SEQ ID NO: 63537 - protein, 186 aa, Homo sapiens
MFVAYSVIGLTLWRRAVPGHQAHGANLRHLQAMKKFVKTMVLVVLTFAICWLPYHLYFILGSFQEDIYCHKFIQQVYLALFWLAMSSTMYNPIIYCCLNHRFRSGFRLAFRCCPWVTPTKEDKLELTPTTSLSTRVNRCHTKETLFMAGDTAPSEATSGEAGRPQDGSGLWFGYGLLAPTKTHVEI

SEQ ID NO: 63538 - protein, 108 aa, Homo sapiens
MSFDSQCDLRSSEPDYARFEAKIHDLREQMMNHSMSSGSGSLRTNQKRSLYVRAMFDYDKSKDSGLPSQGLSFKYGDILHVINASDDEWWQARRVMLEGDSEEMGVIP

SEQ ID NO: 63539 - protein, 84 aa, Homo sapiens
MVRSRQMCNTNMSVPTDGAVTTSQIPASEQETLVRPKPLLLKLLKSVGAQKDTYTMKEENIYHDLQELGSSQSAGIIGLRYICE

SEQ ID NO: 63540 - protein, 143 aa, Homo sapiens
MAGVKALVALSFSGAIGLTFLMLGCALEDYGVYWPLFVLIFHAISPIPHFIAKRVTYDSDATSSACRELAYFFTTGIVVSAFGFPVILARVAVVSFIFYCFAQPLLSLLQRPVSGTSISCSLLRLYTQGRVFLVSLFLYFRPA

SEQ ID NO: 63541 - protein, 410 aa, Homo sapiens
MRRYFMHGVCREGSQCLFSHDLANSKPSTICKYYQKGYCAYGTRCRYDHTRPSAAAGGAVGTMAHSVPSPAFHSPHPPSEVTASIVKTNSHEPGKREKRTLVLRDRNLSGMAERKTQPSMVSNPGSCSDPQPSPEMKPHSYLDAIRSGLDDVEASSSYSNEQQLCPYAAAGECRFGDACVYLHGEVCEICRLQVLHPFDPEQRKAHEKICMLTFEHEMEKAFAFQASQDKVCSICMEVILEKASASERRFGILSNCNHTYCLSCIRQWRCAKQFENPIIKSCPECRVISEFVIPSVYWVEDQNKKNELIEAFKQGMGKKACKYFEQGKGTCPFGSKCLYRHAYPDGRLAEPEKPRKQLSSQGTVRFFNSVRLWDFIENRESRHVPNNEDVDMTELGDLFMHLSGVESSEP

SEQ ID NO: 63542 - protein, 124 aa, Homo sapiens
MKYQEVRCLTSFNISVSFPAETDDYAEIIDEEDTYTMPSTRDYEIQRERIELGRCIGEGQFGDVHQGIYMSPENPALAVAIKTCKNCTSDSVREKFLQEASEVIFASKEIQFGSSIFDPVCLSA

SEQ ID NO: 63543 - protein, 862 aa, Homo sapiens
MNSAEQTVTWLITLGVLESPKKTISDPEGFLQASLKDGVVLCRLLERLLPGTIEKVYPEPRSESECLSNIREFLRGCGASLRLETFDANDLYQGQNFNKVLSSLVTLNKVTADIGLGSDSVCARPSSHRIKSFDSLGSQSLHTRTSKLFQGQYRSLDMTDNSNNQLVVRAKFNFQQTNEDELSFSKGDVIHVTRVEEGGWWEGTLNGRTGWFPSNYVREVKASEKPVSPKSGTLKSPPKGFDTTAINKSYYNVVLQNILETENEYSKELQTVLSTYLRPLQTSEKLSSANISYLMGNLEEICSFQQMLVQSLEECTKLPEAQQRVGGCFLNLMPQMKTLYLTYCANHPSAVNVLTEHSEELGEFMETKGASSPGILVLTTGLSKPFMRLDKYPTLLKELERHMEDYHTDRQDIQKSMAAFKNLSAQCQEVRKRKELELQILTEAIRNWEGDDIKTLGNVTYMSQVLIQCAGSEEKNERYLLLFPNVLLMLSASPRMSGFIYQGKLPTTGMTITKLEDSENHRNAFEISGSMIERILVSCNNQQDLQEWVEHLQKQTKVTSVGNPTIKPHSVPSHTLPSHPVTPSSKHADSKPAPLTPAYHTLPHPSHHGTPHTTINWGPLEPPKTPKPWSLSCLRPAPPLRPSAALCYKEDLSKSPKTMKKLLPKRKPERKPSDEEFASRKSTAALEEDAQILKVIEAYCTSAKTRQTLNSTWQGTDLMHNHVLADDDQPSLDSLGRRSSLSRLEPSDLSEDSDYDSIWTAHSYRMGSTSRSRKESAPQVLLPEEEKIIVEETKSNGQTVIEEKSLVDTVYALKDEVQELRQDNKKMKKSLEEEQRARKDLEKLVRKVLKNMNDPAWDETNL

SEQ ID NO: 63544 - protein, 108 aa, Homo sapiens
QLANSAAIRAEIQRFESVHPNIYSIYELLERVEEPVLQNQIREHVIAIEDAFVNSQEWTLSRSVPELKVGIVGNLASGKSALVHRYLTGTYVQEEYGCRWQVQERDCR

SEQ ID NO: 63545 - protein, 331 aa, Homo sapiens
MAGQGLPLHVATLLTGLLECLGFAGVLFGWPSLVFVFKNEDYFKDLCGPDAGPIGNATGQADCKAQDERFSLIFTLGSFMNNFMTFPTGYIFDRFKTTVARLIAIFFYTTATLIIAFTSAGSAVLLFLAMPMLTIGGILFLITNLQIGNLFGQHRSTIITLYNGAFDSSSAVFLIIKLLYEKGISLRASFIFISVCSTWHVARTFLLMPRGHIPYPLPPNYSYGLCPGNGTTKEEKETAEHENRELQSKEFLSAKEETPGAGQKQELRSFWSYAFSRRFAWHLVWLSVIQLWHYLFIGTLNSLLTNMAGGDMARVSTYTNAFAFTQFGVLC

SEQ ID NO: 63546 - protein, 61 aa, Homo sapiens
MPHRKERPSGSSLHTHGSTGTAEGGNMSRLSLTRSPVSPLAAQGIPLPAQLTKSNAPVHID

SEQ ID NO: 63547 - protein, 256 aa, Homo sapiens
VELRRRRLRRGAAAPGRAAPGAGATAAGEPGTGRGSGHRLLSAAVPDTPRICREMENFRRSFTFIGEVEEESEAGKESEETETKQTLKEFRCQVSDCSRIFQAITGLIQHYMKLHEMTPEEIESMTASVDVGKFPCDQLECKSSFTTYLNYVVHLEADHGIGLRASKTEEDGVYKCDCEGCDRIYATRSNLLRHIFNKHNDKHKAHLIRPRRLTPGQENMSSKANQEKSKSKHRGTKHSRCGKEGIKMPKTKRKKK

SEQ ID NO: 63548 - protein, 64 aa, Homo sapiens
MACLSPSQLQKFQQDGFLVLEGFLSAEECVAMQQRIGEIVAEMDVPLHCRTEFSTQEEEQLRAQ

SEQ ID NO: 63549 - protein, 118 aa, Homo sapiens
MTDTAEAVPNFEEMFASRFTENDKEYQEYLKRPPESPPIVEEWNSRAGGNQRNRGNRLQDNRQFRGRDNRWGWPSDNRSNQWHGRSWGNNYPQHRQEPYYPQQYGHYGYNQRPPYGYY

SEQ ID NO: 63550 - protein, 301 aa, Homo sapiens
MGALRPTLLPPSLPLLLLLMLGMGCWAREVLVPEGPLYRVAGTAVSISCNVTGYEGPAQQNFEWFLYRPEAPDTALGIVSTKDTQFSYAVFKSRVVAGEVQVQRLQGDAVVLKIARLQAQDAGIYECHTPSTDTRYLGSYSGKVELRVLPDVLQVSAAPPGPRGRQAPTSPPRMTVHEGQELALGCLARTSTQKHTHLAVSFGRSVPEAPVGRSTLQEVVGIRSDLAVEAGAPYAERLAAGELRLGKEGTDRYRMVVGGAQAGDAGTYHCTAAEWIQDPDGSWAQIAEKRAVLAHVDVQTL

SEQ ID NO: 63551 - protein, 147 aa, Homo sapiens
MAQVLHVPAPFPGTPGPASPPAFPAKDPDPPYSVETPYGYRLDLDFLKYVDDIEKGHTLRRVAVQRRPRLSSLPRGPGSWWTSTESLCSNASGDSRHSAYSYCGRGFYPQYGALETRGGFNPRVERTLLDARRRLEDQAATPTGLGS

SEQ ID NO: 63552 - protein, 292 aa, Homo sapiens
HTVTVSMDSSEISMIINSIKEECFRSGVAEAPVGSKAPSIDGKEELDLAEKMDIAVSYTGEELDFETVGDIIAIIEDKVDDHPEVLDVAAVEAALSFCEENDDPQSLPGPWEHPIQQERDKPVPLPAPEMTVKQERLDFEETENKGIHELVDIREPSAEIKVEPAEPEPVISGAEIVAGVVPATSMEPPELRSQDLDEELGSTAAGEIVEADVAIGKGDETPLTNVKTEASPESMLSPSHGSNPIEDPLEAETQHKFEMSDSLKEESGTIFGSQIKGQSYSRARGKKERLLA

SEQ ID NO: 63553 - protein, 151 aa, Homo sapiens
MSLNLPEASLLRASWPEQAKEPRREGHTDKQQTEDVLAAGLRCLPHLPAICARRMSPAFRAMDVEPRAKGVLLEPFVHQVGGHSCVLRFNETTLCKPLVPREHQFYETLPAEMRKFTPQYKGQSQRPLVSWPSLPHFFPWSFPLWPQGSVA

SEQ ID NO: 63554 - protein, 126 aa, Homo sapiens
MVQEREKDILTAIAADLCKSEFNVYSQEVITVLGEIDFMLENLPEWVTAKPVKKNVLTMLDEAYIQPQPLGVVLIIGAWNYPFVLTIQPLIGAIAAGNAVIIKPSELSENTAKILAKLLPQYLDQD

SEQ ID NO: 63555 - protein, 118 aa, Homo sapiens
  MOD_RES (1)..(1): Any amino acid
XSRRTLGSSDTQQLRRARHDSPDLAPNVTYSLPRTKSGKAPERASSKTSPHWKESGASHLSFPKNSKYEYDPDISPPRKKQAKSHFGDKKQLDSKEPATATKCGGCNERDAKASGPLY

SEQ ID NO: 63556 - protein, 144 aa, Homo sapiens
MSSKRPASPYGEADGEVAMVTSRQKVEEEESDGLPAFHLPLHVSFPNKPHSEEFQPVSLLTQETCGHRTPTSQHNTMEVDGNKVMSSFAPHNSSTSPQKAEEGGRQSGESLSSTALGTPERRKGSLADVVDTLKQRKMEELIKN

SEQ ID NO: 63557 - protein, 197 aa, Homo sapiens
  MOD_RES (1)..(1): Any amino acid
XTPSGLYLGTCERCSCHGHSEACEPETGACQGCQHHTEGPRCEQCQPGYYGDAQRGTPQDCQLCPCYGDPAAGQAAHTCFLDTDGHPTCDACSPGHSGRHCERCAPGYYGNPSQGQPCQRDSQVPGPIGCNCDPQGSVSSQCDAAGQCQCKVSPNPCPCGACSAPLPRPCGEIRQHLVEAETWAWGAGHGGQGRGCP

SEQ ID NO: 63558 - protein, 87 aa, Homo sapiens
MILPKRKDPTGMDPDDIWQLSSSLKRFDDKYTLKLTFISGRTKQQREAEFTKSIAKFFDHSGTLVMDAYEPEISRLHDSLAIERKIK

SEQ ID NO: 63559 - protein, 251 aa, Homo sapiens
MSPTPPLFSLPEARTRFTKSTREALNNKNIKPLLSTFSQVPGSENEKKCTLDQAFRGILEEEIINHSSCENVLAIISLAIGGVTEGICTASTPFVLLGDVLDCLPLDQCDTIFTFVEKNVATWKSNTFYSAGKNYLLRMCNDLLRRLSKSQNTVFCGRIQLFLARLFPLSEKSGLNLQSQFNLENVTVFNTNEQESTLGQKHTEDREEGMDVEEGEMGDEEAPTTWITSGTLCNAMRRFHGKLFSSILKKF

SEQ ID NO: 63560 - protein, 167 aa, Homo sapiens
MDLPDSASRVFCGRILSMVNTDDVNAIILAQKNMLDRFEKTNEMLLNFNNLSSARLQQMSERFLHHTRTLVEMKRDLDSIFRRIRTLKGKLARQHPEAFSHIPEASFLEEEDEDPIPPSTTTTIATSEQSTGSCDTSPDTVSPSLSPGFEDLSHVQPGSPAINGRSQ

SEQ ID NO: 63561 - protein, 145 aa, Homo sapiens
MVALCSLQHLGSSDPRALPTLPTATSGQRPAKRRRKSPAMAALTRDPQFQKLQQWYREHRSELNLRRLFDANKDRFNHFSLTLNTNHGHILVDYSKNLVTEDVMRMLVDLAKSRGVEAARERMFNGEKINYTEGRAVLHVALRNR

SEQ ID NO: 63562 - protein, 72 aa, Homo sapiens
MLAGGVRSMPSPLLACWQPILLLVLGSVLSGSATGCPPRCECSAQDRAVLCHRKRFVAVPEGIPTETRLLDL

SEQ ID NO: 63563 - protein, 113 aa, Homo sapiens
  MOD_RES (1)..(1): Any amino acid
XGGPKFAAKPHNPGFGMGGPMHNEVPPPPNLRGRGRGGSIRGRGRGRGFGGANHGGYMNAGAGYGSYGYGGNSATAGYMMKTISPHLNPEKPAFFLIASMLKRWEHVGNCILR

SEQ ID NO: 63564 - protein, 1655 aa, Homo sapiens
MMKRRQERLGAPCLRIHCRTSNRKSLIVTSSTSPTLPRPHSPLHGHTGNSPLDSPRNFSPNAPAHFSFVPARSHSHRADRTDGRRWSLASLPSSGYGTNTPSSTVSSSCSSQEKLHQLPFQPTADELHFLTKHFSTESVPDEEGRQSPAMRPRSRSLSPGRSPVSFDSEIIMMNHVYKERFPKATAQMEERLAEFISSNTPDSVLPLADGALSFIHHQVIEMARDCLDKSRSGLITSQYFYELQDNLEKLLQDAHERSESSEVAFVMQLVKKLMIIIARPARLLECLEFDPEEFYHLLEAAEGHAKEGQGIKCDIPRYIVSQLGLTRDPLEEMAQLSSCDSPDTPETDDSIEGHGASLPSKKTPSEEDFETIKLISNGAYGAVFLVRHKSTRQRFAMKKINKQNLILRNQIQQAFVERDILTFAENPFVVSMFCSFDTKRHLCMVMEYVEGGDCATLLKNIGALPVDMVRLYFAETVLALEYLHNYGIVHRDLKPDNLLITSMGHIKLTDFGLSKIGLMSLTTNLYEGHIEKDAREFLDKQVCGTPEYIAPEVILRQGYGKPVDWWAMGIILYEFLVGCVPFFGDTPEELFGQVISDEIVWPEGDEALPPDAQDLTSKLLHQNPLERLGTGSAYEVKQHPFFTGLDWTGLLRQKAEFIPQLESEDDTSYFDTRSERYHHMDSEDEEEVSEDGCLEIRQFSSCSPRFNKVYSSMERLSLLEERRTPPPTKRSLSEEKEDHSDGLAGLKGRDRSWVIGSPEILRKRLSVSESSHTESDSSPPMTVRRRCSGLLDAPRFPEGPEEASSTLRRQPQEGIWVLTPPSGEGVSGPVTEHSGEQRPKLDEEAVGRSSGSSPAMETRGRGTSQLAEGATAKAISDLAVRRARHRLLSGDSTEKRTARPVNKVIKSASATALSLLIPSEHHTCSPLASPMSPHSQSSNPSSRDSSPSRDFLPALGSMRPPIIIHRAGKKYGFTLRAIRVYMGDSDVYTVHHMVWHVEDGGPASEAGLRQGDLITHVNGEPVHGLVHTEVVELILKSGNKVAISTTPLENTSIKVGPARKGSYKAKMARRSKRSRGKDGQESRKRSSLFRKITKQASLLHTSRSLSSLNRSLSSGESGPGSPTHSHSLSPRSPTQGYRVTPDAVHSVGGNSSQSSSPSSSVPSSPAGSGHTRPSSLHGLAPKLQRQYRSPRRKSAGSIPLSPLAHTPSPPPPTASPQRSPSPLSGHVAQAFPTKLHLSPPLGRQLSRPKSAEPPRSPLLKRVQSAEKLAAALAASEKKLATSRKHSLDLPHSELKKELPPREVSPLEVVGARSVLSGKGALPGKGVLQPAPSRALGTLRQDRAERRESLQKQEAIREVDSSEDDTEEGPENSQGAQELSLAPHPEVSQSVAPKGAGESGEEDPFPSRDPRSLGPMVPSLLTGITLGPPRMESPSGPHRRLGSPQAIEEAASSSSAGPNLGQSGATDPIPPEGCWKAQHLHTQALTALSPSTSGLTPTSSCSPPSSTSGKLSMWSWKSLIEGPDRASPSRKATMAGGLANLQDLENTTPAQPKNLSPREQGKTQPPSAPRLAHPSYEDPSQGWLWESECAQAVKEDPALSITQVPDASGDRRQDVPCRGCPLTQKSEPSLRRGQEPGGHQKHRDLALVPDELLKQT

SEQ ID NO: 63565 - protein, 165 aa, Homo sapiens
MPMGSLQPLATLYLLGMLVASCLGRLSWYDPDFQARLTRSNSKCQGQLEVYLKDGWHMVCSQSWGRSSKQWEDPSQASKVCQRLNCGVPLSLGPFLVTYTPQSSIICYGQLGSFSNCSHSRNDMCHSLGLTCLEPQKTTPPTTRPPPTTTPEPTAMRPRTRPRTW

SEQ ID NO: 63566 - protein, 28 aa, Homo sapiens
MNWRRKSVIGLSFDFVALNLTGFVAYSV

SEQ ID NO: 63567 - protein, 163 aa, Homo sapiens
MWASCCGLLNEVMGTGAVRGQQSAFAGATGPFRFTPNPEFSTYPPAATEGPNIVCKACGLSFSVFRKKHVCCDCKKDFCSVCSVLQENLRRCSTCHLLQETAFQRPQLMRLKVKDLRQYLILRNIPIDTCREKEDLVDLVLCHHGLGSEDDMDTSSLNSSRSQ

SEQ ID NO: 63568 - protein, 163 aa, Homo sapiens
MAAVGAGGSTAAPGPGAVSAGALEPGTASAAHRRLKYISLAVLVVQNASLILSIRYARTLPGDRFFATTAVVMAEVLKGLTCLLLLFAQKRGNVKHLVLFLHEAVLVQYVDTLKLAVPSLIYTLQNNLQYVAISNLPAATFQVSPKPSMAPEELTGLGTGVWE

SEQ ID NO: 63569 - protein, 459 aa, Homo sapiens
MAALTIATGTGNWFSALALGVTLLKCLLIPTYSRTLLFQRFSVIFMDVLFVYAVRECCKCIDGKKVGKELTEKPKFILSVLLLWNFGLLIVDHIHFQYNGFLFGLMLLSIARLFQKRHMEGAFLFAVLLHFKHIYLYVAPAYGVYLLRSYCFTANKPDGSIRWKSFSFVRVISLGLVVFLVSALSLGPFLALNQLPQVFSRLFPFKRGLCHAYWAPNFWALYNALDKVLSVIGLKLKFLDPNNIPKASMTSGLVQQFQHTVLPSVTPLATLICTLIAILPSIFCLWFKPQGPRGFLRCLTLCALSSFMFGWHVHEKAILLAILPMSLLSVGKAGDASIFLILTTTGHYSLFPLLFTAPELPIKILLMLLFTIYSISSLKTLFRKEKPLFNWMETFYLLGLGPLEVCCEFVFPFTSWKVKYPFIPLLLTSVYCAVGITYAWFKLYVSVLIDSAIGKTKKQ

SEQ ID NO: 63570 - protein, 123 aa, Homo sapiens
MPPSCHLLCPDLSPSSAHPSAEAGLEEKMAAKQPPPLMKKHSQTDLVSRLKTRKILGVGGEDDDGEVHRSKISQVLGNEIKFTIREPLGLRVWQFVSAVLFSGIAIMALAFPDQLYDAVFDGA

SEQ ID NO: 63571 - protein, 142 aa, Homo sapiens
MSVLQRILAAQVPCQKDSWLYRILPSVSHKPFESIDEGQVTHNWDEVDPDPNQLRWKPFEIPKASQKKVDFVSGLHTLCGAGDIKSNNGLAIHIFLCNTSMENRCFYNSDGDFLIVPQKGNLLIYTEFGKMLVQPNEICVIQ

SEQ ID NO: 63572 - protein, 175 aa, Homo sapiens
MQPASPPARWSFHSAAGWSGGGQACGGHSCDQHRPCPGPSLADDTDANSNGSSGNESNGHESRGASQRSSHSSSSGNGKDSALLETTESSKSTNSQSPSPPSSSIAYSLLSASSEQDNPSTSGCSSEQSARARTQKELMTALRELKLRLPPERRGKGRSGTLATLQYALACVKQV

SEQ ID NO: 63573 - protein, 386 aa, Homo sapiens
MAGAGPAPGLPGAGGPVVPGPGAGIPGKSGEERLKEMEAEMALFEQEVLGAPVPGIPTAVPAVPTVPTVPTVEAMQVPAAPVIRPIIATNTYQQVQQTLEARAAAAATVVPPMVGGPPFVGPVGFGPGDRSHLDSPEAREAMFLRRAAAGPRPMALRPPHQALVGPPLPGPPGPPMMLPPMARAPGPPLGSMAALRPPLEEPAAPRELGLGLGLGLKEKEEAVVAAAAGLEEASAAVAVGAGGAPAGPAVIGPSLPLALAMPLPEPEPLPLPLEVVRGLLPPLRIPELLSLRPRPRPPRPEPPPGLMALEVPEPLGEDKKKGKPEKLKRCIRTAAGSSWEDPSLLEWDAGKYVGSRPIKLRKSMWKDRNLDVVRKKQKEKKKLGLR

SEQ ID NO: 63574 - protein, 223 aa, Homo sapiens
MNKLRQSFRRKKDVYVPEASRPHQWQTDEEGVRTGKCSFPVKTGKKAVKAVLWVSADGLRVVDEKTKDLIVDQTIEKVSFCAPDRNFDRAFSYICRDGTTRRWICHCFMAVKDTGERLSHAVGCAFAACLERKQKREKECGVTATFDASRTTFTREGSFRVTTATEQAEREEIMKQMQDAKKAETDKIVVGSSVAPGNTAPSPSSPTSPTSDATTSLEMNNPH

SEQ ID NO: 63575 - protein, 143 aa, Homo sapiens
MARKKLKKFTTLEIVLSVLLLVLFIISIVLIVLLAKESLKSTAPDPGTTGTPDPGTTGTPDPGTTGTTHARTTGPPDPGTTGTTPVSAECPVVNELERINCIPDQPPTKATCDQRGCCWNPQGAVSVPWCYYSKNHSYHVEGN

SEQ ID NO: 63576 - protein, 161 aa, Homo sapiens
  MOD_RES (1)..(1): Any amino acid
XMNGDPKHHYPGCINLSFAYVEGESLLMALKDVALSSGSACTSASLEPSYVLRAIGTDEDLAHSSIRFGIGRFTTEEEVDYTVEKCIQHVKRLREMSLKVGFNWLPTGLTWPLLLVKEIHLLFYQVCVVSAQHGCGHPFARSPNCGGDHGHSPLLLWIDHS

SEQ ID NO: 63577 - protein, 427 aa, Homo sapiens
MAALVVSGAAEQGGRDGPGRGRAPRGRVANQIPPEILKNPQLQAAIRVLPSNYNFEIPKTIWRIQQAQAKKVALQMPEGLLLFACTIVDILERFTEAEVMVMGDVTYGACCVDDFTARALGADFLVHYGHSCLIPMDTSAQDFRVLYVFVDIRIDTTHLLDSLRLTFPPATALALAAAQELKAEYRVSVPQCKPLSPGEILGCTSPRLSKEVEAVVYLGDGRFHLESVMIANPNVPAYRYDPYSKVLSREHYDHQRMQAARQEAIATARSAKSWGLILGTLGRQGSPKILEHLESRLRALGLSFVRLLLSEIFPSKLSLLPEVDVWVQVACPRLSIDWGTAFPKPLLTPYEAAVALRDISWQQPYPMDFYAGSSLGPWTVNHGQDRRPHAPGRPARGKVQEGSARPPSAVACEDCSCRDEKVAPLAP

SEQ ID NO: 63578 - protein, 236 aa, Homo sapiens
MALVPYEETTEFGLQKFHKPLATFSFANHTIQIRQDWRHLGVAAVVWDAAIVLSTYLEMGAVELRGRSAVELGAGTGLVGIVAALLALKSSMKPLLVHCLLFFSGAHVTITDRKVALEFLKSNVQANLPPHIQTKTVVKELTWGQNLGSFSPGEFDLILGADIIYLEETFTDLLQTLEHLCSNHSVILLACRIRYERDNNFLAMLERQFTVRKVHYDPEKDVHIYEAQKRNQKEDL

SEQ ID NO: 63579 - protein, 581 aa, Homo sapiens
MSASAQQLAEELQIFGLDCEEALIEKLVELCVQYGQNEEGMVGELIAFCTSTHKVGLTSEILNSFEHEFLSKRLSKARHSTCKDSGHAGARDIVSIQELIEVEEEEEILLNSYTTPSKGSQKRAISTPETPLTKRSVSTRSPHQLLSPSSFSPSATPSQKYNSRSNRGEVVTSFGLAQGVSWSGRGGAGNISLKVLGCPEALTGSYKSMFQKLPDIREVLTCKIEELGSELKEHYKIEAFTPLLAPAQEPVTLLGQIGCDSNGKLNNKSVILEGDREHSSGAQIPVDLSELKEYSLFPGQVVIMEGINTTGRKLVATKLYEGVPLPFYQPTEEDADFEQSMVLVACGPYTTSDSITYDPLLDLIAVINHDRPDVCILFGPFLDAKHEQVENCLLTSPFEDIFKQCLRTIIEGTRSSGSHLVFVPSLRDVHHEPVYPQPPFSYSDLSREDKKQVQFVSEPCSLSINGVIFGLTSTDLLFHLGAEEISSSSGTSDRFSRILKHILTQRSYYPLYPPQEDMAIDYESFYVYAQLPVTPDVLIIPSELRYFVKDRILHRPVPMQLHNMHMCQSREAAPQPWTGDK

SEQ ID NO: 63580 - protein, 52 aa, Homo sapiens
MWMNSILPIFLVPRRSGYCPPALGAGMTKERGTTMAWNMRRTSLPLKAPHTS

SEQ ID NO: 63581 - protein, 144 aa, Homo sapiens
MREIVHLQAGQCGNQIGAKFWEGAELVDAVLDVVRKEAESCDCLQGFQLTHSLGGGTGSGMGTLLISKIREEFPDRIMNTFSVVPSPKVSDTVVEPYNATLSVHQLVENTDETYCIDNEALYDICFRTLKLTTPTYGDLNHLVS

SEQ ID NO: 63582 - protein, 109 aa, Homo sapiens
RPGMSPGNRMPMAGLQVGPPAGSPFGAAAPLRPGMPPTMMDPFRKRLLVPQAQPPMPAQRRGLKRRKMADKVLPQRVSVKRTPGRPAQWPPWDPGACSRVSGVHGSLGF

SEQ ID NO: 63583 - protein, 219 aa, Homo sapiens
MAVFRSGLLVLTTPLASLAPRLASILTSAARLVNHTLYVHLQPGMSLEGPAQPQSSPVQATFEVLDFITHLYAGADVHRHLDVRILLTNIRTKSTFLPPLPTSVQNLAHPPEVVLTDFQTLDGSQYNPVKQQLVRYATSCYSCCPRLASVLLYSDYGIGEVPVEPLDVPLPSTIRPASPVAGSPKQPVRGYYRGAVGGTFDRLHNAHKVLLSVACILAQ

SEQ ID NO: 63584 - protein, 111 aa, Homo sapiens
MQALVLLLCIGALLGHSSCQNPASPPEEGSPDPDSTGALVEEEDPFFKVPVNKLAAAVSNFGYDLYRVRSSTSPTTNVLLSPLSVATALSALSLGAEQRTESIIHRALYYD

SEQ ID NO: 63585 - protein, 2301 aa, Homo sapiens
MKQRKGQGSGGSRGRKKRGLSDISPSTSLPPLVEGQLRCFLKLTVNRVIWKIAKPPTCVLVRVRWWGETSDGTLFCPRDALQTEPKAVRTTTRYAIRCGPKQFTSYLTDMAVLVLEVITKLDGLPIGRVQINGLAQLSPTHQINGFFTIVSSTSKKLGELQVSLALEPLSETYDSYHPLPTTDMTENVLLSKQGFRENTEPSSTQFQVPSRPRDIHTIKIDGKELAANSSRSTTPRGKDHVCFAENPDTIKDSSFGLQHSLNSGQSLESVTLKGRAPRKQMSLLNSSEFQPQIRTVAKSHSDSCILSSNNLPTKDLLSALLEQGNKLRNAMVISAMKSSPETSMLLDQVHPPINEDSLRASTQIRAFSRNRFKDHIEDHLLPSTENTFWRHDTKADTRAIQLLLGSAELSQGNFWDGLGSPPDSPSPGSDVYCISELNDPQYDQSLLENLFYTAPKSDTSISDFLSEEDDIVPSKKISQSTALARSSKVLESSDHKLKKRSAGKRNRNLVEQQMLSETPEDAQTMTLSVDRLALLGRTHSVRIIIETMGVPPDSPQMTPGKKSYAGPPPKVTTAKKRTFFVEYHFPVGFSESGLGKTALITEVVRLASSKITDGKVKFQQRFVFPVQFGGPMIEHWWNSNLTFQIYVKKTPQKKPEVIGSVSLSLRAVIQSELLSFSDQLPVQQENGQSPFGPLKVTMELITDNKDFTGINTKLSGNTHYTPLCAPTSPNKALPELNQDMTCTKNPQNLNQIHEETAKKAQNLVLPNRKSPSPVAPHPSTFVATPASHNLVNQTNGTTKESALLLHVLLMVPDGKDFISGESEKQSPCNVYLNCKLFSTEEVTRSVIAWGTTQPVFNFSQVIPVSLSSKYLERLKNNVMVIETWNKVRSPGQDKLLGLVKLPLHQFYMSFKDAKISRLLLDAQYPVVAVDSYMPVIDVFSGHQNGSLRVFLAMGSSNQIMALQRLKNEEGTLPPFSPRPAHFLDQPTAASVAMAEDRGNGLMEHCFEIHIEMVKGLAPLQATVWGEADCYVQYYFPVQHSQSSVLKGPEFLENGITLKPFRTATTLCVPDPIFNSEHHHSLLLPAEVPVQRLLLSAFSAQGLVPGGGVQFEIWCRYYYPNVRDQKVAKGTLPLSRICAMVTTQHREDVGIQTFNLPLTPRIENRKELRNQSSGLLDVGLRYRRSPRTAEGVLAARTVSISVQIIRACGLQAAAKALAEREPALQFSATVGVNASVTTHLSFLPQGEQRRTHPVACSFCPEFSHHVEFTCNLVTQHCSGEACFLAELLEFAEVIFAVYHENTKSASDIISIESCKEYLLGVVKVPTKELLIKRSGITGWYPIILPEDGGLPHGLELMQKIVGGLELSISFTHRGDRERVLEAAEHLGWSFENSLKDFVRMDEGEPATVTISTPRLWLPIHCVLLAGHNHIHKNTYCYLRYKFYDHEAFWTPLKKPKESVNKKQIMVTFKASKRAEVTRGPSLLWYFREERLEIQVWRAYGNDSVERPHQTDSWIGSAYVDLARLGERSARTLTVSGVYPLFGRNASNLSGAALRVHVVLSSLSSHLEPTHELDSMDCSSHSESEQLPRRNDEVQLSPPEVISCHQKSPASTQVPCSSTTAEVRLTQEGPADLDGTFAVSILVERAMHLSLKGSPLTERKVSIPSCCVSFATADESSPVYTQVVENTDSPIWNFQQQSRLSKELLLDPQQTLVFKVWHKGDEERVIGFASVDLSPLLSGFQFVCGWYNITDFSGECQGQIKVAVSPLESLIHFKEERQARRGVETSKSLIPIYSPFSFPASDTYAAFSSHMARQTLDQLAHASSKELDFSSPGRSDTTRSQASRHEEHVQNIRRFHESLHLQGEAPLPCDDKLTTSPLSSQTSILTSLRKNLSELDQIQRYFRQKLTKPFLPLSPQTQTAISQHQESCRDHLGPGASSLDPGSQCILEKSSNLVLQVSSLITDLQTITRDSQAALSSHRARSRSNKATTLPDAQDTEALQERCTMPDEPLVRAPDKGTDSPSPPPLEETSNGGRMLHESLRHAVPITRMQSSEDTEAGPAYSDEDYEEDIIEPRTLNEITTVTDKTSPWSSVISDTSEVISPQPDEVQREGPSCPSPGPFCREELMVKSSFLSSPERAVNPHLPRQGSPSQSLVACECEASKARVGGESASANPQPIPCPTLSGAQQSSTFVGWSSPQTDQNKEPKSEAPAENEAATSELGDSADSFKKLPLNLASQSRRENHKGPPIDSSDIRQRQVTTGSETSTKQSLLLYPLAFPTSGLDAGQERSHQGSSLPKALSPQT

SEQ ID NO: 63586 - protein, 54 aa, Homo sapiens
MAEDMETKIKNYKTAPFDSRFPNQNQTRNCWQNYLDFHRCQKAMTAKGGDISVC

SEQ ID NO: 63587 - protein, 233 aa, Homo sapiens
VVLECYVRKDLVYTKANPTFHHWKVDNRKFGLTFQSPADARAFDRGVRKAIEDLIEGSTTSSSTIHNEAELGDDDVFTPMPRPYRQVSFPDDDEEIVRINPREKIWMTGYEDYRHAPVRGKYPDPSEDADSSYVRFAKGEVPKHDYNYPYVDSSDFGLGEDPKGRGGSVIKTQPSRGKSRRRKEDGERSRCVYCRDMFNHEENRRGHCQDAPDSVRTCIRRVSCMWCADSMLY

SEQ ID NO: 63588 - protein, 154 aa, Homo sapiens
MAMESTATAAVAAELVSADNLDVDSEAKKLLGLGQKHLVMGDIPAAVNAFQEAASLLGKKYGETANECGEAFFFYGKSLLELARMENGVLGNALEGVHVEEEEGEKTEDESLVENNDNIDETEGSEEDDKENDKTEEMPNDSVLENKSLQENEE

SEQ ID NO: 63589 - protein, 180 aa, Homo sapiens
MPHSYPALSAEQKKELSDIALRIVAPGKGILAADESVGSMAKRLSQIGVENTEENRRLYRQVLFSADDRVKKCIGGVIFFHETLYQKDDNGVPFVRTIQDKGIVVGIKVDKGVVPLAGTDGETTTQGLDGLSERCAQYKKDGADFAKWRCVLKISERTPSALAILENANVLARYASICQQ

SEQ ID NO: 63590 - protein, 2168 aa, Homo sapiens
MLRAFVQPGTPAYQPLPSHLSANTEVKFKGTLVHEAQLNYFYISPGGSNYGSPRPAHANMNANAAAGLAPEHIPTPGAALSWQAAIDAARQAKLMGSAGNATISTVSSTQRKRQQYGKPKKQGSTTATRPPRALLCLTLKNPIRRACISIVEWKPFEIIILLTIFANCVALAIYIPFPEDDSNATNSNLERVEYLFLIIFTVEAFLKVIAYGLLFHPNAYLRNGWNLLDFIIVVVGLFSAILEQATKADGANALGGKGAGFDVKALRAFRVLRPLRLVSGVPSLQVVLNSIIKAMVPLLHIALLVLFVIIIYAIIGLELFMGKMHKTCYNQEGIADVPAEDDPSPCALETGHGRQCQNGTVCKPGWDGPKHGITNFDNFAFAMLTVFQCITMEGWTDVLYWMQDAMGYELPWVYFVSLVIFGSFFVLNLVLGVLSGEFSKEREKAKARGDFQKLREKQQLEEDLKGYLDWITQAEDIDPENEDEGMDEEKPRNMSMPTSETESVNTENVAGGDIEGENCGARLAHRISKSKFSRYWRRWNRFCRRKCRAAVKSNVFYWLVIFLVFLNTLTIASEHYNQPNWLTEVQDTANKALLALFTAEMLLKMYSLGLQAYFVSLFNRFDCFVVCGGILETILVETKIMSPLGISVLRCVRLLRIFKITRYWNSLSNLVASLLNSVRSIASLLLLLFLFIIIFSLLGMQLFGGKFNFDEMQTRRSTFDNFPQSLLTVFQILTGEDWNSVMYDGIMAYGGPSFPGMLVCIYFIILFICGNYILLNVFLAIAVDNLADAESLTSAQKEEEEEKERKKLARTASPEKKQELVEKPAVGESKEEKIELKSITADGESPPATKINMDDLQPNENEDKSPYPNPETTGEEDEEEPEMPVGPRPRPLSELHLKEKAVPMPEASAFFIFSSNNRFRLQCHRIVNDTIFTNLILFFILLSSISLAAEDPVQHTSFRNHILGNADYVFTSIFTLEIILKMTAYGAFLHKGSFCRNYFNILDLLVVSVSLISFGIQSSAINVVKILRVLRVLRPLRAINRAKGLKHVVQCVFVAIRTIGNIVIVTTLLQFMFACIGVQLFKGKLYTCSDSSKQTEAECKGNYITYKDGEVDHPIIQPRSWENSKFDFDNVLAAMMALFTVSTFEGWPELLYRSIDSHTEDKGPIYNYRVEISIFFIIYIIIIAFFMMNIFVGFVIVTFQEQGEQEYKNCELDKNQRQCVEYALKARPLRRYIPKNQHQYKVWYVVNSTYFEYLMFVLILLNTICLAMQHYGQSCLFKIAMNILNMLFTGLFTVEMILKLIAFKPKHYFCDAWNTFDALIVVGSIVDIAITEVNPAEHTQCSPSMNAEENSRISITFFRLFRVMRLVKLLSRGEGIRTLLWTFIKSFQALPYVALLIVMLFFIYAVIGMQVFGKIALNDTTEINRNNNFQTFPQAVLLLFRCATGEAWQDIMLACMPGKKCAPESEPSNSTEGETPCGSSFAVFYFISFYMLCAFLIINLFVAVIMDNFDYLTRDWSILGPHHLDEFKRIWAEYDPEAKGRIKHLDVVTLLRRIQPPLGFGKLCPHRVACKRLVSMNMPLNSDGTVMFNATLFALVRTALRIKTEGNLEQANEELRAIIKKIWKRTSMKLLDQVVPPAGDDEVTVGKFYATFLIQEYFRKFKKRKEQGLVGKPSQRNALSLQAGLRTLHDIGPEIRRAISGDLTAEEELDKAMKEAVSAASEDDIFRRAGGLFGNHVSYYQSDGRSAFPQTFTTQRPLHINKAGSSQGDTESPSHEKLVDSTFTPSSYSSTGSNANINNANNTALGRLPRPAGYPSTVSTVEGHGPPLSPAIRVQEVAWKLSSNRCHSRESQAAMAGQEETSQDETYEVKMNHDTEACSEPSLLSTEMLSYQDDENRQLTLPEEDKRDIRQSPKRGFLRSASLGRRASFHLECLKRQKDRGGDISQKTVLPLHLVHHQALAVAGLSPLLQRSHSPASFPRPFATPPATPGSRGWPPQPVPTLRLEGVESSEKLNSSFPSIHCGSWAETTPGGGGSSAARRVRPVSLMVPSQAGAPGRQFHGSASSLVEAVLISEGLGQFAQDPKFIEVTTQELADACDMTIEEMESAADNILSGGAPQSPNGALLPFVNCRDAGQDRAGGEEDAGCVRARGRPSEEELQDSRVYVSSL

SEQ ID NO: 63591 - protein, 108 aa, Homo sapiens
MEEGHGLDLTYITERIIAVSFPAGCSEESYLHNLQEVTRMLKSKHGDNYLVLNLSEKRYDLTKLNPKIMDVGWPELHAPPLDKMCTICKAQESWLNSNLQHVVVIHCR

SEQ ID NO: 63592 - protein, 57 aa, Homo sapiens
MMVSLGHLAKGASLDDLIDSCIQSFDADGNLCRSNQLLQVMLTMHRIVISSAELLQK

SEQ ID NO: 63593 - protein, 23 aa, Homo sapiens
  MOD_RES (1)..(1): Any amino acid
XNAGGTSYGKLTFGQGTILTVHP

SEQ ID NO: 63594 - protein, 115 aa, Homo sapiens
MWLAAAAPSLARRLLFLGPPPPPLLLLVFSRSSRRRLHSLGLAAMPEKRPFERLPADVSPINYSLCLKPDLLDFTFEGKLEAAAQKYMLQDLTIRMKMKKSPCLSLVLCKQVREP

SEQ ID NO: 63595 - protein, 1026 aa, Homo sapiens
MEKRLGVKPNPASWILSGYYWQTSAKWLRSLYLFYTCFCFSVLWLSTDASESRCQQGKTQFGVGLRSGGENHLWLLEGTPSLQSCWAACCQDSACHVFWWLEGMCIQADCSRPQSCRAFRTHSSNSMLVFLKKFQTADDLGFLPEDDVPHLLGLGWNWASWRQSPPRAALRPAVSSSDQQSLIRKLQKRGSPSDVVTPIVTQHSKVNDSNELGGLTTSGSAEVHKAITISSPLTTDLTAELSGGPKNVSVQPEISEGLATTPSTQQVKSSEKTQIAVPQPVAPSYSYATPTPQASFQSTSAPYPVIKELVVSAGESVQITLPKNEVQLNAYVLQEPPKGETYTYDWQLITHPRDYSGEMEGKHSQILKLSKLTPGLYEFKVIVEGQNAHGEGYVNVTVKPEPRKNRPPIAIVSPQFQEISLPTTSTVIDGSQSTDDDKIVQYHWEELKGPLREEKISEDTAILKLSKLVPGNYTFSLTVVDSDGATNSTTANLTVNKAVDYPPVANAGPNQVITLPQNSITLFGNQSTDDHGITSYEWSLSPSSKGKVVEMQGVRTPTLQLSAMQEGDYTYQLTVTDTIGQQATAQVTVIVQPENNKPPQADAGPDKELTLPVDSTTLDGSKSSDDQKIISYLWEKTQGPDGVQLENANSSVATVTGLQVGTYVFTLTVKDERNLQSQSSVNVIVKEEINKPPIAKITGNVVITLPTSTAELDGSKSSDDKGIVSYLWTRDEGSPAAGEVLNHSDHHPILFLSNLVEGTYTFHLKVTDAKGESDTDRTTVEVKPDPRKNNLVEIILDINVSQLTERLKGMFIRQIGVLLGVLDSDIIVQKIQPYTEQSTKMVFFVQNEPPHQIFKGHEVAAMLKSELRKQKADFLIFRALEVNTVTCQLNCSDHGHCDSFTKRCICDPFWMENFIKVQLRDGDSNCEWSVLYVIIATFVIVVALGILSWTVICCCKRQKGKPKRKSKYKILDATDQESLELKPTSRAGIKQKGLLLSSSLMHSESELDSDDAIFTWPDREKGKLLH

SEQ ID NO: 63596 - protein, 122 aa, Homo sapiens
MPKVKSGAIGRRRGRQEQRRELKSAGGLMFNTGIGQHILKNPLIINSIIDKAALRPTDVVLEVGPGTGNMTVKLLEKAKKAGVLWRDLGSLQPLTPWFKQFSCFSLLSSWDYRLLLVNLTQG

SEQ ID NO: 63597 - protein, 132 aa, Homo sapiens
MGPLSPARTLRLWGPRSLGVALGVFMTIGFALQLLGGPFQRRLPGLQLRQPSAPSLRPALPSCPPRQRLVFLKTHKSGSSSVLSLLHRYGDQHGLRFALPARYQFGYPKLFQASRVKGYRPQGGGTQLPFHI

SEQ ID NO: 63598 - protein, 42 aa, Homo sapiens
MEDEEGPEYGKPDFVLLDQVTMEDFMRNLQLRGEWGREDRSQ

SEQ ID NO: 63599 - protein, 120 aa, Homo sapiens
MSRLGLPEEPVRNSLLDDAKARLRKYDIGGKYSHLPYNKYSVLLPLVAKEGKLHLLFTVRSEKLRRAPGEVCFPGGKRDPTDMDDAATALREAQEEVGLRPHQVEVVCCLVPCLIDVRVS

SEQ ID NO: 63600 - protein, 160 aa, Homo sapiens
MFYSGLLTEGGRKETDMREAASLRQQRRMKQAVQFIHKDSADLLPLDGLKKLGSSKDMRRLMETNLSKLRSGPRVPWASKTNKLNQAKSEGLKKSEEDDMILVSCQCAGKDVKALVDTGCLYNLISLACVDRLGLKEHVKSHKHEGEKLSLPRHLKVVGQ

SEQ ID NO: 63601 - protein, 87 aa, Homo sapiens
FVRLLELFPSGNKPGPCWPGPSSHANGDPVAVAKAQPSRLIMGTHRDLEAFKRLNYRKTKLGGKAPLPYPSKGPGNIPRGDPPWREL

SEQ ID NO: 63602 - protein, 272 aa, Homo sapiens
MDSQELKTLINYYCQERYFHHVLLVASEGIKRYGSDPVFRFYHAYGTLMEGKTQEALREFEAIKNKQDVSLCSLLALIYAHKMSPNPDREAILESDARVKEQRKGAGEKALYHAGLFLWHIGRHDKAREYIDRMIKISDGSKQGHVLKAWLDITRGKEPYTKKALKYFEEGLQDGNDTFALLGKAQCLEMRQNYSGALETVNQIIVNFPSFLPAFVKKMKLQLALQDWDQTVETAQRFLYGHQFSTPLDQMPRNIIPESYGCCSKIAKMWKH

SEQ ID NO: 63603 - protein, 96 aa, Homo sapiens
MAAAVLTDRAQVSVTFDDVAVTFTKEEWGQLDLAQRTLYQEVMLENCGLLVSLGDKGKPKTTEPTTCEPALSEGISLQGQVTQGNSVDSQLGQAED

SEQ ID NO: 63604 - protein, 14 aa, Homo sapiens
MNPFWSMSTSSVRK

SEQ ID NO: 63605 - protein, 135 aa, Homo sapiens
MGKRRCVPPLEPKLAAGCCGVKKPKLSGSGTHSHGNQSTTVPGSSSGPLQNHQHVDSSSGRENVSDLTLGPGNSPITRMNPASGALSPLPRPNGTANTTKNLVVTAEMCCYCFDVLYCHLYGFPQPRLPRFTNDP

SEQ ID NO: 63606 - protein, 66 aa, Homo sapiens
  MOD_RES (1)..(1): Any amino acid
XMKKFCAQPWEEIKTSYAGVKEKYLSEYCFSGTYILSLLLQGYHFTADSWEHIHFIGKKVEIKGPS

SEQ ID NO: 63607 - protein, 312 aa, Homo sapiens
MASQLTQRGALFLLFFLTPAVTPTWYAGSGYYPDESYNEVYAEEVPQAPALDYRACLSSIATVPRWCYTLNIQDGEATCYSPKGGNYHSSLGTRCELSCDRGFRLIGRRSVQCLPSRRWSGTAYCRQMRCHALPFITSGTYTCTNGVLLDSRCDYSCSSGYHLEGDRSRICMEDGRWSGGEPVCVDIDPPKIRCPHSREKMAEPEKLTARVYWDPPLVKDSADGTITRVTLRGPEPGSHFPEGEHVIRYTAYDRAYNRASCKFIVKVQVRRCPTLKPPQHGYLTCTSAGDNYGATCEYHCDGGYDRQGTPSR

SEQ ID NO: 63608 - protein, 99 aa, Homo sapiens
MVRAGAVGAHLPASGLDIFGDLKKMNKRQLYYQVLNFAMIVSSALMIWKGLIVLTGSESPIVVVLSGSMEPAFHRGDLLFLTNFREDPIRAEIMETSNF

SEQ ID NO: 63609 - protein, 204 aa, Homo sapiens
MAQPQGPAEGSLPTGDPSPSEGTPGTSQAPGSPAATRRRELLRELEAQVQAAYGQDRELRPEEIEELQVAFQEFDRDRDGYIGCRELGACMRTLGYMPTEMELIEISQQISGGKVDFEDFVELMGPKLLAETADMIGVRELRDAFREFDTNGDGRISVGELRAALKALLGERLSQREVDEILQDVDLNGDGLVDFEEFVRMMSR

SEQ ID NO: 63610 - protein, 674 aa, Homo sapiens
MTSNGVALLNFYNMPSTPSFVGCLQDIKIDWNHITLENISSGSSLNVKAGCVRKDWCESQPCQSRGRCINLWLSYQCDCHRPYEGPNCLREYVAGRFGQDDSTGYVIFTLDESYGDTISLSMFVRTLQPSGLLLALENSTYQYIRVWLERGRLAMLTPNSPKLVVKFVLNDGNVHLISLKIKPYKIELYQSSQNLGFISASTWKIEKGDVIYIGGLPDKQETELNGGFFKGCIQDVRLNNQNLEFFPNPTNNASLNPVLVNVTQGCAGDNSCKSNPCHNGGVCHSRWDDFSCSCPALTSGKACEEVQWCGFSPCPHGAQCQPVLQGFECIANAVFNGQSGQILFRSNGNITRELTNITFGFRTRDANVIILHAEKEPEFLNISIQDSRLFFQLQSGNSFYMLSLTSLQSVNDGTWHEVTLSMTDPLSQTSRWQMEVDNETPFVTSTIATGSLNFLKDNTDIYVGDRAIDNIKGLQGCLSTIEIGGIYLSYFENVHGFINKPQEEQFLKISTNSVVTGCLQLNVCNSNPCLHGGNCEDIYSSYHCSCPLGWSGKHCELNIDECFSNPCIHGNCSDRVAAYHCTCEPGYTGVNCEVDIDNCQSHQCANGATCISHTNGYSCLCFGNFTGKFCRQSRLPSTVCGNEKTNLTCYNGGNCTEFQTELKCMCRPGFTGEW

SEQ ID NO: 63611 - protein, 364 aa, Homo sapiens
MALTAHPSCLLALLVAGLAQGIRGPLRAQDLGPQPLELKEAFKLFQIQFNRSYLSPEEHAHRLDIFAHNLAQAQRLQEEDLGTAEFGVTPFSDLTEEEFGQLYGYRRAAGGVPSMGREIRSEEPEESVPFSCDWRKVASAISPIKDQKNCNCCWAMAAAGNIETLWRISFWDFVDVSVQELLDCGRCGDGCHGGFVWDAFITVLNNSGLASEKDYPFQGKVRAHRCHPKKYQKVAWIQDFIMLQNNEHRIAQYLATYGPITVTINMKPLQLYRKGVIKATPTTCDPQLVDHSVLLVGFGSVKSEEGIWAETVSSQSQPQPPHPTPYWILKNSWGAQWGEKVSVIYWGRGQGRTGLFPPSRPYVP

SEQ ID NO: 63612 - protein, 188 aa, Homo sapiens
LIYHHLLRAGYVRAAREVKEQSGQKCFLAQPVTLLDIYTHWQQTSELGRKRKAEEDAALQAKKTRVSDPISTSESSEEEEEAEAETAKATPRLASTNSSVLGADLPSSMKEKAKDEPEEELQKGMGTVEGGDQSNPKSKKEKKKSDKRKKDKEKKEKKKKAKKASTKDSESPSQKKKKKKKKTAEQTV

SEQ ID NO: 63613 - protein, 157 aa, Homo sapiens
MNQSIPVAPTPPRRVRLKPWLVAQVNSCQYPGLQWVNGEKKLFCIPWRHATRHGPSQDGDNTIFKAWAKETGKYTEGVDEADPAKWKANLRCALNKSRDFRLIYDGPRDMPPQPYKIYEVCSNGPAPTDSQPPEDYSFGAGEEEEEEEEMQCSLAPT

SEQ ID NO: 63614 - protein, 1448 aa, Homo sapiens
MPALRPALLWALLALWLCWAAPAHALQCRDGYEPCVNKGMCVTYHSGTGYCKCPEGFLGEYCQHRDPCEKNRCQNGGTCVAQAMLGKATCRCASGFTGEDCQYSTPHPCFVSRPCLNGGTCHMLSRDTYECTCQVGFTGKECQWTDACLSHLCANGSTCTTVANQFSCKCLTGFTGQKCETDVNECDIPGHCQHGGTCLNLPGSYQCQCLQGFTGQYCDRLYVPCAHSPCVNGGTCRQTGDFTFECNCLPVPDSTSSATNVSMVVSAGHWSSEKAEMNILEINETLRPQLPENKQQLRNLKEKCFLTQLAGFLANRQKKYKYEECKDLIKFMLRNERQFKEEKLAEQLKQAEELRQYKVLVHSQERELTQLKEKLREGRDASRSLNEHLQALLTPDEPDKSQGQDLQEQLAEGCRLAQHLVQKLSPENDEDEDEDVQVEEDEKVLESSAPREVQKTEESKVPEDSLEECAITCSNSHGPCDSNQPHKNIKITFEEDEVNSTLVVDRESSHDECQDALNILPVPGPTSSATNVSMVVSAGPLSGEKAAINILEINEKLRPQLAEKKQQFRNLKEKCFLTQLAGFLANQQNKYKYEECKDLIKSMLRNERQFKEEKLAEQLKQAEELRQYKVLVHAQERELTQLREKLREGRDASRSLNEHLQALLTPDEPDKSQGQDLQEQLAEGCRLAQHLVQKLSPENDNDDDEDVQVEVAEKVQKSSAPREMQKAEEKEVPEDSLEECAITCSNSHGPYDCNQPHRKTKITFEEDKVDSTLIGSSSHVEWEDAVHIIPENESDDEEEEEKGPVSPRNLQESEEEEVPQESWDEGYSTLSIPPEMLASYKSYSSTFHSLEEQQVCMAVDIGRHRWDQVKKEDHEATGPRLSRELLDEKGPEVLQDSLDRCYSTPSGCLELTDSCQPYRSAFYVLEQQRVGLAVDMDEIEKYQEVEEDQDPSCPRLSRELLDEKEPEVLQDSLGRCYSTPSGYLELPDLGQPYSSAVYSLEEQYLGLALDVDRIKKDQEEEEDQGPPCPRLSRELLEVVEPEVLQDSLDRCYSTPSSCLEQPDSCQPYGSSFYALEEKHVGFSLDVGEIEKKGKGKKRRGRRSKKERRRGRKEGEEDQNPPCPRLSRELLDEKGPEVLQDSLDRCYSTPSGCLELTDSCQPYRSAFYILEQQRVGLAVDMDEIEKYQEVEEDQDPSCPRLSRELLDEKEPEVLQDSLGRCYSTPSGYLELPDLGQPYSSAVYSLEEQYLGLALDVDRIKKDQEEEEDQGPPCPRLSRELLEVVEPEVLQDSLDRCYSTPSSCLEQPDSCQPYGSSFYALEEKHVGFSLDVGEIEKKGKGKKRRGRRSKKERRRGRKEGEEDQNPPCPRLNSMLMEVEEPEVLQDSLDICYSTPSMYFELPDSFQHYRSVFYSFEEEHISFALYVDNRFFTLTVTSLHLVFQMGVIFPQ

SEQ ID NO: 63615 - protein, 120 aa, Homo sapiens
MDVTDYKGETVFHYAVQGDNSQVLQLLGRNAVAGLNQVNNQGLTPLHLACQLGKQEMVRVLLLCNARCNIMGPNGYPIHSAMKFSQKGCAEMIISMDSSQIHSKDPRYGASPLHWAKNAE

SEQ ID NO: 63616 - protein, 39 aa, Homo sapiens
MEIKEEGASEEGQHFLPTAQANDPGDCQFTSIQKTPNEP

SEQ ID NO: 63617 - protein, 140 aa, Homo sapiens
MTPQSLLQTTLFLLSLLFLVQGAHGRGHREDFRFCSQRNQTHRSSLHYKPTPDLRISIENSEEALTVHAPFPAAHPASRSFPDPRGLYHFCLYWNRHAGRLHLLYGKRDFLLSDKASSLLCFQHQEESLAQGPPLLATSV

SEQ ID NO: 63618 - protein, 193 aa, Homo sapiens
GKELNLVFGLQLSMARIGSTVNMNLMGWLYSKIEALLGSAGHTTLGITLMIGGITCILSLICALALAYLDQRAERILHKEQGKTGEVIKLTDVKDFSLPLWLIFIICVCYYVAVFPFIGLGNVVYVISAPMSPVFGLLVDKTGKNIIWVLCAVAATLVSHMMLAFTMWNPWIAMCLLGLSYSLLACALWPMVA

SEQ ID NO: 63619 - protein, 141 aa, Homo sapiens
MVPLVAVVSGPRAQLFACLLRLGTQQVGPLQLHTGASHAARNHYEVLVLGGGSGGITMAARMKRKVGAENVAIVEPSERHFYQPIWTLVGAGAKQLSSSGRPTASVIPSGVEWIKARVTELNPDKNCIHTDDDEKISYRYL

SEQ ID NO: 63620 - protein, 130 aa, Homo sapiens
MRNMLSKLQIACDNAVFGCSAVVRLDNLMSHLSDCEHNPKRPVTCEQGCGLEMPKDELPNHNCIKHLRSVVQQQQTRIAELEKTSAEHKHQLAEQKRDIQLLKAYMRAIRSVNPNLQNLEETIEYNEILE

SEQ ID NO: 63621 - protein, 64 aa, Homo sapiens
MFLFGEEDNLSESSSESFLWSDDEYGQDVDVTTNPDEELDGDDRYDFEVVRCICEVQEENDFMI

SEQ ID NO: 63622 - protein, 148 aa, Homo sapiens
MDPDPQAGVQVGMRVVRGVDWKWGQQDGGEGGVGTVVELGRHGSPSTPDRTVVVQWDQGTRTNYRAGYQGAHDLLLYDNAQIGVRHPNIICDCCKKHGLRGMRWKCRVCLDYDLCTQCYMHNKHELAHAFDRYETAHSRPVTLSPRQG

SEQ ID NO: 63623 - protein, 120 aa, Homo sapiens
  MOD_RES (1)..(1): Any amino acid
XGRPAELCFYSGRVLGHPGSLVSLSACGAAGGLVGLIQLGQEQVLIQPLNNSQGPFSGREHLIRRKWSLTPSPSAEAQRPEQLCKVLTVPQCLGLTWEDLKSGGWSDLEVPHSCVWPGGG

SEQ ID NO: 63624 - protein, 165 aa, Homo sapiens
LAWRPGERGAPASRPRLALLLLLLLLPLPSGAWYKHVASPRYHTVGRAAGLLMGLRRSPYLWRRALRAAAGPLARDTLSPEPAAREAPLLLPSWVQELWETRRRSSQAGIPVRAPRSPRAPEPALEPESLDFSGAGQRLRRDVSRPAVDPAANRLGLPCLAPGPF

SEQ ID NO: 63625 - protein, 722 aa, Homo sapiens
MGPKAKKSGSKKKKVTKAERLKLLQEEEERRLKEEEEARLKYEKEEMERLEIQRIEKEKWHRLEAKDLERRNEELEELYLLERCFPEAEKLKQETKLLSQWKHYIQCDGSPDPSVAQEMNTFISLWKEKTNETFEEVIEKSKVVLNLIEKLKFILLETPPCDLQDKNIIQYQESILQLQELLHLKFGVATEILLKQASTLADLDSGNMEKVIKDENVTLYVWANLKKNPRHRSVRFSETQIGFEIPRILATSDIAVRLLHTHYDHVSALHPVSTPSKEYTSAVTELVKDDVKNVEKAISKEVEEESKQQERGSHLIQEEEIKVEEEQGDIEVKMSSAEEESEAIKCEREMKVLSETVSAAQLLLVENSSEKPDFFEDNVVDLCQFTTLGGVYHLDILELPPQCKPVKGWMIVEILKEGLQKYTYPPETTEEFETENAFPPIEVTLEVHENVIFFEDPVVVRWDAEGKHWRTDGISNVSYKPKERLVTFSLDTFGPVTLIQDAHINMPYQSWELRPLDVNKVLLTVTTVFTEIQIQIKENLCMLSSIKLKDKKHISILEGTWMTPIPFIIALKEAGLNIFPTRHSHFYVIINNKVPLVEVKAYRQMALLSSAFAFGWSKWNLLCNSTKVVFKVREHLTEACTENPNWALLMFSGDRAQRLKIKEESEAFSEALKEETEFHSTLYHMVKDFASEEAMEKVRSSNCQFVNSVCHMLLSTRLLSYS

SEQ ID NO: 63626 - protein, 547 aa, Homo sapiens
MIASQFLSALTLVLLIKESGAWSYNTSTEAMTYDEASAYCQQRYTHLVAIQNKEEIEYLNSILSYSPSYYWIGIRKVNNVWVWVGTQKPLTEEAKNWAPGEPNNRQKDEDCVEIYIKREKDVGMWNDERCSKKKLALCYTAACTNTSCSGHGECVETINNYTCKCDPGFSGLKCEQIVNCTALESPEHGSLVCSHPLGNFSYNSSCSISCDRGYLPSSMETMQCMSSGEWSAPIPACNVVECDAVTNPANGFVECFQNPGSFPWNTTCTFDCEEGFELMGAQSLQCTSSGNWDNEKPTCKAVTCRAVRQPQNGSVRCSHSPAGEFTFKSSCNFTCEEGFMLQGPAQVECTTQGQWTQQIPVCEAFQCTALSNPERGYMNCLPSASGSFRYGSSCEFSCEQGFVLKGSKRLQCGPTGEWDNEKPTCEVVKCSSLAVPGKINMSCSGEPVFGTVCKFACPEGWTLNGSAARTCGATGHWSGLLPTCEAPTESNIPLVAGLSAAGLSLLTLAPFLLWLRKCLRKAKKFVPASSCQSLESDGSYQKPSYIL

SEQ ID NO: 63627 - protein, 27 aa, Homo sapiens
MLRWLIGGGREPQGLAEVNPGNLLYRQ

SEQ ID NO: 63628 - protein, 101 aa, Homo sapiens
MPNSVLWAVDLFGRVYTLSTAGQYWEMCKDSQLEFKRVSATTQCCWGIACDNQVYVYVCASDVPIRRREEAYENQRWNPMGGFCEKLLLSDRWGWSDVSGL

SEQ ID NO: 63629 - protein, 129 aa, Homo sapiens
MLSLDFLDDVRRMNKRQLYYQVLNFGMIVSSALMIWKGLMVITGSESPIVVVLRQNGHIKFLTKGDNNAVDDRGLYKQGQHWLEKKDVVGRARGFVPYIGIVTILMNDYPKFKYAVLFLLGLFVLVHRE

SEQ ID NO: 63630 - protein, 61 aa, Homo sapiens
MSVIFFACVVRVRDGLPLSASTDFYHTQDFLEWRRRLKSLALRLAQYPGRGSAEGCDFSIQ

SEQ ID NO: 63631 - protein, 46 aa, Homo sapiens
MAGFGAMEKFLVEYKSAVEKKLAEYKCNTNTAIELKLVKLLLVTRV

SEQ ID NO: 63632 - protein, 118 aa, Homo sapiens
MSPCSVRLSSVKSPRSALFRVGHMSSVELDDELLDPDMDPPHPFPKEIPHNEKLLSLKYESLDYDNSENQLFLEEERRINHTAFRTVEIKRWVICALIGILTGLVACFIDIVVENLAG

SEQ ID NO: 63633 - protein, 183 aa, Homo sapiens
FTVMVFTVTLKLALDTHYWTWINHFVIWGSLLFYVVFSLLWGGVIWPFLNYQRMYYVFIQMLSSGPAWLAIVLLVTISLLPDVLKKVLCRQLWPTATERVQNGCAQPRDRDSEFTPLASLQSPGYQSTCPSAAWYSSHSQQVTLAAWKEKVSTEPPPILGGSHHHCSSIPSHSCPRSRVGMLV

SEQ ID NO: 63634 - protein, 128 aa, Homo sapiens
MSSNDSSLMAGIIYYSQEKYFHHVQQAAAVGLEKFSNDPVLKFFKAYGVLKEEHIQDAISDLESIRHHPDVSLCSTMALIYAHKRCEIIGECHHAQPGLTHQGKESPAPEITQPLKGCQRRPRSNSGA

SEQ ID NO: 63635 - protein, 303 aa, Homo sapiens
MSSTLPALLCVGLCLSQRISAQQQTLPKPFIWAEPHFMVPKEKQVTICCQGNYGAVEYQLHFEGSLFAVDRPKPPERINKVQFYIPDMNSRMAGQYSCIYRVGELWSEPSNLLDLVVTEMYDTPTLSVHPGPEVISGEKVTFYCRLDTATSMFLLLKEGRSSHVQRGYGKVQAEFPLGPVTTAHRGTYRCFGSYNNHAWSFPSEPVKLLVTGDIENTSLAPEDPTFPDTWGTYLLTTETGLQKDHALWDHTAQNLLRMGLAFLVLVALVWFLVEDWLSRKRTRERASRASTWEGRRRLNTQTL

SEQ ID NO: 63636 - protein, 158 aa, Homo sapiens [sequence omitted]

SEQ ID NO: 63637 - protein, 283 aa, Homo sapiens
MRPLLLLALLGWLLLAEAKGDAKPEDNLLVLTVATKETEGFRRFKRSAQFFNYKIQALGLGEDWNVEKGTSAGGGQKVRLLKKALEKHADKEDLVILFADSYDVLFASGPRELLKKFRQARSQVVFSAEELIYPDRRLETKYPVVSDGKRFLGSGGFIGYAPNLSKLVAEWEGQDSDSDQLFYTKIFLDPEKREQINITLDHRCRIFQNLDGALVSPWGQGHLPGACYELTASVLTSELSVMPSFPAVVLQLNYLGNYIPRFWTFETGCTVCDEGLRSLKGIG

SEQ ID NO: 63638 - protein, 753 aa, Homo sapiens
AENMADLIDGYCRLVNGTSQSFIIRPQKEGERALPSIPKLANSEKQGMRTHAVSVSGVSHCQHKVKKARRFLPLVFCSHDPPSTDEISGDETDDYAEIIDEEDTYTMPSTRDYEIQRERIELGRCIGEGQFGDVHQGIYMSPENPALAVAIKTCKNCTSDSVREKFLQEALTMRQFDHPHIVKLIGVITENPVWIIMELCTLGELRSFLQVRKYSLDLASLILYAYQLSTALAYLESKRFVHRDIAARNVLVSSNDCVKLGDFGLSRYMEDSTYYKASKGKLPIKWMAPESINFRRFTSASDVWMFGVCMWEILMHGVKPFQGVKNNDVIGRIENGERLPMPPNCPPTLYSLMTKCWAYDPSRRPRFTELKAQLSTILEEEKAQQEERMRMESRRQATVSWDSGGSDEAPPKPSRPGYPSPRSSEGFYPSPQHMVQTNHYQVSGYPGSHGITAMAGSIYPGQASLLDQTDSWNHRPQEIAMWQPNVEDSTVLDLRGIGQVLPTHLMEERLIRQQQEMEEDQRWLEKEERFLKPDVRLSRGSIDREDGSLQGPIGNQHIYQPVGKPDPAAPPKKPPRPGAPGHLGSLASLSSPADSYNEGVKPWRLQPQEISPPPTANLDRSNDKVYENVTGLVKAVIEMSSKIQPAPPEEYVPMVKEVGLALRTLLATVDETIPLLPASTHREIEMAQKLLNSDLGELINKMKLAQQYVMTSLQQEYKKQMLTAAHALAVDAKNLLDVIDQARLKMLGQTRPH

SEQ ID NO: 63639 - protein, 242 aa, Homo sapiens
MPKRAVLFTDRQPIQFLKINCLRNCKTYQARKPLWFYNTSLKFFLNKPMLADVVFEIQGTTVPAHRAILVARCEVMAAMFNGNYMEAKSVLIPVYGVSKETFLSFLEYLYTDSCCPAGIFQAMCLLICAEMYQVSRLQHICELFIITQLQSMPSRELASMNLDIVDLLKKAKFHHSDCLSTWLLHFIATNYLIFSQKPEFQDLSVEERSFVEKHRWPSNMYLKQLAEYRKYIHSRKCRCLVM

SEQ ID NO: 63640 - protein, 1889 aa, Homo sapiens
MEGSLAGSLAAPDRPQGPERLPGPAPRENIEGGAEAAEGEGGIFRSTRYLPVTKEGPRDILDGRGGISDGQPHPGLSEALPRVTSATHRISSCCWDGGSLDFRPGSPPPHLLGHFPGTPDGRGPWEHPLVQEAGEGILSERRFEDSVIVRTMKPHAELEGSRRFLHHRGEPRLLEKHAQGRPRFDWLQDEDEQGSPQDAGLHLDLPAQPPPLAPFRRVFVPVEDTPKTLDMAVVGGREDLEDLEGLAQPSEWGLPTSASEVATQTWTVNSEASVERLQPLLPPIRTGPYLCELLEEVAEGVASPDEDEDEEPAVFPCIECSIYFKQKEHLLEHMSQHRRAPGQEPPADLAPLACGECGWAFADPTALEQHRQLHQASREKIIEEIQKLKQVPGDEGREARLQCPKCVFGTNSSRAYVQHAKLHMREPPGQTTKEPFGGSSGAGSPSPEASALLYQPYGAAVGLSACVFCGFPAPSESLLREHVRLVHAHPHWEEDGEAYEEDPASQPGTSQDAHACFPDTAVDYFGKAEPSLAPMWRENPAGYDPSLAFGPGCQQLSIRDFPLSKPLLHGTGQRPLGRLAFPSTLASTPYSLQLGRNKSTVHPQGLGERRRPWSEEEEEEEEEEDVVLTSEMDFSPENGVFSPLATPSLIPQAALELKQAFREALQAVEATQGQQQQLRGMVPIVLVAKLGPQVMAAARVPPRLQPEELGLAGAHPLDFLLLDAPLGGPLGLDTLLDGDPAMALKHEERKCPYCPDRFHNGIGLANHVRGHLNRVGVSYNVRHFISAEEVKAIERRFSFQKKKKKVANFDPGTFSLMRCDFCGAGFDTRAGLSSHARAHLRDFGITNWELTVSPINILQELLATSAAEQPPSPLGREPGGPPGSFLTSRRPRLPLTVPFPPTWAEDPGPAYGDGLGSEENAMVAMDLGSPSLPKKSLPVPGALEQVASRLSSKVAAEVPHGSKQELQDLKAQSLTTCEVCGACFETRKGLSSHARSHLRQLGVAESESSGAPIDLLYELVKQKGLPDAHLGLPPGLAKKSSSLKEVVAGAPRPGLLSLAKPLDAPAVNKAIKSPPGFSAKGLGHPPSSPLLKKTPLALAGSPTPKNPEDKSPQLSLSPRPASPKAQWPQSEDEGPLNLTLDSDGGRELDCQLCGAWFETRKGLSSHARAHLRHLGVSDPDAKGSPIDVLHGLIRRDGVQIRLPPRRGALAHPGRPPPTSAALSLLPPPPPAKKAKLKAAGMASPWGKQDLSAAAAAGIFWASDVEPSPLNLSSGPEPARDIRCEFCGEFFENRKGLSSHARSHLRQMGVTEWYVNGSPIDTLREILKRRTQSRPGGPPNPPGPSPKALAKMMGGAGPGSSLEARSPSDLHISPLAKKLPPPPGSPLGHSPTASPPPTARKMFPGLAAPSLPKKLKPEQIRVEIKREMLPGALHGELHPSEGPWGAPREDMTPLNLSSRAEPVRDIRCEFCGEFFENRKGLSSHARSHLRQMGVTEWSVNGSPIDTLREILKKKSKPCLIKKEPPAGDLAPALAEDGPPTVAPGPVQSPLPLSPLAGRPGKPGAGPAQVPRELSLTPITGAKPSATGYLGSVAAKRPLQEDRLLPAEVKAKTYIQTELPFKAKTLHEKTSHSSTEACCELCGLYFENRKALASHARAHLRQFGVTEWCVNGSPIETLSEWIKHRPQKVGAYRSYIQGGRPFTKKFRSAGHGRDSDKRPSLGLAPGGLAVVGRSAGGEPGPEAGRAADGGERPLAASPPGTVKAEEHQRQNINKFERRQARPPDASAARGGEDTNDLQQKLEEVRQPPPRVRPVPSLVPRPPQTSLVKFVGNIYTLKCRFCEVEFQGPLSIQEEWVRHLQRHILEMNFSKADPPPEESQAPQAQTAAAEAP

SEQ ID NO: 63641 - protein, 130 aa, Homo sapiens
MGLGTLSPRMLVWLVASGIVFYGELWVCAGLDYDYTFDGNEEDKTETIDYKDPCKAAVFWGDIALDDEDLNIFQIDRTIDLTQNPFGNLGHTTGGLGDHAMSKKRGALYQLIDRIRRIGFGISMFKVADA

SEQ ID NO: 63642 - protein, 89 aa, Homo sapiens
MGWITEDLIRRNAEHNDCVIFSLEELSLHQQEIERLEHIDKWCRDLKILYLQNNLIGKIENVSKLKKLEYLNLALNNIEKIENLEDVIY

SEQ ID NO: 63643 - protein, 83 aa, Homo sapiens
PEVPLAGLRRLLLDRLVFAPAFLMLFFLIMNFLEGKDASAFAAKMRGGFWPALRMNWRVWTPLQFININYVPLKVRATGLSLC

SEQ ID NO: 63644 - protein, 318 aa, Homo sapiens
MSTVKEQLIEKLIEDDENSQCKITIVGTGAVGMACAISILLKDLADELALVDVALDKLKGEMMDLQHGSLFFSTSKITSGKAGARQQEGETRLALVQRNVAIMKSIIPAIVHYSPDCKILVVSNPVDILTYIVWKISGLPVTRVIGSGCNLDSARFRYLIGEKLGVHPTSCHGWIIGEHGDSSVPLWSGVNVAGVALKTLDPKLGTDSDKEHWKNIHKQVIQSAYEIIKLKGYTSWAIGLSVMDLVGSILKNLRRVHPVSTMVKGLYGIKEELFLSIPCVLGRNGVSDVVKINLNSEEEALFKKSAETLWNIQKDLIF

SEQ ID NO: 63645 - protein, 131 aa, Homo sapiens
MLDHKDLEAEIHPLKNEERKSQENLGNPSKNEDNVKSAPPQSRLSRCRAAAFFLSLFLCLFVVFVVSFVIPCPDRPASQRMWRIDYSAAVIYDFLAVDDINGDRIQDVLFLYKNTNSSNNFSRSCVDEAAV

SEQ ID NO: 63646 - protein, 132 aa, Homo sapiens
  MOD_RES (1)..(1): Any amino acid
XMGLEAIIRKALMGKYDQWEESPPLSANAFNPLNASASLPAAMPITAADGRSDHTLTSPGGGGKAKVSGRPSSRKAKSPAPGLASGDRPPSVSSVHSEGDCNRRTPLTNRVWEDRPSSAGGHQVPRHSPTTP

SEQ ID NO: 63647 - protein, 16 aa, Homo sapiens
MTQQPLRGVTSLRFNQ

SEQ ID NO: 63648 - protein, 183 aa, Homo sapiens
  MOD_RES (1)..(1): Any amino acid
XSLVCKLNTRTTILAATNPKGQYDPQESVSVNIALGSPLLSRFDLILVLLDTKNEDWDRIISSFILENKAHARLMFRDTVTLEDAITVVSVMESSMQGGALLGGVNALHTSFPENPGEQYQRQCELILEKLELQSLLSEELRRLERLQNQSVHQSQPRVLEVETTPGSLRNGPGEESNFRTSS

SEQ ID NO: 63649 - protein, 235 aa, Homo sapiens
PKWKNFKGLKLLCRDKIRLNNAIWRAWYIQYVKRRKSPVCGFVTPLQGPEADAHRKPEAVVLEGNYWKRRIEVVMREYHKWRIYYKKRVSGGGPGRPQSFPPAAAGYRPPRKIPGKGILTPELAPLGPSIQSRADSATVWPQRLLAASLPRGRLRKPSREDDLLAPKQAEGRWPPPEQWCKQLFSSVVPVLLGDPEEEPGGRQLLDLNCFLSDISDTLFTMTQSGPSPLQLPPED

SEQ ID NO: 63650 - protein, 186 aa, Homo sapiens
MFWKFDLHSSSHIDTLLEREDVTLKELMDEEDVLQECKAQNRKLIEFLLKAECLEDLVSFIIEEPPQDMDEKIRYKYPNISCELLTSDVSQMNDRLGEDESLLMKLYSFLLNDSPLNPLLASFFSKVLSILISRKPEQIVDFLKKKHDFVDLIIKHIGTSAIMDLLLRLLTCIEPPQPRQDVLNWL

SEQ ID NO: 63651 - protein, 251 aa, Homo sapiens
MLPAATEVQLRLQGQKDMVWKWMPLLLLLVCVATMCSAQDRTDLLNVCMDAKHHKTKPGPEDKLHDQCSPWKKNACCTASTSQELHKDTSRLYNFNWDHCGKMEPACKRHFIQDTCLYECSPNLGPWIQQVNQSWRKERFLDVPLCKEDCQRWWEDCHTSHTCKSNWHRGWDWTSAALCEGLWSHSYKVSNYSRGSGRCIQMWFDSAQGNPNEEVARFYAAAMHVNAGEMLHGTGGLLLSLALMLQLWLLG

SEQ ID NO: 63652 - protein, 45 aa, Homo sapiens
MDWGTLHTFIGGVNKHSTSIGKVWITVIFIFRVMILVVAAQEVWG

SEQ ID NO: 63653 - protein, 52 aa, Homo sapiens
MMGVLFCCGAGFFIRRRMYPPPLIEEPAFNVSYTRQPPNPGPGAQQPGPPYY

SEQ ID NO: 63654 - protein, 84 aa, Homo sapiens
FPLDPKRRKEWVRLVRRKNFVPGKHTFLCSKHFEASCFDLTGQTRRLKMDAVPTIFDFCTHIKSMVTYDLFLRGVGCFLLLFLF

SEQ ID NO: 63655 - protein, 817 aa, Homo sapiens
MFQRCLDDHKYKQAIGIALETRRLDVFEKTILESNDVPGMLAYSLKLCMSLMQNKQFRNKVLRVLVKIYMNLEKPDFINVCQCLIFLDDPQAVSDILEKLVKEDNLLMAYQICFDLYESASQQFLSSVIQNLRTVGTPIASVPGSTNTGTVPGSEKDSDSMETEEKTSSAFVGKTPEASPEPKDQTLKMIKILSGEMAIELHLQFLIRNNNTDLMILKNTKDAVRNSVCHTATVIANSFMHCGTTSDQFLRDNLEWLARATNWAKFTATASLGVIHKGHEKEALQLMATYLPKDTSPGSAYQEGGGLYALGLIHANHGGDIIDYLLNQLKNASNDIVRHGGSLGLGLAAMGTARQDVYDLLKTNLYQDDAVTGEAAGLALGLVMLGSKNAQAIEDMVGYAQETQHEKILRGLAVGIALVMYGRMEEADALIESLCRDKDPILRRSGMYTVAMAYCGSGNNKAIRRLLHVAVSDVNDDVRRAAVESLGFILFRTPEQCPSVVSLLSESYNPHVRYGAAMALGICCAGTGNKEAINLLEPMTNDPVNYVRQGALIASALIMIQQTEITCPKVNQFRQLYSKVINDKHDDVMAKFGAILAQGILDAGGHNVTISLQSRTGHTHMPSVVGVLVFTQFWFWFPLSHFLSLAYTPTCVIGLNKDLKMPKVQYKSNCKPSTFAYPAPLEVPKEKEKEKVSTAVLSITAKAKKKEKEKEKKEEEKMEVDEAEKKEEKEKKKEPEPNFQLLDNPARVMPAQLKVLTMPETCRYQPFKPLSIGGIIILKDTSEDIEELVEPVAAHGPKIEEEEQEPEPPEPFEYIDD

SEQ ID NO: 63656 - protein, 327 aa, Homo sapiens
MAAEPNKTEIQTLFKRLRAVPTNKACFDCGAKNPSWASITYGVFLCIDCSGVHRSLGVHLSFIRSTELDSNWNWFQLRCMQVGGNANATAFFRQHGCTANDANTKYNSRAAQMYREKIRQLGSAALARHGTDLWIDNMSSAVPNHSPEKKDSDFFTEHTQEWLTEASVIWPPFQPPAWDAPATEPSGTQQPAPSTESSGLAQPEHGPNTDLLGTSPKASLELKSSIIGKKKPAAAKKGLGAKKGLGAQKVSSQSFSEIERQAQVAEKLREQQAADAKKQAEESMVASMRLAYQELQIDRKKEEKKLQNLEGKKREQAERLGMGLVSR

SEQ ID NO: 63657 - protein, 237 aa, Homo sapiens
MSLKLQASNVTNKNDPKSINSRVFIGNLNTALVKKSDVETIFSKYGRVAGCSVHKGYAFVQYSNERHARAAVLGENGRVLAGQTLDINMAGEPKPDRPKGLKRAASAIYRLFDYRGRLSPVPVPRAVPVKRPRVTVPLVRRVKTNVPVKLFARSTAVTTSSAKIKLKSSELQAIKTELTQIKSNIDALLSRLEQIAAEQKANPDGKKKGDGGGAGGGGGGGGSGGGGSGGGGGGGSS

SEQ ID NO: 63658 - protein, 132 aa, Homo sapiens
MLMLFVFGVLLHEVSLSGQNEAPPNTHSIPGEPLYNYASIRLPEEHIPFFLHNNRHIATVCRKDSLCPYKKHLEKLKYCWGYEKSCKPEFRFGYPVCSYVDMGWTDTLESAEDIFWKQADFGYARERLEEMH

SEQ ID NO: 63659 - protein, 365 aa, Homo sapiens
MDSALSDPHNGSAEAGGPTNSTTRPPSTPEGIALAYGSLLLMALLPIFFGALRSVRCARGKNASDMPETITSRDAARFPIIASCTLLGLYLFFKVYFPNKSYAGSVLKTWKTQKSKKGKTAVIQNPTTRDSHSFPSEIFSQEYINLLLSMYFFVLGILALSHTISPFMNKFFPASFPNRQYQLLFTQGSGENKEEIINYEFDTKDLVCLGLSSIVGVWYLLRKHWIANNLFGLAFSLNGVELLHLNNVSTGCILLGGLFIYDVFWVFGTNVMVTVAKSFEAPIKLVFPQDLLEKGLEANNFAMLGLGDVVIPGIFIALLLRFDISLKKNTHTYFYTSFAAYIFGLGLTIFIMHIFKHAQDNLFTS

SEQ ID NO: 63660 - protein, 860 aa, Homo sapiens
MVGCGRCDDWFHGDCVGLSLSQAQQMGEEDKEYVCVKCCAEEDKKTEILDPDTLENQATVEFHSGDKTMECEKLGLSKHTTNDRTKYIDDTVKHKVKILKRESGEGRNSSDCRDNEIKKWQLAPLRKMGQPVLPRRSSEEKSEKIPKESTTVTCTGEKASKPGTHEKQEMKKKKVEKGVLNVHPAASASKPSADQIRQSVRHSLKDILMKRLTDSNLKVPEEKAAKVATKIEKELFSFFRDTDAKYKNKYRSLMFNLKDPKNNILFKKVLKGEVTPDHLIRMSPEELASKELAAWRRRENRHTIEMIEKEQREVERRPITKITHKGEIEIESDAPMKEQEAAMEIQEPAANKSLEKPEGSEKQKEEVDSMSKDTTSQHRQHLFDLNCKICIGRMAPPVDDLSPKKVKVVVGVARKHSDNEAESIADALSSTSNILASEFFEEEKQESPKSTFSPAPRPEMPGTVEVESTFLARLNFIWKGFINMPSVAKFVTKAYPVSGSPEYLTEDLPDSIQVGGRISPQTVWDYVEKIKASGTKEICVVRFTPVTEEDQISYTLLFAYFSSRKRYGVAANNMKQVKDMYLIPLGATDKIPHPLVPFDGPGLELHRPNLLLGLIIRQKLKRQHSACASTSHIAETPESAPPIALPPDKKSKIEVSTEEAPEEENDFFNSFTTVLHKQRNKPQQNLQEDLPTAVEPLMEVTKQEPPKPLRFLPGVLIGWENQPTTLELANKPLPVDDILQSLLGTTGQVYDQAQSVMEQNTVKEIPFLNEQTNSKIEKTDNVEVTDGENKEIKVKVDNISESTDKSAEIETSVVGSSSISAGSLTSLSLRGKPPDVSTEAFLTNLSIQSKQEETVESKEK

SEQ ID NO: 63661 - protein, 430 aa, Homo sapiens
MEDSASASLSSAAATGTSTSTPAAPTARKQLDKEQVRKAVDALLTHCKSRKNNYGLLLNENESLFLMVVLWKIPSKELRVRLTLPHSIRSDSEDICLFTKDEPNSTPEKTEQFYRKLLNKHGIKTVSQIISLQTLKKEYKSYEAKLRLLSSFDFFLTDARIRRLLPSLIGRHFYQRKKVPVSVNLLSKNLSREINDCIGGTVLNISKSGSCSAIRIGHVGMQIEHIIENIVAVTKGLSEKLPEWESVKLLFVKTEKSAALPIFSSFVSNWDEATKRSLLNKKKKEARRKRRERNFEKQKERKKKRQQARKTASVLSKDDVAPESGDTTVKKPESKKEQTPEHGKKKRGRGKAQVKATNESEDEIPQLVPIGKKTPANEKVEIQKHATGKKSPAKSPNPSTPRGKKRKALPASETPKAAESETPGKSPEKK

SEQ ID NO: 63662 - protein, 159 aa, Homo sapiens
  MOD_RES (1)..(1): Any amino acid
XFKCHNCHRAYTDAASLEVHLSTHTVKHAKVYTCTICSRAYTSQQVQAAAAAAAVAQAQAQAQAQAQAQAQAQAQAQASQASQQQQQQQQQQQQQQQQPPPHFQSPGAAPQGGGGGDSNPNPPPQCSFDLTPYKTAEHHKDICLTVTTSTIQVEHLASS

SEQ ID NO: 63663 - protein, 69 aa, Homo sapiens
  MOD_RES (1)..(1): Any amino acid
XIFPPPPDDDIYDGIEEEDADDGSTLQVQEKSNTWSWGILKMLKGKDDRKKSIREKPKVSDSDNNEGSS

SEQ ID NO: 63664 - protein, 93 aa, Homo sapiens
SWSPVIQRCSQPYGFSLLISFFLKCVSETSQQPPRQKNTACPALQTRSTRPRFRLLAINPTREMELHLLFLKMTPPTTKPVMTDSKCLHVYFS

SEQ ID NO: 63665 - protein, 52 aa, Homo sapiens
CLEALGINSVRDLQTFSPKILEKELGISVAQRIQKLSFGEDNSPVILSGPPQ

SEQ ID NO: 63666 - protein, 186 aa, Homo sapiens
MPEPRGSSQLRVNAAFAARYNRYREREELQRPSSSDSEEDPEALEKQKKVRPMYLKDYERKVILEKAGKYVDEENSDGETSNHRLQETSSQSYVEEQKQLKESFRAFVEDSEDEDGAGEGGSSLLQKRAKTRQEKAQEEADYIEWLKGQKEIRNPDSLKELTHLKEYWNDPELDEGERFLRDYILN

SEQ ID NO: 63667 - protein, 303 aa, Homo sapiens
ECLNTDGSFACTCAPGYRPGPRGASCLDVDECSEEDLCQSGICTNTDGSFECICPPGHRAGPDLASCLDVDECRERGPALCGSQRCENSPGSYRCVRDCDPGYHAGPEGTCDDVNECETLQGVCGAALCENVEGSFLCVCPNSPEEFDPMTGRCVPPRTSADVDECQLFRDQVCKSGVCVNTAPGYSCYCSNGYYYHTQRLECIDNDECADEEPACEGGRCVNTVGSYHCTCEPPLVLDGSQRRCVSNESQSLDDNLGVCWQEVGADLVCSHPRLDRQATYTECCCLYGEAWGMDCALCPAQD

SEQ ID NO: 63668 - protein, 69 aa, Homo sapiens
MNKSQEQVSFKDVCVDFTQEEWYLLDPAQKILYRDVILENYSNLVSVGYCITKPEVIFKIEQGEEPWIL

SEQ ID NO: 63669 - protein, 596 aa, Homo sapiens
MAEDEPDAKSPKTGGRAPPGGAEAGEPTTLLQRLRGTISKAVQNKVEGILQDVQKFSDNDKLYLYLQLPSGPTTGDKSSEPSTLSNEEYMYAYRWIRNHLEEHTDTCLPKQSVYDAYRKYCESLACCRPLSTANFGKIIREIFPDIKARRLGGRGQSKYCYSGIRRKTLVSMPPLPGLDLKGSESPEMGPEVTPAPRDELVEAACALTCDWAERILKRSFSSIVEVARFLLQQHLISARSAHAHVLKAMGLAEEDEHAPRERSSKPKNGLENPEGGAHKKPERLAQPPKDLEARTGAGPLARGERKKSVVESSAPGANNLQVNALVARLPLLLPRAPRSLIPPIPVSPPILAPRLSSGALKVATLPLSSRAGAPPAAVPIINMILPTVPALPGPGPGPGRAPPGGLTQPRGTENREVGIGGDQGPHDKGVKRTAEVPVSEASGQAPPAKAAKQDIEDTASDAKRKRGRPRKKSGGSGERNSTPLKSAAAMESAQSSRLPWETWGSGGEGNSAGGAERPGPMGEAEKGAVLAQGQGDGTVSKGGRGPGSQHTKEAEDKIPLVPSKVSVIKGSRSQKEAFPLAKGEVDTAPQGNKDLK

SEQ ID NO: 63670 - protein, 166 aa, Homo sapiens
MLGLRPPLLALVGLLSLGCVLSQECTKFKVSSCRECIESGPGCTWCQKLNFTGPGDPDSIRCDTRPQLLMRGCAADDIMDPTSLAETQEDHNGGQKQLSPQKVTLYLRPGQAAAFNVTFRRAKGYPIDLYYLMDLSYSMLDDLRNVKKLGGDLLRALNEITESGRI

SEQ ID NO: 63671 - protein, 311 aa, Homo sapiens
MALLCLDGVFLSSAENDFVHRIQEELDRFLLQKQLSNRLRYLIHRTAENFDLLSSFSVGEGWKRRTVICHQDIRVPSSDGLSGPCRAPASCPSRYHGPRPISNQGAAAVPRGARAGRWYRGRKPDQPLYVPRVLRRQEEWGLTSTSVLKREAPAGRDPEEPGDVGAGDPNSDQGLPVLMTQGTEDLKGPGQRCENEPLLDPVGPEPLGPESQSGKGDMVEMATRFGSTLQLDLEKGKESLLEKRLVAEEEEDEEEVEEDGPSSCSEDDYSELLQEITDNLTKKEIQIEKIHLDTSSFVEELPGEKDLAHVV

SEQ ID NO: 63672 - protein, 144 aa, Homo sapiens
MDSNHQSNYKLSKTEKKFLRKQIKAKHTLLRHEGIETVSYATQSLVVANGGLGNGVSRNQLLPVLEKCGLVDALLMPPNKPYSFARYRTTEESKRAYVTLNGKEVVDDLGQKITLYLNFVEKVEGVEASSLTTRTHGSRRNNFF

SEQ ID NO: 63673 - protein, 75 aa, Homo sapiens
MTLKNREPVQLETLSIRGNNIRYFILPDSLPLDTLLVDVEPKVKSKKREAVAGRGRGRGRGRGRGRGRGRGGPRR

SEQ ID NO: 63674 - protein, 26 aa, Homo sapiens
MPDRTEKHSTMPDSPVDVKTQSRLTP

SEQ ID NO: 63675 - protein, 165 aa, Homo sapiens
  MOD_RES (1)..(1): Any amino acid
XMSGELQRKIGLKVLEMRGNAVVGYLQCFDLEGESGLVVRAIGTACTLDKLSSPAAFLPACNSPSKEMKEIPFNEDPNPNTHSSGPSTPLKNQTYSFSPSKSYSRQSSSSDTDLSLTPKTGMGSGSAGKEGGPFKALLRQQTQSALEQRMNQKLEMHGGQKSDKK

SEQ ID NO: 63676 - protein, 33 aa, Homo sapiens
MPRRKQQAPRRAADKSINWVEVLSTWWVENVLP

SEQ ID NO: 63677 - protein, 192 aa, Homo sapiens
VDGTFVLSCVATGSPVPTILWRKDGVLVSTQDSRIKQLENGVLQIRYAKLGDTGRYTCIASTPSGEATWSAYIEVQGKVNEFGVPVQPPRPTDPNLIPSAPSKPEVTDVSRNTVTLSWQPNLNSGATPTSYIIEAFSHASGSSWQTVAENVKTETSAIKGLKPNAIYLFLVRAANAYGISDPSQISDPVKTQ

SEQ ID NO: 63678 - protein, 234 aa, Homo sapiens
MASVLSYESLVHAVAGAVGSVTAMTVFFPLDTARLRLQGVVNVLLTTPLWVVNTRLKLQGAKFRNEDIVPTNYKGIIDAFHQIIRDEGISALWNGTFPSLLLVFNPAIQFMFYEGLKRQLLKKRMKLSSLDVFIIGAVAKAIATTVTYPLQTVQSILRFGRHRLNPENRTLGSLRNILYLLHQRVRRFGIMGLYKGLEAKLLQTVLTAALMFLVYEKLTAATFTVMGLKRAHQH

SEQ ID NO: 63679 - protein, 211 aa, Homo sapiens
MDHAEENEILAATQRYYVERPIFSHPVLQERLHTKDKVPDSIADKLKQAFTCTPKKIRNIIYMFLPITKWLPAYKFKEYVLGDLVSGISTGVLQLPQGPFAVISLMIGGVAVRLVPDDIVIPGGVNATNGTEARDALRVKVAMSVTLLSGIIQFCLGVCRFGFVAIYLTEPLVRGFTTAAAVHVFTSMLKYLFGVKTKRYSGIFSVVYASG

SEQ ID NO: 63680 - protein, 134 aa, Homo sapiens
MSGHKCYPWDLQDRYAQDKSVVNKMQQKYWETKQAFIKATGKKEDEHVVASDADLDAKLELFHSIQRTCLDLSKAIVLYQKRICFLSQEENELGKFLRSQGFQDKTRAGKMMQATGKALCFSSQQRLALRNPLC

SEQ ID NO: 63681 - protein, 68 aa, Homo sapiens
  MOD_RES (1)..(1): Any amino acid
XRHRARASRCPPPPRGAAVPRGGRWLTKSSLKGFGSWSPSPRLTWTSWHLRGNWIKPSCGSGWTSRRL

SEQ ID NO: 63682 - protein, 956 aa, Homo sapiens
  MOD_RES (1)..(1): Any amino acid
XDSMPAMQLASKDRVSERSSAGAHKTDCLKLAEAGETGRIILPNVNSDSVHTKSEKNFQAVSQGSVPSSVMSAVNTMCNTKTDVITSAADTTSVSSWGGSEVISSLSNTILASTSSECVSSKSVSQPVAQKQECKVSTTAPVTLASSKTGSVVQPSSGFSGTTDFIHLKKHKAALAAAQYKSSNASETEPNAIKNQTLSASLPLDSTVICSTINKANSVGNGQASQTSQPNYHTKLKKAWLTRHSEEDKNTNKMENSGNSVSEIIKPCSVNLIASTSSDIQNSVDSKIIVDKYVKDDKVNRRKAKRTYESGSESGDSDESESKSEQRTKRQPKPTYKKKQNDLQKRKGEIEEDLKPNGVLSRSAKERSKLKLQSNSNTKIAWKRAVRGVREMCDACEATLFNIHWVCQKCGFVVCLDCYKAKERKSSRDKELYAWMKCVKGQPHDHKHLMPTQIIPGSVLTDLLDAMHTLREKYGIKSHCHCTNKQNLQVGNFPTMNGVSQVLQNVLNHSNKISLCMPESQQQNTPPKSEKNGGSSPESDVGTDNKLTPPESQSPLHWLADLAEQKAREEKKENKELTLENQIKEEREQDNSESPNGRTSPLVSQNNEQGSTLRDLLTTTAGKLRVGSTDAGIAFAPVYSMGAPSSKSGRTMPNILDDIIASVVENKIPPSKTSKINVKPELKEEPEESIISAVDENNKLYSDIPHSWICEKHILWLKDYKNSSNWKLFKECWKQGQPAVVSGVHKKMNISLWKAESISLDFGDHQADLLNCKDSIISNANVKEFWDGFEEVSKRQKNKSGETVVLKLKDWPSGEDFKTMMPARYEDLLKSLPLPEYCNPEGKFNLASHLPGFFVRPDLGPRLCSAYGVVAAKDHDIGTTNLHIEVSDVVNILVYVGIAKGNGILSKAGILKKFEEEDLDDILRKRLKDSSEIPGALWHIYAGKDVDKIREFLQKV

SEQ ID NO: 63683 - protein, 125 aa, Homo sapiens
MVLLRVLILLLSWAAGMGGQYGNPLNKYIRHYEGLSYNVDSLHQKHQRAKRAVSHEDQFLRLDFHAHGRHFNLRMKRDTSLFSDEFKVETSNKVLDYDTSHIYTGHIYDYPHKYGPQGGCADHSV

SEQ ID NO: 63684 - protein, 129 aa, Homo sapiens
MPGRWRWQRDMHPARKLLSLLFLILMGTELTQDSAAPDSLLRSSKGSTRGSLAAIVIWRGKSESRIAKTPGIFRGGGTLVLPPTHTPEWLILPLGITLPLGAPETGGGDCAAETWKGSQRAGQLCALLA

SEQ ID NO: 63685 - protein, 257 aa, Homo sapiens
MACLMAAFSVGTAMNASSYSAEMTEPKSVCVSVDEVVSSNMEATETDLLNGHLKKVDNNLTEAQRFSSLPRRAAVNIEFRDLSYSVPEGPWWRKKGYKTLLKGISGKFNSGELVAIMGPSGAGKSTLMNILAGYRETGMKGAVLINGLPRDLRCFRKVSCYIMQDDMLLPHLTVQEAMMVKEILTALGLLSCANTRTGSLSGGQRKRLAIALELVNNPPVMFFDEPTSGLDSASCFQVVSLMKGLAQGGRSIICTIH

SEQ ID NO: 63686 - protein, 147 aa, Homo sapiens
LSLLKIQKELNDLARDPPAQCSAGPVGDDMFHWQATIMGPNDSPYQGGVFFLTIHFPTDYPFKPPKVAFTTRIYHPNINSNGSICLDILRSQWSPALTISKVLLSICSLLCDPNPDDPLVPEIARIYKTDREKYNRIAREWTQKYAM

SEQ ID NO: 63687 - protein, 195 aa, Homo sapiens
  MOD_RES (1)..(1): Any amino acid
XFIEGHVVIPRIHPNSICAANNTGVYILTSNTSQYDTYCFNASAPPEEDCTSVTDLPNAFDGPITITIVNRDGTRYVQKGEYRTNPEDIYPSNPTDDDVSSGSSSERSSTSGGYIFYTFSTVHPIPDEDSPWITDSTDRIPATKQSNSQSFSTSHEGLEEDKDHPTTSTLTSSNRNDVTGGRRDPNHSEGSTTLL

SEQ ID NO: 63688 - protein, 59 aa, Homo sapiens
MPPPADIVKVAIEWPGAYPKLMEIDQKKPLSAIIKEVCDGWSLANHEYFALQHADSSNF

SEQ ID NO: 63689 - protein, 813 aa, Homo sapiens
MPTSPGVDLQSPAAQDVLFSSPPQMHSSAIPLDFDVSSPLTYGTPSSRVEGTPRSGVRGTPVRQRPDLGSAQKGLQVDLQSDGAAAEDIVASEQSLGQKLVIWGTDVNVAACKENFQRFLQRFIDPLAKEEENVGIDITEPLYMQRLGEINVIGEPFLNVNCEHIKSFDKNLYRQLISYPQEVIPTFDMAVNEIFFDRYPDSILEHQIQVRPFNALKTKNMRNLNPEDIDQLITISGMVIRTSQLIPEMQEAFFQCQVCAHTTRVEMDRGRIAEPSVCGRCHTTHSMALIHNRSLFSDKQMIKLQESPEDMPAGQTPHTVILFAHNDLVDKVQPGDRVNVTGIYRAVPIRVNPRVSNVKSVYKTHIDVIHYRKTDAKRLHGLDEEAEQKLFSEKRVELLKELSRKPDIYERLASALAPSIYEHEDIKKGILLQLFGGTRKDFSHTGRGKFRAEINILLCGDPGTSKSQLLQYVYNLVPRGQYTSGKGSSAVGLTAYVMKDPETRQLVLQTGALVLSDNGICCIDEFDKMNESTRSVLHEVMEQQTLSIAKAGIICQLNARTSVLAAANPIESQWNPKKTTIENIQLPHTLLSRFDLIFLLLDPQDEAYDRRLAHHLVALYYQSEEQAEEELLDMAVLKDYIAYAHSTIMPRLSEEASQALIEAYVDMRKIGSSRGMVSAYPRQLESLIRLAEAHAKVRLSNKVEAIDVEEAKRLHREALKQSATDPRTGIVDISILTTGMSATSRKRKEELAEALKKLILSKGKTPALKYQQLFEDIRGQSDIAITKDMFEEALRALADDDFLTVTGKTVRLL

SEQ ID NO: 63690 - protein, 223 aa, Homo sapiens
MASQLTQRGALFLLFFLTPAVTPTWYAGSGYYPDESYNEVYAEEVPQAPALDYRVPRWCYTLNIQDGEATCYSPKGGNYHSSLGTRCELSCDRGFRLIGRRSVQCLPSRRWSGTAYCRQMRCHALPFITSGTYTCTNGVLLDSRCDYSCSSGYHLEGDRSRICMEDGRWSGGEPVCVDIDPPKIRCPHSREKMAEPEKLTARVYWDPPLVKDSADGTITRVTL

SEQ ID NO: 63691 - protein, 62 aa, Homo sapiens
  MOD_RES (1)..(1): Any amino acid
XSLEDFQHSKGKEPYSSSKYATDLLSVALNRNFNQQVLYSSVYVIKYLPHYMEVGLSITIFR

SEQ ID NO: 63692 - protein, 44 aa, Homo sapiens
MAFLMHLLVCVFGMGSWVTINGLWVELPLLVMELPEGWYLPSYL

SEQ ID NO: 63693 - protein, 73 aa, Homo sapiens
MNSKGQYPTQPTYPVQPPGNPVYPQTLHLPQAPPYTDAPPAYSEGLPQSPPCQPHFLEPLCIFPWPSLWLLGL

SEQ ID NO: 63694 - protein, 470 aa, Homo sapiens
MHSFLHQYTGSFKKPPLRRPHSVIGGSLGSFMAMPRNGSRLDIVHENLKMGSDGESDQASGTSSDEVQSPTGVCLRNRIHRRISMEDLNKRLSLPADIRIPDGYLEKLQINSPPFDQPMSRRSRRASLSEIGFGKMETYIKLEKLGEGTYATVYKGRSKLTENLVALKEIRLEHEEGAPCTAIREVSLLKDLKHANIVTLHDIVHTDKSLTLVFEYLDKDLKQYMDDCGNIMSMHNVKLFLYQILRGLAYCHRRKVLHRDLKPQNLLINEKGELKLADFGLARAKSVPTKTYSNEVVTLWYRPPDVLLGSSEYSTQIDMWGVGCIFFEMASGRPLFPGSTVEDELHLIFRLLGTPSQETWPGISSNEEFKNYNFPKYKPQPLINHAPRLDSEGIELITKFLQYESKKRVSAEEAMKHVYFRSLGPRIHALPESVSIFSLKEIQLQKDPGFRNSSYPETGVFVINHFTCRS

SEQ ID NO: 63695 - protein, 752 aa, Homo sapiens
MIKTIYKTPGMIKDEQEIVQKRTFTKWINSHLAKRKPPMVVDDLFEDMKDGVKLLALLEVLSGQKLPCEQGRRMKRIHAVANIGTALKFLEGRKSMHRGSPIKLVNINSTDIADGRPSIVLGLMWTIILYFQIEELTSNLPQLQSLSSSASSVDSIVSSETPSPPSKRKVTTKIQGNAKKALLKWVQYTAGKQTGIEVKDFGKSWRSGVAFHSVIHAIRPELVDLETVKGRSNRENLEDAFTIAETELGIPRLLDPEDVDVDKPDEKSIMTYVAQFLKHYPDIHNASTDGQEDDEILPGFPSFANSVQNFKREDRVIFKEMKVWIEQFERDLTRAQMVESNLQDKYQSFKHFRVQYEMKRKQIEHLIQPLHRDGKLSLDQALVKQSWDRVTSRLFDWHIQLDKSLPAPLGTIGAWLYRAEVALREEITVQQVHEETANTIQRKLEQHKDLLQNTDAHKRAFHEIYRTRSVNGIPVPPDQLEDMAERFHFVSSTSELHLMKMEFLELKYRLLSLLVLAESKLKSWIIKYGRRESVEQLLQNYVSFIENSKFFEQYEVTYQILKQTAEMYVKADGSVEEAENVMKFMNETTAQWRNLSVEVRSVRSMLEEVISNWDRYGNTVASLQAWLEDAEKMLNQSENAKKDFFRNLPHWIQQHTAMNDAGNFLIETCDEMVSRDLKQQLLLLNGRWRELFMEVKQYAQADEMDRMKKEYTDCVVTLSAFATEAHKKLSEPLEVSFMNVKLLIQDLEVRGF

SEQ ID NO: 63696 - protein, 451 aa, Homo sapiens
MKYILVTGGVISGIGKGIIASSVGTILKSCGLHVTSIKIDPYINIDAGTFSPYEHGEVFVLDDGGEVDLDLGNYERFLDIRLTKDNNLTTGKIYQYVINKERKGDYLGKTVQVVPHITDAIQEWVMRQALIPVDEDGLEPQVCVIELGGTVGDIESMPFIEAFRQFQFKVKRENFCNIHVSLVPQPSSTGEQKTKPTQNSVRELRGLGLSPDLVVCRCSNPLDTSVKEKISMFCHVEPEQVICVHDVSSIYRVPLLLEEQGVVDYFLRRLDLPIERQPRKMLMKWKEMADRYDRLLETCSIALVGKYTKFSDSYASVIKALEHSALAINHKLEIKYIDSADLEPITSQEEPVRYHEAWQKLCSAHGVLVPGGFGVRGTEGKIQAIAWARNQKKPFLGVCLGMQLAVVEFSRNVLGWQDANSTEFDPTTSHPVGNSMETQTTWKRGTATDLR

SEQ ID NO: 63697 - protein, 629 aa, Homo sapiens
MFGIQENIPRGGTTMKEEPLGSGMNPVRSWMHTAGVVDANTAAQSGVGLARAHFEKQPPSNLRKSNFFHFVLALYDRQGQPVEIERTAFVDFVEKEKEPNNEKTNNGIHYKLQLLYSNGVRTEQDLYVRLIDSMTKQAIVYEGQDKNPEMCRVLLTHEIMCSRCCDKKSCGNRNETPSDPVIIDRFFLKFFLKCNQNCLKNAGNPRDMRRFQVVVSTTVNVDGHVLAVSDNMFVHNNSKHGRRARRLDPSEGTAPSYLENATPCIKAISPSEGWTTGGATVIIIGDNFFDGLQVVFGTMLVWSELITPHAIRVQTPPRHIPGVVEVTLSYKSKQFCKGAPGRFVYTALNEPTIDYGFQRLQKVIPRHPGDPERLPKEVLLKRAADLVEALYGMPHNNQEIILKRAADIAEALYSVPRNHNQIPTLGNNPAHTGMMGVNSFSSQLAVNVSETSQANDQVGYSRNTSSVSPRGYVPSSTPQQSNYNTVSTSMNGYGSGAMASLGVPGSPGFLNGSSANSPYGIVPSSPTMAASSVTLPSNCSSTHGIFSFSPANVISAVKQKSAFAPVVRPQASPPPSCTSANGNGLQGSLLGAEDVAAEKTNWPFCEVGGIFHFDELMLKKGTGKLCLGW

SEQ ID NO: 63698 - protein, 1513 aa, Homo sapiens
MMIPSQISYPASQGAYYIPGQGRSTYVVPTQQYPVQPGAPGFYPGASPTEFGTYAGAYYPAQGVQQFPTGVAPTPVLMNQPPQIAPKRERKTIRIRDPNQGGKDITEEIMSGARTASTPTPPQTGGGLEPQANGETPQVAVIVRPDDRSQGAIIADRPGLPGPEHSPSESQPSSPSPTPSPSPVLEPGSEPNLAVLSIPGDTMTTIQMSVEESTPISRETGEPYRLSPEPTPLAEPILEVEVTLSKPVPESEFSSSPLQAPTPLASHTVEIHEPNGMVPSEDLEPEVESSPELAPPPACPSESPVPIAPTAQPEELLNGAPSPPAVDLSPVSEPEEQAKEVTASMAPPTIPSATPATAPSATSPAQEEEMEEEEEEEEGEAGEAGEAESEKGGEELLPPESTPIPANLSQNLEAAAATQVAVSVPKRRRKIKELNKKEAVGDLLDAFKEANPAVPEVENQPPAGSNPGPESEGSGVPPRPEEADETWDSKEDKIHNAENIQPGEQKYEYKSDQWKPLNLEEKKRYDREFLLGFQFIFASMQKPEGLPHISDVVLDKANKTPLRPLDPTRLQGINCGPDFTPSFANLGRTTLSTRGPPRGGPGGELPRGPQAGLGPRRSQQGPRKEPRKIIATVLMTEDIKLNKAEKAWKPSSKRTAADKDRGEEDADGSKTQDLFRRVRSILNKLTPQMFQQLMKQVTQLAIDTEERLKGVIDLIFEKAISEPNFSVAYANMCRCLMALKVPTTEKPTVTVNFRKLLLNRCQKEFEKDKDDDEVFEKKQKEMDEAATAEERGRLKEELEEARDIARRRSLGNIKFIGELFKLKMLTEAIMHDCVVKLLKNHDEESLECLCRLLTTIGKDLDFEKAKPRMDQYFNQMEKIIKEKKTSSRIRFMLQDVLDLRGSNWVPRRGDQGPKTIDQIHKEAEMEEHREHIKVQQLMAKGSDKRRGGPPGPPISRGLPLVDDGGWNTVPISKGSRPIDTSRLTKITKPGSIDSNNQLFAPGGRLSWGKGSSGGSGAKPSDAASEAARPATSTLNRFSALQQAVPTESTDNRRVVQRSSLSRERGEKAGDRGDRLERSERGGDRGDRLDRARTPATKRSFSKEVEERSRERPSQPEGLRKAASLTEDRDRGRDAVKREAALPPVSPLKAALSEEELEKKSKAIIEEYLHLNDMKEAVQCVQELASPSLLFIFVRHGVESTLERSAIAREHMGQLLHQLLCAGHLSTAQYYQGLYEILELAEDMEIDIPHVWLYLAELVTPILQEGGVPMGELFREITKPLRPLGKAASLLLEILGLLCKSMGPKKVGTLWREAGLSWKEFLPEGQDIGAFVAEQKVEYTLGEESEAPGQRALPSEELNRQLEKLLKEGSSNQRVFDWIEANLSEQQIVSNTLVRALMTAVCYSAIIFETPLRVDVAVLKARAKLLQKYLCDEQKELQALYALQALVVTLEQPPNLLRMFFDALYDEDVVKEDAFYSWESSKDPAEQQGKGVALKSVTAFFKWLREAEEESDHN

SEQ ID NO: 63699 - protein, 107 aa, Homo sapiens
TPGIRARSARLQWFCDRCVANNQVETLEKLVELTQKLFECDRDQMYYNLLKLYKINGDWQRADAVWNKIQEENVIPREKTLRLLAEILREGNQEVPFDVPEGHMIFS

SEQ ID NO: 63700 - protein, 556 aa, Homo sapiens
MSSSHSRAGQSAAGAAPGGGVDTRDAEMPATEKDLAEDAPWKKIQQNTFTRWCNEHLKCVSKRIANLQTDLSDGLRLIALLEVLSQKKMHRKHNQRPTFRQMQLENVSVALEFLDRESIKLVSIDSKAIVDGNLKLILGLIWTLILHYSISMPMWDEEEDEEAKKQTPKQRLLGWIQNKLPQLPITNFSRDWQSGRALGALVDSCAPGLCPDWDSWDASKPVTNAREAMQQADDWLGIPQVITPEEIVDPNVDEHSVMTYLSQFPKAKLKPGAPLRPKLNPKKARAYGPGIEPTGNMVKKRAEFTVETRSAGQGEVLVYVEDPAGHQEEAKVTANNDKNRTFSVWYVPEVTGTHKVTVLFAGQHIAKSPFEVYVDKSQGDASKVTAQGPGLEPSGNIANKTTYFEIFTAGAGTGEVEVVIQDPMGQKGTVEPQLEARGDSTYRCSYQPTMEGVHTVHVTFAGVPIPRSPYTVTVGQGRPGPDCPLLWHCSLGLPQEGDPLGQSRCSPPRGPYSLSFYCLGTCCFSSPAGALPPLLSSPLSISLLTLSPSEELAPAV

SEQ ID NO: 63701 - protein, 597 aa, Homo sapiens
MDEVEQDQHEARLKELFDSFDTTGTGSLGQEELTDLCHMLSLEEVAPVLQQTLLQDNLLGRVHFDQFKEALILILSRTLSNEEHFQEPDCSLEAQPKYVRGGKRYGRRSLPEFQESVEEFPEVTVIEPLDEEARPSHIPAGDCSEHWKTQRSEEYEAEGQLRFWNPDDLNASQSGSSPPQDWIEEKLQEVCEDLGITRDGHLNRKKLVSICEQYGLQNVDGEMLEEVFHNLDPDGTMSVEDFFYGLFKNGKSLTPSASTPYRQLKRHLSMQSFDESGRRTTTSSAMTSTIGFRVFSCLDDGMGHASVERILDTWQEEGIENSQEILKALDFSLDGNINLTELTLALENELLVTKNSIHQAALASFKAEIRHLLERVDQVVREKEKLRSDLDKAEKLKSLMASEVDDHHAAIERRNEYNLRKLDEEYKERIAALKNELRKEREQILQQAGKQRLELEQEIEKAKTEENYIRDRLALSLKENSRLENELLENAEKLAEYENLTNKLQRNLENVLAEKFGDLDPSSAEFFLQEERLTQMRNEYERQCRVLQDQVDELQSELEEYRAQGRVLRLPLKNSPSEEVEANSGGIEPEHDATLCY

SEQ ID NO: 63702 - protein, 38 aa, Homo sapiens
MKVTLSALDTSESSFTPLVVIELAQDVKEETKEWLKNR

SEQ ID NO: 63703 - protein, 898 aa, Homo sapiens
MDFSSVVCLPPSVIAVNGLDGGGAGENDDEPVLVSLSAAPSPQSEAVANELQELSLQPELTLGLHPGRNPNLPPLSERKNVLQLKLQQRRTREELVSQGIMPPLKSPAAFHEQRRSLERARTEDYLKRKIRSRPERSELVRMHILEETSAEPSLQAKQLKLKRARLADDLNEKIAQRPGPMELVEKNILPVESSLKEAIIVGQVNYPKVADSSSFDEDSSDALSPEQPASHESQGSVPSPLEARVSEPLLSATSASPTQVVSQLPMGRDSREMLFLAEQPPLPPPPLLPPSLTNGTTIPTAKSTPTLIKQSQPKSASEKSQRSKKAKELKPKVKKLKYHQYIPPDQKQDRGAPPMDSSYAKILQQQQLFLQLQILNQQQQQHHNYQAILPAPPKSAGEALGSSGTPPVRSLSTTNSSSSSGAPGPCGLARQNSTSLTGKPGALPANLDDMKVAELKQELKLRSLPVSGTKTELIERLRAYQDQISPVPGAPKAPAATSILHKAGEVVVAFPAARLSTGPALVAAGLAPAEVVVATVASSGVVKFGSTGSTPPVSPTPSERSLLSTGDENSTPGDTFGEMVTSPLTQLTLQASPLQILVKEEGPRAGSCCLSPGGRAELEGRDKDQMLQEKDKQIEALTRMLRQKQQLVERLKLQLEQEKRAQQPAPAPAPLGTPVKQENSFSSCQLSQQPLGPAHPFNPSLAAPATNHIDPCAVAPGPPSVVVKQEALQPEPEPVPAPQLLLGPQGPSLIKGVAPPTLITDSTGTHLVLTVTNKNADSPGLSSGSPQQPSSQPGSPAPAPSAQMDLEHPLQPLFGTPTSLLKKEPPGYEEAMSQQPKQQENGSSSQQMDDLFDILIQSGGNPRNFSRFQGAAIPAREGEAIPEDSLWVPPGSTAITFC

SEQ ID NO: 63704 - protein, 758 aa, Homo sapiens
MTTAKEPSASGKSVQQQEQELVGSNPPQRNWKGIAIALLVILVICSLIVTSVILLTPAEDNSLSQKKKVTVEDLFSEDFKIHDPEAKWISDTEFIYREQKGTVRLWNVETNTSTVLIEGKKIESLRAIRYEISPDREYALFSYNVEPIFIFENNIYYCAHVGKQAIRVVSTGKEGVIYNGLSDWLYEEEILKTHIAHWWSPDGTRLAYAAINDSRVPIMELPTYTGSIYPTVKPYHYPKAGSENPSISLHVIGLNGPTHDLEMMPPDDPRMREYYITMVKWATSTKVAVTWLNRAQNVSILTLCDATTGVCTKKHEDESEAWLHRQNEEPVFSKDGRKFFFIRAIPQGGRGKFYHITVSSSQPNSSNDNIQSITSGDWDVTKILAYDEKGNKIYFLSTEDLPRRRQLYSANTVGNFNRQCLSCDLVENCTYFSASFSHSMDFFLLKCEGPGVPMVTVHNTTDKKKMFDLETNEHVKKAINDRQMPKVEYRDIEIDDYNLPMQILKPATFTDTTHYPLLLVVDGTPGSQSVAEKFEVSWETVMVSSHGAVVVKCDGRGSGFQGTKLLHEVRRRLGLLEEKDQMEAVRTMLKEQYIDRTRVAVFGKDYGGYLSTYILPAKGENQGQTFTCGSALSPITDFKLYASAFSERYLGLHGLDNRAYEMTKVAHRVSALEEQQFLIIHPTADEKIHFQHTAELITQLIRGKANYSLQIYPDESHYFTSSSLKQHLYRSIINFFVECFRIQDKLLTVTAKEDEEED

SEQ ID NO: 63705 - protein, 602 aa, Homo sapiens
MLAFAARTVVKPLGFLKPFSLMKASSRFKAHQDALPRLPVPPLQQSLDHYLKALQPIVSEEEWAHTKQLVDEFQASGGVGERLQKGLERRARKTENWLSEWWLKTAYLQYRQPVVIYSSPGVMLPKQDFVDLQGQLRFAAKLIEGVLDFKVMIDNETLPVEYLGGKPLCMNQYYQILSSCRVPGPKQDTVSNFSKTKKPPTHITVVHNYQFFELDVYHSDGTPLTADQIFVQLEKIWNSSLQTNKEPVGILTSNHRNSWAKAYNTLIKDKVNRDSVRSIQKSIFTVCLDATMPRVSEDVYRSHVAGQMLHGGGSRLNSGNRWFDKTLQFIVAEDGSCGLVYEHAAAEGPPIVTLLDYVIEYTKKPELVRSPLVPLPMPKKLRFNITPEIKSDIEKAKQNLSIMIQDLDITVMVFHHFGKDFPKSEKLSPDAFIQMALQLAYYRIYGQACATYESASLRMFHLGRTDTIRSASMDSLTFVKAMDDSSVTEHQKVELLRKAVQAHRGYTDRAIRGEAFDRHLLGLKLQAIEDLVPAKTDCVMFFGPVVPDGYGVCYNPMEAHINFSLSAYNSCAETNAARLAHYLEKALLDMRALLQSHPRAKL

SEQ ID NO: 63706 - protein, 116 aa, Homo sapiens
GMTIVYKNSIDLFLYVVGSSYENELMLMSVLTCLFESLNHMLRKNVEKRWLLENMDGAFLVLDEIVDGGVILESDPQQVIQKVNFRADDGGLTEQSVAQVSLLRLILLVWNFPPWR

SEQ ID NO: 63707 - protein, 263 aa, Homo sapiens
MDEATWYLDSDDSSPLGSPSTPPALNGNPPRPSLEPEEPKRPVPAERGSSSGTPKLIQRALLRGTALLASLGLGRDLQPPGGPGRERGESPTTPPTPTPAPCPTEPPPSPLICFSLKTPDSPPTPAPLLLDLGIPVGQRSAKSPRREEEPRGGTVSPPPGTSRSAPGTPGTPRSPPLGLISRPRPSPLRSRIDPWSFVSAGPRPSPLPSPQPAPRRAPWTLFPDSDPFWDSPPANPFQGGPQDCRAQTKDMGAQAPWVPEAGP

SEQ ID NO: 63708 - protein, 144 aa, Homo sapiens
MGSNLSPQLCLMPFILGLLSGGVTTTPWSLARPQGSCSLEGVEIKGGSFRLLQEGQALEYVCPSGFYPYPVQTRTCRSTGSWSTLKTQDQKTVRKAECRAIHCPRPHDFENGEYWPRSPYYNVSDEISFHCYDGYTLRGSANRT

SEQ ID NO: 63709 - protein, 2384 aa, Homo sapiens
  MOD_RES (1)..(1): Any amino acid
XFQSPESWKEHKPSSIDRRASDSVFQPKSLEFTKSGPWESEFGQPELGSNDIQDKNEESLPFQNLPMEKSPLPNTSPQGTNHLIEDFASLWHSGRSPTAMPEPWGNPTDDGEPAAVAPFPAWSAFGKEDHDEALKNTWNLHPTSSKTPSVRDPNEWAMAKSGFAFSSSELLDNSPSEINNEAAPEIWGKKNNDSRDHIFAPGNPSSDLDHTWTNSKPPKEDQNGLVDPKTRGKVYEKVDSWNLFEENMKKGGSDVLVPWEDSFLSYKCSDYSASNLGEDSVPSPLDTNYSTSDSYTSPTFAGDEKETEHKPFAKEEGFESKDGNSTAEETDIPPQSLQQSSRNRISSGPGNLDMWASPHTDNSSEINTTHNLDENELKTEHTDGKNISMEDDVGESSQSSYDDPSMMQLYNETNRQLTLLHSSTNSRQTAPDSLDLWNRVILEDTQSTATISDMDNDLDWDDCSGGAAIPSDGQTEGYMAEGSEPETRFTVRQLEPWGLEYQEANQVDWELPASDEHTKDSAPSEHHTLNEKSGQLIANSIWDSVMRDKDMSSFMLPGSSHITDSEQRELPPEIPSHSANVKDTHSPDAPAASGTSESEALISHLDKQDTERETLQSDAASLATRLENPGYFPHPDPWKGHGDGQSESEKEAQGATDRGHLDEEEVIASGVENASGISEKGQSDQELSSLVASEHQEICIKSGKISSLAVTFSPQTEEPEEVLEYEEGSYNLDSRDVQTGMSADNLQPKDTHEKHLMSQRNSGETTETSDGMNFTKYVSVPEKDLEKTEECNFLEPENVGGGPPHRVPRSLDFGDVPIDSDVHVSSTCSEITKNLDVKGSENSLPGAGSSGNFDRDTISSEYTHSSASSPELNDSSVALSSWGQQPSSGYQEENQGNWSEQNHQESELITTDGQVEIVTKVKDLEKNRINEFEKSFDRKTPTFLEIWNDSVDGDSFSSLSSPETGKYSEHSGTHQESNLIASYQEKNEHDISATVQPEDARVISTSSGSDDDSVGGEESIEEEIQVANCHVAEDESRAWDSLNESNKFLVTADPKSENIYDYLDSSEPAENENKSNPFCDNQQSSPDPWTFSPLTETEMQITAVEKEKRSSPETGTTGDVAWQISPKASFPKNEDNSQLEMLGFSADSTEWWKASPQEGRLIESPFERELSDSSGVLEINSSVHQNASPWGVPVQGDIEPVETHYTNPFSDNHQSPFLEGNGKNSHEQLWNIQPRQPDPDADKFSQLVKLDQIKEKDSREQTFVSAAGDELTPETPTQEQCQDTMLPVCDHPDTAFTHAEENSCVTSNVSTNEGQETNQWEQEKSYLGEMTNSSIATENFPAVSSPTQLIMKPGSEWDGSTPSEDSRGTFVPDILHGNFQEGGQLASAAPDLWIDAKKPFSLKADGENPDILTHCEHDSNSQASDSPDICHDSEAKQETEKHLSACMGPEVESSELCLTEPEIDEEPIYEPGREFVPSNAELDSENATVLPPIGYQADIKGSSQPASHKGSPEPSEINGDNSTGLQVSEKGASPDMAPILEPVDRRIPRIENVATSIFVTHQEPTPEGDGSWISDSFSPESQPGARALFDGDPHLSTENPALVPDALLASDTCLDISEAAFDHSFSDASGLNTSTGTIDDMSKLTLSEGHPETPVDGDLGKQDICSSEASWGDFEYDVMGQNIDEDLLREPEHFLYGGDPPLEEDSLKQSLAPYTPPFDLSYLTEPAQSAETIEEAGSPEDESLGCRAAEIVLSALPDRRSEGNQAETKNRLPGSQLAVLHIREDPESVYLPVGAGSNILSPSNVDWEVETDNSDLPAGGDIGPPNGASKEISELEEEKTIPTKEPEQIKSEYKEERCTEKNEDRHALHMDYILVNREENSHSKPETCEERESIAELELYVGSKETGLQGTQLASFPDTCQPASLNERKGLSAEKMSSKSDTRSSFESPAQDQSWMFLGHSEVGDPSLDARDSGPGWSGKTVEPFSELGLGEGPQLQILEEMKPLESLALEEASGPVSQSQKSKSRGRAGPDAVTLQAVTHDNEWEMLSPQPVQKNMIPDTEMEEETEFLELGTRISRPNGLLSEDVGMDIPFEEGVLSPSAADMRPEPPNSLDLNDTHPRRIKLTAPNINLSLDQSEGSILSDDNLDSPDEIDINVDELDTPDEADSFEYTGHDPTANKDSGQESESIPEYTAEEEREDNRLWRTVVIGEQEQRIDMKVIEPYRRVISHGGDSGYYGDGLNAIIVFAACFLPDSSRADYHYVMENLFLYVISTLELMVAEDYMIVYLNGATPRRRMPGLGWMKKCYQMIDRRLRKNLKSFIIVHPSWFIRTILAVTRPFISSKFSSKIKYVNSLSELSGLIPMDCIHIPESIINIDLKLKEKP

SEQ ID NO: 63710 - protein, 189 aa, Homo sapiens
MWLKVGGLLRGTGGQLGQTVGWPCGALGPGPHRWGPCGGSWAQKFYQDGPGRGLGEEDIRRAREARPRKTPRPQLSDRSRERKVPASRISRLANFGGLAVGLGLGVLAEMAKKSMPGGRLQSEGGSGLDSSPFLSEANAERIVQTLCTVRGAALKVGQMLSIQASSALSCSTSLSGSARAPTSCPAGRC

SEQ ID NO: 63711 - protein, 192 aa, Homo sapiens
  MOD_RES (1)..(1): Any amino acid
XMAEDEEGYRKLIDQKKDKRLAYLLQQTDEYVANLTELVRQHKAAQVAKEKKKKKKKKAENAEGQTPAIGPDGEPLDETSQMSDLPVKVIHVESGKILTGTDAPKAGQLEAWLEMNPGYEVAPRSDSEESGSEEEEEEEEEEQPQAAQPPTLPVEEKKKIPDPDSDDVSEVDARHIIESKVWSGWCPCTTTT

SEQ ID NO: 63712 - protein, 559 aa, Homo sapiens [sequence omitted]

SEQ ID NO: 63713 - protein, 84 aa, Homo sapiens
MSKGRAEAAAGAAGILLRYLQEQNRPYSSQDVFGNLQREHGLGKAVVVKTLEQLAQQGKIKEKMYGKQKIYFADQTLWRLWGPV

SEQ ID NO: 63714 - protein, 17 aa, Homo sapiens
  MOD_RES (1)..(1): Any amino acid
XGPRSGNEKHGNESRIY

SEQ ID NO: 63715 - protein, 139 aa, Homo sapiens
MGAARGSPARPRRLPLLSVLLLPLLGGTQTAIVFIKQPSSQDALQGRRALLRCEVEAPGPVHVYWLLDGAPVQDTERRFAQGSSLSFAAVDRLQDSGTFQCVARDDVTGEEARSANASFNIKCESQGGCAQSPCQTLND

SEQ ID NO: 63716 - protein, 374 aa, Homo sapiens
MAEERPGAWFGFGFCGFGQELGSGRGRQVHSPSPLRAGVDICRVSASWSYTAFVTRGGRLELSGSASGAAGRCKDAWASEGLLAVLRAGPGPEALLQVWAAESALRGEPLWAQNVVPEAEGEDDPAGEAQAGRLPLLPCARAYVSPRAPFYRPLAPELRARQLELGAEHALLLDAAGQVFSWGGGRHGQLGHGTLEAELEPRLLEALQGLVMAEVAAGGWHSVCVSETGDIYIWGWNESGQLALPTRNLAEDGETVAREELNEDGSQVKRTGGAEDGAPAPFIAVQPFPALLDLPMGSDAVKASCGSRHTAVVTRTGELYTWGWGKYGQLGHEDTTSLDRPRRVEYFVDKQLQVKAVTCGPWNTYVYAVEKGKS

SEQ ID NO: 63717 - protein, 446 aa, Homo sapiens
MPHQLSQNWNLVCGDGWKVPLEQVSHLLGWLLGCVILGAGCDRFGRRAVFVASLVLTTGLGASEALAASFPTLLVLRLLHGGTLAGALLALYLARLELCDPPHRLAFSMGAGLFSVVGTLLLPGLAALVQDWRLLQGLGALMSGLLLLFWGFPALFPESPCWLLATGQVARARKILWRFAEASGVGPGDSSLEENSLATELTMLSARSPQPRYHSPLGLLRTRVTWRNGLILGFSSLVGGGIRASFRRSLAPQVPTFYLPYFLEAGLEAAALVFLLLTADCCGRRPVLLLGTMVTGLASLLLLAGAQYLPGWTVLFLSVLGLLASRAVSALSSLFAAEVFPTVIRGAGLGLVLGAGFLGQAAGPLDTLHGRQGFFLQQVVFASLAVLALLCVLLLPESRSRGLPQSLQDADRLRRSPLLRGRPRQDHLPLLPPSNSYWAGHTPEQH

SEQ ID NO: 63718 - protein, 170 aa, Homo sapiens
MESALTARDRVGVQDFVLLENFTSEAAFIENLRRRFRENLIYTYIGPVLVSVNPYRDLQIYSRQHMERYRGVSFYEVPPHLFAVADTVYRALRTERRDQAVMISGESGAGKTEATKRLLQFYAETCPAPERGGAVRDRLLQSNPVLEAFGNAKTLRNDNSSRFGKYMDVQ

SEQ ID NO: 63719 - protein, 390 aa, Homo sapiens
MDRGGSQPRAGTGYASPDRTHVLAAGKAEETLEAWRPPPPCLTSLASCVPASSVLPTDRNLPTPTSAPTPGLAQGVHAPSTCSYMEATASSRARISRSISLGDSEGPIVATLAQPLRRPSSVGELASLGQELQAITTATTPSLDSEGQEPALRSWGNHEARANLRLTLSSACDGLLQPPVDTQPGVTVPAVSFPAPSPVEESALRLHGSAFRPSLPAPESPGLPAHPSNPQLPEARPGIPGGTASLLEPTSGALGLLQGSPARWSEPWVPVEALPPSPLELSRVGNILHRLQTTFQEALDLYRVLVSSGQVDTGQQQARTELVSTFLWIHSQLEAECLVGTSVAPAQALPSPGPPSPPTLYPLASPDLQALLEHYSELLVQAVRRKARGH

SEQ ID NO: 63720 - protein, 223 aa, Homo sapiens
  MOD_RES (1)..(1): Any amino acid
XSEEELPAAEALVQLPFQTLPPPQTVAVNLQVQPPAPVDPPVGMHLNQCHLHKVFSLKVYQVEDVCEEEMPEESDECVRMDRTPPPPTLSPAAITVGRGEDLTSEHPLLEQVELPAVASVSASVIKSPSDPSHVSVPPPPLLLPAATTRSNSTSMHSSIPSIENKPPQAIVKPQILTHVIEGFVIQEGLEPFPVSSKHICVCVCNLYNIILKVTYYCSLIKSL

SEQ ID NO: 63721 - protein, 105 aa, Homo sapiens
MPWDARRPGGGADGGPEASGAARSRAQKQCRKSSFAFYQAVRDLLPVWLLEDMRASEAFHWDERGRAAAYSPSEALLYALVHDHQAYAHYLLATFPRRALAPPSA

SEQ ID NO: 63722 - protein, 129 aa, Homo sapiens
MSLLRSLRVFLVARTGSYPVRSPGAGWVSSASVAPAKAHILCWAPSVCLGLQQGAPHEAAAENRLLLCKLQESSGDLWRGPQTGRDLAPQGGPEGGLEQSCQAPREEDQRRPDWAVAGRKHNCISRGKL

SEQ ID NO: 63723 - protein, 13 aa, Homo sapiens
MQRNASVPNLRGS

SEQ ID NO: 63724 - protein, 17 aa, Homo sapiens
MAISQHQFYLDRKQSKV

SEQ ID NO: 63725 - protein, 187 aa, Homo sapiens
  MOD_RES (1)..(1): Any amino acid
XYERLQRAEAQGKQEVESLREKLLVAENRLQAVEALCSSQHTHMIESNDISEETIRTKETVEGAVLASLYPLSRNILCRPAGQAEQEGQRGDSLDLPDRDAQGPTLESKCKSGEKKVDALLKEKRRLEAELETVSRKTHDASGQLVLISQELLRKERSLNELRVLLLEANRHSPGPERDLSREVHKA

SEQ ID NO: 63726 - protein, 72 aa, Homo sapiens
  MOD_RES (1)..(1): Any amino acid
XGDTLEEAFEQCAMAMFGYMTDTGTVEPLQTVEVETQGDDLQSLLFHFLDEWLYKFSADEFFIPRKLCAIVF

SEQ ID NO: 63727 - protein, 207 aa, Homo sapiens
  MOD_RES (1)..(1): Any amino acid
XNSLGVEKAGAAACAPGPCRACVWVVVSAMVLASLELLREQWIRAKYERQEFIYPEKQEPYSAGYREGFLWKRGRDNGQFLSRKFVLTEREGALKYFNRNDAKEPKAVMKIEHLNATFQPAKIGHPHGLQVTYLKDNSTRNIFIYHEDGKEIVDWFNALRAARFHYLQVAFPGAGDADLVPKLSRNYLKEGYMEKTGPKQTEGFRKR

SEQ ID NO: 63728 - protein, 154 aa, Homo sapiens
  MOD_RES (1)..(1): Any amino acid
XKGDKAKSESLELPQAAPPQIYHEKQRRELCALHALNNVFQDSNAFTRDTLQEIFQRDVGVIALTNVMGFIMNLPSSLCWGPLKLPLKRQHWICVREVGGAYYNLDSKLKMPEWIGGESELRKFLKHHLRGKNCELLLVVPEEVEAHQSWRTDV

SEQ ID NO: 63729 - protein, 646 aa, Homo sapiens
MRPRKAFLLLLLLGLVQLLAVAGAEGPDEDSSNRENAIEDEEEEEEEDDDEEEDDLEVKEENGVLVLNDANFDNFVADKDTVLLEFYAPWCGHCKQFAPEYEKIANILKDKDPPIPVAKIDATSASVLASRFDVSGYPTIKILKKGQAVDYEGSRTQEEIVAKVREVSQPDWTPPPEVTLVLTKENFDEVVNDADIILVEFYAPWCGHCKKLAPEYEKAAKELSKRSPPIPLAKVDATAETDLAKRFDVSGYPTLKIFRKGRPYDYNGPREKYGIVDYMIEQSGPPSKEILTLKQVQEFLKDGDDVIIIGVFKGESDPAYQQYQDAANNLREDYKFHHTFSTEIAKFLKVSQGQLVVMQPEKFQSKYEPRSHMMDVQQGSTQDSAIKDFVLKYALPLVGHRKVSNDAKRYTRRPLVVVYYSVDFSFDYRAATQFWRSKVLEVAKDFPEYTFAIADEEDYAGEVKDLGLSESGEDVNAAILDESGKKFAMEPEEFDSDTLREFVTAFKKGKLKPVIKSQPVPKNNKGPVKVVVGKTFDSIVMDPKKDVLIEFYAPWCGHCKQLEPVYNSLAKKYKGQKGLVIAKMDATANDVPSDRYKVEGFPTIYFAPSGDKKNPVKFEGGDRDLEHLSKFIEEHATKLSRTKEEL

SEQ ID NO: 63730 - protein, 34 aa, Homo sapiens
MNVRRVESISAQLEEASSTGEAVIEHSLCTKCCP

SEQ ID NO: 63731 - protein, 267 aa, Homo sapiens
HTCLCQAVSTLASENERTKDLIIEQRFHRTIIGQKGERIREIRDKFPEVIINFPDPAQKSDIVQLRGPKNEVEKCTKYMQKMVADLVENSYSISVPIFKQFHKNIIGKGGANIKKIREESNTKIDLPAENSNSETIIITGKRANCEAARSRILSIQKDLANIAEVEVSIPAKLHNSLIGTKGRLIRSIMEECGGVHIHFPVEGSGSDTVVIRGPSSDVEKAKKQLLHLAEEKQTKSFTVDIRAKPEYHKFLIGKGGGKIRKVRDSTG

SEQ ID NO: 63732 - protein, 179 aa, Homo sapiens
MKKFKRRLSLTLRGSQTIDESLSELAEQMTIEENSSKDNEPIVKNGRPPTSHSMHSFLHQYTGSFKKPPLRRPHSVIGGSLGSFMAMPRNGSRLDIVHENLKMGSDGESDQASGTSSDEVQSPTGVCLRNRIHRRISMEDLNKRLSLPADIRIPDGYLEKLQINSPPFDQPMSRRSRRA

SEQ ID NO: 63733 - protein, 684 aa, Homo sapiens
MLVLSILLYTCEMFQDSVAFEDVAVTFTQEEWALLDPSQKNLCRDVMQETFRNLASIGKKWKPQNIYVEYENLRRNLRIVGERLFESKEGHQHGEILTQVPDDMLKKTTTGVKSCESSVYGEVGSAHSSLNRHIRDDTGHKAYEYQEYGQKPYKCKYCKKPFNCLSSVQTHERAHSGRKLYVCEECGKTFISHSNLQRHRIMHRGDGPYKCKFCGKALMFLSLYLIHKRTHTGEKPYQCKQCGKAFSHSSSLRIHERTHTGEKPYKCNECGKAFHSSTCLHAHKRTHTGEKPYECKQCGKAFSSSHSFQIHERTHTGEKPYECKECGKAFKCPSSVRRHERTHSRKKPYECKHCGKVLSYLTSFQNHLGMHTGEISHKCKICGKAFYSPSSLQTHEKTHTGEKPYKCNQCGKAFNSSSSFRYHERTHTGEKPYECKQCGKAFRSASLLQTHGRTHTGEKPYACKECGKPFSNFSFFQIHERMHREEKPYECKGYGKTFSLPSLFHRHERTHTGGKTYECKQCGRSFNCSSSFRYHGRTHTGEKPYECKQCGKAFRSASQLQIHGRTHTGEKPYECKQCGKAFGSASHLQMHGRTHTGEKPYECKQCGKSFGCASRLQMHGRTHTGEKPYKCKQCGKAFGCPSNLRRHGRTHTGEKPYKCNQCGKVFRCSSQLQVHGRAHCIDTP

SEQ ID NO: 63734 - protein, 58 aa, Homo sapiens
MDEQSVESIAEVFRCFICMEKLRDARLCPHCSKLCCFSCIRRWLTEQRAQCPHCRKGM

SEQ ID NO: 63735 - protein, 278 aa, Homo sapiens
  MOD_RES (1)..(1): Any amino acid
XTAPLGPSCPQPPPAPQPQARSRLNATASLEQERSERPRAPGPQAGPGPGVRDAAAPAEPQAQHTRSRERADGTGPTKGDMEIPFEEVLERAKAGDPKAQTEVGKHYLQLAGDTDEELNSCTAVDWLVLAAKQGRREAVKLLRRCLADRRGITSENEREVRQLSSETDLERAVRKAALVMYWKLNPKKKKQVAVAELLENVGQMEGRSQAPCPSPCRSRGACWSAWSAASPRTTSRWMTLWRSLRSTPRASSPAACSCRTTKMMTSWRGRALRTCHCV

SEQ ID NO: 63736 - protein, 30 aa, Homo sapiens
MSAELNVPIDPSAPACPEPGHKGMDYRDWV

SEQ ID NO: 63737 - protein, 23 aa, Homo sapiens
MKYITSLNEDSTVHGFLVQLPLD

SEQ ID NO: 63738 - protein, 119 aa, Homo sapiens
  MOD_RES (1)..(1): Any amino acid
XSVGREFIATTPSITTETISTTMIIGKDVLTSTYGATAETLSTSTTTHVTKTVKGGFSETRIEKRIIITGDEDVDQDQALALAIKEAKLQHPDMLVTKAVVYRETDPSPEERDKKPQES

SEQ ID NO: 63739 - protein, 175 aa, Homo sapiens
MEQFNPSLRNFIAMGKNYEKALAGVTYAAKGYFDALVKMGELASESQGSKELGDVLFQMAEVHRQIQNQLEEMLKSFHNELLTQLEQKVELDSRYLSAALKKYQTEQRSKGDALDKCQAELKKLRKKSQGSKNPQKYSDKELQYIDAISNKQGELENYVSDGYKTALTEERRRFC

SEQ ID NO: 63740 - protein, 186 aa, Homo sapiens
MATASPSVFLLMVNGQVESAQFPEYDDLYCKYCFVYGQDWAPTAGLEEGISQITSKSQDVRQALVWNFPIDVTFKSTNPYGWPQIVLSVYGPDVFGNDVVRGYGAVHVPFSPGRHKRTIPMFVPESTSKLQKFTSWFMGRRPEYTDPKVVAQGEGREAITAPRKAVFSVHGLTSPRALALVHIKGT

SEQ ID NO: 63741 - protein, 418 aa, Homo sapiens
MLRRALLCLAVAALVRADAPEEEDHVLVLRKSNFAEALAAHKYLLVEFYAPWCGHCKALAPEYAKAAGKLKAEGSEIRLAKVDATEESDLAQQYGVRGYPTIKFFRNGDTASPKEYTGFDEGRNNFEGEVTKENLLDFIKHNQLPLVIEFTEQTAPKIFGGEIKTHILLFLPKSVSDYDGKLSNFKTAAESFKGKILFIFIDSDHTDNQRILEFFGLKKEECPAVRLITLEEEMTKYKPESEELTAERITEFCHRFLEGKIKPHLMSQELPEDWDKQPVKVLVGKNFEDVAFDEKKNVFVEFYAPWCGHCKQLAPIWDKLGETYKDHENIVIAKMDSTANEVEAVKVHSFPTLKFFPASADRTVIDYNGERTLDGFKKFLESGGQDGAGDDDDLEDLEEAEEPDMEEDDDQKAVKDEL

SEQ ID NO: 63742 - protein, 158 aa, Homo sapiens
KVKRVIGVELCPEAVEDARVNAQDNELSNVEFHCGRAEDLVPTLVSRLASQHLVAILDPPRAGLHSKVILAIRRAKNLRRLLLCRAPSNRVKGIPFRPVKAVAVDLFPQTPHCEMLILFERVEHPNGTGVLGPHSPPAQPTPGPPDNTLQETGTFPSS

SEQ ID NO: 63743 - protein, 146 aa, Homo sapiens
LENLMLDKDGHIKITDFGLCKEGIKDGATMKTFCGTPEYLAPEVLEDNDYGRAVDWWGLGVVMYEMMCGRLPFYNQDHEKLFELILMEEIRFPRTLGPEAKSLLSGLLKKDPKQRLGGGSEDAKEIMQHRFFAGIVWQHVYEKKGP

SEQ ID NO: 63744 - protein, 176 aa, Homo sapiens
MTLFQEDLDPDSTTDVGDVTNTEEELIRECEEMWKDMEECQNKLSLIGTETLTDSNAQLSLLIMQVKCLTAELSQWQKKTPETIPLTEDVLITLGKEEFQKLRQDLEMVLSTKESKNEKLKEDLEREQRWLDEQQQIMESLNVLHSELKNKVETFSESRIFNELKTKMLNIKEYKE

SEQ ID NO: 63745 - protein, 1085 aa, Homo sapiens
MSAADEVDGLGVARPHYGSVLDNERLTAEEMDERRRGIWQSNKDTQEAQKFALGIFAINEAVESGDVGKTLSALRSPDVGLYGVIPECGETYHSDLAEAKKKKLAVGDNNSKWVKHWVKGGYYYYHNLETQEGGWDEPPNFVQNSMQLSREEIQSSISGVTAAYNREQLWLANEGLITRLQARCRGYLVRQEFRSRMNFLKKQIPAITCIQSQWRGYKQKKAYQDRLAYLRSHKDEVVKIQSLARMHQARKRYRDRLQYFRDHINDIIKIQAFIRANKARDDYKTLINAEDPPMVVVRKFVHLLDQSDQDFQEELDLMKMREEVITLIRSNQQLENDLNLMDIKIGLLVKNKITLQDVVSHSKKLTKKNKEQLSDMMMINKQKGGLKALSKEKREKLEAYQHLFYLLQTNPTYLAKLIFQMPQNKSTKFMDSVIFTLYNYASNQREEYLLLRLFKTALQEEIKSKVDQIQEIVTGNPTVIKMVVSFNRGARGQNALRQILAPVVKEIMDDKSLNIKTDPVDIYKSWVNQMESQTGEASKLPYDVTPEQALAHEEVKTRLDSSIRNMRAVTDKFLSAIVSSVDKIPYGMRFIAKVLKDSLHEKFPDAGEDELLKIIGNLLYYRYMNPAIVAPDAFDIIDLSAGGQLTTDQRRNLGSIAKMLQHAASNKMFLGDNAHLSIINEYLSQSYQKFRRFFQTACDVPELQDKFNVDEYSDLVTLTKPVIYISIGEIINTHTLLLDHQDAIAPEHNDPIHELLDDLGEVPTIESLIGESSGNLNDPNKEALAKTEVSLTLTNKFDVPGDENAEMDARTILLNTKRLIVDVIRFQPGETLTEILETPATSEQEAEHQRAMQRRAIRDAKTPDKMKKSKSVKEDSNLTLQEKKEKIQTGLKKLTELGTVDPKNKYQELINDIARDIRNQRRYRQRRKAELVKLQQTYAALNSKATFYGEQVDYYKSYIKTCLDNLASKGKVSKKPREMKGKKSKKISLKYTAARLHEKGVLLEIEDLQVNQFKNVIFEISPTEEVGDFEVKAKFMGVQMETFMLHYQDLLQLQYEGVAVMKLFDRAKVNVNLLIFLLNKKFYGK

SEQ ID NO: 63746 - protein, 84 aa, Homo sapiens
MDVAIEFCLEEWQCLDIAQQNLYRNVMLENYRNLVFLGIAVSKPDLITCLEQEKEPWEPMRRHEMVAKPPGGIVSLLNVFFDVQ

SEQ ID NO: 63747 - protein, 902 aa, Homo sapiens
MVRKKNPPLRNVASEGEGQILEPIGTESKVSGKNKEFSADQMSENTDQSDAAELNHKEEHSLHVQDPSSSSKKDLKSAVLSEKAGFNYESPSKGGNFPSFPHDEVTDRNMLAFSSPAAGGVCEPLKSPQRAEADDPQDMACTPSGDSLETKEDQKMSPKATEETGQAQSGQANCQGLSPVSVASKNPQVPSDGGVRLNKSKTDLLVNDNPDPAPLSPELQDFKCNICGYGYYGNDPTDLIKHFRKYHLGLHNRTRQDAELDSKILALHNMVQFSHSKDFQKVNRSVFSGVLQDINSSRPVLLNGTYDVQVTSGGTFIGIGRKTPDCQGNTKYFRCKFCNFTYMGNSSTELEQHFLQTHPNKIKASLPSSEVAKPSEKNSNKSIPALQSSDSGDLGKWQDKITVKAGDDTPVGYSVPIKPLDSSRQNGTEATSYYWCKFCSFSCESSSSLKLLEHYGKQHGAVQSGGLNPELNDKLSRGSVINQNDLAKSSEGETMTKTDKSSSGAKKKDFSSKGAEDNMVTSYNCQFCDFRYSKSHGPDVIVVGPLLRHYQQLHNIHKCTIKHCPFCPRGLCSPEKHLGEITYPFACRKSNCSHCALLLLHLSPGAAGSSRVKHQCHQCSFTTPDVDVLLFHYESVHESQASDVKQEANHLQGSDGQQSVKESKEHSCTKCDFITQVEEEISRHYRRAHSCYKCRQCSFTAADTQSLLEHFNTVHCQEQDITTANGEEDGHAISTIKEEPKIDFRVYNLLTPDSKMGEPVSESVVKREKLEEKDGLKEKVWTESSSDDLRNVTWRGADILRGSPSYTQASLGLLTPVSGTQEQTKTLRDSPNVEAAHLARPIYGLAVETKGFLQGAPAGGEKSGALPQQYPASGENKSKDESQSLLRVFESAWMTPEEQFSL

SEQ ID NO: 63748 - protein, 230 aa, Homo sapiens
  MOD_RES (1)..(1): Any amino acid
XGGVPVGLASKPFQILYGHTNEVLSVGISTELDMAVSGSRDGTVIIHTIQKGQYMRTLRPPCESSLFLTIPNLAISWEGHIVVYSSTEEKTTLKDKNALHLFSINGKYLGSQILKEQVSDICIIGEHIVTGSIQGFLSIRDLHSLNLSINPLAMRLPIHCVCVTKEYSHILVGLEDGKLIVVGVGKPAEMRSGQLSRKFWGSSKRLSQISAGETEYNTQDSKSRITKQQR

SEQ ID NO: 63749 - protein, 92 aa, Homo sapiens
EFSLEEWQCLDTAQQDLYRKVMLENYRNLVFLAGIAVSKPDLVTCLEQGKDPWNMKGHSTVVKPPGGDCSIFLMEHQGDVTLLPGPCPQRRL

SEQ ID NO: 63750 - protein, 1454 aa, Homo sapiens
  MOD_RES (1)..(1): Any amino acid
XRSMMSSYERSMMSYERSMMSPMAERSMMSAYERSMMSAYERSMMSPMAERSMMSAYERSMMSAYERSMMSPMADRSMMSMGADRSMMSSYSAADRSMMSSYSAADRSMMSSYTADRSMMSMAADSYTDSYTDTYTEAYMVPPLPPEEPPTMPPLPPEEPPMTPPLPPEEPPEGPALPTEQSALTAENTWPTEVPSSPSEESVSQPEPPVSQSEISEPSAVPTDYSVSASDPSVLVSEAAVTVPEPPPEPESSITLTPVESAVVAEEHEVVPERPVTCMVSETPAMSAEPTVLASEPPVMSETAETFDSMRASGHVASEVSTSLLVPAVTTPVLAESILEPPAMAAPESSAMAVLESSAVTVLESSTVTVLESSTVTVLEPSVVTVPEPPVVAEPDYVTIPVPVVSALEPSVPVLEPAVSVLQPSMIVSEPSVSVQESTVTVSEPAVTVSEQTQVIPTEVAIESTPMILESSIMSSHVMKGINLSSGDQNLAPEIGMQEIALHSGEEPHAEEHLKGDFYESEHGINIDLNINNHLIAKEMEHNTVCAAGTSPVGEIGEEKILPTSETKQRTVLDTYPGVSEADAGETLSSTGPFALEPDATGTSKGIEFTTASTLSLVNKYDVDLSLTTQDTEHDMVISTSPSGGSEADIEGPLPAKDIHLDLPSNNNLVSKDTEEPLPVKESDQTLAALLSPKESSGGEKEVPPPPKETLPDSGFSANIEDINEADLVRPLLPKDMERLTSLRAGIEGPLLASDVGRDRSAASPVVSSMPERASESSSEEKDDYEIFVKVKDTHEKSKKNKNRDKGEKEKKRDSSLRSRSKRSKSSEHKSRKRTSESRSRARKRSSKSKSHRSQTRSRSRSRRRRRSSRSRSKSRGRRSVSKEKRKRSPKHRSKSRERKRKRSSSRDNRKTVRARSRTPSRRSRSHTPSRRRRSRSVGRRRSFSISPSRRSRTPSRRSRTPSRRSRTPSRRSRTPSRRSRTPSRRSRTPSRRRRSRSVVRRRSFSISPVRLRRSRTPLRRRFSRSPIRRKRSRSSERGRSPKRLTDLDKAQLLEIAKANAAAMCAKAGVPLPPNLKPAPPPTIEEKVAKKSGGATIEELTEKCKQIAQSKEDDDVIVNKPHVSDEEEEEPPFYHHPFKLSEPKPIFFNLNIAAAKPTPPKSQVTLTKEFPVSSGSQHRKKEADSVYGEWVPVEKNGEENKDDDNVFSSNLPSEPVDISTAMSERALAQKRLSENAFDLEAMSMLNRAQERIDAWAQLNSIPGQFTGSTGVQVLTQEQLANTGAQAWIKKDQFLRAAPVTGGMGAVLMRKMGWREGEGLGKNKEGNKEPILVDFKTDRKGLVAVGERAQKRSGNFSAAMKDLSGKHPVSALMEICNKRRWQPPEFLLVHDSGPDHRKHFLFRVLINGSAYQPSFASPNKKHAKATAATVVLQAMGLVPKDLMANATCFRSASRR

SEQ ID NO: 63751 - protein, 217 aa, Homo sapiens
MLQGLLPVSLLLSVAVSAIKELPGVKKYEVVYPIRLHPLHKREAKEPEQQEQFETELKYKMTINGKIAVLYLKKNKNLLAPGYTETYYNSTGKEITTSPQIMDDCYYQGHILNEKVSDASISTCRGLRGYFSQGDQRYFIEPLSPIHRDGQEHALFKYNPDEKNYDSTCGMDGVLWAHDLQQNIALPATKLVKLKDRKVQEHEKYIEYYLVLDNGEF

SEQ ID NO: 63752 - protein, 193 aa, Homo sapiens
  MOD_RES (1)..(1): Any amino acid
XSSLRKEVCQLLPFLVRYAKTLYEEAEEANDLSQQVANLAISPTTPGPTWPGDALRLLLPGWCHLTVEDGPREILIKEGAPSLLCKYFLQQWELTSPGHDTSVLPDSVEIGLQTCCHIFLNLVVTAPGLIKRDACFTSLMNTLMTSLPALVQQQGRLLLAANVATLGLLMARLLSTSPGSISSQLPGAEHMPC

SEQ ID NO: 63753 - protein, 253 aa, Homo sapiens
GSAFNSPLRSPIRSANPTRPSSPVTSHISKVLFGEDDSLLRVDCIRYNRAVRDLGPVISTGLLHLAEDGVLSPLALTEGGKGSSPSIRPIQGSQGSSSPVEKEVVEATDSREKTGMVRPGEPLSGEKYSPKLPIARGALLLARPDQRCNAGFWQELLALLKCVEAEIANYEACLKEEVEKRKKFKIDDQRRTHNYDEFICTFISMLAQEGMLANLVEQNISVRRRQGVSIGRLHKQRKPDRRKRSRPYKAKRQ

SEQ ID NO: 63754 - protein, 111 aa, Homo sapiens
MAFEQLLDDYPKCFIVGADNVGSKQMQQIRMSLRGKAVVLMGKNTMMRKAIRGHLENNPALEKLLPHIRGNVGFVFTKEDLTEIRDMLLANKVPAAARAGAIAPCEVTVPA

SEQ ID NO: 63755 - protein, 156 aa, Homo sapiens
MAAAYLDPNLNHTPNSSTKTHLGTGMERSPGAMERVLKVFHYFESNSEPTTWASIIRHGDATDVRGIIQKIVDSHKVKHVACYGFRLSHLRSEEVHWLHVDMGVSSVREKYELAHPPEEWKYELRIRYLPKGFLNQFTEDKPTLNFFYQQVKSDYM

SEQ ID NO: 63756 - protein, 61 aa, Homo sapiens
GHMEGEVWGLAAHPLLPICATVSDDKTLRIWELSAQHRMLAVRKLKKDRVSLCHPVWSAMA

SEQ ID NO: 63757 - protein, 98 aa, Homo sapiens
  MOD_RES (1)..(1): Any amino acid
XDSSRTSIRSSQWSFSTISSSTQRSYNTCCSWTQHPLIQKNRRVVLASFLLLLLGLVLILVGVGLEATPSPVYHVIFIYCAVKGHRGFQFFYLPYFEK

SEQ ID NO: 63758 - protein, 42 aa, Homo sapiens
GCCQRAPDNCESHCAEKGSEGSLCQTQLPATPCFLPSNTVRT

SEQ ID NO: 63759 - protein, 154 aa, Homo sapiens
MGTSHPAFLVLGCLLTGLSLILCQLSLPSILPNENEKVVQLNSSFSLRCFGESEVSWQYPMSEEESSDVEIRNEENNSGLFVTVLEVSSASAAHTGLYTCYYNHTQTEENELEGRHIYIYVPDPDVAFVPLGMTDYLVIVEDDDSAIIPCRTTD

SEQ ID NO: 63760 - protein, 104 aa, Homo sapiens
MLENFTFQIFKIVGLDDIMDEGVVKESGNDTIDEEELILPNRNLRDKVEENSVRSPRKSPRLMAQEQVRSLRQSTIAKRSNAAPLSNTKKASGKTVSTAKAGVK

SEQ ID NO: 63761 - protein, 208 aa, Homo sapiens
MPAPIRLRELIRTIRTARTQAEEREMIQKECAAIRSSFREEDNTYRCRNVAKLLYMHMLGYPAHFGQLECLKLIASQKFTDKRIGYLGAMLLLDERQDVHLLMTNCIKNDLNHSTQFVQGLALCTLGCMGSSEMCRDLAGEVEKLLKTSNSYLRKKAALCAVHVIRKVPELMEMFLPATKNLLNEKNHGNVIWMTCLFMRHSSIFTVF

SEQ ID NO: 63762 - protein, 151 aa, Homo sapiens
MRTEAIARPLEINETEKVMRIAIKEILTQVQKTKDLLNNVASDEANLEAKIEKRKLELERNRKRLETLQSVRPCFMDEYEKTEEELQKQYDTYLEKFQNLTYLEQQLEDHHRMEQERFEEAKNTLCLIQNKLKEEEKRLLKSGSNDDSDID

SEQ ID NO: 63763 - protein, 171 aa, Homo sapiens
MAFVKSGWLLRQSTILKRWKKNWFDLWSDGHLIYYDDQTRQNIEDKVHMPMDCINIRTGQECRDTQPPDGKSKDCMLQIVCRDGKTISLCAESTDDCFRLMAMGHTVVRTRQELKLSTLRMGRRMPCPTSTHMQDFMDSSLLTKSSFESAIETTTATWHWACWQEQPRAWP

SEQ ID NO: 63764 - protein, 1887 aa, Homo sapiens
MGWGSRCCCPGRLDLLCVLALLGGCLLPVCRTRVYTNHWAVKIAGGFPEANRIASKYGFINIGQIGALKDYYHFYHSRTIKRSVISSRGTHSFISMEPKVEWIQQQVVKKRTKRDYDFSRAQSTYFNDPKWPSMWYMHCSDNTHPCQSDMNIEGAWKRGYTGKNIVVTILDDGIERTHPDLMQNYDALASCDVNGNDLDPMPRYDASNENKHGTRCAGEVAAAANNSHCTVGIAFNAKIGGVRMLDGDVTDMVEAKSVSFNPQHVHIYSASWGPDDDGKTVDGPAPLTRQAFENGVRMGRRGLGSVFVWASGNGGRSKDHCSCDGYTNSIYTISISSTAESGKKPWYLEECSSTLATTYSSGESYDKKIITTDLRQRCTDNHTGTSASAPMAAGIIALALEANPFLTWRDVQHVIVRTSRAGHLNANDWKTNAAGFKVSHLYGFGLMDAEAMVMEAEKWTTVPRQHVCVESTDRQIKTIRPNSAVRSIYKASGCSDNPNRHVNYLEHVVVRITITHPRRGDLAIYLTSPSGTRSQLLANRLFDHSMEGFKNWEFMTIHCWGERAAGDWVLEVYDTPSQLRNFKTPGKLKEWSLVLYGTSVQPYSPTNEFPKVERFRYSRVEDPTDDYGTEDYAGPCDPECSEVGCDGPGPDHCNDCLHYYYKLKNNTRICVSSCPPGHYHADKKRCRKCAPNCESCFGSHGDQCMSCKYGYFLNEETNSCVTHCPDGSYQDTKKNLCRKCSENCKTCTEFHNCTECRDGLSLQGSRCSVSCEDGRYFNGQDCQPCHRFCATCAGAGADGCINCTEGYFMEDGRCVQSCSISYYFDHSSENGYKSCKKCDISCLTCNGPGFKNCTSCPSGYLLDLGMCQMGAICKDGEYVDEHGHCQTCEASCAKCQGPTQEDCTTCPMTRIFDDGRCVSNCPSWKFEFENQCHPCHHTCQRCQGSGPTHCTSCGADNYGREHFLYQGECGDSCPEGHYATEGNTCLPCPDNCELCHSVHVCTRCMKGYFIAPTNHTCQKLECGQGEVQDPDYEECVPCEEGCLGCSLDDPGTCTSCAMGYYRFDHHCYKTCPEKTYSEEVECKACDSNCGSCDQNGCYWCEEGFFLLGGSCVRKCGPGFYGDQEMGECESCHRACETCTGPGHDECSSCQEGLQLLRGMCVHATKTQEEGKFWNEAVSTANLSVVKSLLQERRRWKVQIKRDILRKLQPCHSSCKTCNGSATLCTSCPKGAYLLAQACVSSCPQGTWPSVRSGSCENCTEACAICSGADLCKKCQMQPGHPLFLHEGRCYSKCPEGSYAEDGICERCSSPCRTCEGNATNCHSCEGGHVLHHGVCQENCPERHVAVKGVCKHCPEMCQDCIHEKTCKECTPEFFLHDDMCHQSCPRGFYADSRHCVPCHKDCLECSGPKADDCELCLESSWVLYDGLCLEECPAGTYYEKETKECRDCHKSCLTCSSSGTCTTCQKGLIMNPRGSCMANEKCSPSEYWDEDAPGCKPCHVKCFHCMGPAEDQCQTCPMNSLLLNTTCVKDCPEGYYADEDSNRCAHCHSSCRTCEGRHSRQCHSCRPGWFQLGKECLLQCREGYYADNSTGRCERCNRSCKGCQGPRPTDCLSCDRFFFLLRSKGECHRSCPDHYYVEQSTQTCERCHPTCDQCKGKGALNCLSCVWSYHLMGGICTSDCLVGEYRVGEGEKFNCEKCHESCMECKGPGAKNCTLCPANLVLHMDDSHCLHCCNTSDPPSAQECCDCQDTTDECILRTSKVRPATEHFKTALFITSSMMLVLLLGAAVVVWKKSRGRVQPAAKAGYEKLADPNKSYSSYKSSYRESTSFEEDQVIEYRDRDYDEDDDDDIVYMGQDGTVYRKFKYGLLDDDDIDELEYDDESYSYYQ

SEQ ID NO: 63765 - protein, 100 aa, Homo sapiens
MGPEALSSLLLLLLVASGDADMKGHFDPAKCRYALGMQDRTIPDSDISASSSWSDSTAARHSRLESSDGDGAWCPAGSVFPKEEEYLQVDLQRLHLVALV

SEQ ID NO: 63766 - protein, 109 aa, Homo sapiens
MFRKKKKKRPEISAPQNFQHRVHTSFDPKEGKFVGLPPQWQNILDTLRRPKPVVDPSRITRVQLQPMKTVVRGSAMPVDGYISGLLNDIQKLSVISSNTLRGRSPTSRR

SEQ ID NO: 63767 - protein, 661 aa, Homo sapiens
MRVLGGRCGALLACLLLVLPVSEANFLSKQQASQVLVRKRRANSLLEETKQGNLERECIEELCNKEEAREVFENDPETDYFYPKYLVCLRSFQTGLFTAARQSTNAYPDLRSCVNAIPDQCSPLPCNEDGYMSCKDGKASFTCTCKPGWQGEKCEFDINECKDPSNINGGCSQICDNTPGSYHCSYVDECSLKPSICGTAVCKNIPGDFECECPEGYRYNLKSKSCEDIDECSENMCAQLCVNYPGGYTCYCDGKKGFKLAQDQKSCEVVSVCLPLNLDTKYELLYLAEQFAGVVLYLKFRLPEISRFSAEFDFRTYDSEGVILYAESIDHSAWLLIALRGGKIEVQLKNEHTSKITTGGDVINNGLWNMVSVEELEHSISIKIAKEAVMDINKPGPLFKPENGLLETKVYFAGFPRKVESELIKPINPRLDGCIRSWNLMKQGASGIKEIIQEKQNKHCLVTVEKGSYYPGSGIAQFHIDYNNVSSAEGWHVNVTLNIRPSTGTGVMLALVSGNNTVPFAVSLVDSTSEKSQDILLSVENTVIYRIQALSLCSDQQSHLEFRVNRNNLELSTPLKIETISHEDLQRQLAVLDKAMKAKVATYLGGLPDVPFSATPVNAFYNGCMEVNINGVQLDLDEAISKHNDIRAHSCPSVWKKTKNS

SEQ ID NO: 63768 - protein, 83 aa, Homo sapiens
MEYSDELEAIIEEDDGDGGWVDTYHNTGITGITEAVKEITLENKDNIRLQDCSALCEEEEDEDEGEAADMEEYEESGLLETDE

SEQ ID NO: 63769 - protein, 205 aa, Homo sapiens
ARCGSPSLPERPLQVKVVGLFSCPNFQIAKSAAEELKNETWEYSSSVISFVNGQFLGDALDLQKWAHEVWDIVDIKPSALYDALTEDFSAKFLRDTKHDFVFLDICIDSSPIGRLIFELYCDVCPKTCKNFQVLCTGKAGFSQRGIRLHYKNSIFHRIVQNGWIQGGDIVYGKGDNGESIYGPTFEDENFSVPHNKRGVLGMANK

SEQ ID NO: 63770 - protein, 144 aa, Homo sapiens
  MOD_RES (1)..(1): Any amino acid
XHMRTIREVRTLVTRVITDVYYVDGTEVERKVTEETEEPIVECQECETEVSPSQTGGSSGDLGDISSFSSKASSLHRTSSGTSLSAMHSSGSSGKGAGPLRGKTSGTEPADFALPSSRGGPGKLRCRQGLQRERATAGAGLLTF

SEQ ID NO: 63771 - protein, 817 aa, Homo sapiens
MEIKEEGASEEGQHFLPTAQANDPGDCQFTSIQKTPNEPQLEFILACKDLVAPVRDRKLNTLVQISVIHPVEQSLTRYSSTEIVEGTRDPLFLTGVTFPSEYPIYEETKIKLTVYDVKDKSHDTVRTSVLPEHKDPPPEVGRSFLGYASFKVGELLKSKEQLLVLSLRTSDGGKVVGTIEVSVVKMGEIEDGEADHITTDVQGQKCALVCECTAPESVSGKDNLPFLNSVLKNPVCKLYRFPTSDNKWMRIREQMSESILSFHIPKELISLHIKEDLCRNQEIKELGELSPHWDNLRKNVLTHCDQMVNMYQDILTELSKETGSSFKSSSSKGEKTLEFVPINLHLQRMQVHSPHLKDALYDVITVGAPAAHFQGFKNGGLRKLLHRFETERRNTGYQFIYYSPENTAKAKEVLSNINQLQPLIATHADLLLNSASQHSPDSLKNSLKMLSEKTELFVHAFKDQLVRSALLALYTARPGGILKKPPSPKSSTEESSPQDQPPVMRGQDSIPHHSDYDEEEWDRVWANVGKSLNCIIAMVDKLIERDGGSEGSGGNNDGEKEPSLTDAIPSHPREDWYEQLYPLILTLKDCMGEVVNRAKQSLTFVLLQELAYSLPQCLMLTLRRDIVFSQALAGLVCGFIIKLQTSLYDPGFLQQLHTVGLIVQYEGLLSTYSDEIGMLEDMAVGISDLKKVAFKIIEAKSNDVLPVITGRREHYVVEVKLPARMFESLPLQIKEGQLLHVYPVLFNVGINEQQTLAERFGDVSLQESINQENFELLQEYYKIFMEKMPPDYISHFQEQNDLKALLENLLQNIQSKK

SEQ ID NO: 63772 - protein, 147 aa, Homo sapiens
MSNQTDLLALGTAVGSILLYSTVKGELHSKLISGGHDNRVNCIQWHQDSGCLYSCSDDKHIVEWNVQTCKVKCKWKGDNSSVSSLCISPDGKMLLSAGRTIKLWVLETKEVYRHFTGHATPVSSLMFTTIRPPNESQPFDGITGLYF

SEQ ID NO: 63773 - protein, 56 aa, Homo sapiens
MASDLDFSPPEVPEPTFLENLLRYGLFLGAIFQLICVLAIIVPIPKSHEAEFHVEA

SEQ ID NO: 63774 - protein, 109 aa, Homo sapiens
MEIRADGLGIPQLLEAVLKLLPLDTYVESPAAVMELVPSDKERGLQTPVWTEYESILRRAGCVRALAKIERFEFYERAKKAFAVVATGETALYGNLILRKGVLALNPLL

SEQ ID NO: 63775 - protein, 99 aa, Homo sapiens
MARERGQLVFLEGLKSAVDVVFQAQKEPHPLQFLREANAGNLKPLFEFVREALKPVDSGEARWTYPVLLVDDLSVLLSLGMGAVAVLDFIHYCRATVCW

SEQ ID NO: 63776 - protein, 140 aa, Homo sapiens
MKRMRQERRLCCVVVLEPVERVSTWVAFQSDGTVTSCDSLFAHLHGYVSGEDVAGQHITDLIPSVQLPPSGQHIPKNLKIQRSVGRARDGTTFPLSLKLKSQPSSEEATTGEAAPVSGYRASVWVFCTISGLITLLPDGT

SEQ ID NO: 63777 - protein, 212 aa, Homo sapiens
  MOD_RES (1)..(1): Any amino acid
XQRVARPRAQETLQEVHRFVVREYLARALRPRERFRGMERMHGSQKMSLDAQAISDTFQGLGSEATWLDQAIQCVAEILGETYKDDIQRHLETLIRSYPDIRRDHILAILALRRLGRQRNQHLLQHTQDLLRAAAGAAGAEAPRGRVLFEEIKPSAAVRPEGAAVQEAFQASLRGVFWGRRALNAAYRAGGGLPPDCPASPSSLKVKSRVFI

SEQ ID NO: 63778 - protein, 212 aa, Homo sapiens
MALRSMGQFSVFFFFFFWAQKKIASLSHSGFLHWFLLFEAVSSNGVLLFFSRFRWRRRLLVISAPNDEDWAYSQQLSALSGQACNFGLRHITILKLLGVGEEVGGVLELFPINGSSVVEREDVPAHLVKDIRNYFQVSPEYFSMLLVGKDGNVKSWYPSPMWSMVIVYDLIDSMQLRRQEMAIQQSLGMRCPEDEYAGYGYHSYHQGYQDGY

SEQ ID NO: 63779 - protein, 190 aa, Homo sapiens
  MOD_RES (1)..(1): Any amino acid
XYDIHRSYLKVAEVVNSEKRLFGRYYRVAFYGQAVGFFEEEEGKEYIYKEPKLTGLSEISQRLLKLYADKFGADNVKIIQDSNKVNPKDLDPKYAYIQVTYVTPFFEEKEIEDRKTDFEMHHNINRFVFETPFTLSGKKHGGVAEQCKRRTILTTSHLFPYVKKRIQVISQSSTELNPIEVAIDEMSKKV

SEQ ID NO: 63780 - protein, 115 aa, Homo sapiens
MSLRAGGKTRRWPGPEQAARGGRSGGEQSPRRGEARRRCTHAHGSSVTQLLAQDMDNDPLVFGVSGEEASRFFAVEPDTGVVWLRQPLDRETKSEFTVEFSVSDHQGVITRKVNI

SEQ ID NO: 63781 - protein, 444 aa, Homo sapiens
MTVARPSVPAALPLLGELPRLLLLVLLCLPAVWGDCGLPPDVPNAQPALEGRTSFPEDTVITYKCEESFVKIPGEKDSVICLKGSQWSDIEEFCNRSCEVPTRLNSASLKQPYITQNYFPVGTVVEYECRPGYRREPSLSPKLTCLQNLKWSTAVEFCKKKSCPNPGEIRNGQIDVPGGILFGATISFSCNTGYKLFGSTSSFCLISGSSVQWSDPLPECREIYCPAPPQIDNGIIQGERDHYGYRQSVTYACNKGFTMIGEHSIYCTVNNDEGEWSGPPPECRGKSLTSKVPPTVQKPTTVNVPTTEVSPTSQKTTTKTTTPNAQATRSTPVSRTTKHFHETTPNKGSGTTSGTTRLLSGSRPVTQAGMRWCDRSSLQSRTPGFKRSFHFSLPSSWYYRCVPRHPAKFLKFIFCRDRIFLCCPGWFQTPGRKRFFRPPKTLRL

SEQ ID NO: 63782 - protein, 582 aa, Homo sapiens
NNLQQPTWGAALTAFARLLQPAYRDGIRAPRGLGLPVGSRQPLPPPRLVATVWARAAAVTPDHSYTRMLMHWGWFLEHDLDHTVPALSTARFSDGRPCSSVCTNDPPCFPMNTRHADPRGTHAPCMLFARSSPACASGRPSATVDSVYAREQINQQTAYIDGSNVYGSSERESQALRDPSVPRGLLKTGFPWPPSGKPLLPFSTGPPTECARQEQESPCFLAGDHRANEHLALAAMHTLWFREHNRMATELSALNPHWEGNTVYQEARKIVGAELQHITYSHWLPKVLGDPGTRMLRGYRGYNPNVNAGIINSFATAAFRFGHTLINPILYRLNATLGEISEGHLPFHKALFSPSRIIKEGGIDPVLRGLFGVAAKWRAPSYLLSPELTQRLFSAAYSAAVDSAATIIQRGRDHGIPPYVDFRVFCNLTSVKNFEDLQNEIKDSEIRQKLRKLYGSPGDIDLWPALMVEDLIPGTRVGPTLMCLFVTQFQRLRDGDRFWYENPGVFTPAQLTQLKQASLSRVLCDNGDSIQQVQADVFVKAEYPQDYLNCSEIPKVDLRVWQDCCADKQAGGTPEAGRVYRC

SEQ ID NO: 63783 - protein, 143 aa, Homo sapiens
KLHCVRQAFEGLLEDKSNQLFFGKVGRQMVTGLMTKAEKSPKGFLESYEEMLSYALRPETWATTRLELEGRGSPVPALPQAKAEGGMASATPVAQQSGKDVSPPRVLMPWTPASVSPSGKWPRGSGSAPMHEPPGGTLCRWYA

SEQ ID NO: 63784 - protein, 148 aa, Homo sapiens
SYGKVVDLAPLHLDARISLSTLQQQLGQPEKALEALEPMYDPDTLAQDANAAQQELKLLLHRSTLLFSQGKMYGYVDTLLTMLAMLLKVAMNRAQVCLISSSKSGERHLYLIKVSRDKISDSNDQESANCDAKGNNFICIMLYKIWLN

SEQ ID NO: 63785 - protein, 288 aa, Homo sapiens
MAPYSLLVTRLQKALGVRQYHVASVLCQRAKVAMSHFEPNEYIHYDLLEKNINIVRKRLNRPLTLSEKIVYGHLDDPASQEIERGKSYLRLRPDRVAMQDATAQMAMLQFISSGLSKVAVPSTIHCDHLIEAQVGGEKDLRRAKDINQEVYNFLATAGAKYGVGFWKPGSGIIHQIILENYAYPGVLLIGTDSHTPNGGGLGGICIGVGGADAVDVMAGIPWELKCPKVIGVKLTGSLSGWSSPKDVILKVAGILTVKGGTGAIVEYHGPGVDSISCTAATLSWGPEL

SEQ ID NO: 63786 - protein, 121 aa, Homo sapiens
MRAGPGPTVTLALVLAVSWAMELKPTAPPIFTGRPFVVAWDVPTQDCGPRLKVPLDLNAFDVQASPNEGFVNQNITIFYRDRLGLYPRFDSAGRSVHGGVPQNVSLWAHRKMLQKRVEHYI

SEQ ID NO: 63787 - protein, 182 aa, Homo sapiens
MNTDSGGCARKRAAMSVTLTSVKRVQSSPNLLAAGRDSQSPDSAWRSYNDGNQETLNGDATYSSLAAKGFRSVRPNLQDKRSPTQAPPPPERKESFHSSLITSHTKGVILDQLVTNTQIPSSTEYFANKKPLQGTMYSNEDSRQTIVYSEESNTTMSYTQKITNPLPAASSTDPAPFANINT

SEQ ID NO: 63788 - protein, 291 aa, Homo sapiens
MVLLHVKRGDESQFLLQAPGSTELEELTVQVARVYNGRLKVQRLCSEMEELAEHGIFLPPNMQGLTDDQIEELKLKDEWGEKCVPSGGAVFKKDDIGRRNGQAPNEKMKQVLKKTIEEAKAIISKKQVEAGVCVTMEMVKDALDQLRGAVMIVYPMGLPPYDPIRMEFENKEDLSGTQAGLNVIKEAEAQLWWAAKELRRTKKLSDYVGKNEKTKIIAKIQQDAGRSTRGQGPQRGHPPRGPVPRSWGCHGEDSCGSRGSHGGLQHWGDATITAADHQTPPRAWETEVSVG

SEQ ID NO: 63789 - protein, 1136 aa, Homo sapiens
MSGGGGGGGSAPSRFADYFVICGLDTETGLEPDELSALCQYIQASKARDGASPFISSTTEGENFEQTPLRRTFKSKVLARYPENVEWNPFDQDAVGMLCMPKGLAFKTQADPREPQFHAFIITREDGSRTFGFALTFYEEVTSKQICSAMQTLYHMHNAEYDVLHAPPADDRDQSSMEDGEDTPVTKLQRFNSYDISRDTLYVSKCICLITPMSFMKACRSVLEQLHQAVTSPQPPPLPLESYIYNVLYEVPLPPPGRSLKFSGVYGPIICQRPSTNELPLFDFPVKEVFELLGVENVFQLFTCALLEFQILLYSQHYQRLMTVAETITALMFPFQWQHVYVPILPASLLHFLDAPVPYLMGLHSNGLDDRSKLELPQEANLCFVDIDNHFIELPEDLPQFPNKLEFVQEVSEILMAFGIPPEGNLHCSESASKLKRLRASELVSDKRNGNIAGSPLHSYELLKENETIARLQALVKRTGVSLEKLEVREDPSSNKDLKVQCDEEELRIYQLNIQIREVFANRFTQMFADYEVFVIQPSQDKESWFTNREQMQNFDKASFLSDQPEPYLPFLSRFLETQMFASFIDNKIMCHDDDDKDPVLRVFDSRVDKIRLLNVRTPTLRTSMYQKCTTVDEAEKAIELRLAKIDHTAIHPHLLDMKIGQGKYEPGFFPKLQSDVLSTGPASNKWTKRNAPAQWRRKDRQKQHTEHLRLDNDQREKYIQEARTMGSTIRQPKLSNLSPSVIAQTNWKFVEGLLKECRNKTKRMLVEKMGREAVELGHGEVNITGVEENTLIASLCDLLERIWSHGLQVKQGKSALWSHLLHYQDNRQRKLTSGSLSTSGILLDSERRKSDASSLMPPLRISLIQDMRHIQNIGEIKTDVGKARAWVRLSMEKKLLSRHLKQLLSDHELTKKLYKRYAFLRCDDEKEQFLYHLLSFNAVDYFCFTNVFTTILIPYHILIVPSKKLGGSMFTANPWICISGELGETQIMQIPRNVLEMTFECQNLGKLTTVQIGHDNSGLYAKWLVEYVMVRNEITGHTYKFPCGRWLGKGMDDGSLERILVGELLTSQPEVDERPCRTPPLQQSPSVIRRLVTISPNNKPKLNTGQIQESIGEAVNGIVKHFHKPEKEAHVLWTP

SEQ ID NO: 63790 - protein, 344 aa, Homo sapiens
MAPPGSSTVFLLALTIIASTWALTPTHYLTKHDVERLKASLDRPFTNLESAFYSIVGLSSLGAQVPDAKKACTYIRSNLDPSNVDSLFYAAQASQALSGCEISISNETKDLLLAAVSEDSSVTQIYHAVAALSGFGLPLASQEALSALTARLSKEETVLARVWSTVLESRSLFSKRTVQALQTASHLSQQADLRSIVEEIEDLVARLDELGGVYLQFEEGLETTALFVAATYKLMDHVGTEPSIKEDQVIQLMNAIFSKKNFESLSEAFSVASAAAVLSHNRYHVPVVVVPEGSASDTHEQAILRLQVTNVLSQPLTQATVKLEHAKSVASRATVLQKTSFTPV

SEQ ID NO: 63791 - protein, 123 aa, Homo sapiens
MSSETPTSRQLSEYLKHAKGRTRTAIRNGQVWEESLKRLRQKASLTNVTDPSLDLTSLSLEVGCGAPAPVVRCDPCSPYRTITGDCNNRRKPALGAANRALARWLPAEYEDGLSLPFGWTPGK

SEQ ID NO: 63792 - protein, 97 aa, Homo sapiens
  MOD_RES (1)..(1): Any amino acid
XDLTDELAPVFLLRWFYSASDYISDCWDSIFHNNWREMMPLLSLIFSALFILFGTVIVQAFSDSNDERESSPPEKEEAQEKTGKTEPSFTKENSRFL

SEQ ID NO: 63793 - protein, 183 aa, Homo sapiens
MVKLAAKCILAVPVDKRLSRAEVCSGCCEVCRSVSWTCALPAASEQVPVRGDPAVGKTALAQIFRSDGAHFQKSYTLTTGMDLVVKTVPVPDTGDSVELFIFDSAGKELFSEMLDKLWESPNVLCLVYDVTNEESFNNCSKWLEKARSQAPGISLPGVLVGNKTDLAGRRAVDSAEARAWALG

SEQ ID NO: 63794 - protein, 2294 aa, Homo sapiens
MARFGEAVVARPGSGDGDSDQSRNRQGTPVPASGQAAAYKQTKAQRARTMALYNPIPVRQNCFTVNRSLFIFGEDNIVRKYAKKLIDWPPFEYMILATIIANCIVLALEQHLPEDDKTPMSRRLEKTEPYFIGIFCFEAGIKIVALGFIFHKGSYLRNGWNVMDFIVVLSGILATAGTHFNTHVDLRTLRAVRVLRPLKLVSGIPSLQIVLKSIMKAMVPLLQIGLLLFFAILMFAIIGLEFYSGKLHRACFMNNSGILEGFDPPHPCGVQGCPAGYECKDWIGPNDGITQFDNILFAVLTVFQCITMEGWTTVLYNTNDALGATWNWLYFIPLIIIGSFFVLNLVLGVLSGEFAKERERVENRRAFMKLRRQQQIERELNGYRAWIDKAEEVMLAEENKNAGTSALEVLRRATIKRSRTEAMTRDSSDEHCVDISSVGTPLARASIKSAKVDGVSYFRHKERLLRISIRHMVKSQVFYWIVLSLVALNTACVAIVHHNQPQWLTHLLYYAEFLFLGLFLLEMSLKMYGMGPRLYFHSSFNCFDFGVTVGSIFEVVWAIFRPGTSFGISVLRALRLLRIFKITKYWASLRNLVVSLMSSMKSIISLLFLLFLFIVVFALLGMQLFGGRFNFNDGTPSANFDTFPAAIMTVFQILTGEDWNEVMYNGIRSQGGVSSGMWSAIYFIVLTLFGNYTLLNVFLAIAVDNLANAQELTKDEQEEEEAFNQKHALQKAKEVSPMSAPNMPSIERERRRRHHMSVWEQRTSQLRKHMQMSSQEALNREEAPTMNPLNPLNPLSSLNPLNAHPSLYRRPRAIEGLALGLALEKFEEERISRGGSLKGDGGDRSSALDNQRTPLSLGQREPPWLARPCHGNCDPTQQEAGGGEAVVTFEDRARHRQSQRRSRHRRVRTEGKESSSASRSRSASQERSLDEAMPTEGEKDHELRGNHGAKEPTIQEERAQDLRRTNSLMVSRGSGLAGGLDEADTPLVLPHPELEVGKHVVLTEQEPEGSSEQALLGNVQLDMGRVISQSEPDLSCITANTDKATTESTSVTVAIPDVDPLVDSTVVHISNKTDGEASPLKEAEIREDEEEVEKKKQKKEKRETGKAMVPHSSMFIFSTTNPIRRACHYIVNLRYFEMCILLVIAASSIALAAEDPVLTNSERNKVLRYFDYVFTGVFTFEMVIKMIDQGLILQDGSYFRDLWNILDFVVVVGALVAFALANALGTNKGRDIKTIKSLRVLRVLRPLKTIKRLPKLKAVFDCVVTSLKNVFNILIVYKLFMFIFAVIAVQLFKGKFFYCTDSSKDTEKECIGNYVDHEKNKMEVKGREWKRHEFHYDNIIWALLTLFTVSTGEGWPQVLQHSVDVTEEDRGPSRSNRMEMSIFYVVYFVVFPFFFVNIFVALIIITFQEQGDKMMEECSLEKNERACIDFAISAKPLTRYMPQNRHTFQYRVWHFVVSPSFEYTIMAMIALNTVVLMMKYYSAPCTYELALKYLNIAFTMVFSLECVLKVIAFGFLNYFRDTWNIFDFITVIGSITEIILTDSKLVNTSGFNMSFLKLFRAARLIKLLRQGYTIRILLWTFVQSFKALPYVCLLIAMLFFIYAIIGMQVFGNIKLDEESHINRHNNFRSFFGSLMLLFRSATGEAWQEIMLSCLGEKGCEPDTTAPSGQNENERCGTDLAYVYFVSFIFFCSFLMLNLFVAVIMDNFEYLTRDSSILGPHHLDEFVRVWAEYDRAACGRIHYTEMYEMLTLMSPPLGLGKRCPSKVAYKRLVLMNMPVAEDMTVHFTSTLMALIRTALDIKIAKGGADRQQLDSELQKETLAIWPHLSQKMLDLLVPMPKASDLTVGKIYAAMMIMDYYKQSKVKKQRQQLEEQKNAPMFQRMEPSSLPQEIIANAKALPYLQQDPVSGLSGRSGYPSMSPLSPQDIFQLACMDPADDGQFQERQSLEPEVSELKSVQPSNHGIYLPSDTQEHAGSGRASSMPRLTVDPQVVTDPSSMRRSFSTIRDKRSNSSWLEEFSMERSSENTYKSRRRSYHSSLRLSAHRLNSDSGHKSDTHRSGGRERGRSKERKHLLSPDVSRCNSEERGTQADWESPERRQSRSPSEGRSQTPNRQGTGSLSESSIPSVSDTSTPRRSRRQLPPVPPKPRPLLSYSSLIRHAGSISPPADGSEEGSPLTSQALESNNACLTESSNSPHPQQSQHASPQRYISEPYLALHEDSHASDCGEEETLTFEAAVATSLGRSNTIGSAPPLRHSWQMPNGHYRRRRRGGPGPGMMCGAVNNLLSDTEEDDKC

SEQ ID NO: 63795 - protein, 81 aa, Homo sapiens
  MOD_RES (1)..(1): Any amino acid
XHRRGVGAGAIAKKKLAEAKYKERGTVLAEDQLAQMSKQLDMFKTNLEEFASKHKQEIRKNPEFRVQFQDMCATIGVDPLA

SEQ ID NO: 63796 - protein, 583 aa, Homo sapiens
  MOD_RES (1)..(1): Any amino acid
XLNVNNGVPGGAAAASSATVAAASATTAASSSLATPELGSSLKKKKRLSQSDEDVIRLIGQHLNGLGLNQTVDLLMQESGCRLEHPSATKFRNHVMEGDWDKAENDLNELKPLVHSPHAIVVRGALEISQTLLGIIVRMKFLLLQQKYLEYLEDGKVLEALQVLRCELTPLKYNTERIHVLSGYLMCSHAEDLRAKAEWEGKGTASRSKLLDKLQMMLPPRRLQTLLRQAVELQRDRCLYHNTKLDNNLDSVSLLIDHVCSRRQFPCYTQQILTEHCNEVWFCKFSNDGTKLATGSKDTTVIIWQVDPDTHLLKLLKTLEGHAYGVSYIAWSPDDNYLVACGPDDCSELWLWNVQTGELRTKMSQSHEDSLTSVAWNPDGKRFVTGGQRGQFYQCDLDGNLLDSWEGVRVQCLWCLSDGKTVLASDTHQRIRGYNFEDLTDRNIVQEDHPIMSFTISKNGRLALLNVATQGVHLWDLQDRVLVRKYQGVTQGFYTIHSCFGGHNEDFIASGSEDHKVYIWHKRSELPIAELTGHTRTVNCVSWNPQIPSMMASASDDGTVRIWGPAPFIDHQNIEEECSSMDS

SEQ ID NO: 63797 - protein, 118 aa, Homo sapiens
MAATQKLVKDIIDSKTGETASKRWKGAKNSETAAKVALMKLKMHADGDKSLPQTERIYFQVFLPKGSKEKSKPMFFCHRWSIGKAIDFAASLARLKNDNNKFTAKKLRLCHITSGEAL

SEQ ID NO: 63798 - protein, 151 aa, Homo sapiens
MKVTQDPIEEALGLPSSLDSLDQMNQDGGGGDVGNSSASELVPPPEETAPTELSKESTAPAPESITLHDYTTQPASQEQPAQPVLQTSTPTSGLLQVSKSQEILSQGNPFMGVSATAVSSSSAGGQPPQSAPKIVILKAPPSSSVTGAHVA

SEQ ID NO: 63799 - protein, 1308 aa, Homo sapiens
MGSVTGAVLKTLLLLSTQNWNRVEAGNSYDCDDPLVSALPQASFSSSSELSSSHGPGFARLNRRDGAGGWSPLVSNKYQWLQIDLGERMEVTAVATQGGYGSSNWVTSYLLMFSDSGWNWKQYRQEDSIWGFSGNANADSVVYYRLQPSIKARFLRFIPLEWNPKGRIGMRIEVFGCAYRSEVVDLDGKSSLLYRFDQKSLSPIKDIISLKFKTMQSDGILLHREGPNGDHITLQLRRARLFLLINSGEAKLPSTSTLVNLTLGSLLDDQHWHSVLIQRLGKQVNFTVDEHRHHFHARGEFNLMNLDYEISFGGIPAPGKSVSFPHRNFHGCLENLYYNGVDIIDLAKQQKPQIIAMGNVSFSCSQPQSMPVTFLSSRSYLALPDFSGEEEVSATFQFRTWNKAGLLLFSELQLISGGILLFLSDGKLKSNLYQPGKLPSDITAGVELNDGQWHSVSLSAKKNHLSVAVDGQMASAAPLLGPEQIYSGGTYYFGGCPDKSFGSKCKSPLGGFQGCMRLISISGKVVDLISVQQGSLGNFSDLQIDSCGISDRCLPNYCEHGGECSQSWSTFHCNCTNTGYRGATCHNSIYEQSCEAYKHRGNTSGFYYIDSDGSGPLEPFLLYCNMTETAWTIIQHNGSDLTRVRNTNPENPYAGFFEYVASMEQLQATINRAEHCEQEFTYYCKKSRLVNKQDGTPLSWWVGRTNETQTYWGGSSPDLQKCTCGLEGNCIDSQYYCNCDADRNEWTNDTGLLAYKEHLPVTKIVITDTGRLHSEAAYKLGPLLCQGDRSFWNSASFDTEASYLHFPTFHGELSADVSFFFKTTASSGVFLENLGIADFIRIELRSPTVVTFSFDVGNGPFEISVQSPTHFNDNQWHHVRVERNMKEASLQVDQLTPKTQPAPADGHVLLQLNSQLFVGGTATRQRGFLGCIRSLQLNGMTLDLEERAQVTPEVQPGCRGHCSSYGKLCRNGGKCRERPIGFFCDCTFSAYTGPFCSNEISAYFGSGSSVIYNFQENYLLSKNSSSHAASFHGDMKLSREMIKFSFRTTRTPSLLLFVSSFYKEYLSVIIAKNGDLQIRYKLNKYQEPDVVNFDFKNMADGQLHHIMINREEGVVFIEIDDNRRRQVHLSSGTEFSAVKSLVLGRILEHSDVDQDTALAGAQGFTGCLSAVQLSHVAPLKAALHPSHPDPVTVTGHVTESSCMAQPGTDATSRERTHSFADHSGTIDDREPLANAIKSDSAVIGGLIAVVIFILLCITAIAVRIYQQKRLYKRSEAKRSENVDSAEAVLKSELNIQNAVNENQKEYFF

SEQ ID NO: 63800 - protein, 141 aa, Homo sapiens
MKGRRRHTELDSRKEGRCRDGRREEPGDLISTLLFATLYILCHIFLTRFKKPAEFTTVDDEDATVNKIALELCTFTLAIALGAVLLLPFSIISNEVLLSLPRNYYIQWLNGSLIHGLWNLVFLFSNLSLIFLMPFAYFFTE

SEQ ID NO: 63801 - protein, 36 aa, Homo sapiens
MSRPRFNPRGDFPLQRPRAPNPSGMRPPGPFMRPGS

SEQ ID NO: 63802 - protein, 144 aa, Homo sapiens
  MOD_RES (1)..(1): Any amino acid
XFTAAYPTQSSIPFKSQASVIPESEKKGFNSQAKRFPHKKNDIPGPGFYNVIHQSPVSNSVSLSKKGTCMFPSMCARLDTIISKYPAANAYTIPSDFISKRDFSNSCSSMFQLPSFMKALKFETPAPNYYNVRTLPMLAKYRSN

SEQ ID NO: 63803 - protein, 186 aa, Homo sapiens
MGSSGLLSLLVLFVLLANVQGPGLTDWLFPRRCPKIREECEFQERDVCTKDRQCQDNKKCCVFSCGKKCLDLKQDVCEMPKETGPCLAYFLHWWYDKKDNTCSMFVYGGCQGNNNNFQSKANCLNTCKNKQPCPKIKVECEVEEIDQCTKPRDCPENMKCCPFSRGKKCLDFRKVSLTLYHKEELE

SEQ ID NO: 63804 - protein, 1093 aa, Homo sapiens [sequence omitted]

SEQ ID NO: 63805 - protein, 704 aa, Homo sapiens
MSQPGQKPAASPRPRRAAAARRTHEVSASSGATSKSSSMNPTETKAVKTEPEKKSQSTKPKSLPKQASDTGSNDAHNKKAVSRSAEQQPSEKSTEPKTKPQDMISAGGESVAGITAISGKPGDKKKEKKSLTPAVPVESKPDKPSGKSGMDAALDDLIDTLGGPEETEEENTTYTGPEVSDPMSSTYIEELGKREVTIPPKYRELLAKKEGITGPPADSSKPIGPDDAIDALSSDFTCGSPTAAGKKTEKEESTEVLKAQSAGTVRSAAPPQEKKRKVEKDTMSDQALEALSASLGTRQAEPELDLRSIKEVDEAKAKEEKLEKCGEDDETIPSEYRLKPATDKDGKPLLPEPEEKPKPRSESELIDELSEDFDRSECKEKPSKPTEKTEESKAAAPAPVSEAVCRTSMCSIQSAPPEPATLKGTVPDDAVEALADSLGKKEADPEDGKPVMDKVKEKAKEEDREKLGEKEETIPPDYRLEEVKDKDGKPLLPKESKEQLPPMSEDFLLDALSEDFSGPQNASSLKFEDAKLAAAISEVVSQTPASTTQAGAPPRDTSSDKDLDDALDKLSDSLGQRQPDPDENKPMEDKVKEKAKAEHRDKLGERDDTIPPEYRHLLDDNGQDKPVKPPTKKSEDSKKPADDQDPIDALSGDLDSCPSTTETSQNTAKDKCKKAASSSKAPKNGGKAKDSAKTTEETSKPKDD

SEQ ID NO: 63806 - protein, 74 aa, Homo sapiens
  MOD_RES (1)..(1): Any amino acid
XIQSRCQRNASLEAIMGLESSSELFTISVNGVLYLQATKNLVPQDLLGAKLVWQGRSGLGEKGAMASHLHLLTN

SEQ ID NO: 63807 - protein, 286 aa, Homo sapiens
MSPHPTALLGLVLCLAQTIHTQEDLPRPSISAEPGTVIPLGSHVTFVCRGPVGVQTFRLERDSRSTYNDTEDVSQASPSESEARFRIDSVREGNAGLYRCIYYKPPKWSEQSDYLELLVKESSGGPDSPDTEPGSSAGPTQRPSDNSHNEHAPASQGLKAEHLYILIGVSVVFLFCLLLLVLFCLHRQNQIKQGPPRSKDEEQKPQQRPDLAVDVLERTADKATVNGLPEKDRETDTSALAAGSSQEVTYAQLDHWALTQRTARAVSPQSTKPMAESITYAAVARH

SEQ ID NO: 63808 - protein, 599 aa, Homo sapiens
MKKQKYGRIIMTSSASGIYGNFGQANYSAAKLGLLGLANSLAIEGRKSNIHCNTIAPNAGSRMTQTVMPEDLVEALKPEYVAPLVLWLCHESCEENGGLFEVGAGWIGKLRWERTLGAIVRQKNHPMTPEAVKANWKKICDFENASKPQSIQESTGSIIEVLSKIDSEGGVSANHTSRATSTATSGFAGAIGQKLPPFSYAYTELEAIMYALGVGASIKDPKDLKFIYEGSSDFSCLPTFGVIIGQKSMMGGGLAEIPGLSINFAKVLHGEQYLELYKPLPRAGKLKCEAVVADVLDKGSGVVIIMDVYSYSEKELICHNQFSLFLVGSGGFGGKRTSDKVKVAVAIPNRPPDAVLTDTTSLNQAALYRLSGDWNPLHIDPNFASLAGFDKPILHGLCTFGFSARRVLQQFADNDVSRFKAIKARFAKPVYPGQTLQTEMWKEGNRIHFQTKVQETGDIVISNAYVDLAPTSGTSAKTPSEGGKLQSTFVFEEIGRRLKDIGPEVVKKVNAVFEWHITKGGNIGAKWTIDLKSGSGKVYQGPAKGAADTTIILSDEDFMEVVLGKLDPQKAFFSGRLKARGNIMLSQKLQMILKDYAKL

SEQ ID NO: 63809 - protein, 125 aa, Homo sapiens
MVHSPTCPHPCFLLVPASEPQFPHLQTPDPGDAVWNIVHAPEQRRTSPRLRRHHLRAKLWPRPLRHRSDPDQRPRQRPRPPNSHSTPRPAPCSPRQPAPAQRSPLRGASGPRTGALVPRSPEFHR

SEQ ID NO: 63810 - protein, 63 aa, Homo sapiens
MHGSEPPSRGKPPPPPSRTPAGPPPPPPPPLRNGHRDSITTVRSFLDDFESKYSFHPVEDFPA

SEQ ID NO: 63811 - protein, 492 aa, Homo sapiens
MEMKADINAKQEDMMFHKIYIQKHDNVSILFADIEGFTSLASQCTAQELVMTLNELFARFDKLAAENHCLRIKILGDCYYCVSGLPEARADHAHCCVEMGMDMIEAISLVREVTGVNVNMRVGIHSGRVHCGVLGLRKWQFDVWSNDVTLANHMEAGGKAGRIHITKATLNYLNGDYEVEPGCGGERNAYLKEHSIETFLILRCTQKRKEEKAMIAKMNRQRTNSIGHNPPHWGAERPFYNHLGGNQVSKEMKRMGFEDPKDKNAQESANPEDEVDEFLGRAIDARSIDRLRSEHVRKFLLTFREPDLEKKYSKQVDDRFGAYVACASLVFLFICFVQITIVPHSIFMLSFYLTCSLLLTLVVFVSVIYSCVKLFPSPLQTLSRKIVRSKMNSTLVGVFTITLVFLAAFVNMFTCNSRDLLGCLAQEHNISASQVNACHVAESAVNYSLGDEQGFCGSPWPNCNFPEYFTYSVLLSLLACSVFLQISCIGKL

SEQ ID NO: 63812 - protein, 1555 aa, Homo sapiens
MDEEEDGAGAEESGQPRSFMRLNDLSGAGGRPGPGSAEKDPGSADSEAEGLPYPALAPVVFFYLSQDSRPRSWCLRTVCNPWFERISMLVILLNCVTLGMFRPCEDIACDSQRCRILQAFDDFIFAFFAVEMVVKMVALGIFGKKCYLGDTWNRLDFFIVIAGMLEYSLDLQNVSFSAVRTVRVLRPLRAINRVPSMRILVTLLLDTLPMLGNVLLLCFFVFFIFGIVGVQLWAGLLRNRCFLPENFSLPLSVDLERYYQTENEDESPFICSQPRENGMRSCRSVPTLRGDGGGGPPCGLDYEAYNSSSNTTCVNWNQYYTNCSAGEHNPFKGAINFDNIGYAWIAIFQVITLEGWVDIMYFVMDAHSFYNFIYFILLIIVGSFFMINLCLVVIATQFSETKQRESQLMREQRVRFLSNASTLASFSEPGSCYEELLKYLVYILRKAARRLAQVSRAAGVRVGLLSSPAPLGGQETQPSSSCSRSHRRLSVHHLVHHHHHHHHHYHLGNGTLRAPRASPEIQDRDANGSRRLMLPPPSTPALSGAPPGGAESVHSFYHADCHLEPVRCQAPPPRSPSEASGRTVGSGKVYPTVHTSPPPETLKEKALVEVAASSGPPTLTSLNIPPGPYSSMHKLLETQSTGACQSSCKISSPCLKADSGACGPDSCPYCARAGAGEVELADREMPDSDSEAVYEFTQDAQHSDLRDPHSRRQRSLGPDAEPSSVLAFWRLICDTFRKIVDSKYFGRGIMIAILVNTLSMGIEYHEQPEELTNALEISNIVFTSLFALEMLLKLLVYGPFGYIKNPYNIFDGVIVVISVWEIVGQQGGGLSVLRTFRLMRVLKLVRFLPALQRQLVVLMKTMDNVATFCMLLMLFIFIFSILGMHLFGCKFASERDGDTLPDRKNFDSLLWAIVTVFQILTQEDWNKVLYNGMASTSSWAALYFIALMTFGNYVLFNLLVAILVEGFQAEEISKREDASGQLSCIQLPVDSQGGDANKSESEPDFFSPSLDGDGDRKKCLALVSLGEHPELRKSLLPPLIIHTAATPMSLPKSTSTGLGEALGPASRRTSSSGSAEPGAAHEMKSPPSARSSPHSPWSAASSWTSRRSSRNSLGRAPSLKRRSPSGERRSLLSGEGQESQDEEESSEEERASPAGSDHRHRGSLEREAKSSFDLPDTLQVPGLHRTASGRGSASEHQDCNGKSASGRLARALRPDDPPLDGDDADDEGNLSKGERVRAWIRARLPACCLERDSWSAYIFPPQSRFRLLCHRIITHKMFDHVVLVIIFLNCITIAMERPKIDPHSAERIFLTLSNYIFTAVFLAEMTVKVVALGWCFGEQAYLRSSWNVLDGLLVLISVIDILVSMVSDSGTKILGMLRVLRLLRTLRPLRVISRAQGLKLVVETLMSSLKPIGNIVVICCAFFIIFGILGVQLFKGKFFVCQGEDTRNITNKSDCAEASYRWVRHKYNFDNLGQVSPRLRGGAVVKEAGGGTGPCLVIPADSGGGGLHEEISPSHPLLSNHQHVAKPSPSHSAPKSGPMGSLAVLKDEETEAQRG

SEQ ID NO: 63813 - protein, 168 aa, Homo sapiens
  MOD_RES (1)..(1): Any amino acid
XLQKIKEKLEIALEKHQDSSMRKFQEQNETFQANRAKMAEGLALALARKDQEWSEKMDQLEKEKNILTAQLQEMKNQSMNLFQRRDEMDELEGFQQQELSKIKHMLLKKEESLGKMEQELEARTRELSRTQEELMNSNQMSSDLSQKLEELQRHYSTLEEQRFLLGHC

SEQ ID NO: 63814 - protein, 153 aa, Homo sapiens
  MOD_RES (1)..(1): Any amino acid
XFLKEQIQAEQCLKENLEETLQLEIENCKEEIASISSLKAELERIKVEKGQLESTLREKSQQLESLQEIKISLEEQLKKETAAKATVEQLMFEEKNKAQRLQTELDVSEQVQRDFVKLSQTLQVRHLGNHIQSTKAVLGDRTLPIPDLTTGSS

SEQ ID NO: 63815 - protein, 407 aa, Homo sapiens
MPLFFRKRKPSEEARKRLEYQMCLAKEAGADDILDISKCELSEIPFGAFATCKVLQKKVLIVHTNHLTSLLPKSCSLLSLATIKVLDLHDNQLTALPDDLGQLTALQVLNVERNQLMQLPRSIGNLTQLQTLNVKDNKLKELPDTVGELRSLRTLNISGNEIQRLPQMLAHVRTLENRFSDYEKRKEQKMLEKLEFERRLELGQREHTQLLQQSSSQKDEILQTVKEEQSRLEQGLSEHQRHLNAERQRLQEQLKQTEQNISSRIQKLLQDNQRQKKSSEILKSLENERIRMEQLMSITQEETESLRRRDVASAMQQMLTESCKNRLIQMAYESQRQNLVQQACSRPWDSDRLSVCGPPRARLPAAWPKWMNDSSRFCRGSKWIRTKPSARSCRRARCRRLRSRHSR

SEQ ID NO: 63816 - protein, 41 aa, Homo sapiens
MALQLSREQGITLRGSAEIVAEFFLHPEKSLRKLSRMKSVQ

SEQ ID NO: 63817 - protein, 800 aa, Homo sapiens
MQRSIMSFFHPKKEGKAKKPEKEASNSSRETEPPPKAALKEWNGVVSESDSPVKRPGRKAARVLGSEGEEEDEALSPAKGQKPALDCSQVSPPRPATSPENNASLSDTSPMDSSPSGIPKRRTARKQLPKRTIQEVLEEQSEDEDREAKRKKEEEEETPKESLTEAEVATEKEGEDGDQPTTPPKPLKTSKAETPTESVSEPEVATKQELQEEEEQTKPPRRAPKTLSSFFTPRKPAVKKEVKEEEPGAPGKEGAAEGPLDPSGYNPAKNNYHPVEDACWKPGQKVPYLAVARTFEKIEEVSARLRMVETLSNLLRSVVALSPPDLLPVLYLSLNHLGPPQQGLELGVGDGVLLKAVAQATGRQLESVRAEAAEKGDVGLVAENSRSTQRLMLPPPPLTASGVFSKFRDIARLTGSASTAKKIDIIKGLFVACRHSEARFIARSLSGRLRLGLAEQSVLAALSQAVSLTPPGQEFPPAMVDAGKGKTAEARKTWLEEQGMILKQTFCEVPDLDRIIPVLLEHGLERLPEHCKLSPGIPLKPMLAHPTRGISEVLKRFEEAAFTCEYKYDGQRAQIHALEGGEVKIFSRNQEDNTGKYPDIISRIPKIKLPSVTSFILDTEAVAWDREKKQIQPFQVLTTRKRKEVDASEIQVQVCLYAFDLIYLNGESLVREPLSRRRQLLRENFVETEGEFVFATSLDTKDIEQIAEFLEQSVKDSCEGLMVKTLDVDATYEIAKRSHNWLKLKKDYLDGVGDTLDLVVIGAYLGRGKRAGRYGGFLLASYDEDSEELQAICKVLGNWG

SEQ ID NO: 63818 - protein, 2002 aa, Homo sapiens
MAQVPGEVDNMEGLPAPNNNPAARWESPDRGWEREQPAASTAAASLFECSRIKALADEREAVQKKTFTKWVNSHLARVGCHIGDLYVDLRDGFVLTRLLEVLSGEQLPRPTRGRMRIHSLENVDKALQFLKEQRVHLENVGSHDIVDGNHRLTLGLVWTIILRFQIQVIKIETEDNRETRSAKDALLLWCQMKTAGYPEVNIQNFTTSWRDGLAFNALIHRHRPDLVDFSKLTKSNANYNLQRAFRTAEQHLGLARLLDPEDVNMEAPDEKSIITYVVSFYHYFSKMKALAVEGKRIGKVLDQVLEVGKIIERYEELAAELLAWIHRTVGLISNQKFANSLSGVQQQLQAFTAYCTLEKPVKFQEKGNLEVLLFSIQSKLRACNRRLFVPREGCGIWDIDKAWGELEKAEHEREAALRAELIRQEKLELLAQRFDHKVAMRESWLNENQRLVSQDNFGYELPAVEAAMKKHEAIEADIAAYEERVQGVAELAQALAAEGYYDIRRVAAQRDSVLRQWALLTGLVGARRTRLEQNLALQKVFQEMVYMVDWMEEMQAQLLSRECGQHLVEADDLLQKHGLLEGDIAAQSERVEALNAAALRFSQLQGYQPCDPQVICNRVNHVHGCLAELQEQAARRRAELEASRSLWALLQELEEAESWARDKERLLEAAGGGGAAGAAGAAGTAGGAHDLSSTARLLAQHKILQGELGGRRALLQQALRCGEELVAAGGAVGPGADTVHLVGLAERAASARRRWQRLEEAAARRERRLQEARALHQFGADLDGLLDWLRDAYRLAAAGDFGHDEASSRRLARQHRALTGEVEAHRGPVSGLRRQLATLGGASGAGPLVVALQVRVVEAEQLFAEVTEVAALRRQWLRDALAVYRMFGEVHACELWIGEKEQWLLSMRVPDSLDDVEVVQHRFESLDQEMNSLMGRVLDVNHTVQELVEGGHPSSDEVRSCQDHLNSRWNRIVELVEQRKEEMSAVLLVENHVLEVAEVRAQVREKRRAVESAPRAGGALQWRLSGLEAALQALEPRQAALLEEAALLAERFPAQAARLHQGAEELGAEWGALASAAQACGEAVAAAGRLQRFLHDLDAFLDWLVRAQEAAGGSEGPLPNSLEEADALLARHAALKEEVDQREEDYARIVAASEALLAADGAELGPGLALDEWLPHLELGWHKLLGLWEARREALVQAHIYQLFLRDLRQALVVLRNQEMALSGAELPGTVESVEEALKQHRDFLTTMELSQQKMQVAVQAAEGLLRQGNIYGEQAQEAVTRLLEKNQENQLRAQQWMQKLHDQLELQHFLRDCHELDGWIHEKMLMARDGTREDNHKLHKRWLRHQAFMAELAQNKEWLEKIEREGQQLMQEKPELAASVRKKLGEIRQCWAELESTTQAKARQLFEASKADQLVQSFAELDKKLLHMESQLQDVDPGGDLATVNSQLKKLQSMESQVEEWYREVGELQAQTAALPLEPASKELVGERQNAVGERLVRLLEPLQERRRLLLASKELHQVAHDLDDELAWVQERLPLAMQTERGNGLQAVQQHIKKNQGLRREIQAHGPRLEEVLERAGALASLRSPEAEAVRRGLEQLQSAWAGLREAAERRQQVLDAAFQVEQYYFDVAEVEAWLGEQELLMMSEDKGKDEQSTLQLLKKHLQLEQGVENYEESIAQLSRQCRALLEMGHPDSEQISRRQSQVDRLYVALKELGEERRVALEQQYWLYQLSRQVSELEHWIAEKEVVAGSPELGQDFEHVSVLQEKFSEFASETGMAGRERLAAVNQMVDELIECGHTAAATMAEWKDGLNEAWAELLELMGTRAQLLAASRELHKFFSDARELQGQIEEKRRRLPRLTTPPEPRPSASSMQRTLRAFEHDLQLLVSQVRQLQEGAAQLRTVYAGEHAEAIASREQEVLQGWKELLSACEDARLHVSSTADALRFHSQVRDLLSWMDGIASQIGAADKPRCPSSLLGLPASPWWPTPATPSPLTAPFSME

SEQ ID NO: 63819 - protein, 90 aa, Homo sapiens
MAVFRSGLLVLTTPLASLAPRLASILTSAARLVNHTLYVHLQPGMSLEGPAQPQSSPVQATFEVLDFITHLYAGADVHRHLDVRILLTNI

SEQ ID NO: 63820 - protein, 1669 aa, Homo sapiens
LGSPSPCSAGSEEEDMDALLNNSLPPPHPENEEDPEEDLSETETPKLKKKKKPKKPRDPKIPKSKRQKKELGDSSGEGPEFVEEEEEVALRSDSEGSDYTPGKKKKKKLGPKKEKKSKSKRKEEEEEEDDDDDSKEPKSSAQLLEDWGMEDIDHVFSEEDYRTLTNYKAFSQFVRPLIAAKNPKIAVSKMMMVLGAKWREFSTNNPFKGSSGASVAAAAAAAVAVVESMVTATEVAPPPPPVEVPIRKAKTKEGKGPNARRKPKGSPRVPDAKKPKPKKVAPLKIKLGGFGSKRKRSSSEDDDLDVESDFDDASINSYSVSDGSTSRSSRSRKKLRTTKKKKKGEEEVTAVDGYETDHQDYCEVCQQGGEIILCDTCPRAYHMVCLDPDMEKAPEGKWSCPHCEKEGIQWEAKEDNSEGEEILEEVGGDLEEEDDHHMEFCRVCKDGGELLCCDTCPSSYHIHCLNPPLPEIPNGEWLCPRCTCPALKGKVQKILIWKWGQPPSPTPVPRPPDADPNTPSPKPLEGRPERQFFVKWQGMSYWHCSWVSELQLELHCQVMFRNYQRKNDMDEPPSGDFGGDEEKSRKRKNKDPKFAEMEERFYRYGIKPEWMMIHRILNHSVDKKGHVHYLIKWRDLPYDQASWESEDVEIQDYDLFKQSYWNHRELMRGEEGRPGKKLKKVKLRKLERPPETPTVDPTVKYERQPEYLDATGGTLHPYQMEGLNWLRFSWAQGTDTILADEMGLGKTVQTAVFLYSLYKEGHSKGPFLVSAPLSTIINWEREFEMWAPDMYVVTYVGDKDSRAIIRENEFSFEDNAIRGGKKASRMKKEASVKFHVLLTSYELITIDMAILGSIDWACLIVDEAHRLKNNQSKFFRVLNGYSLQHKLLLTGTPLQNNLEELFHLLNFLTPERFHNLEGFLEEFADIAKEDQIKKLHDMLGPHMLRRLKADVFKNMPSKTELIVRVELSPMQKKYYKYILTRNFEALNARGGGNQVSLLNVVMDLKKCCNHPYLFPVAAMEAPKMPNGMYDGSALIRASGKLLLLQKMLKNLKEGGHRVLIFSQMTKMLDLLEDFLEHEGYKYERIDGGITGNMRQEAIDRFNAPGAQQFCFLLSTRAGGLGINLATADTVIIYDSDWNPHNDIQAFSRAHRIGQNKKVMIYRFVTRASVEERITQVAKKKMMLTHLVVRPGLGSKTGSMSKQELDDILKFGTEELFKDEATDGGGDNKEGEDSSVIHYDDKAIERLLDRNQDETEDTELQGMNEYLSSFKVAQYVVREEEMGEEEEVEREIIKQEESVDPDYWEKLLRHHYEQQQEDLARNLGKGKRIRKQVNYNDGSQEDRGVCGRPRPPPMGRSTRAVGPAHLPSLPPDWQDDQSDNQSDYSVASEEGDEDFDERSEAPRRPSRKGLRNDKDKPLPPLLARVGGNIEVLGFNARQRKAFLNAIMRYGMPPQDAFTTQWLVRDLRGKSEKEFKAYVSLFMRHLCEPGADGAETFADGVPREGLSRQHVLTRIGVMSLIRKKVQEFEHVNGRWSMPELAEVEENKKMSQPGSPSPKTPTPSTPGDTQPNTPAPVPPAEDGIKIEENSLKEEESIEGEKEVKSTAPETAIECTQAPAPASEDEKVVVEPPEGEEKVEKAEVKERTEEPMETEPKGAADVEKVEEKSAIDL

SEQ ID NO: 63821 - protein, 57 aa, Homo sapiens
  MOD_RES (1)..(1): Any amino acid
XAEASPEEEIYPYIRTLLHFDTREFLNVLALTFEDFKNDKQAVEYQQRIVDILLKHA

SEQ ID NO: 63822 - protein, 729 aa, Homo sapiens
MLYGTQAVPVRLKILLDRLFSVLKQEEVLHILHGLGWTLRDYVRGYILQDAAGKVLDRWAIMSREEEIITLQQFLRFGETKSIVELMAIQEKEGQAVAVPSSKTDSDIRTFIESNNRTRSPSLLAHLENSNPSSIHHFENIPNSLAFLLPFQYINPVSAPLLGLPPNGLLLEQPGLRLREPSLSTQNEYNESSESEVSPTPYKNDQTPNRNALTSITNVEPKTEPACVSPIQNSAPVSDLTKTEHPKSSFRIHRMRRMGSASRKGRVFCNACGKTFYDKGTLKIHYNAVHLKIKHRCTIEGCNMVFSSLRSRNRHSANPNPRLHMPMLRNNRDKDLIRATSGAATPVIASTKSNLALTSPGRPPMGFTTPPLDPVLQNPLPSQLVFSGLKTVQPVPPFYRSLLTPGEMVSPPTSLPTSPIIPTSGTIEQHPPPPSEPVVPAVMMATHEPSADLAPKKKPRKSSMPVKIEKEIIDTADEFDDEDDDPNDGGAVVNDMSHDNHCHSQEEMSPGMSVKDFSKHNRTRCISRTEIRRADSMTSEDQEPERDYENESESSEPKLGEESMEGDEHIHSEVSEKVLMNSERPDENHSEPSHQDVIKVKEEFTDPTYDMFYMSQYGLYNGGGASMAALHESFTSSLNYGSPQKFSPEGDLCSSPDPKICYVCKKSFKSSYSVKLHYRNVHLKEMHVCTVAGCNAAFPSRRSRDRNRNLRMERTIGPGHRDSLHLLPT

SEQ ID NO: 63823 - protein, 498 aa, Homo sapiens
  MOD_RES (1)..(1): Any amino acid
XCVNRWNMYLCECPLRFGGKNCEQAMPHPQLFSGESVVSWSDLNIIISVPWYLGLMFRTRKEDSVLMEATSGGPTSFRLQILNNYLQFEVSHGPSDVESVMLSGLRVTDGEWHHLLIELKNVKEDSEMKHLVTMTLDYGMDQNKADIGGMLPGLTVRSVVVGGASEDKVSVRRGFRGCMQGVRMGGTPTNVATLNMNNALKVRVKDGCDVDDPCTSSPCPPNSRCHDAWEDYSCVCDKGYLGINCVDACHLNPCENMGACVRSPGSPQGYVCECGPSHYGPYCENKLDLPCPRGWWGNPVCGPCHCAVSKGFDPDCNKTNGQCQCKENYYKLLAQDTCLPCDCFPHGSHSRTCDMATGQCACKPGVIGRQCNRCDNPFAEVTTLGCEVIYNGCPKAFEAGIWWPQTKFGQPAAVPCPKGSVGKVLGRNPIAFSLPGNTQSRQRAQQKHEQCSACGDARQSGPASPCSAAQAGAPGQVASLFIASGYLCEMGTLTVSTL

SEQ ID NO: 63824 - protein, 57 aa, Homo sapiens
  MOD_RES (1)..(1): Any amino acid
XRFTLLRGIEWLQPQREAISSVQNSSSSKLTQPRLVVSAMQLHPVQGNLIQPIQTKG

SEQ ID NO: 63825 - protein, 40 aa, Homo sapiens
MNPFWSMSTSSVRKRSEGEEKTLTGDVKTSPPRTAPKKQL

SEQ ID NO: 63826 - protein, 177 aa, Homo sapiens
  MOD_RES (1)..(1): Any amino acid
XPCHPECQPQNGSVTCFGPEADQCVACAHYKDPPFCVARCPSGVKPDLSYMPIWKFPDEEGACQPCPINCTHSCVDLDDKGCPAEQRASPLTSIISAVVGILLVVVLGVVFGILIKRRQQKIRKYTMRRLLQETELVEPLTPSGAMPNQAQMRILKETELRKVKGIWIPDGENVKIP

SEQ ID NO: 63827 - protein, 75 aa, Homo sapiens
  MOD_RES (1)..(1): Any amino acid
XEAAGCGSALLWPRLLLFGDSITQFSFQQGGWGASLADRLVRLQYQVGQNYPSKINQERKQFGHPSSSYNFLWGQ

SEQ ID NO: 63828 - protein, 118 aa, Homo sapiens
  MOD_RES (1)..(1): Any amino acid
XRPATLPSTRTWALSKAVEMTWRAWATCSCTSTWAPCPGRGSKQPPSARSMNGSARRRCQRPSRSSAKAIPPNSQHTSTSAAPCGLTTSPTTLTYVSSSATSSTGRASPMTTSLTGTC

SEQ ID NO: 63829 - protein, 178 aa, Homo sapiens
MVMSQGTYTFLTCFAGFWLIWGLIVLLCCFCSFLRRRLKRRQEERLREQNLRALELEPLELEGSLAGSPPGLAPPQPPPHRSRLEAPAHAHSHPHVHVHPLLHHGPAQPHAHAHPHPHHHALPHPPPTHLSVPPRPWSYPRQAESDMSKPPCYEEAVLMAEPPPPYSEVLTDTRGLYR

SEQ ID NO: 63830 - protein, 172 aa, Homo sapiens
  MOD_RES (1)..(1): Any amino acid
XRDIEEVSQGLLSLLGANRAEAQQRRLLGRHEQVVERLLETQDGAEKQLREILTMEKEVAQSLLNAKEQVHQGGVELQQLEAGLQEAGEEDTRLKASLLQLTRELEELKEIEADLERQEKEVDEDTTVTIPSAVYVAQLYHQLLEWPQLGNQRESTYLCQACSFTSVTGWDK

SEQ ID NO: 63831 - protein, 33 aa, Homo sapiens
FGNYIGPELDSDEDDDELGRETKDLDENPLLSQ

SEQ ID NO: 63832 - protein, 139 aa, Homo sapiens
MFPPSGSTGLIPPSHFQARPLSTLPRMAPTWLSDIPLVQPPGHQDVSERRLDTQRPQVTMWERDVSSDRQEPGRRGRSWGLEGSQALSQQAEVIVRQLQELRRLEEEVRLLRETSLQQKMRLEAQAMELEALARAEKAG

SEQ ID NO: 63833 - protein, 144 aa, Homo sapiens
  MOD_RES (1)..(1): Any amino acid
XVVTGREPDSRRQDGAMSSSDAEDDFLEPATPTATQAGHALPLLPQERCAEFPALRGPPTQGACSSCVQRGPVLCHRAPPGAAGEHAATEGREGAPSVSGTHALLQRPLGADCGDRPAACGPAEGPLCQAQGLCLQGGDAHHPL

SEQ ID NO: 63834 - protein, 76 aa, Homo sapiens
  MOD_RES (1)..(1): Any amino acid
XSLYGGNAVVELVTVKSFDTSLIRKTRTILEAKQAEKEHVYQKKKKERNKEVFMGVKSFNVCLSSELPAEEPSKSL

SEQ ID NO: 63835 - protein, 359 aa, Homo sapiens
MTSKIPVALLIHYQQNQASCGKRAIILETRQHRLFCADPKEQWVKDAMQHLDRQAAALTRNGGTFEKQIGEVKPRTTPAAGGMDESVVLEPEATGESSSLEPTPSSQEAQRALGTSPELPTGVTGSSGTRLPPTPKAQDGGPVGTELFRVPPVSTAATWQSSAPHQPGPSLWAEAKTSEAPSTQDPSTQASTASSPAPEENAPSEGQRVWGQGQSPRPENSLEREEMGPVPAHTDAFQDWGPGSMAHVSVVPVSSEGTPSREPVASGSWTPKAEEPIHATMDPQRLGVLITPVPDAQAATRRQAVGLLAFLGLLFCLGVAMFTYQSLQGCPRKMAGEMAEGLRYIPRSCGSNSYVLVPV

SEQ ID NO: 63836 - protein, 909 aa, Homo sapiens
MATCIGEKIEDFKVGNLLGKGSFAGVYRAESIHTGLEVAIKMIDKKAMYKAGMVQRVQNEVKIHCQLKHPSILELYNYFEDSNYVYLVLEMCHNGEMNRYLKNRVKPFSENEARHFMHQIITGMLYLHSHGILHRDLTLSNLLLTRNMNIKIADFGLATQLKMPHEKHYTLCGTPNYISPEIATRSAHGLESDVWSLGCMFYTLLIGRPPFDTDTVKNTLNKVVLADYEMPSFLSIEAKDLIHQLLRRNPADRLSLSSVLDHPFMSRNSSTKSKDLGTVEDSIDSGHATISTAITASSSTSISGSLFDKRRLLIGQPLPNKMTVFPKNKSSTDFSSSGDGNSFYTQWGNQETSNSGRGRVIQDAEERPHSRYLRRAYSSDRSGTSNSQSQAKTYTMERCHSAEMLSVSKRSGGGENEESSNHLCPGKTPFPFADPTPQTETVQQWFGNLQINAHLRKTTEYDSISPNRDFQGHPDLQKDTSKNAWTDTKVKKNSDASDNAHSVKQQNTMKYMTALHSKPEIIQQECVFGSDPLSEQSKTRGMEPPWGYQNRTLRSITSPLVAHRLKPIRQKTKKAVVSILDSEEITIYYPNGGRGFPLADRPPSPTDNISRYSFDNLPEKYWRKYQYASRFVQLVRSKSPKITYFTRYAKCILMENSPGADFEVWFYDGVKIHKTEDFIQVIEKTGKSYTLKSESEVNSLKEEIKMYMDHANEGHRICLALESIISEEERKTRSAPFFPIIIGRKPGSTSSPKALSPPPSVDSNYPTRERASFNRMVMHSAASPTQAPILNPSMVTNEGLGLTTTASGTDISSNSLKDCLPKSAQLLKSVFVKNVGWATQLTSGAVWVQFNDGSQLVVQAGVSSISYTSPNGQTTRYGENEKLPDYIKQKLQCLSSILLMFSNPTPNFH

SEQ ID NO: 63837 - protein, 301 aa, Homo sapiens
MVAGESGLGKSTLVHSLFLTDLYKDRKLLSAEERISQTVEILKHTVDIEEKGVKLKLTIVDTPGFGDAVNNTECWKPITDYVDQQFEQYFRDESGLNRKNIQDNRVHCCLYFISPFGHGLRPVDVGFMKALHEKVNIVPLIAKADCLVPSEIRKLKERIREEIDKFGIHVYQFPECDSDEDEDFKQQDRELKESAPFAVIGSNTVVEAKGQRVRGRLYPWGIVEVENQAHCDFVKLRNMLIRTHMHDLKDVTCDVHYENYRAHCIQQMTSKLTQDSRMESPIPILPLPTPDAETEKLIRMK

SEQ ID NO: 63838 - protein, 89 aa, Homo sapiens
EYLEVQRQLAIQRLQEQEKERQMRLEQQKQTLQAMPAAGGVLYQPSGPASFPSTFSPAGSVEGSPMHGVYMSQPAPAAGPYPSMPSTAA

SEQ ID NO: 63839 - protein, 119 aa, Homo sapiens
MDFVMKQALGGATKDMGKMLGGEEEKDPDAQKKEEERQEALRQQEEERKAKHARMEAEREKVRQQIRDKYGLKKKEEKEAEEKAALEQPCEGSLTRPKKAIPAGCGDEEEEEEESILDT

SEQ ID NO: 63840 - protein, 90 aa, Homo sapiens
MVVALRYVWPLLLCSPCLLIQIPEELMEPPVITEQSPRRLVVFPTDDISLKCEASGKPEVQFRWTRDGVHFKPKEELGVTVYQSPHSGSF

SEQ ID NO: 63841 - protein, 43 aa, Homo sapiens
MACAAARSPADQDRFICIYPAYLNNKKTIAEGRRIPISKCLCF

SEQ ID NO: 63842 - protein, 108 aa, Homo sapiens
MDDRCYPVIFPDERNFRPFTSDSLAAIEKRIAIQKEKKKSKDQTGEVPQPRPQLDLKASRKLPKLYGDIPRELIGKPLEDLDPFYRNHKVLCFPSLILLEYPIGHLWC

SEQ ID NO: 63843 - protein, 62 aa, Homo sapiens
MILANVFCLFFFLGPGPLLRRNGVQREKTCSYIQGRMMPEFSLGYEEGCPTESPWCALAKWV

SEQ ID NO: 63844 - protein, 119 aa, Homo sapiens
MATVMAATAAERAVLEEEFRWLLHDEVHAVLKQLQDILKEASLRFTLPGSGTEGPAKQENFILGSCGTDQVKGVLTLQGDALSQAVSPPALSPPILPMGKSMGAPTFSLYKPCDSGRDP

SEQ ID NO: 63845 - protein, 75 aa, Homo sapiens
MAAHGGSAASSALKGLIQQFTTITEKKFVPQFLKSRKYWWNQNHYLVLLKDDGLHVQFLMVSGIFRLKLFGKNKN

SEQ ID NO: 63846 - protein, 53 aa, Homo sapiens
MFHGIPATPGIGAPGNKPELYEEVKLYKNAREREKYDNMAELFAVVKTMQALE

SEQ ID NO: 63847 - protein, 60 aa, Homo sapiens
  MOD_RES (1)..(1): Any amino acid
XVSGFYPKPVWVMWMRGEQEQRGTQRGDVLPNADETWWIFHLSHPDLFDCDSYPGHIGCS

SEQ ID NO: 63848 - protein, 46 aa, Homo sapiens
MRQTPLTCSGHTRPVVDLAFSGITPYGYFLISACKAKCGMLSQEMN

SEQ ID NO: 63849 - protein, 182 aa, Homo sapiens
MDKEKLDVKIEYCNYAMDSSVENMYVNKVWVQCENENCLKWRLLSSEDSAKVDHDEPWYCFMNTDSRYNNCSISEEDFPEESQLHQCGFKIVYSQLPLGSLVLVKLQNWPSWPGILCPDRFKGKYVTYDPDGNVEEYHIEFLGDPHSRSWIKATFVGHYSITLKINPKHMTKLLHWSRKGCL

SEQ ID NO: 63850 - protein, 253 aa, Homo sapiens
MRGAPGNCVGAEQALARRKRAQTVAIRGHPRPPGPPGDTRAESPPDPLQSAGDDEDDEEEDEEEEIDVVTVEKRRSSSNTKAVTTFTITVRPKNAALGPGRAQSSELILKRCLPIHQQHNYAAPSPYVESEDAPPQKKIKSEASPRPLKSVIPPKAKSLSPRNSDSEDSERRRNHNILERQRRNDLRSSFLTLRDHVPELVKNEKAAKVVILKKATEYVHSLQAEEHQLLLEKEKLQARQQQLLKKIEHARTC

SEQ ID NO: 63851 - protein, 58 aa, Homo sapiens
MEGGLADGEPDRTSLLGDSKDVLGPSTVVANSDESQLLTPGKMSQRQGKEAYPTPTKD

SEQ ID NO: 63852 - protein, 165 aa, Homo sapiens
EEKHKLHERITDREEKYNQAKEKLQRAAIAQKKRKSLHENKLKRLQEKVEVLEAKKEELETENQVLNRQNVPFEDYTRLQKRLKDIQRRHNEFRSLILVPNMPPTASINPVSFQSSAMVPSMELPFPPHMQEEQHQRELSLLRKRLEELETTQRKQLEELGSSGE

SEQ ID NO: 63853 - protein, 1375 aa, Homo sapiens
MAGYVPGQQPANRSQEKEFVQAYEDVLERYKDERDRVQKKTFTKWVNKHLMKVRKHINDLYEDLRDGHNLISLLEVLSGIKLPREKGRMRFHRLQNVQIALDFLKQRQVKLVNIRNDDITDGNPKLTLGLIWTIILHFQISDIYISGESGDMSAKEKLLLWTQKVTAGYTGIKCTNFSSCWSDGKMFNALIHRYRPDLVDMERVQIQSNRENLEQAFEVAERLGVTRLLDAEDVDVPSPDEKSVITYVSSIYDAFPKVPEGGEGISATEVDSRWQEYQSRVDSLIPWIKQHTILMSDKTFPQNPVELKALYNQYIHFKETEILAKEREKGRIEELYKLLEVWIEFGRIKLPQGYHPNDVEEEWGKLIIEMLEREKSLRPAVERLELLLQIANKIQNGALNCEEKLTLAKNTLQADAAHLESGQPVQCESDVIMYIQECEGLIRQLQVDLQILRDENYYQLEELAFRVMRLQDELVTLRLECTNLYRKGHFTSLELVPPSTLTTTHLKAEPLTKATHSSSTSWFRKPMTRAELVAISSSEDEGNLRFVYELLSWVEEMQMKLERAEWGNDLPSVELQLETQQHIHTSVEELGSSVKEARLYEGKMSQNFHTSYAETLGKLETQYCKLKETSSFRMRHLQSLHKFVSRATAELIWLNEKEEEELAYDWSDNNSNISAKRNYFSELTMELEEKQDVFRSLQDTAELLSLENHPAKQTVEAYSAAVQSQLQWMKQLCLCVEQHVKENTAYFQFFSDARELESFLRNLQDSIKRKYSCDHNTSLSRLEDLLQDSMDEKEQLIQSKSSVASLVGRSKTIVQLKPRSPDHVLKNTISVKAVCDYRQIEITICKNDECVLEDNSQRTKWKVISPTGNEAMVPSVCFLIPPPNKDAIEMASRVEQSYQKVMALWHQLHVNTKSLISWNYLRKDLDLVQTWNLEKLRSSAPGECHQIMKNLQAHYEDFLQDSRDSVLFSVADRLRLEEEVEACKARFQHLMKSMENEDKEETVAKMYISELKNIRLRLEEYEQRVVKRIQSLASSRTDRDAWQDNALRIAEQEHTQEDLQQLRSDLDAVSMKCDSFLHQSPSSSSVPTLRSELNLLVEKMDHVYGLSTVYLNKLKTVDVIVRSIQDAELLVKGYEIKLSQEEVVLADLSALEAHWSTLRHWLSDVKDKNSVFSVLDEEIAKAKVVAEQMSRLTPERNLDLERYQEKGSQLQERWHRVIAQLEIRQSELESIQEVLGDYRACHGTLIKWIEETTAQQEMMKPGQAEDSRVLSEQLSQQTALFAEIERNQTKLDQCQKFSQQYSTIVKDYELQLMTYKAFVESQQKSPGKRRRMLSSSDAITQEFMDLRTRYTALVTLTTQHVKYISDALRRLEEEE

SEQ ID NO: 63854 - protein, 86 aa, Homo sapiens
MEKEKGNDDGIPDQENSLDFSEHFNQLELLETHGHLIPTGTQSLWVGNSDEDEEQDDKNEEWYRLQEKKMEKDPSRLLLWAAEKNR

SEQ ID NO: 63855 - protein, 154 aa, Homo sapiens
MAAEADGPLKRLLVPILLPEKCYDQLFVQWDLLHVPCLKILLSKGLGLGIVAGSLLVKLPQVFKILGAKSAEGLSLQSVMLELVALTGTMVYSITNNFPFSFSRQPPTTTTGTQASSQPSQSSCCLGAPWPESSLPFRGEHPILSALRKDSGVQ

SEQ ID NO: 63856 - protein, 61 aa, Homo sapiens
MGVQMSEEMDNITAEEIIDKHLQKDLDAEENQNVAKTLRGKVREKLKISKINKGEKSSTEQ

SEQ ID NO: 63857 - protein, 235 aa, Homo sapiens
MALTVDVAGPAPWGFRITGGRDFHTPIMVTKVAERGKAKDADLRPGDIIVAINGESAEGMLHAEAQSKIRQSPSPLRLQLDRSQATSPGQTNGDSSLEVLATRFQGSVRTYTESQSSLRSSYSSPTSLSPRAGSPFSPPPSSSSLTGEAAISRSFQSLACSPGLPAADRLSYSGRPGSRQAGLGRAGDSAVLVLPPSPGPRSSRPSMDSEGGSLLLDEDSEVFKMLQENREGRAA

SEQ ID NO: 63858 - protein, 490 aa, Homo sapiens
MTLTLSVLICLGLSVGPRTCVQAGTLPKPTLWAEPASVIARGKPVTLWCQGPLETEEYRLDKEGLPWARKRQNPLEPGAKAKFHIPSTVYDSAGRYRCYYETPAGWSEPSDPLELVATGVSRKPSLLIPQGSVVARGGSLTLQCRSDVGYDIFVLYKEGEHDLVQGSGQQPQAGLSQANFTLGPVSRSHGGQYRCYGAHNLSPRWSAPSDPLDILIAGLIPDIPALSVQPGPKVASGENVTLLCQSWHQIDTFFLTKEGAAHPPLCLKSKYQSYRHQAEFSMSPVTSAQGGTYRCYSAIRSYPYLLSSPSYPQELVVSGPSGDPSLSPTGSTPTPGPEDQPLTPTGLDPQSGLGRHLGVVTGVSVAFVLLLFLLLFLLLRHRHQSKHRTSAHFYRPAGAAGPEPKDQGLQKRASPVADIQEEILNAAVKDTQPKDGVEMDARAAASEAPQDVTYAQLHSLTLRREATEPPPSQEREPPAEPSIYAPLAIH

SEQ ID NO: 63859 - protein, 93 aa, Homo sapiens
MAPKKRPETQKTSEIVLRPRNKRSRSPLELEPEAKKLCAKGSGPSRRCDSDCLWVGLAGPQILPPCRSIVRTLHQHKLGRASWPSVQQGLQQS

SEQ ID NO: 63860 - protein, 116 aa, Homo sapiens
MVLLHWCLLWLLFPLSSRTQKLPTRDEELFQMQIRDKAFFHDSSVIPDGAEISSYLFRDTPKRYFFVVEEDNTPLSVTVTPCDAPLEWKLSLQELPEDRSGEGSGDLEPLEQQKQQ

SEQ ID NO: 63861 - protein, 157 aa, Homo sapiens
MREYKLVVLGSGGVGKSALTVQFVQGIFVEKYDPTIEDSYRKQVEVDAQQCMLEILDTAGTEQFTAMRDLYMKNGQGFALVYSITAQSTFNDLQDLREQILRVKDTDDVPMILVGNKCDLEDERVVGKEQGQNLARQWNNCAFLESSAKSKINVNEV

SEQ ID NO: 63862 - protein, 42 aa, Homo sapiens
MVDLTQVMDDEVFMAFASYATIILSKMMLMSTATAFYRLTRK

SEQ ID NO: 63863 - protein, 939 aa, Homo sapiens
MVPWVRTMGQKLKQRLRLDVGREICRQYPLFCFLLLCLSAASLLLNRYIHILMIFWSFVAGVVTFYCSLGPDSLLPNIFFTIKYKPKQLGLQELFPQGHSCAVCGKVKCKRHRPSLLLENYQPWLDLKISSKVDASLSEVLELVLENFVYPWYRDVTDDESFVDELRITLRFFASVLIRRIHKVDIPSIITKKLLKAAMKHIEVIVKARQKVKNTEFLQQAALEEYGPELHVALRSRRDELHYLRKLTELLFPYILPPKATDCRSLTLLIREILSGSVFLPSLDFLADPDTVNHLLIIFIDDSPPEKATEPASPLVPFLQKFAEPRNKKPSVLKLELKQIREQQDLLFRFMNFLKQEGAVHVLQFCLTVEEFNDRILRPELSNDEMLSLHEELQKIYKTYCLDESIDKIRFDPFIVEEIQRIAEGPYIDVVKLQTMRCLFEAYEHVLSLLENVFTPMFCHSDEYFRQLLRGAESPTRNSKLNRGSLSLDDFRNTQKRGESFGISRIGSKIKGVFKSTTMEGAMLPNYGVAEGEDDFIEEGIVVMEDDSPVEAVSTPNTPRNLAAWKISIPYVDFFEDPSSERKEKKERIPVFCIDVERNDRRAVGHEPEHWSVYRRYLEFYVLESKLTEFHGAFPDAQLPSKRIIGPKNYEFLKSKREEFQEYLQKLLQHPELSNSQLLADFLSPNGGETQFLDKILPDVNLGKIIKSVPGKLMKEKGQHLEPFIMNFINSCESPKPKPSRPELTILSPTSENNKKLFNDLFKNNANRAENTERKQNQNYFMEVMTVEGVYDYLMYVGRVVFQVPDWLHHLLMGTRILFKNTLEMYTDYYLQCKLEQLFQEHRLVSLITLLRDAIFCENTEPRSLQDKQKGAKQTFEEMMNYIPDLLVKCIGEETKYESIRLLFDGLQQPVLNKQLTYVLLDIVIQELFPELNKVTEKQ

SEQ ID NO: 63864 - protein, 68 aa, Homo sapiens
MPWFHGKITREQAERLLYPPETGLFLVRESTNYPGDYTLCVSCDGKVEHYRIMYHASKLSIDEEVYFE

SEQ ID NO: 63865 - protein, 338 aa, Homo sapiens
MAASALYACTKCTQRYPFEELSQGQQLCKECRIAHPIVKCTYCRSEFQQESKTNTICKKCAQNVKQFGTPKPCQYCNIIAAFIGTKCQRCTNSEKKYGPPQTCEQCKQQCAFDRKEEGRRKVDGKLLCWLCTLSYKRVLQKTKEQRKSLGSSHSNSSSSSLTEKDQHHPKHHHHHHHHHHRHSSSHHKISNLSPEEEQGLWKQSHKSSATIQNETPKKKPKLESKPSNGDSSINQSADSGGTDNFVLISQLKEEVMSLKRLLQQRDQTILEKDKKLTELKADFQYQESNLRTKMNSMEKAHKETVEQLQAKNRELLKQVAALSKGKKFDKSGSILTSP

SEQ ID NO: 63866 - protein, 300 aa, Homo sapiens
MRPEGSLTYRVPERLRQGFCGVGRAAQALVCASAKEGTAFRMEAVQEGAAGVESEQAALGEEAVLLLDDIMAEVEVVAEVEVVAEEEGLVERREEAQRAQQAVPGPGPMTPESALEELLAVQVELEPVNAQARKAFSRQREKMERRRKPHLDRRGAVIQSVPGFWANVIANHPQMSALITDEDEDMLSYMVSLEVEEEKHPVHLCKIMLFFRSNPYFQNKVITKEYLVNITEYRASHSTPIEWYPDYEVEAYRRRHHNSSLNFFNWFSDHNFAGSNKIAESPDRSYVRTCGAIPCNTTRG

SEQ ID NO: 63867 - protein, 54 aa, Homo sapiens
  MOD_RES (1)..(1): Any amino acid
XLQGAEEDEEKCLDTMSCPPWKNGQDPCTLEPQAWGPPSRCLQGHLLWKTFPWI

SEQ ID NO: 63868 - protein, 154 aa, Homo sapiens
MLVSLKMSYKAAAGEDYKADCPPGNPAPTSNHGPDATEAEEDFVDPWTVQTSSAKGIDYDKLIVRFGSSKIDKELINRIERATGQRPHHFLRRGIFFSHRDMNQVLDAYENKKPFYLYTGRGPSSEAMHVGHLIPFIFTKWLQDVFNVPLVIQM

SEQ ID NO: 63869 - protein, 144 aa, Homo sapiens
MSSILEERILGADTSVDLEETGRVLSIGDGIARVHGLRNVQAEEMVEFSSGLKGMSLNLEPDNVGVVVFGNDKLIKEGDIVKRTGAIVDVPVGEELLGRVVDALGNAIDGKGPIGSKTRRRVGLKAPGIIPRISVREPMQTGIK

SEQ ID NO: 63870 - protein, 314 aa, Homo sapiens
MDEGGCSQAAPAFAEGAGLGSGAPALSGSCLLTSGRCRCHRHRTALSIHPPLARPLFWSQFLLHHSHEADSLQKEEARLPQTKEEAALLSQEFAEAWGQKAKELYEPIWQNFTDPQLRRIIGAVRTLGSANLPLAKRQQYNALLSNMSRIYSTAKVCLPNKTATCWSLDPDLTNILASSRSYAMLLFAWEGWHNAAGIPLKPLYEDFTALSNEAYKQDGFTDTGAYWRSWYNSPTFEDDLEHLYQQLEPLYLNLHAFVRRALHRRYGDRYINLRGPIPAHLLGDMWAQSWENIYDMVVPFPDKPNLDVTSTMLQ

SEQ ID NO: 63871 - protein, 58 aa, Homo sapiens
MILVCDRVSEDGINRQKAQEWCIKHGFELVELSPEELPEEDDDFPESTGVKRIVQALN

SEQ ID NO: 63872 - protein, 231 aa, Homo sapiens
MWLGRRALCALVLLLACASLGLLYASTRDAPGLRLPLAPWAPPQSPRRPELPDLAPEPRYAHIPVRIKEQVVGLLAWNNCSCESSGGGLPLPFQKQVRAIDLTKAFDPAELRAASATREQEFQAFLSRSQSPADQLLIAPANSPLQYPLQGVEVQPLRSILVPGEPDCLPRHLGRGRGSDWSYSHWRGSGRSHPCQPRAGPTQQATTTGHLQQPKLPDQHSRHSPVLHRGT

SEQ ID NO: 63873 - protein, 331 aa, Homo sapiens
MGLLVFVRNLLLALCLFLVLGFLYYSAWKLHLLQWEEDSNSVVLSFDSAGQTLGSEYDRLGFLLNLDSKLSPRTLCTVVFGLDCILESPGEPKKLLMPASHPLEILKSLSEDTAFALGFLKLPRPAELATKYANFSEGACKPGYASALMTAIFPRFSKPAPMFLDDSFRKWARIREFVPPFGIKGQDNLIKAILSVTKEYRLTPALDSLRCRRCIIVGNGGVLANKSLGSRIDDYDIVVRLNSAPVKGFEKDVGSKTTLRITYPEGAMQRPEQYERDSLFVLAGFKWQDFKWLKYIVYKERVSWTHNIQREKEFLRKLVKARVITDLSSGI

SEQ ID NO: 63874 - protein, 77 aa, Homo sapiens
MSNVSEERRKRQQNIKEGLQFIQSPLSYPGTQEQYAVYLRALVRNLFNEGNDVYREHDWNNSISQYTEALNIADYAK

SEQ ID NO: 63875 - protein, 113 aa, Homo sapiens
MFEDKPHAEGAAVVAAAGEALQALCQELNLDEGSAAEALDDFTAIRGNYSLEGEVTHWLACSLYVACRKSIIPTVGKGIMEGNCVSLTRILRSAKLRGCCCPMSPGQLTFWQP

SEQ ID NO: 63876 - protein, 412 aa, Homo sapiens
MKLLTRAGSFSRFYSLKVAPKVKATAAPAGAPPQPQDLEFTKLPNGLVIASLENYSPVSRIGLFIKAGSRYEDFSNLGTTHLLRLTSSLTTKGASSFKITRGIEAVGGKLSVTATRENMAYTVECLRGDVDILMEFLLNVTTAPEFRRWEVADLQPQLKIDKAVAFQNPQTHVIENLHAAAYRNALANPLYCPDYRIGKVTSEELHYFVQNHFTSARMALIGLGVSHPVLKQVAEQFLNMRGGLGLSGAKANYRGGEIREQNGDSLVHAAFVAESAVAGSAEANAFSVLQHVLGAGPHVKRGSNTTSHLHQAVAKATQQPFDVSAFNASYSDSGLFGIYTISQATAAGDVIKAAYNQVKTIAQGNLSNTDVQAAKRQRSLFLARSQWQQVEIWDIHLLLMSCNTDAHITGES

SEQ ID NO: 63877 - protein, 119 aa, Homo sapiens
MGELFECVLFTASLAKYADPVTDLLDRCGVFRARLFRESCVFHQGCYVKDLSRLGRDLRKTLILDNSPASYIFHPENAVPVQSWFDDMADTELLNLIPIFEELSGAEDVYTSLGQLRAP

SEQ ID NO: 63878 - protein, 296 aa, Homo sapiens
  MOD_RES (1)..(1): Any amino acid
XHGIQDINCIDACIPPLLDISAMCRVPCLICSSRPASLDSGRTSTSNSNNNASLHEVKGAVNNQSRPQSHSSGEFSLLHDHEAWSSSGSSPIQYLKRQTRSSPVLQHKISETLESRHHKIKTGSPGSEVVTLQQFLEESNKLTSVQIKSSSQENLLDEVMKSLSVSSDFLGKDKPVSCGLARSVSGKTPGDFYDRRTTKPEFLRPGPRKTEDTYFISSAGKPTPGTQGKIKLVKESSLSRQSKDSNPYATLPRASSVISTAEGTTRRTSIHDFLTKDSRLPISVDSPPAAADSNTT

SEQ ID NO: 63879 - protein, 102 aa, Homo sapiens
VVTFDAGGVSGHSNHIALYAAVRVLCAHASVCECAAQVHLPSGSALVSASYAGCPLRAQQQRSGTGQESHVLPPQPAPLVPPPLHYLLPVHENQLTELPLKP

SEQ ID NO: 63880 - protein, 329 aa, Homo sapiens
  MOD_RES (1)..(1): Any amino acid
XVAAAAAAGPVFWRRLLGLLPGRPGLAALLGRLSDRLGRNRDRQRRRSPWLLLAPLLSPAVPQVTSPPCCLCPEGVHRFQWIRNLVPEFGVSSSHVRVLSSPAEFFELMKGQIRVAKRRVVMASLYLGTGPLEQELVDCLESTLEKSLQAKFPSNLKVSILLDFTRGSRGRKNSRTMLLPLLRRFPEQVRVSLFHTPHLRGLLRLLIPERFNETIGLQHIKVYLFDNSVILSGANLSDSYFTNRQDRYVFLQDCAEIADFFTELVDAVGDVSLQLQGDDTVQVVDGMVHPYKGDRAEYCKAANKRVMDVINSARTRQQMLHAQTFHSNS

SEQ ID NO: 63881 - protein, 377 aa, Homo sapiens
MAEAELHKERLQAIAEKRKRQTEIEGKRQQLDEQILLLQHSKSKVLREKWLLQGIPAGTAEEEEARRRQSEEDEFRVKQLEDNIQRLEQEIQTLESEESQISAKEQIILEKLKETEKSFKDFQKGFSSTDGAVYAMEINVEKDKQTGETKILSTSTIGPEGVHQKGVKVYDDGTKVVYEVRSGGTVVENGVHKLSTKDVEELIQKAGQSSLGGGHVSERTVIADGSLSHPKEHMLCKEAKLEMVHKSRKDHSSGNPGQQAQAPSAAGPEANLDQPVTMIFMGYQNIEDEEETKKVLGYDETIKAELVLIDEDDEKSLREKTVTDVSTIDGNAAELVSGRPVSDTTEPSSPEGKEESLATEPAPGTQKKKRCQCCVVM

SEQ ID NO: 63882 - protein, 54 aa, Homo sapiens
MNRKKLQKLTDTLTKNCKHLFRGFDKDNDGCVNVLEWIHGLSLFLRGSLEEKMK

SEQ ID NO: 63883 - protein, 1207 aa, Homo sapiens
MEVDTEEKRHRTRSKGVRVPVEPAIQELFSCPTPGCDGSGHVSGKYARHRSVYGCPLAKKRKTQDKQPQEPAPKRKPFAVKADSSSVDECDDSDGTEDMDEKEEDEGEEYSEDNDEPGDEDEEDEEGDREEEEEIEEEDEDDDEDGEDVEDEEEEEEEEEEEEEEEENEDHQMNCHNTRIMQDTEKDDNNNDEYDNYDELVAKSLLNLGKIAEDAAYRARTESEMNSNTSNSLEDDSDKNENLGRKSELSLDLDSDVVRETVDSLKLLAQGHGVVLSENMNDRNYADSMSQQDSRNMNYVMLGKPMNNGLMEKMVEESDEEVCLSSLECLRNQCFDLARKLSETNPQERNPQQNMNIRQHVRPEEDFPGRTPDRNYSDMLNLMRLEEQLSPRSRVFASCAKEDGCHERDDDTTSVNSDRSEEVFDMTKGNLTLLEKAIALETERAKAMREKMAMEAGRRDNMRSYEDQSPRQLPGEDRKPKSSDSHVKKPYYGKDPSRTEKKESKCPTPGCDGTGHVTGLYPHHRSLSGCPHKDRVPPEILAMHESVLKCPTPGCTGRGHVNSNRNSHRSLSGCPIAAAEKLAKAQEKHQSCDVSKSSQASDRVLRPMCFVKQLEIPQYGYRNNVPTTTPRSNLAKELEKYSKTSFEYNSYDNHTYGKRAIAPKVQTRDISPKGYDDAKRYCKDPSPSSSSTSSYAPSSSSNLSCGGGSSASSTCSKSSFDYTHDMEAAHMAATAILNLSTRCREMPQNLSTKPQDLCATRNPDMEVDENGTLDLSMNKQRPRDSCCPILTPLEPMSPQQQAVMNNRCFQLGEGDCWDLPVDYTKMKPRRIDEDESKDITPEDLDPFQEALEERRYPGEVTIPSPKPKYPQCKESKKDLITCPTPGCDGSGHVTGNYASHRSLSGCPLADKSIRSMLATSSQELKCPTPGCDGSGHITGNYASHRSLSGCPRAKKSGIRIAQSKEDKEDQEPIRCPVPGCDGQGHITGKYASHRSASGCPLAAKRQKDGYLNGSQFSWKSVKTEGMSCPTPGCDGSGHVSGSFLTHRSLSGCPRATSAMKKAKLSGEQMLTIKQRASNGIENDEEIKQLDEEIKELNESNSQMEADMIKLRTQITTMESNLKTIEEENKVIEQQNESLLHELANLSQSLIHSLANIQLPHMDPINEQNFDAYVTTLTEMYTNQDRYQSPENKALLENIKQAVRGIQV

SEQ ID NO: 63884 - protein, 114 aa, Homo sapiens
VLCCAPSNIAVDNLVERLALCKQRILRLGHPARLLESIQQHSLDAVLARSDSAQIVADIRKDIDQVKNKKTQDKREKSNFRNEIKLLRKELKEREEAAMLESLTSANVVLATNT

SEQ ID NO: 63885 - protein, 124 aa, Homo sapiens
GGRWPPADCGCCCRSCRSCRSCRCRRWVGRRSLSVRPPRGGSLLGPRPSRAHPCPHRWRWASRTAAATPRTSARPRPAGAACGTWACTPRSLHPPTMKLSRWPSPERKDQHSPRNPALSLGPRA

SEQ ID NO: 63886 - protein, 687 aa, Homo sapiens
MKELQAVRETLLRQHEAELLRVIKIKDNENQRLQALLSALRDGGPEKVKTVLLSEAKEEAKKGFEVEKVKMQQEISELKGAKRQVEEALTLVIQADKIKAAEIRSVYHLHQEEITRIKKECEREIRRLQLDEKDARRFQLKIAELSAIIRKLEDRNALLSEERNELLKRVREAESQYKPLLDKNKRLSRKNEDLSHALRRMENKLKFVTQENIEMRQRAGIIRRPSSLNDLDQSQDEREVDFLKLQIVEQQNLIDELSKTLETAGYVKSVLERDKLLRFRKQRKKMAKLPKPVVVETFFGYDEEASLESDGSSVSYQTDRTDQTPCTPDDDLEEGMAKEETELRFRQLTMEYQALQRAYALLQEQVGGTLDAEREVKTREQLQAEVQRAQARIEDLEKALAEQGQDMKWIEEKQALYRRNQELVEKIKQMETEEARLRHEVQDARDQNELLEFRILELEERERKSPAISFHHTPFVDGKSPLQVYCEAEGVTDIVVAELMKKLDILGDNANLTNEEQVVVIQARTVLTLAEKWLQQIEETEAALQRKMVDLESEKELFSKQKGYLDEELDYRKQALDQANKHILELEAMLYDALQQEAGAKVAELLSEEEREKLKVAVEQWKRQVMSELRERDAQILRERMELLQLAQQRIKELEERIEAQKRQIKELEEKFLFLFLFFSLAFILWS

SEQ ID NO: 63887 - protein, 616 aa, Homo sapiens
MLGFPPGRPQLPVQLRPQTRMATALRDPASGSVTFEDVAVYFSWEEWDLLDEAQKHLYFDVMLENFALTSSLGLISSWSHVVAQLGLGEVPSVLHRMFMTPASARWDQRGPGLHEWHLGKGMSSGCWCGVEHEETPSEQRISGERVPQFRTSKEGSSSQNADSCEICCLVLRDILHLAEHQGTNCGQKLHTCGKQFYISANLQQHQRQHITEAPFRSYVDTASFTQSCIVHVSEKPFTCREIRKDFLANMRFLHQDATQTGEKPNNSNKCAVAFYSGKSHHNWGKCSKAFSHIDTLVQDQRILTREGLFECSKCGKACTRRCNLIQHQKVHSEERPYECNECGKFFTYYSSFIIHQRVHTGERPYACPECGKSFSQIYSLNSHRKVHTGERPYECGECGKSFSQRSNLMQHRRVHTGERPYECSECGKSFSQNFSLIYHQRVHTGERPHECNECGKSFSRSSSLIHHRRLHTGERPYECSKCGKSFKQSSSFSSHRKVHTGERPYVCGECGKSFSHSSNLKNHQRVHTGERPVECSECSKSFSCKSNLIKHLRVHTGERPYECSECGKSFSQSSSLIQHRRVHTGKRPYQCSQCGKSFGCKSVLIQHQRVHIGEKP

SEQ ID NO: 63888 - protein, 160 aa, Homo sapiens
MYMESLEACRNLIPVSRVVHNILTQLERTFNLSLLVTLFSQINLREYPNLVTIYRSFKRVGASYEWQSRDTPILLEAPTGLAEGSSLHTPLALPPPQPPQPSCSPCAPRVSEPGTSSQQSDEILSESPSPSDPVLPLPALIQEGRSTSVTNDKLTSKMNA

SEQ ID NO: 63889 - protein, 59 aa, Homo sapiens
  MOD_RES (1)..(1): Any amino acid
XIGKEKPNKDCRRLWPLISLMSRNKILSGDTACQGELSHPCSTTHLHLRSEQPPASLGF

SEQ ID NO: 63890 - protein, 1131 aa, Homo sapiens
  MOD_RES (1)..(1): Any amino acid
XISLKPKIPLSPEVTHTKPAPEPQTLLPSQSTIGPETPGTKPSTTLALEPATIQPEPLVPTTASKPSERPKTTHRPDAPQIQPGSKPPKQLLPKPQTTAEPDMPPTKSVSEPVPFETEAPSMTIVPTTDIEPVTVRTEATVTTLAPKTSQRTRTRRPRPKHKTTPRPETLQTKLDFGPITPGTSSAPTTTTKRTRRPHPKPKTTPHPEVPQTKLVPATILEPVLRTEASGTTAVPATIFEPVSPIKEAPGTTFVPVTDLEPVTFRTEIPATTLATKTSKRTRPPRPRPKTTPSPQAPETKPVPATVLEPVTLRPEASTTLASKTSQRTRRPRLRTKTTPRPEAPESKPVPTAELKPVTLRTETWVTTQAPKTSQRTRRPRPKTKTTPSPEVPQTKLVPSTDLEPGTLRTEAPKTMVVTTVLEPDTFRTKFPETTLAPKTQRTRRPRPRPKTTSSPEVPQNKSVSVTGFEPVVHSTDAPGTTFALTELQTLILKPVTSPSLEMTESQPVSDVLESVTLSTESPKETIAPAKTDYVYPTAKAPLWPEEPKTEVVESITYVSEPPETTLETSPLPSQSITLPSPDEPQTEPAPKQTPRAPPKPKTSPRPRIPQTQPVPKVPQRVTAKPKTSPSPEVSYTTPAPKDVLLPHKPYPEVSQSEPAPLETRGIPFIPMISPSPSQEELQTTLEETDQSTQEPFTTKIPRTTELAKTTQAPHRFYTTVRPRTSDKPHIRPGVKQAPRPSGADRNVSVDSTHPTKKPGTRRPPLPPRPTHPRRKPLPPNNVTGKPGSAGIISSGPITTPPLRSTPRPTGTPLERIETDIKQPTVPASGEELENITDFSSSPTRETDPLGKPRFKGPHVRYIQKPDNSPCSITDSVKRFPKEEATEGNATSPPQNPPTNLTVVTVEGCPSFVILDWEKPLNDTVTEYEVISRENGSFSGKNKSIQMTNQTFSTVENLKPNTSYEFQVKPKNPLGEGPVSNTVAFSTESADPRVSEPVSAGRDAIWTERPFNSDSYSECKGKQYVKRTWYKKFVGVQLCNSLRYKIYLSDSLTGKFYNIGDQRGHGEDHCQFVDSFLDGRTGQQLTSDQLPIKEGYFRAVRQEPVQFGEIGGHTQINYVQWYECGTTIPGKW

SEQ ID NO: 63891 - protein, 85 aa, Homo sapiens
LKDGGKAAQANVRIGDVVLSIDGINAQGMTHLEAQNKIKGCTGSLNMTLQRASAAPKPEPVPVQKPTKKTHCGALYRVLSCTHSQ

SEQ ID NO: 63892 - protein, 632 aa, Homo sapiens
MKNCGRRFHNEVGKFRFLNELIKVVSPKYLGDRVSEKVKTKVIELLYSWTMALPEEAKIKDAYHMLKRQGIVQSDPPIPVDRTLIPSPPPRPKNPVFDDEEKSKLLAKLLKSKNPDDLQEANKLIKSMVKEDEARIQKVTKRLHTLEEVNNNVRLLSEMLLHYSQEDSSDGDRELMKELFDQCENKRRTLFKLASETEDNDNSLGDILQASDNLSRVINSYKTIIEGQVINGEVATLTLPDSEGNSQCSNQGTLIDLAELDTTNSLSSVLAPAPTPPSSGIPILPPPPQASGPPRSRSSSQAEATLGPSSTSNALSWLDEELLCLGLADPAPNVPPKESAGNSQWHLLQREQSDLDFFSPRPGTAACGASDAPLLQPSAPSSSSSQAPLPPPFPAPVVPASVPAPSAGSSLFSTGVAPALAPKVEPAVPGHHGLALGNSALHHLDALDQLLEEAKVTSGLVKPTTSPLIPTTTPARPLLPFSTGPGSPLFQPLSFQSQGSPPKGPELSLASIHVPLESIKPSSALPVTAYDKNGFRILFHFAKECPPGRPDVLVVVVSMLNTAPLPVKSIVLQAAVPKSMKVKLQPPSGTELSPFSPIQPPAAITQVMLLANPLKWQAVSYGHLGRTWNLAS

SEQ ID NO: 63893 - protein, 486 aa, Homo sapiens
MRALVLLGCLLASLLFSGQAELQVSASGGTEDVGNLLENHFSAGDASLEEKERALYADTAPQDKKLLLHYPDGREAESPKKTPASAASAGPDPEASLSNASATESPPPGERDDRDAAGPGEEKNGPPVASALPPGGAKGPVEEEWPEPSSGEGQGEEETGFGLPTEGTASGEAGGQAGGHELPEEVQEVQGDSLVQGAVAGTAEPKAEGASPHSEGDGVGPLNAEAEGSPGPGEEPAVPEGAPDVAAVGGESEPDIDTQASEGTEDQGEPGPAAEASAEPGGAQSVKAGDTEENQSPEMTEEDADEASSEEESGDGSGSEEEGGVPSEEESEEDSGDGASSEEAEGASEEATEPQEAGEPQEAREPQEGGDLQEAEESQEGGDPQEAEEPQEGGAPQEGGEPQEGGDPQEAREPQEAREPQEGAELPEATGTTSHRDRGAQPGPEELNTESMGSETLDMKAEEPEEGHQGEGESHHCCPGRDGGCK

SEQ ID NO: 63894 - protein, 311 aa, Homo sapiens
MGRRSSDTEEESRSKRKKKHRRRSSSSSSSDSRTYSRKKGGRKSRSKSRSWSRDLQPRSHSYDRRRRHRSSSSSSYGSRRKRSRSRSRGRGKSYRVQRSRSKSRTRRSRSRPRLRSHSRSSERSSHRRTRSRSRDRERRKGRDKEKREKEKDKGKDKELHNIKRGESGNIKAGLEHLPPAEQAKARLQLVLEAADQATLVEQVKRVKEIEAIESDSFVQQTFRSSKEVKKSVEPSEVKQATSTSGPASAVADPPSTEKEIDPTSIPTAIKYQDDNSLAHPNLFIEKADAEEKWFKRLIALRQERLMGSPVA

SEQ ID NO: 63895 - protein, 464 aa, Homo sapiens
  MOD_RES (1)..(1): Any amino acid
XVCDDFFVPSLEKICERLHLSEDVAGATFMAAGSSTPELFASVIGVFITHGDVGVGTIVGSAVFNILCIIGVCGLFAGQVVRLTWWAVCRDSVYYTISVIVLIVFIYDEQIVWWEGLVLIILYVFYILIMKYNVKMQAFFTVKQKSIANGNPVNSELEAVKEKPQYGKNPVVMVDEIMSSSPPKFTFPEAGLRIMITNKFGPRTRLRMASRIIINERQRLINSANGVSSKPLQNGRHENIENGNVPVENPEDPQQNQEQQPPPQPPPPEPEPVEADFLSPFSVPEARGDKVKWVFTWPLIFLLCVTIPNCSKPRWEKFFMVTFITATLWIAVFSYIMVWLVTIIGYTLGIPDVIMGITFLAAGTSVPDCMASLIVARQGLGDMAVSNTIGSNVFDILVGLGVPWGLQTMVVNYGSTVKINSRGLVYSVVLLLGSVALTCSSEVPGIQPQEALIEGQGGRQWKER

SEQ ID NO: 63896 - protein, 1440 aa, Homo sapiens
MTTMLQKSDSNASFLRAARAGNLDKVVEYLKGGIDINTCNQNGLNALHLAAKEGHVGLVQELLGRGSSVDSATKKGNTALHIASLAGQAEVVKVLVKEGANINAQSQNGFTPLYMAAQENHIDVVKYLLENGANQSTATEDGFTPLAVALQQGHNQAVAILLENDTKGKVRLPALHIAARKDDTKSAALLLQNDHNADVQSKMMVNRTTESGFTPLHIAAHYGNVNVATLLLNRGAAVDFTARNGITPLHVASKRGNTNMVKLLLDRGGQIDAKTRDGLTPLHCAARSGHDQVVELLLERGAPLLARTKNGLSPLHMAAQGDHVECVKHLLQHKAPVDDVTLDYLTALHVAAHCGHYRVTKLLLDKRANPNARALNGFTPLHIACKKNRIKVMELLVKYGASIQAITESGLTPIHVAAFMGHLNIVLLLLQNGASPDVTNIRGETALHMAARAGQVEVVRCLLRNGALVDARAREEQTPLHIASRLGKTEIVQLLLQHMAHPDAATTNGYTPLHISAREGQVDVASVLLEAGAAHSLATKKGFTPLHVAAKYGSLDVAKLLLQRRAAADSAGKNGLTPLHVAAHYDNQKVALLLLEKGASPHATAKNGYTPLHIAAKKNQMQIASTLLNYGAETNIVTKQGVTPLHLASQEGHTDMVTLLLDKGANIHMSTKSGLTSLHLAAQEDKVNVADILTKHGADQDAHTKLGYTPLIVACHYGNVKMVNFLLKQGANVNAKTKNGYTPLHQAAQQGHTHIINVLLQHGAKPNATTANGNTALAIAKRLGYISVVDTLKVVTEEVTTTTTTITEKHKLNVPETMTEVLDVSDEEGDDTMTGDGGEYLRPEDLKELGDDSLPSSQFLDGMNYLRYSLEGGRSDSLRSFSSDRSHTLSHASYLRDSAVMDDSVVIPSHQVSTLAKEAERNSYRLSWGTENLDNVALSSSPIHSGFLVSFMVDARGGAMRGCRHNGLRIIIPPRKCTAPTRVTCRLVKRHRLATMPPMVEGEGLASRLIEVGPSGAQFLGPVIVEIPHFAALRGKERELVVLRSENGDSWKEHFCDYTEDELNEILNGMDEVLDSPEDLEKKRICRIITRDFPQYFAVVSRIKQDSNLIGPEGGVLSSTVVPQVQAVFPEGALTKRIRVGLQAQPMHSELVKKILGNKATFSPIVTLEPRRRKFHKPITMTIPVPKASSDVMLNGFGGDAPTLRLLCSITGGTTPAQWEDITGTTPLTFVNECVSFTTNVSARFWLIDCRQIQESVTFASQVYREIICVPYMAKFVVFAKSHDPIEARLRCFCMTDDKVDKTLEQQENFAEVARSRDVEVLEGKPIYVDCFGNLVPLTKSGQHHIFSFFAFKENRLPLFVKVRDTTQEPCGRLSFMKEPKSTRGLVHQAICNLNITLPIYTKESESDQEQEEEIHRMSRNGSRKGWLILLITLASAGQN

SEQ ID NO: 63897 - protein, 61 aa, Homo sapiens
MPIVDKLKEALKPGRKDSADDGELGKLLASSAKKAVSTRMRAVVTESQPRRKCFSPRSDCL

SEQ ID NO: 63898 - protein, 1073 aa, Homo sapiens
MRMVHILTSVVGSKCEVQVKNGGIYEGVFKTYSPKCDLVLDAAHEKSTESSSGPKREEIMESILFKCSDFVVVQFKDMDSSYAKRDAFTDSAISAKVNGEHKEKDLEPWDAGELTANEELEALENDVSNGWDPNDMFRYNEENYGVVSTYDSSLSSYTVPLERDNSEEFLKREARANQLAEEIESSAQYKARVALENDDRSEEEKYTAVQRNSSEREGHSINTRENKYIPPGQRNREVISWGSGRQNSPRMGQPGSGSMPSRSTSHTSDFNPNSGSDQRVVNGGVPWPSPCPSPSSRPPSRYQSGPNSLPPRAATPTRPPSRPPSRPSRPPSHPSAHGSPAPVSTMPKRMSSEGPPRMSPKAQRHPRNHRVSAGRGSISSGLEFVSHNPPSEAATPPVARTSPSGGTWSSVVSGVPRLSPKTHRPRSPRQNSIGNTPSGPVLASPQAGIIPTEAVAMPIPAASPTPASPASNRAVTPSSEAKDSRLQDQRQNSPAGNKENIKPNETSPSFSKAENKGISPVVSEHRKQIDDLKKFKNDFRLQPSSTSESMDQLLNKNREGEKSRDLIKDKIEPSAKDSFIENSSSNCTSGSSKPNSPSISPSILSNTEHKRGPEVTSQGVQTSSPACKQEKDDKEEKKDAAEQVRKSTLNPNAKEFNPRSFSQPKPSTTPTSPRPQAQPSPSMVGHQQPTPVYTQPVCFAPNMMYPVPVSPGVQPLYPIPMTPMPVNQAKTYRAVPNMPQQRQDQHHQSAMMHPASAAGPPIAATPPAYSTQYVAYSPQQFPNQPLVQHVPHYQSQHPHVYSPVIQGNARMMAPPTHAQPGLVSSSATQYGAHEQTHAMYACPKLPYNKETSPSFYFAISTGSLAQQYAHPNATLHPHTPHPQPSATPTGQQQSQHGGSHPAPSPVQHHQHQAAQALHLASPQQQSAIYHAGLAPTPPSMTPASNTQSPQNSFPAAQQTVFTIHPSHVQPAYTNPPHMAHVPQCASEALARCGLEMRLSWIYLSEGYLAHVQSGMVPSHPTAHAPMMLMTTQPPGGPQAALAQSALQPIPVSTTAHFPYMTHPSVQAHHQQQL

SEQ ID NO: 63899 - protein, 281 aa, Homo sapiens
  MOD_RES (1)..(1): Any amino acid
XPVGSDPDFQPELSGAGSRLAVVKFTMRGCGPCLRIAPAFSSMSNKYPQAVFLEVDVHQCQGTAATNNISATPTFLFFRNKVRIDQYQGADAVGLEEKIKQHLENDPGSNEDTDIPKGYMDLMPFINKAGCECLNESDEHGFDNCLRKDTTFLESDCDEQLLITVAFNQPVKLYSMKFQGPDNGQGPKYVKIFINLPRSMDFEEAERSEPTQALELTEDDIKEDGIVPLRYVKFQNVNSVTIFVQSNQGEEETTRISYFTFIGTPVQATNMNDFKRVSLLK

SEQ ID NO: 63900 - protein, 224 aa, Homo sapiens
  MOD_RES (1)..(1): Any amino acid
XNPYVAALYKQVGCFLFGCAISQSFTDIAKVSIGRLRPHFLSVCNPDFSQINCSEGYIQNYRCRGDDSKVQEARKSFFSGHASFSMYTMLYLVLYLQARFTWRGARLLRPLLQFTLIMMAFYTGLSRVSDHKHHPSDVLAGFAQGALVACCIVFFVSDLFKTKTTLSLPAPAIRKEILSPVDIIDRNNHHNMILIHGMLSGVHLYWQRSFMTMMLCLLSWKTPT

SEQ ID NO: 63901 - protein, 730 aa, Homo sapiens
QPVKSFPTMARITGPPERDDPYPVLFRYLHSHHFLELVTLLLSIPVTSAHPGVLQATKDVLKFLAQSQKGLLFFMSEYEATNLLIRALCHFYDQDEEEGLQSDGVIDDAFALWLQDSTQTLQCITELFSHFQRCTASEETDHSDLLGTLHNLYLITFNPVGRSAVGHVFSLEKNLQSLITLMEYYSKEALGDSKSKKSVAYNYACILILVVVQSSSDVQMLEQHAASLLKLCKADENNAKLQELGKWLEPLKNLRFEINCIPNLIEYVKQNIDNLMTPEGVGLTTALRVLCNVACPPPPVEGQQKDLKWNLAVIQLFSAEGMDTFIRVLQKLNSILTQPWRLHVNMGTTLHRVTTISMARCTLTLLKTMLTELLRGGSFEFKDMRVPSALVTLHMLLCSIPLSGRLDSDEQKIQNDIIDILLTFTQGVNEKLTISEETLANNTWSLMLKEVLSSILKVPEGFFSGLILLSELLPLPLPMQTTQVIEPHDISVALNTRKLWSMHLHVQAKLLQEIVRSFSGTTCQPIQHMLRRICVQLCDLASPTALLIMRTVLDLIVEDLQSTSEDKEKQYTSQTTRLLALLDALASHKACKLAILHLINGTIKGDERYAEIFQDLLALVRSPGDSVIRQQCVEYVTSILQSLCDQDIALILPSSSEGSISELEQLSNSLPNKELMTSICDCLLATLANSESSYNCLLTCVRTMMFLAEHDYGLFHLKRDAVEMIMVSWK

SEQ ID NO: 63902 - protein, 81 aa, Homo sapiens
MDVLAEANGTFALNLLKTLGKDNSKNVFFSPMSMSCALAMVYMGAKGNTAAQMAQSFALVAQAGAQWRDVGSLQPPPPGFK

SEQ ID NO: 63903 - protein, 201 aa, Homo sapiens
MAHCVTLVQLSISCDHLIDKDIGSKSDPLCVLLQDVGGGSWAELGRTERVRNCSSPEFSKTLQLEYRFETVQKLRFGIYDIDNKTPELRDDDFLGGAECSLGQIVSSQVLTLPLMLKPGKPAGRGTITVSAQELKDNRVVTMEVEARNLDKKDFLGKSDPFLEFFRQGDGKWHLVYRSEVIKNNLNPTWKRFSVPVQHFCG

SEQ ID NO: 63904 - protein, 79 aa, Homo sapiens
MSSVAVLTQESFAEHRSGLVPQQIKVATLNSEEESDPPTYKDAFPPLPEKAACLESAQEPAGAWGNKIRPIKASVITQV

SEQ ID NO: 63905 - protein, 92 aa, Homo sapiens
MDSRDSSFGQNDSPTVLPITTREANNSLISQNIPGPLTQTQTLSAEQFHLVDQNGQAIQYELQSLGESNAQMMIVASPTENGQVLRVIPPTQ

SEQ ID NO: 63906 - protein, 663 aa, Homo sapiens
MNGDSRAAVVTSPPPTTAPHKERYFDRVDENNPEYLRERNMAPDLRQDFNMMEQKKRVSMILQSPAFCEELESMIQEQFKKGKNPTGLLALQQIADFMTTNVPNVYPAAPQGGMAALNMSLGMVTPVNDLRGSDSIAYDKGEKLLRCKLAAFYRLADLFGWSQLIYNHITTRVNSEQEHFLIVPFGLLYSEVTASSLVKINLQGDIVDRGSTNLGVNQAGFTLHSAIYAARPDVKCVVHIHTPAGAAVSAMKCGLLPISPEALSLGEVAYHDYHGILVDEEEKVLIQKNLGPKSKVLILRNHGLVSVGESVEEAFYYIHNLVVACEIQVRTLASAGGPDNLVLLNPEKYKAKSRSPGSPVGEGTGSPPKWQIGEQEFEALMRMLDNLGYRTGYPYRYPALREKSKKYSDVEVPASVTGYSFASDGDSGTCSPLRHSFQKQQREKTRWLNSGRGDEASEEGQNGSSPKSKTKVWTNITHDHVKPLLQSLSSGVCVPSCITNCLWTKEDGHRTSTSAVPNLFVPLNTNPKEVQEMRNKIREQNLQDIKTAGPQSQVLCGVVMDRSLVQGELVTASKAIIEKEYQPHVIVSTTGPNPFTTLTDRELEEYRREVERKQKGSEENLDEAREQKEKSPPDQPAVPHPPPSTPIKLEEAGDGCAREYLLP

SEQ ID NO: 63907 - protein, 455 aa, Homo sapiens
MQDGHHSSDPWSSSSGMNQPGYAGMLGNSSHIPQSSSYCSLHPHERLSYPSHSSADINSSLPPMSTFHRSGTNHYSTSSCTPPANGTDSIMANRGSGAAGSSQTGDALGKALASIYSPDHTNNSFSSNPSTPVGSPPSLSAGTAVWSRNGGQASSSPNYEGPLHSLQSRIEDRLERLDDAIHVLRNHAVGPSTAMPGGHGDMHGIIGPSHNGAMGGLGSGYGTGLLSANRHSLMVGTHREDGVALRGSHSLLPNQVPVPQLPVQSATSPDLNPPQDPYRGMPPGLQGQSVSSGSSEIKSDDEGDENLQDTKSSEDKKLDDDKKDIKSITRSRSSNNDDEDLTPEQKAEREKERRMANNARERLRVRDINEAFKELGRMVQLHLKSDKPQTKLLILHQAVAVILSLEQQVRERNLNPKAACLKRREEEKVSSEPPPLSLAGPHPGMGDASNHMGQM

SEQ ID NO: 63908 - protein, 120 aa, Homo sapiens
MGTASRSNIARHLQTNLILFCVGAVGACTLSVTQPWYLEVDYTHEAVTIKCTFSATGCPSEQPTCLWFRYGAHQPENLCLDGCKKIKLLSKELRSFLTALVSLLSVYVTGVCVAFILLSK

SEQ ID NO: 63909 - protein, 218 aa, Homo sapiens
MNKPITPSTYVRCLNVGLIRKLSDFIDPQEGWKKLAVAIKKPSGDDRYNQFHIRRFEALLQTGKSPTSELLFDWGTTNCTVGDLVDLLIQNEFFAPASLLLPDAVPKTANTLPSKEAITVQQKQMPFCDKDRTLMTPVQNLEQSYMPPDSSSPENKSLEVSDTRFHSFSFYELKNVTNNFDERPISVGGNKMGEGGFGVVYKGYVNNNCGSEEACSNG

SEQ ID NO: 63910 - protein, 138 aa, Homo sapiens
MRTKAAGCAERRPLQPRTEAAAAPAGRAMPSEYTYVKLRSDCSRPSLQWYTRAQSKMRRPSLLLKDILKCTLLVFGVWILYILKLNYTTEECDMKKMHYVDPDHVKTYTVPLKEAGPSLLKHSVSPGTSIFKPSLFSP

SEQ ID NO: 63911 - protein, 86 aa, Homo sapiens
MLLLKKHTEDISSVYEIRERLGSGAFSEVVLAQERGSAHLVALKCIPKKALRGKEALVENEIAVLRRISHPNIVALEDVHESPSHL

SEQ ID NO: 63912 - protein, 48 aa, Homo sapiens
MLTLASKLKRDDGLKGSRTAATASDSTRRVSVRDKLLVKDGVSLCHVE

SEQ ID NO: 63913 - protein, 92 aa, Homo sapiens
MASDDFDIVIEAMLEAPYKKEEDEQQRKEVKKDYPSNTTSSTSNSGNETSGSSTIGETSKKKRSRSHNKSRDRKRSRSRDRDRYRRRNSRSR

SEQ ID NO: 63914 - protein, 636 aa, Homo sapiens
MEPSTCRTMESEEDYVEEKESEKCVKEGVTNPSNSSQQALLKADYKALKNGVPSPIMATKIPKKVIAPVDTGDLEAGRRKRRRKRRSLAINLTNCKYESVRRAAQMCGLKEVGEDEEWTLYWTDCAVSLERVMDMKRFQKINHFPGMTEICRKDLLARNLNRMYKLYPSEYNIFPRTWCLPADYGDFQSYGRQRKARTYICKPDSGCQGRGIFITRNPREIKPGEHMICQQYISKPLLIDGFKFDMRVYVLITSCDPLRIFTYEEGLARFATTPYMEPSHNNLDNVCMHLTNYAINKHNENFVRDGAVGSKRKLSTLNIWLQEHSYNPGELWGDIEDIIIKTIISAHSVLRHNYRTCFPQYLNGGTCACFEILGFDILLDHKLKPWLLEVNHSPSFTTDSCLDQEVKDALLCDAMTLVNLRGCDKRKVMEEDKRRVKERLFQCYRQPRESRKEKTESSHVAMLDQERYEDSHLGKYRRIYPGPDTEKYARFFKHNGSLFQETAASKAREECARQQLEEIRLKQEQQETSGTKRQKARDQNQGESAGEKSRPRAGLQSLSTHLAYRNRNWEKELLPGQLDTMRPQEIVEEEELERMKALLQRETLIRSLGIVEQLTRLQHPGPQGQKKLHESRPRFC

SEQ ID NO: 63915 - protein, 466 aa, Homo sapiens
MRKPRAAVGSGHRKQAASQEGRQKHAKNNSQAKPSACDGLARQPEEVVLQASVSSYHLFRDVAEVTAFRGSLLSWYDQEKRDLPWRRRAEDEMDLDRRAYAVWVSEVMLQQTQVATVINYYTGWMQKWPTLQDLASASLEEVNQLWAGLGYYSRGRRLQEGARKVVEELGGHMPRTAETLQQLLPGVGRYTAGAIASIAFGQATGVVDGNVARVLCRVRAIGADPSSTLVSQQLWGLAQQLVDPARPGDFNQAAMELGATVCTPQRPLCSQCPVESLCRARQRVEQEQLLASGSLSGSPDVEECAPNTGQCHLCLPPSEPWDQTLGVVNFPRKASRKPPREESSATCVLEQPGALGAQILLVQRPNSGLLAGLWEFPSVTWEPSEQLQRKALLQELQRWAGPLPATHLRHLGEVVHTFSHIKLTYQVYGLALEGQTPVTTVPPGARWLTQEEFHTAAVSTAMKKVF

SEQ ID NO: 63916 - protein, 234 aa, Homo sapiens
  MOD_RES (1)..(1): Any amino acid
XEDEYKQKYSRTYDETYQRYRPVSTSSSTTPSSSLSTMSSSLYASSQLNRPNSLVGITSAYSRGITKENEREGEKREEEKEGEDKSQPKSIRERRRPREKRRSTGVSFWTQDSDENEQEQQSDTEEGSNKKETQTDSISRYETSSTSAGDRYDSLLGRSGSYSYLEERKPYSSRLEKDDSTDFKKLYEQILAENEKLKAQLHDTNMELTDLKLQLEKATQSSPVQDTTETRKIC

SEQ ID NO: 63917 - protein, 154 aa, Homo sapiens
MDKPLQLPPIFLEGEKGESSVQNEQEGEPSLQSPSLELQSPAWPRHAGVAQEPLKVSSSYLSDTQSSESHVSSVQHPRPEEGSHASLSSGYAGDKEGSDISLVGSHRRVRLNRRLNTQAASNQTSQLGSIDPPSSLKSRLTGPAHSTKQTGGKE

SEQ ID NO: 63918 - protein, 65 aa, Homo sapiens
MCGDCVEKEYPNRGNTCLENGSFLLNFTGCAVCSKRDFMLITNKSLKEEDGEEIVTYDRQNQRDP

SEQ ID NO: 63919 - protein, 96 aa, Homo sapiens
MSEQGDLNQAIAEEGGTEQETATPENGIVKSESLDEEEKLELQRRLEAQNQERRKSKSGAGKGKLTRSLAVCEESSARPGGESLQDQVYPLAIIIN

SEQ ID NO: 63920 - protein, 104 aa, Homo sapiens
  MOD_RES (1)..(1): Any amino acid
XTGKKFKYESNKYLFIKHPNLPVIKVMNIITMPPECEVLNSTSHFLKMLPRFIWFASFLPILNQLVWVEARSLKGIFYHKTRSVISSKLPTIITFLARHSGSCL

SEQ ID NO: 63921 - protein, 227 aa, Homo sapiens
  MOD_RES (1)..(1): Any amino acid
XNFVKMVPFNTCTLEQDLYVFHRAGLLKSINIRFATLLDTPGVENLVSTLMLNKSILEDLDRYNKARKDPDIEYIRSHYNIEDFIYFSHHQREEHGHMHHFALNPIFRHYTKFFLKEILRLGFKSCLYYRVYPKSREGKFQNPYAHSLTSALHYLVPVRPRRQIVYPLEKLGINAPSKAVSKDPMSYALNHTNRKLTLEPKITVNAKIIVVGASSVGISFLETLVFW

SEQ ID NO: 63922 - protein, 230 aa, Homo sapiens
MRRVLRLLLGCFLTELCARVCRAQERAGHGQLAQLGGVLLLAGGNRSGAASGEASEGAEASDAPPTRAPTPDFCRGYFDVMGQWDPPFNCSSGDFIFCCGTCGFRFCCTFKKRRLNQSTCTNYDTPLWLNTGKPPARKDDPLHDPTKDKTNLIVYIICGVVAVMVLVGIFTKLGLEKAHRPQREHMSRALADVMRPQGHCNTDHMERDLNIVVHVQHYENMDTRTPINNL

SEQ ID NO: 63923 - protein, 178 aa, Homo sapiens
MSWKILLFGVINLICTGFLLMWCSSTNSIALTAYTYLTIFDLFSLMTCLISYWVTLRKPSPVYSFGFERLEVLAVFASTVLAQLGALFILKESAERFLEQPEIHTGRLLVGTFVALCFNLFTMLSIRNKPFAYVSEAASTSWLQEHVADLSRSLCGIIPGLSSIFLPRMNPFVLIDLA

SEQ ID NO: 63924 - protein, 92 aa, Homo sapiens
  MOD_RES (1)..(1): Any amino acid
XVAPPGVVVSRANKRSGAGPGGSGGGGARGAEEEPPPPLQAVLVADSFDRRFFPISKDQPRVLLPLANVALIDYTLEFLTATGGRGPKYHAA

SEQ ID NO: 63925 - protein, 850 aa, Homo sapiens
MGSGARFPSGTLRVRWLLLLGLVGPVLGAARPGFQQTSHLSSYEIITPWRLTRERREAPRPYSKQVSYVIQAEGKEHIIHLERNKDLLPEDFVVYTYNKEGTLITDHPNIQNHCHYRGYVEGVHNSSIALSDCFGLRGLLHLENASYGIEPLQNSSHFEHIIYRMDDVYKEPLKCGVSNKDIEKETAKDEEEEPPSMTQLLRRRRAVLPQTRYVELFIVVDKERYDMMGRNQTAVREEMILLANYLDSMYIMLNIRIVLVGLEIWTNGNLINIVGGAGDVLGNFVQWREKFLITRRRHDSAQLVLKKGFGGTAGMAFVGTVCSRSHAGGINVFGQITVETFASIVAHELGHNLGMNHDDGRDCSCGAKSCIMNSGASGSRNFSSCSAEDFEKLTLNKGGNCLLNIPKPDEAYSAPSCGNKLVDAGEECDCGTPKRRGFATLPRLVSNSWTQAVCLRKTPRVLGLQECELDPCCEGSTCKLKSFAECAYGDCCKDCRFLPGGTLCRGKTSECDVPEYCNGSSQFCQPDVFIQNGYPCQNNKAYCYNGMCQYYDAQCQVIFGSKAKAAPKDCFIEVNSKGDRFGNCGFSGNEYKKCATGNALCGKLQCENVQEIPVFGIVPAIIQTPSRGTKCWGVDFQLGSDVPDPGMVNEGTKCGAGKICRNFQCVDASVLNYDCDVQKKCHGHGVCNSNKNCHCENGWAPPNCETKGYGGSVDSGPTYNEMNTALRDGLLVFFFLIVPLIVCAIFIFIKRDQLWRSYFRKKRSQTYESDGKNQANPSRQPGSVPRHVSPVTPPREVPIYANRFAVPTYAAKQPQQFPSRPPPPQPKVSSQGNLIPARPAPAPPLYSSLT

SEQ ID NO: 63926 - protein, 62 aa, Homo sapiens
MPAIMTMLADHAARQLLDFSQKLDINLLDNVVNCLYHGEGAQQRMAQEVLTHLKEHPDAWTR

SEQ ID NO: 63927 - protein, 392 aa, Homo sapiens
MASRSSDKDGDSVHTASEVPLTPRTNSPDGRRSSSDTSKSTYSLTRRISSLESRRPSSPLIDIKPIEFGVLSAKKEPIQPSVLRRTYNPDDYFRKFEPHLYSLDSNSDDVDSLTDEEILSKYQLGMLHFSTQYDLLHNHLTVRVIEARDLPPPISHDGSRQDMAHSNPYVKICLLPDQKNSKQTGVKRKTQKPVFEERYTFEIPFLEAQRRTLLLTVVDFDKFSRHCVIGKVSVPLCEVDLVKGGHWWKALIPSSQNEVELGELLLSLNYLPSAGRLNVDVIRAKQLLQTDVSQGSDPFVKIQLVHGLKLVKTKKTSFLRGTIDPFYNESFSFKVPQEELENASLVFTGSNSPIPACELSSHPAHGISPWIPSPGNEHFHGIKKQVKAIKVE

SEQ ID NO: 63928 - protein, 212 aa, Homo sapiens
  MOD_RES (1)..(1): Any amino acid
XNRANVNQQDNEGWTPLHAAASCGYLNIAELLIQAGYELNVQDYDGWTPLHAAAHWGVKEACSILAEALCDMDIRNKLGQTPFDVADEGLVEHLELLQKKQNVLRSEKETRNKLIESDLNSKIQSGFFKNKEKMLYEEETPKSQEMEEENKESSSSSSEEEEGEDEASESETEKEADKKPEAFVNHSNSESKSSITEQIPAPAQNTFSASSA

SEQ ID NO: 63929 - protein, 668 aa, Homo sapiens
MMVESASETIRSAPSGQNGVGSLSGQADGSSGGATGTTASGTGREVTTGADSNGEMSPAELLHFQQQQALQVARQFLLQQASGLSSPGNNDSKQSASAVQVPVSVAMMSPQMLTPQQMQQILSPPQLQALLQQQQALMLQQLQEYYKKQQEQLHLQLLTQQQAGKPQPKEALGNKQLAFQQQLLQMQQLQQQHLLNLQRQGLVSLQPNQASGPLQTLPQAAVCPTDLPQLWKGEGAPGQPAEDSVKQEGLDLTGTAATATSFAAPPKVSPPLSHHTLPNGQPTVLTSRRDSSSHEETPGSHPLYGHGECKWPGCETLCEDLGQFIKHLNTEHALDDRSTAQCRVQMQVVQQLEIQLAKESERLQAMMAHLHMRPSEPKPFSQPVTVSAADSFPDGLVHPPTSAAAPVTPLRPPGLGSASLHGGGPARRRSSDKFCSPISSELAQNHEFYKNADVRPPFTYASLIRQAILETPDRQLTLNEIYNWFTRMFAYFRRNTATWKNAVRHNLSLHKCFVRVENVKGAVWTVDEREYQKRRPPKMTGSPTLVKNMISGLSYGALNASYQAALAESSFPLLNSPGMLNPGSASSLLPLSHDDVGAPVEPLPSNGSSSPPRLSPPQYSHQVQVKEEPAEAEEDRQPGPPLGAPNPSASGPPEDRDLEEELPGEELS

SEQ ID NO: 63930 - protein, 95 aa, Homo sapiens
MNQPQRMAPVGTDKELSDLLDFSMMFPLPVTNGKGRPASLAGAQFGGSGLEDRPSSGSWGSGDQSSSSFDPSRTFSEGTHFTESHSSLSSSTFLG

SEQ ID NO: 63931 - protein, 54 aa, Homo sapiens
  MOD_RES (1)..(1): Any amino acid
XILGGVISAISEAAAQYNPEPPPPRTHYSNIEDTLTSSVHGSPHSHQALHTPTP

SEQ ID NO: 63932 - protein, 54 aa, Homo sapiens
MAALLRRLLQRERPSAASGRPVGRREANLGTDAGVAVRVRFAPSPTGVVDAGIQ

SEQ ID NO: 63933 - protein, 378 aa, Homo sapiens
  MOD_RES (1)..(1): Any amino acid
XVIEDDAFAGLSHLQYLFIEDNEIGSISKNALRGLRSLTHLSLANNHLETLPRFLFRGLDTLTHVDLRGNPFQCDCRVLWLLQWMPTVNASVGTGACAGPASLSHMQLHHLDPKTFKCRAIELSWFQTVGESALSVEPFSYQGEPHIVLAQPFAGRCLILSWDYSLQRFRPEEELPAASVVSCKPLVLGPSLFVLAARLWGGSQLWARPSPGLRLAPTQTLAPRRLLRPNDAELLWLEGQPCFVVADASKAGSTTLLCRDGPGFYPHQSLHAWHRDTDAEALELDGRPHLLLASASQRPVLFHWTGGRFERRTDIPEAEDVYATRHFQAGGDVFLCLTRYIGDSMVRLGLGAGGWLFSTDPILHTKPLNSDLPSHADL

SEQ ID NO: 63934 - protein, 547 aa, Homo sapiens
MENDESAKEEKSDLKEKSTGSKKANRFHPYSKDKNSGAGEKKGPNRNRVFISNIPYDMKWQAIKDLMREKVGEVTYVELFKDAEGKSRVSGVVEFKDEEFVKKALETMNKYDLSGRPLNIKEDPDGENARRALQRTGGSFPGGHVPDMGSGLMNLPPSILNNPNIPPEVISNLQAGRLGSTIFVANLDFKVGWKKLKEVFSIAGTVKRADIKEDKDGKSRGMGTVTFEQAIEAVQAISMFNGQFLFDRPMHVKMDDKSVPHEEYRSHDGKTPQLPRGLGGIGMGLGPGGQPISASQLNIGGVMGNLGPGGMGMDGPGFGGMNRIGGGIGFGGLEAMNSMGGFGGVGRMGELYRGAMTSSMERDFGRGDIGINRGFGDSFGRLGSAMIGGFAGRIGSSNMGPVGSGISGGMGSMNSVTGGMGMGLDRMSSSFDRMGPGIGAILERSIDMDRGFLSGPMGSGMRERIGSKGNQIFVRNLPFDLTWQKLKEKFSQCGHVMFAEIKMENGKSKGCGTVRFDSPESAEKACRIMNGIKISGREIDVRLDRNA

SEQ ID NO: 63935 - protein, 219 aa, Homo sapiens
MRPPSPLPARWLCVLAGALAWALGPAGGQAARLQEECDYVQMIEVQHKQCLEEAQLENETIGCSKMWDNLTCWPATPRGQVVVLACPLIFKLFSSIQGRNVSRSCTDEGWTHLEPGPYPIACGLDDKAASLDEQQTMFYGSVKTGYTIGYGLSLATLLVATAILSLFRWAVRQPWSFSNIVSWLTSSGCWWRASTCTPCLPSPSSLSGSTSGGTYSSAG

SEQ ID NO: 63936 - protein, 214 aa, Homo sapiens
MGLSCSSSEISVKEFLAKAKEDFLKKWENPTQNNAGLEDFERKKTLGTGSFGRVMLVKHKATEQYYAMKILDKQKVVKLKQIEHTLNEKRILQAVNFPFLVRLEYAFKDNSNLYMVMEYVPGGEMFSHLRRIGRFSEPHARFYAAQIVLTFEYLHSLDLIYRDLKPENLLIDHQGYIQVTDFGFAKRVKGRTWTLCGTPEYLAPEIILSKGYNK

SEQ ID NO: 63937 - protein, 683 aa, Homo sapiens
MDKYDVIKAIGQGAFGKAYLAKGKSDSKHCVIKEINFEKMPIQEKEASKKEVILLEKMKHPNIVAFFNSFQENGRLFIVMEYCDGGDLMKRINRQRGVLFSEDQILGWFVQISLGLKHIHDRKILHRDIKAQNIFLSKNGMVAKLGDFGIARVLNNSMELARTCIGTPYYLSPEICQNKPYNNKTDIWSLGCVLYELCTLKHPFEGNNLQQLVLKICQAHFAPISPGFSRELHSLISQLFQVSPRDRPSINSILKRPFLENLIPKYLTPEVIQEEFSHMLICRAGAPASRHAGKVVQKCKIQKVRFQGKCPPRSRISVPIKRNAILHRNEWRPPAGAQKARSIKMIERPKIAAVCGHYDYYYAQLDMLRRRAHKPSYHPIPQENTGVEDYGQETRHGPSPSQWPAEYLQRKFEAQQYKLKVEKQLGLRPSSAEPNYNQRQELRSNGEEPRFQELPFRKNEMKEQEYWKQLEEIRQQYHNDMKEIRKKMGREPEENSKISHKTYLVKKSNLPVHQDASEGEAPVQDIEKDLKQMRLQNTKESKNPEQKYKAKKGVKFEINLDKCISDENILQEEEAMDIPNETLTFEDGMKFKEYECVKEHGDYTDKAFEKLHCPEAGFSTQTVAAVGNRRQWDGGAPQTLLQMMAVADITSTCPTGPDSESVLSVSRQEGKTKDPYSPVLILM

SEQ ID NO: 63938 - protein, 181 aa, Homo sapiens
MERTAGKELALAPLQDWGEETEDGAVYSVSLRRQRSQRRSPAEGPGGSQAPSPIANTFLHYRTSKVRVLRAARLERLVGELVFGDREQDPSFMPAFLATYRTFVPTACLLGFLLPPMPPPPPPGDQEDSGTRSELQQEPEGCGVSAGLLAAGPPSGFPRPPCPFGPGQCPNLSGLGGPREC

SEQ ID NO: 63939 - protein, 305 aa, Homo sapiens
MNRLLIFLIPWKDLNMLLMKIITKYVYELLEKDCNLKKVSIPVDATESEPKSFIFMSEDALTNPQKLMVLIHGSGVVRAGQWARRLIINEDLDSGTQIPFIKRAVAEGYGVIVLNPNENYIEVEKPKIHVQSSSDSSDEPAEKRERKDKVSKETKKRRDFYEKYRNPQREKEMMQLYIRENGSPEEHAIYVWDHFIAQAAAENVFFVAHSYGGLAFVELMIQREADVKNKVTAVALTDSVHNVWHQEAGKTIREWMRENCCNWVSSSEPLDTSVESMLPDCPRVSAGFSCCQMQSHEDLLLCFLL

SEQ ID NO: 63940 - protein, 154 aa, Homo sapiens
MLSSLGCLLLCGSITLALGNAQKLPKDAEPKYLIVVRPAPPPSQKKSCSGKTRSRKPLQLVVGTLTPSSVFLSWGFLINPHHDWTLPSHCPNDRFYTIRYREKDKEKKWIFQICPATETIVENLKPNTVYEFGVKDNVEGGIWSKIFNHKTVVG

SEQ ID NO: 63941 - protein, 172 aa, Homo sapiens
MNRHLWKSQLCEMVQPSGGPAADQDVLGEESPLGKPAMLHLPSEQGAPETLQRCLEENQELRDAIRQSNQILRERCEELLHFQASQREEKEFLMCKFQEARKLVERLGLEKLDLKRQKEQALREVEHLKRCQQQMAEDKASVKAQVTSLLGELQESQSRLEAATKECQALEG

SEQ ID NO: 63942 - protein, 36 aa, Homo sapiens
MTRTQKGKTFLPHCFYQSLPPRLGWGMILNYSKLKG

SEQ ID NO: 63943 - protein, 191 aa, Homo sapiens
MLGRNTWKTSAFSFLVEQMWAPLWSRSMRPGRWCSQRSCAWQTSNNTLHPLWTVPVSVPGGTRQSPINIQWRDSVYDPQLKPLRVSYEAASCLYIWNTGYLFQVEFDDATEASAAFSSLEFCEIPKLQGSCRGREWFGCDRRVFKGRAGGHAPLRPLHSAAHLLGLLDLRGLAHHPAADRVGHLDHPEGAR

SEQ ID NO: 63944 - protein, 202 aa, Homo sapiens
  MOD_RES (1)..(1): Any amino acid
XRPQRRLLSARVNRSQSFAGVLGSHERGPRSFPVFSPPGPPRKPPALSRVSRMFSVAHPAAKVPQPERLDLVYTALKRGLTAYLEVHQQEQEKLQGQIRESKRNSRLGFLYDLDKSSPLNASCDDWSSMPARSMSCMRHTVSSGVSGMVPTTWSVPTPLGPREAERPGTAWQRPLGGIASTRRACVCWRASWRHSWASFISE

SEQ ID NO: 63945 - protein, 291 aa, Homo sapiens
ASPPSTPPWDPGHIPGASVRPAPGPVSLQGEFQRKLYKELVKNYNPLERPVANDSQPLTVYFSLSLLQIMDVDEKNQVLTTNIWLQMSWTDHYLQWNVSEYPGVKTVRFPDGQIWKPDILLYNSADERFDATFHTNVLVNSSGHCQYLPPGIFKSSCYIDVRWFPFDVQHCKLKFGSWSYGGWSLDLQMQEADISGYIPNGEWDLVVTMRRRTLYYGLNLLIPCVLISALALLVFLLPADSGEKISLGITVLLSLTVFMLLVAEIMPATSDSVPLIAQYFASTMIIVGLSV

SEQ ID NO: 63946 - protein, 77 aa, Homo sapiens
MATNFSDIVKQGYVKMKSRKLGIYRRCWLVFRKSSSKGPQRLEKYPDEKSVCLRGCPKVTEISNVKCVTRLPKETKR

SEQ ID NO: 63947 - protein, 140 aa, Homo sapiens
  MOD_RES (1)..(1): Any amino acid
XALQHNLGIGGAVVVTLYKMGFPEAASSFRTHQIEAVPTSSASDGFKANLVFKEIEKKLEEEGEQFVKKIGGIFAFKVKDGPGGKEATWVVDVKNGKGSVLPNSDKKADCTITMADSDFLALMTGKMNPQSVSMMELISC

SEQ ID NO: 63948 - protein, 384 aa, Homo sapiens
VKMLFQKKYDLNELCTWFMQTTETQSLSLVRKANARNPLEVINTRGIKLGTKYSDFNASPFRKHFKKFALSSPSKSAEKLHILHKVANSPLLNVKSNLAIARLKRTEFKRLHHERWKREGKLHNHGTVDWNSKRRNLRFFCQNQFLNKTEGETNADIPLQGKSIVDNQCVLPPEIRGDLQQRVVMPDFKIHASFENKFKSEAKENGTNCSQKDFQKGPRLENVCPNSWRSKTLKDCRIFLRKLNCLEHRNTFKLNTIIYSPESTDSGNTHQTHMEESKRFTLRSHSARQNSFKKQSKEIENANTNNPSADEFADHLGNSKLSKCVNFDKNPDSFEVLSNLNKRKRPPWKITEMSTKRHKRQSCNSGQMANYFSKSLASRPAFSI

SEQ ID NO: 63949 - protein, 30 aa, Homo sapiens
MNASEFRRRGKEMVDYMANYMEGIEGRQVY

SEQ ID NO: 63950 - protein, 66 aa, Homo sapiens
MAAATGDPGLSKLQFAPFSSALDVGFWHELTQKKLNEYRLDEAPKDIKGYYYNGDSAGLPARLTLE

SEQ ID NO: 63951 - protein, 34 aa, Homo sapiens
PMRKSYRGDRERWKTLCSHVAAEGLRERWLPLLH

SEQ ID NO: 63952 - protein, 2489 aa, Homo sapiens
MGASSPRSPEPVGPPAPGLPFCCGGSLLAVVVLLALPVAWGQCNAPEWLPFARPTNLTDEFEFPIGTYLNYECRPGYSGRPFSIICLKNSVWTGAKDRCRRKSCRNPPDPVNGMVHVIKGIQFGSQIKYSCTKGYRLIGSSSATCIISGDTVIWDNETPICDRIPCGLPPTITNGDFISTNRENFHYGSVVTYRCNPGSGGRKVFELVGEPSIYCTSNDDQVGIWSGPAPQCIIPNKCTPPNVENGILVSDNRSLFSLNEVVEFRCQPGFVMKGPRRVKCQALNKWEPELPSCSRVCQPPPDVLHAERTQRDKDNFSPGQEVFYSCEPGYDLRGAASMRCTPQGDWSPAAPTCEVKSCDDFMGQLLNGRVLFPVNLQLGAKVDFVCDEGFQLKGSSASYCVLAGMESLWNSSVPVCEQIFCPSPPVIPNGRHTGKPLEVFPFGKTVNYTCDPHPDRGTSFDLIGESTIRCTSDPQGNGVWSSPAPRCGILGHCQAPDHFLFAKLKTQTNASDFPIGTSLKYECRPEYYGRPFSITCLDNLVWSSPKDVCKRKSCKTPPDPVNGMVHVITDIQVGSRINYSCTTGHRLIGHSSAECILSGNAAHWSTKPPICQRIPCGLPPTIANGDFISTNRENFHYGSVVTYRCNPGSGGRKVFELVGEPSIYCTSNDDQVGIWSGPAPQCIIPNKCTPPNVENGILVSDNRSLFSLNEVVEFRCQPGFVMKGPRRVKCQALNKWEPELPSCSRVCQPPPDVLHAERTQRDKDNFSPGQEVFYSCEPGYDLRGAASMRCTPQGDWSPAAPTCEVKSCDDFMGQLLNGRVLFPVNLQLGAKVDFVCDEGFQLKGSSASYCVLAGMESLWNSSVPVCEQIFCPSPPVIPNGRHTGKPLEVFPFGKTVNYTCDPHPDRGTSFDLIGESTIRCTSDPQGNGVWSSPAPRCGILGHCQAPDHFLFAKLKTQTNASDFPIGTSLKYECRPEYYGRPFSITCLDNLVWSSPKDVCKRKSCKTPPDPVNGMVHVITDIQVGSRINYSCTTGHRLIGHSSAECILSGNAAHWSTKPPICQRIPCGLPPTIANGDFISTNRENFHYGSVVTYRCNPGSGGRKVFELVGEPSIYCTSNDDQVGIWSGPAPQCIIPNKCTPPNVENGILVSDNRSLFSLNEVVEFRCQPGFVMKGPRRVKCQALNKWEPELPSCSRVCQPPPDVLHAERTQRDKDNFSPGQEVFYSCEPGYDLRGAASMRCTPQGDWSPAAPTCEVKSCDDFMGQLLNGRVLFPVNLQLGAKVDFVCDEGFQLKGSSASYCVLAGMESLWNSSVPVCEQIFCPSPPVIPNGRHTGKPLEVFPFGKAVNYTCDPHPDRGTSFDLIGESTIRCTSDPQGNGVWSSPAPRCGILGHCQAPDHFLFAKLKTQTNASDFPIGTSLKYECRPEYYGRPFSITCLDNLVWSSPKDVCKRKSCKTPPDPVNGMVHVITDIQVGSRINYSCTTGHRLIGHSSAECILSGNTAHWSTKPPICQRIPCGLPPTIANGDFISTNRENFHYGSVVTYRCNLGSRGRKVFELVGEPSIYCTSNDDQVGIWSGPAPQCIIPNKCTPPNVENGILVSDNRSLFSLNEVVEFRCQPGFVMKGPRRVKCQALNKWEPELPSCSRVCQPPPEILHGEHTPSHQDNFSPGQEVFYSCEPGYDLRGAASLHCTPQGDWSPEAPRCAVKSCDDFLGQLPHGRVLFPLNLQLGAKVSFVCDEGFRLKGSSVSHCVLVGMRSLWNNSVPVCEHIFCPNPPAILNGRHTGTPSGDIPYGKEISYTCDPHPDRGMTFNLIGESTIRCTSDPHGNGVWSSPAPRCELSVRAGHCKTPEQFPFASPTIPINDFEFPVGTSLNYECRPGYFGKMFSISCLENLVWSSVEDNCRRKSCGPPPEPFNGMVHINTDTQFGSTVNYSCNEGFRLIGSPSTTCLVSGNNVTWDKKAPICEIISCEPPPTISNGDFYSNNRTSFHNGTVVTYQCHTGPDGEQLFELVGERSIYCTSKDDQVGVWSSPPPRCISTNKCTAPEVENAIRVPGNRSFFTLTEIIRFRCQPGFVMVGSHTVQCQTNGRWGPKLPHCSRVCQPPPEILHGEHTLSHQDNFSPGQEVFYSCEPSYDLRGAASLHCTPQGDWSPEAPRCTVKSCDDFLGQLPHGRVLLPLNLQLGAKVSFVCDEGFRLKGRSASHCVLAGMKALWNSSVPVCEQIFCPNPPAILNGRHTGTPFGDIPYGKEISYACDTHPDRGMTFNLIGESSIRCTSDPQGNGVWSSPAPRCELSVPAACPHPPKIQNGHYIGGHVSLYLPGMTISYICDPGYLLVGKGFIFCTDQGIWSQLDHYCKEVNCSFPLFMNGISKELEMKKVYHYGDYVTLKCEDGYTLEGSPWSQCQADDRWDPPLAKCTSRTHDALIVGTLSGTIFFILLIIFLSWIILKHRKGNNAHENPKEVAIHLHSQGGSSVHPRTLQTNEENSRVLP

SEQ ID NO: 63953 - protein, 222 aa, Homo sapiens
  MOD_RES (1)..(1): Any amino acid
XTPEEVIPKRLQEKQKSERETAVRISQEIGNLMKEIETLVEEKTKESLDVSRLTREGGPLLYEGISLTMNSKLLNGSQRVVMDGVISDHECQELQRLTNVAATSGDGYRGQTSPHTPNEKFYGVTVFKALKFHVAGEASQSWWKAKRSKSHLTWMAAGKERTSAAGARRQSSSAECPPVLQRDGEGAAHHGVLLPPGYAPLLFLLSSGVPHCHRRGPGREEG

SEQ ID NO: 63954 - protein, 45 aa, Homo sapiens
MSSPNIWSTGSSVYSTPVFSQKMTVWILLLLSLYPGRLCGHVCLL

SEQ ID NO: 63955 - protein, 440 aa, Homo sapiens
MAWIKRKFGERPPPKRLTREAMRNYLKERGDQTVLILHAKVAQKSYGNEKRFFCPPPCVYLMGSGWKKKKEQMERDGCSEQESQPCAFIGIGNSDQEMQQLNLEGKNYCTAKTLYISDSDKRKHFMLSVKMFYGNSDDIGVFLSKRIKVISKPSKKKQSLKNADLDDDESEGEEFTVRDGYIHYGQTVKLVCSVTGMALPRLIIRKVDKQTALLDADDPVSQLHKCAFYLKDTERMYLCLSQERIIQFQATPCPKEPNKEMINDGASWTIISTDKAEYTFYEGMGPVLAPVTPVPVVESLQLNGGGDVAMLELTGQNFTPNLRVWFGDVEAETMYRCGESMLCVVPDISAFREGWRWVRQPVQVPVTLVRNDGIIYSTSLTFTYTPEPGPRPHCSAAGAILRANSSQVPPNESNTNSEGSYTNASTNSTSVTSSTATVVS

SEQ ID NO: 63956 - protein, 70 aa, Homo sapiens
MKDVPGFLQQSQNSGPGQPAVWHRLEELYTKKLWHQLTLQVLDFVQDPCFAQGDGLIKLYENFISEFEHR

SEQ ID NO: 63957 - protein, 1048 aa, Homo sapiens
MLAVSLKWRLGVVRRRLKDDGPYSKGGKDAGGADVSLACRRQSIPEEFRGITVVELIKKEGSTLGLTISGGTDKDGKPRVSNLRPGGLAARSDLLNIGDYIRSVNGIHLTRLRHDEIITLLKNVGERVVLEVEYELPPPAPENNPRIISKTVDVSLYKEGNSFGFVLRGGAHEDGHKSRPLVLTYVRPGGPADREGSLKVGDRLLSVDGIPLHGASHATALATLRQCSHEALFQVEYDVATPDTVANASGPLMVEIVKTPGSALGISLTTTSLRNKSVITIDRIKPASVVDRSGALHPGDHILSIDGTSMEHCSLLEATKLLASISEKVRLEILPVPQSQRPLRPSEAVKVQRSEQLHRWDPCVPSCHSPRPGHCRMPTWATPAGQDQSRSLSSTPFSSPTLNHAFSCNNPSTLPRGSQPMSPRTTMGRRRQRRREHKSSLSLASSTVGPGGQIVHTETTEVVLCGDPLSGFGLQLQGGIFATETLSSPPLVCFIEPDSPAERCGLLQVGDRVLSINGIATEDGTMEEANQLLRDAALAHKVVLEVEFDVAESVIPSSGTFHVKLPKKRSVELGITISSASRKRGEPLIISDIKKGSVAHRTGTLEPGDKLLAIDNIRLDNCPMEDAVQILRQCEDLVKLKIRKDEDNSDELETTGAVSYTVELKRYGGPLGITISGTEEPFDPIVISGLTKRGLAERTGAIHVGDRILAINNVSLKGRPLSEAIHLLQVAGETVTLKIKKQLDRPLLPRKSGSLSETSDADEDPADALKGGLPAARFSPAVPSVDSAVESWDSSATEGGFGGPGSYTPQAAARGTTPQERRPGWLRGSPPPTEPRRTSYTPTPADESFPEEEEEDDWEPPTSPAPGPAREEGFWRMFGEALEDLESCGQSELLRELEASIMTGTVQRVALEGRPGHRPWQRGREVRASPAEMEELLLPTPLEMHKVTLHKDPMRHDFGFSVSDGLLEKGVYVHTVRPDGPAHRGGLQPFDRVLQVNHVRTRDFDCCLAVPLLAEAGDVLELIISRKPHTAHSSRAPRSPGPSSPRML

SEQ ID NO: 63958 - protein, 179 aa, Homo sapiens
MDMGNPGTLSPTKPGSQYYQYSSNNPRRRPLHSSAMEVQTKKVRKVPPGLPSSVYAPSASTADYNRDSPGYPSSKPATSTFPSSFFMQDGHHSSDPWSSSSGMNQPGYAGMLGNSSHIPQSSSYCSLHPHERLSYPSHSSADINSSLPPMSTFHRSGTNHYSTSSCTPPANGTDSIMAN

SEQ ID NO: 63959 - protein, 962 aa, Homo sapiens
MLNGAGLDKALKMSLPRRSRIRSSVGPVRSSLGYKKAEDEMSRATSVGDQLEAPARTIYLNQPHLNKFRDNQISTAKYSVLTFLPRFLYEQIRRAANAFFLFIALLQQIPDVSPTGRYTTLVPLIIILTIAGIKEIVEDFKRHKADNAVNKKKTIVLRNGMWHTIMWKEVAVGDIVKVVNGQYLPADVVLLSSSEPQAMCYVETANLDGETNLKIRQGLSHTADMQTREVLMKLSGTIECEGPNRHLYDFTGNLNLDGKSLVALGPDQILLRGTQLRNTQWVFGIVVYTGHDTKLMQNSTKAPLKRSNVEKVTNVQILVLFGILLVMALVSSAGALYWNRSHGEKNWYIKKMDTTSDNFGYNLLTFIILYNNLIPISLLVTLEVVKYTQALFINWDTDMYYIGNDTPAMARTSNLNEELGQVKYLFSDKTGTLTCNIMNFKKCSIAGVTYGHFPELAREPSSDDFCRMPPPCSDSCDFDDPRLLKNIEDRHPTAPCIQEFLTLLAVCHTVVPEKDGDNIIYQASSPDEAALVKGAKKLGFVFTARTPFSVIIEAMGQEQTFGILNVLEFSSDRKRMSVIVRTPSGRLRLYCKGADNVIFERLSKDSKYMEETLCHLEYFATEGLRTLCVAYADLSENEYEEWLKVYQEASTILKDRAQRLEECYEIIEKNLLLLGATAIEDRLQAGVPETIATLLKAEIKIWVLTGDKQETAINIGYSCRLVSQNMALILLKEDSLDATRAAITQHCTDLGNLLGKENDVALIIDGHTLKYALSFEVRRSFLDLALSCKAVICCRVSPLQKSEIVDVVKKRVKAITLAIGDGANDVGMIQTAHVGVGISGNEGMQATNNSDYAIAQFSYLEKLLLVHGAWSYNRVTKCILYCFYKNVVLYIIELWFAFVNGFSGQILFERWCIGLYNVIFTALPPFTLGIFERSCTQESMLRFPQLYKITQNGEGFNTKILC

SEQ ID NO: 63960 - protein, 41 aa, Homo sapiens
METGNSAATHKLFCRKVYISPILLLTGLRLWLLHLEIYLLC

SEQ ID NO: 63961 - protein, 90 aa, Homo sapiens
MMKSQGLVSFKDVAVDFTQEEWQQLDPSQRTLYRDVMLENYSHLVSMGYPVSKPDVISKLEQGEEPWIIKGDISNWIYPDEYQADGRQGK

SEQ ID NO: 63962 - protein, 120 aa, Homo sapiens
  MOD_RES (1)..(1): Any amino acid
XSPPRLRPFLAAAPGPPASSAAVWKKSQGAGSSPRRPQGGSDAPSGHAAPSRIVWEHTRGRYSCMQCAFSTASRPAMTLHLEDHRPGAPAAPAAGPPRPDAPAGKAEECAGGEGGGGPRR

SEQ ID NO: 63963 - protein, 44 aa, Homo sapiens
MAKPFFRLQKFLRRTQFLLFFLTAAYLMTGSLLLLQRVRVALPQ

SEQ ID NO: 63964 - protein, 86 aa, Homo sapiens
  MOD_RES (1)..(1): Any amino acid
XIEEVNMFTNQGTVIHFNNPKVQASLAANTFTITGHAETKQLTEMLPSILNQLGADSLTSLRRLAEALPKQYLVENFDEASKNEAN

SEQ ID NO: 63965 - protein, 317 aa, Homo sapiens
MEEPEEPADSGQSLVPVYIYSPEYVSMCDSLAKIPKRASMVHSLIEAYALHKQMRIVKPKVASMEEMATFHTDAYLQHLQKVSQEGDDDHPDSIEYGLGYDCPATEGIFDYAAAIGGATITAAQCLIDGMCKVAINWSGGWHHAKNVLKEVYQAFNPKAVVLQLGADTIAGDPMCSFNMTPVGIGKCLKYILQWQLATLILGGGGYNLANTARCWTYLTGVILGKTLSSEIPDHEFFTAYGPDYVLEITPSCRPDRNEPHRIQQILNYIKGEHRPSRPALLVPPSLWWPISGGFLKYHLPFGKLIISLTWKGNLFLA

SEQ ID NO: 63966 - protein, 189 aa, Homo sapiens
MDRMKKIKRQLSMTLRGGRGIDKTNGAPEQIGLDESGGGGGSDPGEAPTRAAPGELRSARGPLSSAPEIVHEDLKMGSDGESDQASATSSDEVQSPVRVRMRNHPPRKISTEDINKRLSLPADIRLPEGYLEKLTLNSPIFDKPLSRRLRRVSLSEIGFGKLETYIKLDKLGEGTYATVYKGKSKLTDN

SEQ ID NO: 63967 - protein, 102 aa, Homo sapiens
MMKPSWLSRTEFSKRLLCRTLWCQSGWSSRSYTRSMLKMTTSINRRSRTSTKSTRTSARPGLTATVSIGLSDSPTWRHCWMTARSCSGGEADLCRRPAGLLQ

SEQ ID NO: 63968 - protein, 728 aa, Homo sapiens
MLSSVCVSSFRGRQGASKQQPAPPPQPPESPPPPPLPPQQQQPAQPGPAASPAGPPAPRGPGDRRAEPCPGLPAAAMGRHGGGGGDSGKIVINVGGVRHETYRSTLRTLPGTRLAGLTEPEAAARFDYDPGADEFFFDRHPGVFAYVLNYYRTGKLHCPADVCGPLFEEELGFWGIDETDVEACCWMTYRQHRDAEEALDSFEAPDPAGAANAANAAGAHDGGLDDEAGAGGGGLDGAGGELKRLCFQDAGGGAGGPPGGAGGAGGTWWRRWQPRVWALFEDPYSSRAARYVAFASLFFILISITTFCLETHEGFIHISNKTVTQASPIPGAPPENITNVEVETEPFLTYVEGVCVVWFTFEFLMRITFCPDKVEFLKSSLNIIDCVAILPFYLEVGLSGLSSKAAKDVLGFLRVVRFVRILRIFKLTRHFVGLRVLGHTLRASTNEFLLLIIFLALGVLIFATMIYYAERIGADPDDILGSNHTYFKNIPIGFWWAVVTMTTLGYGDMYPKTWSGMLVGALCALAGVLTIAMPVPVIVNNFGMYYSLAMAKQKLPKKKNKHIPRPPQPGSPNYCKPDPPPPPPPHPHHGSGGISPPPPITPPSMGVTVAGAYPAGPHTHPGLLRGGAGGLGIMGLPPLPAPGEPCPLAQEEVIEINRADPRPNGDPAAAALAHEDCPAIDQPAMSPEDKSPITPGSRGRYSRDRACFLLTDYAPSPDGSIRKALVTA

SEQ ID NO: 63969 - protein, 80 aa, Homo sapiens
MSGQRGDWTSALWQLLFRVLSPLPAGNALASLALEVQARLVKSALCSQGYPRLALAQLPEDGSQGSRELLLALSWLLARG

SEQ ID NO: 63970 - protein, 39 aa, Homo sapiens
MYYKFSGFTQKLAGAWASEAYSPQVRVAPGQLGHEKWRP

SEQ ID NO: 63971 - protein, 118 aa, Homo sapiens
MARHRNVRGYNYDEARLYSCLDHMREVLGDAVPDEILIEAVLKNKFDVQKALSGVLEQDRVQSLKDKNEATVSTGKIAKGKESYFLLLKFQLIMFKVLILSQQIIWIIVANPLILLAQ

SEQ ID NO: 63972 - protein, 69 aa, Homo sapiens
  MOD_RES (1)..(1): Any amino acid
XLHLFYEDCAGTALSDDPEGPPVLCPRRPWPSLCWKISLSSGTLLLLLGVAALTTGYAVPPKLEGIGEG

SEQ ID NO: 63973 - protein, 416 aa, Homo sapiens
MIIPHKCILQTSSTNASLISTSSTIANIPAAAVASISNQDYPTYTILGQNQYQACYPSSSFGVTGQTNSDAESTTLAATTYQSEKPSVMAPAPAAQRLSSDPSTSPSLSQTTPSKDTDDQSRKNMTSKNRGKRKADATSSQDSELERVFLWDLDETIIIFHSLLTGSYAQKYGKDPTVVIGSGLTMEEMIFEVADTHLFFNDLEECDQVHVEDVASDDNGQDLSNYSFSTDGFSGSGGSGSHGSSVGVQGGVDWMRKLAFRYRKVREIYDKHKSNVGGLLSPQRKEALQRLRAEIEVLTDSWLGTALKSLLLIQSRKNCVNVLITTTQLVPALAKVLLYGLGEIFPIENIYSATKIGKESCFERIVSRFGKKVTYVVIGDGRDEEIAAKQHNMPFWRITNHGDLVSLHQALELDFL

SEQ ID NO: 63974 - protein, 991 aa, Homo sapiens
  MOD_RES (1)..(1): Any amino acid
XECSAQCGLGYRTLDIYCAKYSRLDGKTEKVDDGFCSSHPKPSNREKCSGECNTGGWRYSAWTECSKSCDGGTQRRRAICVNTRNDVLDDSKCTHQEKVTIQRCSEFPCPQWKSGDWSECLVTCGKGHKHRQVWCQFGEDRLNDRMCDPETKPTSMQTCQQPECASWQAGPWGQCSVTCGQGYQLRAVKCIIGTYMSVVDDNDCNAATRPTDTQDCELPSCHPPPAAPETRRSTYSAPRTQWRFGSWTPCSATCGKGTRMRYVSCRDENGSVADESACATLPRPVAKEECSVTPCGQWKALDWSSCSVTCGQGRATRQVMCVNYSDHVIDRSECDQDYIPETDQDCSMSPCPQRTPDSGLAQHPFQNEDYRPRSASPSRTHVLGGNQWRTGPWGACSSTCAGGSQRRVVVCQDENGYTANDCVERIKPDEQRACESGPCPQWAYGNWGECTKLCGGGIRTRLVVCQRSNGERFPDLSCEILDKPPDREQCNTHACPHDAAWSTGPWSSCSVSCGRGHKQRNVYCMAKDGSHLESDYCKHLAKPHGHRKCRGGRCPKWKAGAWSQCSVSCGRGVQQRHVGCQIGTHKIARETECNPYTRPESERDCQGPRCPLYTWRAEEWQECTKTCGEGSRYRKVVCVDDNKNEVHGARCDVSKRPVDRESCSLQPCEYVWITGEWSECSVTCGKGYKQRLVSCSEIYTGKENYEYSYQTTINCPGTQPPSVHPCYLRDCPVSATWRVGNWGSCSVSCGVGVMQRSVQCLTNEDQPSHLCHTDLKPEERKTCRNVYNCELPQNCKEVKRLKGASEDGEYFLMIRGKLLKIFCAGMHSDHPKEYVTLVHGDSENFSEVYGHRLHNPTECPYNGSRRDDCQCRKDYTAAGFSSFQKIRIDLTSMQIITTDLQFARTSEGHPVPFATAGDCYSAAKCPQGRFSINLYGTGLSLTESARWISQGNYAVSDIKKSPDGTRVVGKCGGYCGKCTPSSGTGLEVRVL

SEQ ID NO: 63975 - protein, 178 aa, Homo sapiens
  MOD_RES (1)..(1): Any amino acid
XDPGDDWLVESLRLYQDFYAFDLSGATRVLEWIDDKGVFVAGYESLKKNEILHLKLPLRLSVKENKGLFPERDFKVRHGGFSDRSIFDLKHVPHTRLLVTSGLPGCYLQVWQVAEDSDVIKAVSTIAVHEKEESLWPRVAVFSTLAPGVLHGARLRSLQVVDLESRKTTYTSGVGDTQ

SEQ ID NO: 63976 - protein, 199 aa, Homo sapiens
  MOD_RES (1)..(1): Any amino acid
XMNPVEDATGDQNGICFQSEESKARACSETEESNTCCSDWQRHFDVALGRMVYVNKMTGLSTFIAPTEDIQAACTKDLTTVAVDVVLENGSQYRCQPFRSDLVLPFLPRARAERTVMRQDNRDTVDDTVSSESLQSLFSEWDNPVFARYPEVLQQVDNKFIACLMSTKTEENGEAAELMMLQDPCCRQSREDENHEFSL

SEQ ID NO: 63977 - protein, 183 aa, Homo sapiens
MLGELIGKGSLVMEGQKHLNSKKKGLKASFSLSLTFTSRLAPDPSLVIYAIFPSGGVVADKIQFSVEMCFDNQVSLGFSPSQQLPGAEVELQLQAAPGSLCALRAVDESVLLLRPDRELSNRSVYGMFPFWYGHYPYQVAEYDQCPVSGPWDFPQPLIDPMPQGHSSQRSIIWRPSFSEGTDL

SEQ ID NO: 63978 - protein, 166 aa, Homo sapiens
MVLNVEREKNMILEQQAQLQREKEQDQMKLYAKLEKLDVLEKECFRLTTTQKTAEDKIKHLEEKLKEEEHQRKLFQDKASELQTGLEISKIIMSSVSNLKHSKEKKKSSKKTKCIKRRPPWQICSKFGALPFVAEKVRGDKMKIVVQKNSCFVMRQHRDPHILQKP

SEQ ID NO: 63979 - protein, 44 aa, Homo sapiens
  MOD_RES (1)..(1): Any amino acid
XTDPVNMSGFSPELIDYLEGKISFEEFERRREERKTREKKVRRC

SEQ ID NO: 63980 - protein, 494 aa, Homo sapiens
MAALTIATGTGNWFSALALGVTLLKCLLIPTYHSTDFEVHRNWLAITHSLPISQWYYEATSEWTLDYPPFFAWFEYILSHVAKYFDQEMLNVHNLNYSSSRTLLFQRFSVIFMDVLFVYAVRECCKCIDGKKYNGFLFGLMLLSIARLFQKRHMEGAFLFAVLLHFKHIYLYVAPAYGVYLLRSYCFTANKPDGSIRWKSFSFVRVISLGLVVFLVSALSLGPFLALNQLPQVFSRLFPFKRGLCHAYWAPNFWALYNALDKVLSVIGLKLKFLDPNNIPKASMTSGLVQQFQHTVLPSVTPLATLICTLIAILPSIFCLWFKPQGPRGFLRCLTLCALSSFMFGWHVHEKAILLAILPMSLLSVGKAGDASIFLILTTTGHYSLFPLLFTAPELPIKILLMLLFTIYSISSLKTLFRKEKPLFNWMETFYLLGLGPLEVCCEFVFPFTSWKVKYPFIPLLLTSVYCAVGITYAWFKLYVSVLIDSAIGKTKKQ

SEQ ID NO: 63981 - protein, 1486 aa, Homo sapiens
PRDHSLNASQGHFMFILKKSSSLWQVAKLQSPTFSQTGPGCILSFWFYNYGLSVGAAELQLHMENSHDSTVIWRVLYNQGKQWLEATIQLGRLSQPFHLSLDKVSLGIYDGVSAIDDIRFENCTLPLPAESCEGLDHFWCRHTRACIEKLRLCDLVDDCGDRTDEVNCAPELQCNFETGICNWEQDAKDDFDWTRSQGPTPTLNTGPMKDNTLGTAKGHYLYIESSEPQAFQDSAALLSPILNATDTKGCTFRFYYHMFGKRIYRLAIYQRIWSDSRGQLLWQIFGNQGNRWIRKHLNISSRQPFQILVEASVGDGFTGDIAIDDLSFMDCTLYPGNLPADLPTPPETSVPVTLPPHNCTDNEFICRSDGHCIEKMQKCDFKYDCPDKSDEASCVMEVCSFEKRSLCKWYQPIPVHLLQDSNTFRWGLGNGISIHHGEENHRPSVDHTQNTTDGWYLYADSSNGKFGDTADILTPIISLTGPKCTLVFWTHMNGATVGSLQVLIKKDNVTSKLWAQTGQQGAQWKRAEVFLGIRSHTQIVFRAKRGISYIGDVAVDDISFQDCSPLLSPERKCTDHEFMCANKHCIAKDKLCDFVNDCADNSDETTFICRTSSGRCDFEFDLCSWKQEKDEDFDWNLKASSIPAAGTEPAADHTLGNSSGHYIFIKSLFPQQPMRAARISSPVISKRSKNCKIIFHYHMYGNGIGALTLMQVSVTNQTKVLLNLTVEQGNFWRREELSLFGDEDFQLKFEGRVGKGQRGDIALDDIVLTENCLSLHDSVQEELAVPLPTGFCPLGYRECHNGKCYRLEQSCNFVDNCGDNTDENECGSSCTFEKGWCGWQNSQADNFDWVLGVGSHQSLRPPKDHTLGNENAILLMRRHKYPIRSVNLHTVKHVLKAQTVGNCSVSKLEARLLDFLSVPNENTFGSSDHTNWHFMYLEATAVGLRGDKAHFRSTMWRESSAACTMSFWYFVSAKATGSIQILIKRGRRRRRAPNPVLSGSPTIPRQGSQQLGGWRGGSARHRARAFPEPECPRGRSALLKGPPQEKPNRRSALLSVGEISELCPEITDFLCRDKKCIASHLLCDYKPDCSDRSDEAHCAHYTSTTGSCNFETSSGNWTTACSLTQDSEDDLDWAIGSRIPAKALIPDSDHTPGSGQHFLYVNSSGSKEGSVARITTSKSFPASLGMCTVRFWFYMIDPRSMGILKVYTIEESGLNILVWSVIGNKRTGWTYGSVPLSSNSPFKVAFEADLDGNEDIFIALDDISFTPECVTGGPVPVQPSPCEADQFSCIYTLQCVPLSGKCDGHEDCIDGSDEMDCPLSPTPPLCSNMEFPCSTDECIPSLLLCDGVPDCHFNEDELICSNKSCSNGALVCASSNSCIPAHQRCDGFADCMDFQLDESSCSDTWTLLGIGLAFLMTHITVAVLCFLANRKVPIRKTEGSGNCAFVNPVYGNWSNPEKTESSVYSFSNPLYGTTSGSLETLSHHLK

SEQ ID NO: 63982 - protein, 46 aa, Homo sapiens
MPDSPVDVKTQSRLTPPTMPPPPTTQGAPRTSSFTPTTLTNGTSHS

SEQ ID NO: 63983 - protein, 22 aa, Homo sapiens
MPDSPAEVKTQPRSTPPSMPPP

SEQ ID NO: 63984 - protein, 97 aa, Homo sapiens
MEIRHLLAQWIENQDWEAASNNETMATILLQNLLIQLDEQLGRVSKEKNLLLIHNLKRIRKVLQGKFHGNPMHVAVVISNCLREERRILAAANMPVQ

SEQ ID NO: 63985 - protein, 141 aa, Homo sapiens
MVMEKPSPLLVGREFVRQYYTLLNKAPEYLHRFYGRNSSYVHGGVDASGKPQEAVYGQNDIHHKVLSLNFSECHTKIRHVDAHATLSDGVVVQVMGLLSNSGQPERKFMQTFVLAPEGSVPNKFYVHNDMFRYEDEVFGDS

SEQ ID NO: 63986 - protein, 89 aa, Homo sapiens
  MOD_RES (1)..(1): Any amino acid
XMVQSMTLLENQLVEKLWVLKVLQHLSTSEVNCTIMMKAQAASGICTHLNDPDPSGQLLFRSSEILWNLLEKSSKEEVIQQLSNLECLL

SEQ ID NO: 63987 - protein, 50 aa, Homo sapiens
MVSLTAPYVSGFLAFREVPFLLELVQQLREKEPGLMPQVLLVDGNGVLHH

SEQ ID NO: 63988 - protein, 194 aa, Homo sapiens
MADNSSDECEEENNKEKKKTSQLTPQRGFSENEDDDDDDDDSSETDSDSDDDDEEHGAPLEGAYDPADYEHLPVSAEIKELFQYISRYTPQLIDLDHKLKPFIPDFIPAVGDIDAFLKVPRPDGKPDNLGLLVLDEPSTKQSDPTVLSLWLTENSKQHNITQHMKVKSLEDAEKNPKAIDTWIESISELHRSKP

SEQ ID NO: 63989 - protein, 335 aa, Homo sapiens
MCVCAEDGKTLPVAVPIEDMQRIHLRFMFRHRSSLESKDKGEKNFAMSYVKLMKEDGTTLHDGFHDLVVLKGDSKKMEDASAYLTLPSYRHHVENKGATLSRSSSSVGGLSVSSRDVFSISTLVCSTKLTQNVGLLGLLKWRMKPQLESMRRLFESINNLMKSQYKTTILLQVAALKYIPSVLHDVEMVFDAKLLSQLLYEFYTCIPPVKLQKQKVQSMNEIVQSNLFKKQECRDILLPVITKELKELLEQKDDMQHQVLERKYCVELLNSILEVLSYQDAAFTYHHIQEIMVQLLRTVNRTVITMGRDHILIGACCNCGFPSSTPHSLIQWLWG

SEQ ID NO: 63990 - protein, 98 aa, Homo sapiens
MFVPCGESAPDLAGFTLLMPAVSVGNVGQLAMDLIISTLNMSKIGYFYTDCLVPMVGNNPYATTEGNSTELSINAEVYSLPSRKLVALQLRSIFIKLF

SEQ ID NO: 63991 - protein, 106 aa, Homo sapiens
MAALSPTFATSTQDSTCLQDSEFPVSSKDHSCPQNLDLFVCSGLEPHTPSVGSQESVTFQDVAVDFTEKEWPLLDSSQRKLYKDVMLENYSNLTSLEILAPPFCCS

SEQ ID NO: 63992 - protein, 133 aa, Homo sapiens
MAAGGAAPETPAISPSKRARPAEVGGMQLRFARLSEHATAPTRGSARAAGYDLYSAYDYTIPPMEKAVVKTDIQIALPSGCYGRVAPRSGLAAKHFIDVGAGVIDEDYRGNVGVVLFNFGKEKFEDRIWRMCQ

SEQ ID NO: 63993 - protein, 100 aa, Homo sapiens
EEEEEEEEDEDEDEDEDEAGSELGEGEEEVGLSYLMKEEIQSEKSYGFFNLQTEYLNFKDEEDDDDYVEEGEEEEEEEEGGLRGEKRKRDAEDDGEEEDD

SEQ ID NO: 63994 - protein, 86 aa, Homo sapiens
MSASLVRATVRAVSKRKLQPTRAALTLTPSAVNKIKQLLKDKPEHVGVKVGVRTRGCNGLSYTLEYTKTKGDSDEEVIQDGWSAVV

SEQ ID NO: 63995 - protein, 92 aa, Homo sapiens
MASADSRRVADGGGAGGTFQPYLDTLRQELQQTDPTLLSVVVAVLAVLLTLVFWKLIRSRRSSQRAVLLVGLCDSGKTLLFVRLLTGLYRDT

SEQ ID NO: 63996 - protein, 252 aa, Homo sapiens
MAAAAKPNNLSLVVHGPGDLRLENYPIPEPGPNEVLLRMHSVGICGSDVHYWEYGRIGNFIVKKPMVLGHEASGTVEKVGSSVKHLKPGDRVAIEPGAPRENDEFCKMGRYNLSPSIFFCATPPDDGNLCRFYKHNAAFCYKLPDNVTFEEGALIEPLSVGIHACRRGGVTLGHKVLVCGAGPIGMVTLLVAKAMGAAQVVVTDLSATRLSKAKEIGADLVLQISKESPQEIARKVEGHSLWWEPRACGAGL

SEQ ID NO: 63997 - protein, 379 aa, Homo sapiens
MHRKHLQEIPDLSSNVATSFTWGWDSSKTSELLSGMGVSALEKEEPDSENIPQELLSNLGHPESPPRKRLKSKGSDKDFVIVRRPKLNRENFPGVSWDSLPDELLLGIFSCLCLPELLKVSGVCKRWYRLASDESLWQTLDLTGKNLHPDVTGRLLSQGVIAFRCPRSFMDQPLAEHFSTLAKNSNLVRLNLSGCSGFSEFALQTLLSSCSRLDELNLSWCFDFTEKHVQVAVAHVSETITQLNLSGYRKNLQKSDLSTLVRRCPNLVHLDLSDSVMLKNDCFQEFFQLNYLQHLSLSRCYDIIPETLLELGEIPTLKTLQVFGIVPDGTLQLLKEALPHLQINCSHFTTIARPTIGNKKNQEIWGIKCRLTLQKPSCL

SEQ ID NO: 63998 - protein, 389 aa, Homo sapiens
MAAGFGRCCRVLRSISRFHWRSQHTKANRQREPGLGFSFEFTEQQKEFQATARKFAREEIIPVAAEYDKTGEYPVPLIRRAWELGLMNTHIPENCGGLGLGTFDACLISEELAYGCTGVQTAIEGNSLGQMPIIIAGNDQQKKKYLGRMTEEPLMCAYCVTEPGAGSDVAGIKTKAEKKGDEYIINGQKMWITNGGKANWYFLLARSDPDPKAPANKAFTGFIVEADTPGIQIGRKELNMGQRCSDTRGIVFEDVKVPKENVLIGDGAGFKVAMGAFDKTRPVHQAISFMLAEMAMKVELARMSYQRAAWEVDSGRRNTYYASIAKAFAGDIANQLATDAVQILGGNGFNTEYPVEKLMRDAKIYQIYEGTSQIQRLIVAREHIDKYKN

SEQ ID NO: 63999 - protein, 153 aa, Homo sapiens
MADPWQECMDYAVTLARQAGEVVCEAIKNEMNVMLKSSPVDLVTATDQKVEKMLISSIKEKYPSHRFPFVAVSIGFAVNKKIEFGVVYSCVEGKMYTARKGKGAFCNGQKLQVSQQEDITKSLLVTELGSSRTPETVRMVLSNMEKLFCIPVH

SEQ ID NO: 64000 - protein, 1525 aa, Homo sapiens
MEVCLVEELPPTTELEEGLRNGVYLAKLAKFFAPKMVSEKKIYDVEQTRYKKSGLHFRHTDNTVQWLRAMESIGLPKIFYPETTDVYDRKNIPRMIYCIHALSLYLFKLGIAPQIQDLLGKVDFTEEEISNMRKELEKYGIQMPSFSKIGGILANELSVDEAALHAAVIAINEAVEKGIAEQTVVTLRNPNAVLTLVDDNLAPEYQKELWDAKKKKEENARLKNSCISEEERDAYEELLTQAEIQGNINKVNRQAAVDHINAVIPEGDPENTLLALKKPEAQLPAVYPFAAAMYQNELFNLQKQNTMNYLAHEELLIAVEMLSAVALLNQALESNDLVSVQNQLRSPAIGLNNLDKAYVERYANTLLSVKLEVLSQGQDNLSWNEIQNCIDMVNAQIQEENDRVVAVGYINEAIDEGNPLRTLETLLLPTANISDVDPAHAQHYQDVLYHAKSQKLGDSESVSKVLWLDEIQQAVDDANVDKDRAKQWVTLVVDVNQCLEGKKSSDILSVLKSSTSNANDIIPECADKYYDALVKAKELKSERVSSDGSWLKLNLHKKYDYYYNTDSKESSWVTPESCLYKESWLTGKEIEDIIEEVTVGYIRENIWSASEELLLRFQATSSGPILREEFEARKSFLHEQEENVVKIQAFWKGYKQRKEYMHRRQTFIDNTDSIVKIQSWFRMATARKSYLSRLQYFRDHNNEIVKIQSLLRANKARDDYKTLVGSENPPLTVIRKFVYLLDQSDLDFQEELEVARLREEVVTKIRANQQLEKDLNLMDIKIGLLVKNRITLEDVISHSKKLNKKKGGEMEILNNTDNQGIKSLSKERRKTLETYQQLFYLLQTNPLYLAKLIFQMPQNKSTKFMDTVIFTLYNYASNQREEYLLLKLFKTALEEEIKSKVDQVQDIVTGNPTVIKMVVSFNRGARGQNTLRQLLAPVVKEIIDDKSLIINTNPVEVYKAWVNQLETQTGEASKLPYDVTTEQALTYPEVKNKLEASIENLRRVTDKVLNSIISSLDLLPYGLRYIAKVLKNSIHEKFPDATEDELLKIVGNLLYYRYMNPAIVAPDGFDIIDMTAGGQINSDQRRNLGSVAKVLQHAASNKLFEGENEHLSSMNNYLSETYQEFRKYFKEACNVPEPEEKFNMDKYTDLVTVSKPVIYISIEEIISTHSLLLEHQDAIAPEKNDLLSELLGSLGEVPTVESFLGEGAVDPNDPNKANTLSQLSKTEISLVLTSKYDIEDGEAIDSRSLMIKTKKLIIDVIRNQPGNTLTEILETPATAQQEVDHATDMVSRAMIDSRTPEEMKHSQSMIEDAQLPLEQKKRKIQRNLRTLEQTGHVSSENKYQDILNEIAKDIRNQRIYRKLRKAELAKLQQTLNALNKKAAFYEEQINYYDTYIKTCLDNLKRKNTRRSIKLDGKGEPKGAKRAKPVKYTAAKLHEKGVLLDIDDLQTNQFKNVTFDIIATEDVGIFDVRSKFLGVEMEKVQLNIQDLLQMQYEGVAVMKMFDKVKVNVNLLIYLLNKKFYGK

SEQ ID NO: 64001 - protein, 77 aa, Homo sapiens
MAGSVADSDAVVKLDDGHLNNSLSSPVQADVYFPRLIVPFCGHIKGGMRPGKKVLVMGIVDLNPESGMIFFSALQSA

SEQ ID NO: 64002 - protein, 145 aa, Homo sapiens
MAMMVFPREEKLSQDEIVLGTKAVIQGLETLRGEHRALLAPLVAPEAGEAEPGSQERCILLRRSLEAIELGLGEAQVILALSSHLGAVESEKQKLRAQVRRLVQENQWLREELAGTQQKLQRSEQAVAQLEEEKQHLLFMSQIRK

SEQ ID NO: 64003 - protein, 167 aa, Homo sapiens
MFLLDSSASVSHYEFSRVREFVGQLVAPLPLGTGALRASLVHVGSRPYTEFPFGQHSSGEAAQDAVRASAQRMGDTHTGLALVYAKEQLFAEASGARPGVPKVLVWVTDGGSSDPVGPPMQELKDLGVTVFIVSTGRGNFLELSAAASAPAEKHLHFVDVDDLHIIV

SEQ ID NO: 64004 - protein, 380 aa, Homo sapiens
MENLSLSIEDVQPRSPGRSSLDDSGERDEKLSKSISFTSESISRVSETESFDGNSSKGGLGKEESQNEKQTKKSLLPTLEKKLTRVPSKSLDLNKNEYLSLDKSSTSDSVDEENVPEKDLHGRLFINRIFHISADRMFELLFTSSRFMQKFASSRNIIDVVSTPWTAELGGDQLRTMTYTIVLNSPLTGKCTAATEKQTLYKESREARFYLVDSEVLTHDVPYHDYFYTVNRYCIIRSSKQKCRLRVSTDLKYRKQPWGLVKSLIEKNSWSSLEDYFKQLESDLLIEESVLNQAIEDPGKLTGLRRRRRTFNRTAETVPKLSSQHSSGDVGLGAKGDITGKKKEMENYNVTLIVVMSIFVLLLVLLNVTLFLKLSKIEHA

SEQ ID NO: 64005 - protein, 61 aa, Homo sapiens
MESQEFIVLYTHQKMKKSKVWQDGILKITHLGNKTESCSVAQAGVQWHSLGSLQPLHPRFK

SEQ ID NO: 64006 - protein, 92 aa, Homo sapiens
WWSSMTKSVPQVWGSWLAMAFRLHVRPCPDVHPDPQHGRGLVVHWQSPSDLPSQDVLWRIFKGNLPVAASPCLQFENGLEPLAQDSGYLACP

SEQ ID NO: 64007 - protein, 152 aa, Homo sapiens
MSELEQLRQEAEQLRNQIRDARKACGDSTLTQITAGLDPVGRIQMRTRRTLRGHLAKIYAMHWGTDSRLLVSASQDGKLIIWDSYTTNKVHAIPLRSSWVMTCAYAPSGNFVACGGLDNICSIYSLKTREGNVRVSRELPGHTGYLSCCRFL

SEQ ID NO: 64008 - protein, 192 aa, Homo sapiens
MERAGATSRGGQAPGFLLRLHTEGRAEAARVQEQDLRQWGLTGIHLRSYQLEGVNWLAQRFHCQNGCILGDEMGLGKTCQTIALFIYLAGRLNDEGPFLILCPLSVLSNWKEEMQRFAPGLSCVTYAGDKEERACLQQDLKQESRFHVLLTTYEICLKDASFLKSFPWSVLVVDEAHRLKNQSSLLHKTLSE

SEQ ID NO: 64009 - protein, 145 aa, Homo sapiens
MIKHRQVQRRGRRSQMTTSFTDPAISMDLLRAVLQPSINEEIQTVFNKYMKFFQKAALNVRDNVGEEVDAEQLIQEACRSCLEQAKLLFSDGEKVIPRLTHELPGIKRGRQAEEECAHRGSPLPKKRKGRPPGHILSSDRAAAGM

SEQ ID NO: 64010 - protein, 52 aa, Homo sapiens
MAAAGWRDGSGQEKYRLVVVGGGGVGKSALTIQFIQVFRNSWVPSFIHVFQI

SEQ ID NO: 64011 - protein, 580 aa, Homo sapiens
MAMWNRPCQRLPQQPLVAEPTAEGEPHLPTGRELTEANRFAYAALCGISLSQLFPEPEHSSFCTEFMAGLVQWLELSEAVLPTMTAFASGLGGEGADVFVQILLKDPILKDDPTVITQDLLSFSLKDGHYDARARVLVCHMTSLLQVPLEELDVLEEMFLESLKEIKEEESEMAEASRKKKENRRKWKRYLLIGLATVGGGTVIGVTGGLAAPLVAAGAATIIGSAGAAALGSAAGIAIMTSLFGAAGAGLTGYKMKKRVGAIEEFTFLPLTEGRQLHITIAVTGWLASGKYRTFSAPWAALAHSREQYCLAWEAKYLMELGNALETILSGLANMVAQEALKYTVLSGIVAALTWPASLLSVANVIDNPWGVCLHRSAEVGKHLAHILLSRQQGRRPVTLIGFSLGARVIYFCLQEMAQEKDCQGIIEDVILLGAPVEGEAKHWEPFRKVVSGRIINGYCRGDWLLSFVYRTSSVQLRVAGLQPVLLQDRRVENVDLTSVVSGHLDYAKQMDAILKAVGIRTKPGWDEKGLLLAPGCLPSEEPRQAAAAASSALESGCPSGGPEGSLGPEAPTPALPWPQ

SEQ ID NO: 64012 - protein, 39 aa, Homo sapiens
MSEASSEDLVPPLEAGAAPYREEEEAAKKKKEKKKKSKG

SEQ ID NO: 64013 - protein, 1072 aa, Homo sapiens
MSLKPEYHKENRRCSRNSGQIEVVPEVSVSSSHSSVSSCLEMKDEDGLDSKHKCNNPGEIDVPSHELNCSLLSETCVTIGEKKNEALMECKAKPVGSPLFKFSDKEEHEQNDSISGKTGETVVEEMIATRKVEQDSKETVKLSHEDDHILEDAGSSDISSDAACTNPNKTENSLVGLPSCVDEVTECNLELKDTMGIADKTENTLERNKIEPLGYCEDAESNRQLESTEFNKSNLEVVDTSTFGPESNILENAICDVPDQNSKQLNAIESTKIESHETANLQDDRNSQSSSVSYLESKSVKSKHTKPVIHSKQNMTTDAPKKIVAAKYEVIHSKTKVNVKSVKRNTDVPESQQNFHRPVKVRKKQIDKEPKIQSCNSGVKSVKNQAHSVLKKTLQDQTLVQIFKPLTHSLSDKSHAHPGCLKEPHHPAQTGHVSHSSQKQCHKPQQQAPAMKTNSHVKEELEHPGVEHFKEEDKLKLKKPEKNLQPRQRRSSKSFSLDEPPLFIPDNIATIRREGSDHSSSFESKYMWTPSKQCGFCKKPHGNRFMVGCGRCDDWFHGDCVGLSLSQAQQMGEEDKEYVCVKCCAEEDKKTEILDPDTLENQATVEFHSGDKTMECEKLGLSKHTTNDRTKYIDDTVKHKVKILKRESGEGRNSSDCRDNEIKKWQLAPLRKMGQPVLPRRSSEEKSEKIPKESTTVTCTGEKASKPGTHEKQEMKKKKVEKGVLNVHPAASASKPSADQIRQSVRHSLKDILMKRLTDSNLKVPEEKAAKVATKIEKELFSFFRDTDAKYKNKYRSLMFNLKDPKNNILFKKVLKGEVTPDHLIRMSPEELASKELAAWRRRENRHTIEMIEKEQREVERRPITKITHKGEIEIESDAPMKEQEAAMEIQEPAANKSLEKPEGSEKQKEEVDSMSKDTTSQHRQHLFDLNCKICIGRMAPPVDDLSPKKVKVVVGVARKHSDNEAESIADALSSTSNILASEFFEEEKQESPKSTFSPAPRPEMPGTVEVESTFLARLNFIWKGFINMPSVAKFVTKAYPVSGSPEYLTEDLPDSIQVGGRISPQTVWDYV

SEQ ID NO: 64014 - protein, 51 aa, Homo sapiens
MEFVKCLGHPEEFYNLVRFRIGGKRKVMPKMDQQRSVHILSGSPSSGHTGR

SEQ ID NO: 64015 - protein, 605 aa, Homo sapiens
MSSVSPIQIPSRLPLLLTHEGVLLPGSTMRTSVDSARNLQLVRSRLLKGTSLQSTILGVIPNTPDPASDAQDLPPLHRIGTAALAVQVVGSNWPKPHYTLLITGLCRFQIVQVLKEKPYPIAEVEQLDRLEEFPNTCKMREELGELSEQFYKYAVQILDAVSLEERFKMTIPLLVRQIEGLKLLQKTRKPKQDDDKRVIAIRPIRRITHISGTLEDEDEDEDNDDIVMLEKKIRTSSMPEQAHKVCVKEIKRLKKMPQSMPEYALTRNYLELMVELPWNKSTTDRLDIRAARILLDNDHYAMEKLKKRVLEYLAVRQLKNNLKGPILCFVGPPGVGKTSVGRSVAKTLGREFHRIALGGVCDQSDIRGHRRTYVGSMPGRIINGLKTVGVNNPVFLLDEVDKLGKSLQGDPAAALLEVLDPEQNHNFTDHYLNVAFDLSQVLFIATANTTATIPAALLDRMEIIQVPGYTQEEKIEIAHRHLIPKQLEQHGLTPQQIQIPQVTTLDIITRYTREAGVRSLDRKLGAICRAVAVKVAEGQHKEAKLDRSDVTEREGCREHILEDEKPESISDTTDLALPPEMPILIDFHALKDILGPPMYEMEIAS

SEQ ID NO: 64016 - protein, 187 aa, Homo sapiens
MDISKGLPGMQGGLHIWISENRKMVPVPEGAYGNFFEEHCYVILHVPQSPKATQGASSDLHYWVGKQAGAEAQGAAEAFQQRLQDELGGQTVLHREAQGHESDCFCSYFRPGIIYRKGGLASDLKHVETNLFNIQRLLHIKGRKHVSATEVELSWNSFNKGDIFLLDLGKMMIQWNGPKTSISEKAR

SEQ ID NO: 64017 - protein, 171 aa, Homo sapiens
MEGPVLTLGLLAALAVCGSWGLNEEERLIRHLFQEKGYNKELRPVAHKEESVDVALALTLSNLISLKEVEETLTTNVWIEHGWTDNRLKWNAEEFGNISVLRLPPDMVWLPEIVLENNNDGSFQISYSCNVLVYHYGFVYWLPPAIFRSSCPISVTYFPFDWQNCSLKFRW

SEQ ID NO: 64018 - protein, 1750 aa, Homo sapiens
MARAWQHPFLNVFRHFRVDEWKRSAKQGDVAVVTDKTLKGAVYRIRGSVSAANYIQLPKSSTQSLGLTGRYLYVLFRPLPSKHFVIHLDVSSKDNQVIRVSFSNLFKEFKSTATWLQFPLVLEARTPQRDLVGLAPSGARWTCLQLDLQDVLLVYLNRCYGHLKSIRLCASLLVRNLYTSDLCFEPAISGAQWAKLPVTPMPREMAFPVPKGESWHDRYIHVRFPSESLKVPSKPIEKSCSPPEAVLLGPGPQPLPCPVASSKPVRFSVSPVVQTPSPTASGRAALAPRPFPEVSLSQERSDASNADGPGFHSLEPWAQLEASDIHTAAAGTHVLTHESAEVPVARTGSCEGFLPDPVLRLKGVIGFGGHGTRQALWTPDGAAVVYPCHAVIVVLLVDTGEQRFFLGHTDKVSALALDGSSSLLASAQARAPSVMRLWDFQTGRCLCLFRSPMHVVCSLSFSDSGALLCGVGKDHHGRTMVVAWGTGQVGLGGEVVVLAKAHTDFDVQAFRVTFFDETRMASCGQGSVRLWRLRGGVLRSCPVDLGEHHALQFTDLAFKQARDGCPEPSAAMLFVCSRSGHILEIDCQRMVVRHARRLLPTRTPGGPHPQKQTFSSGPGIAISSLSVSPAMCAVGSEDGFLRLWPLDFSSVLLEAEHEGPVSSVCVSPDGLRVLSATSSGHLGFLDTLSRVYHMLARSHTAPVLALAMEQRRGQLATVSQDRTVRIWDLATLQQLYDFTSSEDAPCAVTFHPTRPTFFCGFSSGAVRSFSLEAAEVLVEHTCHRGAVTGLTATPDGRLLFSSCSQGSLAQYSCADPQWHVLRVAADMVCPDAPASPSALAVSRDGRLLAFVGPSRCTVTVMGSASLDELLRVDIGTLDLASSRLDSAMAVCFGPAALGHLLVSTSSNRVVVLDAVSGRIIRELPGVHPEPCPSLTLSEDARFLLIAAGRTIKVWDYATQASPGPQVYIGHSEPVQAVAFSPDQQQVLSAGDAVFLWDVLAPTESDQSFPGAPPACKTGPGAGPLEDAASRASELPRQQVPKPCQASPPRLGVCARPPEGGDGARDTRNSGAPRTTYLASCKAFTPARVSCSPHSAKGTCPPPASGGWLRLKAVVGYSGNGRANMVWRPDTGFFAYTCGRLVVVEDLHSGAQQHWSGHSAEISTLALSHSAQVLASASGRSSTTAHCQIRVWDVSGGLCQHLIFPHSTTVLALAFSPDDRLLVTLGDHDGRTLALWGTATYDLVSSTRLPEPVHGVAFNPWDAGELTCVGQGTVTFWLLQQRGADISLQVRREPVPEAVGAGELTSLCYGAPPLLYCGTSSGQVCVWDTRAGRCFLSWEADDGGIGLLLFSGSRLVSGSSTGRLRLWAVGAVSELRCKGSGARSSSVFMEHELVLDGAVVSASFDDSVDMGVVGTTAGTLWFVSWAEGTSTRLISGHRSKVNEVVFSPGESHCATCSEDGSVRVWALASMELVIQFQVLNQSCLCLAWSPPCCGRPEQQRLAAGYGDGSLRIFSVSRTAMELKMHPHPVALTTVAFSTDGQTVLSGDKDGLVAVSHPCTGTTFRVLSDHQGAPISTICVTCKECEDLGVEGTDLWLAASGDQRVSVWASDWLRNHCELVDWLSFPMPATTETQGHLPPSLAAFCPWDGALLMYVGPGVYKEVIIYNLCQKQVVEKIPLPFFAMSLSLSPGTHLLAVGFAECMLRLVDCAMGTAQDFAGHDNAVHLCRFTPSARLLFTAARNEILVWEVPGL

SEQ ID NO: 64019 - protein, 87 aa, Homo sapiens
MVQWKRLCQLHYLWALGCYMLLATVALKLSFRLKCDSDHLGLESRESQSQYCRNILYNFLKLPAKRSINCSGVTRGDQEAVLQAILN

SEQ ID NO: 64020 - protein, 108 aa, Homo sapiens
MGLLTFRDVAIEFSLEEWQCLDTAQKNLYRNVMLENYRNLAFLGIAVSKPDLIICLEKEKEPWNMKRDEMVDEPPGLAVSNPDLISCLEQIKEPWNVKRHETVVKYSG

SEQ ID NO: 64021 - protein, 324 aa, Homo sapiens
MWQLWASLCCLLVLANARSRPSFHPLSDELVNYVNKRNTTWQAGHNFYNVDMSYLKRLCGTFLGGPKPPQRVMFTEDLKLPASFDAREQWPQCPTIKEIRDQGSCGSCWAFGAVEAISDRICIHTNAHVSVEVSAEDLLTCCGSMCGDGCNGGYPAEAWNFWTRKGLVSGGLYESHVGCRPYSIPPCEHHVNGSRPPCTGEGDTPKCSKICEPGYSPTYKQDKHYGYNSYSVSNSEKDIMAEIYKNGPVEGAFSVYSDFLLYKSGVYQHVTGEMMGGHAIRILGWGVENGTPYWLVANSWNTDWGDNENHVLELHVLATLGTSS

SEQ ID NO: 64022 - protein, 20 aa, Homo sapiens
MSTATTVAPAGIPATPGPVN

SEQ ID NO: 64023 - protein, 245 aa, Homo sapiens
MDAIHIGMSSTPLVKHTAGAGLKANRPRVMSKSGHSNVRIDKVDGIYLLYLQDLWTTVIDMKWRYKLTLFAATFVMTWFLFGVIYYAIAFIHGDLEPGEPISNHTPCIMKVDSLTGAFLFSLESQTTIGYGVRSITEECPHAIFLLVAQLVITTLIEIFITGTFLAKIARPKKRAETIKFSHCAVITKQNGKLCLVIQVANMRKSLLIQCQLSGKLLQTHVTKEGERILLNQATVKFHVDSSSES

SEQ ID NO: 64024 - protein, 1099 aa, Homo sapiens
MRTSLQAVALWGQKAPPHSITAIMITDDQRTIVTGSQEGQLCLWNLSHELKISAKELLFGHSASVTCLARARDFSKQPYIVSAAENGEMCVWNVTNGQCMEKATLPYRHTAICYYHCSFRMTGEGWLLCCGEYQDVLIIDAKTLAVVHSFRSSQFPDWINCMCIVHSMRIQDSLLVVSVAGELKVWDLSSSINSIQEKQDVYEKESKFLESLNCQTIRFCTYTERLLLVVFSKCWKVYDYCDFSLLLTEVSRNGQFFAGGEVIAAHRILIWTEDGHSYIYQLLNSGLSKSIYPADGRVLKETIYPHLLCSTSVQENKSRPFVMGYMNERKEPFYKVLFSGEVSGRITLWHIPDVPVSKFDGSPREIPVTATWTLQDNFDKHDTMSQSIIDYFSGLKDGAGTAVVTSSEYIPSLDKLICGCEDGTIIITQALNAAKARLLEGGSLVKDSPPHKVLKGHHQSVTSLLYPHGLSSKLDQSWMLSGDLDSCVILWDIFTEEILHKFFLEAGPVTSLLMSPEKFKLRGEQIICCVCGDHSVALLHLEGKSCLLHARKHLFPVRMIKWHPVENFLIVGCADDSVYIWEIETGTLERHETGERARIILNCCDDSQLVKSVLPIASETLKHKSIEQRSSSPYQLGPLPCPGLQVESSCKVTDAKFCPRPFNVLPVKTKWSNVGFHILLFDLENLVELLLPTPLSDVDSSSSFYGGEVLRRAKSTVEKKTLTLRKSKTACGPLSAEALAKPITESLAQGDNTIKFSEENDGIKRQKKMKISKKMQPKPSRKVDASLTIDTAKLFLSCLLPWGVDKDLDYLCIKHLNILKLQGPISLGISLNEDNFSLMLPGWDLCNSGMIKDYSGVNLFSRKVLDLSDKYTATLPNQVGIPRGLENNCDSLRESDTIVYLLSRLFLVNKLVNMPLELACRVGSSFRMESIHNKMRGAGNDILNMSSFYSCLRNGKNESHVPEADLSLLKLISCWRDQSVQVTEAIQAVLLAEVQQHMKSLGKIPVNSQPVSMAENGNCEMKQMLPKLEWTEELELQCVRNTLPLQTPVSPVKHDSNSNSANFQDVEDMPDRCALEESESPGEPRHHSWIAKVCPCKVS

SEQ ID NO: 64025 - protein, 68 aa, Homo sapiens
MVQPSLEMHNFEEELTCPICYSIFEDPRVLPCSHTFCRNCLENILQASGNFYIWRPLRIPLKCPNCRS

SEQ ID NO: 64026 - protein, 105 aa, Homo sapiens
MDPGSRWRNLPSGPSLKHLTDPSYGIPREQQKAALQELTRAHVESFNYAVHEGLGLAVQGSLPLMELPTDHTVSATLSCWTVSWLAGWIRILLQASQILFVILRC

SEQ ID NO: 64027 - protein, 194 aa, Homo sapiens
MAGSADSYTSRPSDSDVSLEEDREAIRQEREQQAAIQLERAKSKPVAFAVKTNVSYCGALDEDVPVPSTAISFDAKDFLHIKEKYNNDWWIGRLVKEGCEIGFIPSPLRLENIRIQQEQKRGRFHGGKSSGNSSSSLGEMVSGTFRATPTSTAKQKQKVTEHIPPYDVVPSMRPVVLVGPSLKGYEDFNNESDS

SEQ ID NO: 64028 - protein, 138 aa, Homo sapiens
PSDTIENVKAKIQDKEGIPPDQQRLIFAGKQLEDGRTLSDYNIQKESTLHLVLRLRGGIIEPSLRQLAQKYNCDKMICRKYVCSDAWGAVGAAGVGVCPHPPLLSLCRCYARLHPRAVNCRKKKCGHTNNLRPKKKVK

SEQ ID NO: 64029 - protein, 625 aa, Homo sapiens; identical to SEQ ID NO: 13632

SEQ ID NO: 64030 - protein, 110 aa, Homo sapiens
MAETLFWTPLLVVLLAGLGDTEAQQTTLHPLVGRVFVHTLDHETFLSLPEHVAVPPAVHITYHAHLQGHPDLPRWLRYTQRSPHHPGFLYGSATPEDRGLQVTAYNRDSF

SEQ ID NO: 64031 - protein, 91 aa, Homo sapiens
MNHIVQTFSPVNSGQPPNYEMLKEEQEVAMLGVPHNPAPPMSTVIHIRSETSVPDHVVWSLFNTLFMNTCCLGFIAFAYSVKVRTGRWLAT

SEQ ID NO: 64032 - protein, 120 aa, Homo sapiens
MWLGRRALCALVLLLACASLGLLYASTRDAPGLRLPLAPWAPPQSPRRPELPDLAPEPRYAHIPVRIKEQVVGLLAWNNCSCESSGGGLPLPFQKQVRAIDLTKAFDPAELRAASATREQ

SEQ ID NO: 64033 - protein, 121 aa, Homo sapiens
MGVIGIQLVVTMVMASVMQKIIPHYSLARWLLCNGSLRWYQHPTEEELRILAGKQQKGKTKKDRKYNGHIESKPLTIPKDIDLHLETKSVTEVDTLGGLLKNDVDVLDYTLVEVNQNTYAT

SEQ ID NO: 64034 - protein, 138 aa, Homo sapiens
MYAAGLGMLEPTKEPLKPLSAAEKIASIGQTATMSPDMNTCTSDQFQESLPPVQFDWSSSGLTNPLDGVDPELYELTTSKLEISTSSLKVTDAFARLMSTVEKTSTSTRKPKREEHLSEEAIKVIAGLPDLTFMHAKV

SEQ ID NO: 64035 - protein, 98 aa, Homo sapiens
  MOD_RES (1)..(1): Any amino acid
XVHIQSMLKRAPSYRTLELELLEWQERELFEYFVVVSLKKKPSRNTYLPEVSYQFPKLDRPTKQMREAEERLKAIPQFCFPDAKDWLPVSEYSPLTPP

SEQ ID NO: 64036 - protein, 300 aa, Homo sapiens
DANVQIASISEELAKKTEDAARQQEEITHLLSQIVDLQKKAKALRELEDKYAECMEMLHEAQEELKNLRNKTMPNTTSRRYHSLGLFPMDSLAAEIEGTMRKELQLEEAESPDITHQKRVFETVRNINQVVKQRSLTPSPMNIPGSNQSSAMNSLLSSCVSTPRSSFYGSDIGNVVLDNKTNSIILETEAADLGNDERSKKPGTPGTPGSHDLETALRRLSLRRENYLSERRFFEEEQERKLQELAEKGELRSGSLTPTESIMSLGTHSRFSEFTGFSGMSFSSRSYLPEKLQIVKPLEG

SEQ ID NO: 64037 - protein, 167 aa, Homo sapiens
MAPRRARKRAEGTASSNVFSMFDQSQIQEFKEAFTIMDQNRDGFIDKEDLRDTFAALGRINVKNEELEAMVKEAPGPINFTVFLTMFGEKLKGTDPEETILHAFKVFDTEGKGFVKADVIKEKLMTQADRFSEEEVKQMFAAFPPDVCGNLDYRNLCYVITHGEEKD

SEQ ID NO: 64038 - protein, 111 aa, Homo sapiens
MSSLPGCIGLDAATATVESEEIAELQQAVVEELGISMEELRHFIDEELEKMDCVQQRKKQLAELETWVIQKESEVAHVDQLFDDASRTSTPSWDYNTGTVALRTNLPGLQK

SEQ ID NO: 64039 - protein, 370 aa, Homo sapiens
MENLKKLLEIYEMLGEEEDIVNPSNELIKEGQILKLAARNTSAQERYLFLFNNMLLYCVPKFSLVGSKFTVRTRVGIDGMKIVETQNEEYPHTFQVSGKERTLELQASSAQDKEEWIKALQETIDAFHQRHETFRNAIAKDNDIHSEVSTAELGKRAPRWIRDNEVTMCMKCKEPFNALTRRRHHCRACGYVVCWKCSDYKAQLEYDGGKLSKVCKDCYQIISGFTDSEEKKRKGILEIESAEVSGNSVVCSFLQYMEKSKPWQKAWCVIPKQDPLVLYMYGAPQDVRAQATIPLLGYVVDEMPRSADLPHSFKLTQSKSVHSFAADSEELKQKWLKVILLAVTGETPGGPNEHPATLDDHPEPKKKSEC

SEQ ID NO: 64040 - protein, 279 aa, Homo sapiens
MGTRRKVLVLGSGYISEPVLEYLSRDGNIEITVGSDMKNQIEQLGKKYNINPVSMDICKQEEKLGFLVAKQDLVISLLPYVLHPLVAKACITNKVNMVTASYITPALKELEKSVEDAGITIIGELGLDPGLDHMLAMETIDKAKEVGATIESYISYCGGLPAPEHSNNPLRYKFSWSPVGVLMNVMQSATYLLDGKVVNVAGGISFLDAVTSMDFFPGLNLEGYPNRDSTKYAEIYGISSAHTLLRGTLRYKYSQEFQVLCDGRVVAVLPASQDQIQWE

SEQ ID NO: 64041 - protein, 37 aa, Homo sapiens
AEGGESALGPDGECFVEGVRGKNHWPIDESSQMSDLP

SEQ ID NO: 64042 - protein, 185 aa, Homo sapiens
MEVEPSPTSPAPLIQAEHSYSLCEEPRAQSPFTHITTSDSFNDDEVESEKWYLSTDFPSTSIKTEPVTDEPPPGLVPSVTLTITAISTPLEKEEPPLEMNTGVDSSCQTIIPKIKLEPHEVDQFLNFSPKEGLSALPVSLWVMDMVSGSTEREYGERAGMSLYHRCCSWLYEIALFLKNKNFASK

SEQ ID NO: 64043 - protein, 630 aa, Homo sapiens
MASAGHIITLLLWGYLLELWTGGHTADTTHPRLRLSHKELLNLNRTSIFHSPFGFLDLHTMLLDEYQERLFVGGRDLVYSLSLERISDGYKEIHWPSTALKMEECIMKGKDAGECANYVRVLHHYNRTHLLTCGTGAFDPVCAFIRVGYHLEDPLFHLESPRSERGRGRCPFDPSSSFISTLIGSELFAGLYSDYWSRDAAIFRSMGRLAHIRTEHDDERLLKEPKFVGSYMIPDNEDRDDNKVYFFFTEKALEAENNAHAIYTRVGRLCVNDVGGQRILVNKWSTFLKARLVCSVPGMNGIDTYFDELEDVFLLPTRDHKNPVIFGLFNTTSNIFRGHAICVYHMSSIRAAFNGPYAHKEGPEYHWSVYEGKVPYPRPGSCASKVNGGRYGTTKDYPDDAIRFARSHPLMYQAIKPAHKKPILVKTDGKYNLKQIAVDRVEAEDGQYDVLFIGTDNGIVLKVITIYNQEMESMEEVILEELQIFKDPVPIISMEISSKRQQLYIGSASAVAQVRFHHCDMYGSACADCCLARDPYCAWDGISCSRYYPTGTHAKRRFRRQDVRHGNAAQQCFGQQFVGDALDKTEEHLAYGIENNSTLLECTPRSLQAKVIWFVQKGRETRKEEVKAMS

SEQ ID NO: 64044 - protein, 126 aa, Homo sapiens
MVSKSRWKLLAMLALVLVVMVWYSISREDRYIELFYFPIPEKKEPCLQGEAESKASKLFGNYSRDQPIFLRLEDYFWVKTPSAYELPYGTKGSASGAAAVWSWGTGTGCGTAHWEMPSTSTMWSSD

SEQ ID NO: 64045 - protein, 80 aa, Homo sapiens
MKPLIWTWSDVEGQRPALLICTAAAGPTQGVKGYGKPFEPRSVKNIHSTPAYPDATMHRQLLAPVEGRMAETLNQKLHVA

SEQ ID NO: 64046 - protein, 317 aa, Homo sapiens
  MOD_RES (1)..(1): Any amino acid
XSPSMVGHQQPTPVYTQPVCFAPNMMYPVPVSPGVQPLYPIPMTPMPVNQAKTYRAVPNMPQQRQDQHHQSAMMHPASAAGPPIAATPPAYSTQYVAYSPQQFPNQPLVQHVPHYQSQHPHVYSPVIQGNARMMAPPTHAQPGLVSSSATQYGAHEQTHAMYACPKLPYNKETSPSFYFAIETGFRRVGQAGLELLTSGDPPASASQNAGITSVSHRARLHFSQFQIQGGKEFLIKFPRAPLLSSMRTLTLPCTHILHTLSLQLPPLDSSKANMVEVILHPVLFSTISTRPPRLSIWPVHSSSQPFTTRGLRQLHPP

SEQ ID NO: 64047 - protein, 202 aa, Homo sapiens
MKEDPDMASAVAAIRTLLEFLKRDKGETIQGLRANLTSAIETLCGVDSSVAVSSGGELFLRFISLASLEYSDYSKCKKIMIERGELFLRRISLSRNKIADLCHTFIKDGATILTHAYSRVVLRVLEAAVAAKKRFSVYVTESQPDLSGKKMAKALCHLNVPVTVVLDAAVGLEPTRWLCVPKHRTNLSMWLQKVSSLSGSFH

SEQ ID NO: 64048 - protein, 967 aa, Homo sapiens
MADWLRDYQDLLQVKTGLSLEVATYRALLEGESNPEIVIWAEHVENMPSEFRNKSYHYTDSLLQRENERNLFSRQKAPLASFNHSSALYSNLSGHRGSQTGTSIGGDARRGFLGSGYSSSATTQQENSYGKAVSSQTNVRTFSPTYGLLRNTEAQVKTFPDRPKAGDTREVPVYIGEDSTIARESYRDRRDKVAAGASESTRSNERTVILGKKTEVKATREQERNRPETIRTKPEEKMFDSKEKASEERNLRWEELTKLDKEARQRESQQMKEKAKEKDSPKEKSVREREVPISLEVSQDRRAEVSPKGLQTPVKDAGGGTGREAEARELRFRLGTSDATGSLQGDSMTETVAENIVTSILKQFTQSPETEASADSFPDTKVTYVDRKELPGERKTKTEIVVESKLTEDVDVSDEAGLDYLLSKDIKEVGLKGKSAEQMIGDIINLGLKGREGRAKVVNVEIVEEPVSYVSGEKPEEFSVPFKVEEVEDVSPGPWGLVKEEEGYGESDVTFSVNQHRRTKQPQENTTHVEEVTEAGDSEGEQSYFVSTPDEHPGGHDRDDGSVYGQIHIEEESTIRYSWQDEIVQGTRRRTQKDGAVGEKVVKPLDVPAPSLEGDLGSTHWKEQARSGEFHAEPTVIEKEIKIPHEFHTSMKGISSKEPRQQLVEVIGQLEETLPERMREELSALTREGQGGPGSVSVDVKKVQGAGGSSVTLVAEVNVSQTVDADRLDLEELSKDEASEMEKAVESVVRESLSRQRSPAPGSPDEEGGAEAPAAGIRFRRWATRELYIPSGESEVAGGASHSSGQRTPQGPVSATVEVSSPTGFAQSQVLEDVSQAARHIKLGPSEVWRTERMSYEGPTAEVVEMDVSNVEAIRSRTQEAGALGVSDRGSWRDADSRNDQAVGVSFKASAGEGDQAHREQGKEQAMFDKKVQLQRMVDQRSVISDEKKVALLYLDNEEEENDGHWF

SEQ ID NO: 64049 - protein, 185 aa, Homo sapiens
  MOD_RES (1)..(1): Any amino acid
XASPWVPAAAFLSVTIATWATHLPGLDSQGHPLHFGAGLIMTPLLTCCACLEYDPSKATFVKVVPTPNNGSTELVALHRNEGEDGLEVLSFEFQKIKYSYDALEKKQFLPVAFPVGNAFSYYQSNRGFQEDSEIRAAEKKFGSNKAEMVVPDFSELFKERATAPFFVFQVFCVGLWCLDEYWYYS

SEQ ID NO: 64050 - protein, 91 aa, Homo sapiens
MGRKEHESPSQPHMCGWEDSQKPSVPSHGPKTPSCKGVKAPHSSRPRAWKQDLEQSLAAAYVPVVVDSKGQNPDKLRVQSPLGLQGFSGDS

SEQ ID NO: 64051 - protein, 182 aa, Homo sapiens
MLYSPGPSLPESAESLDGSQEDKPRGSCAETRSCSVTQTGVPSHLIAASNCHSLELQGSEPTFTDTGMVAHINNSRLKAKGVGQHDNAQNFGNQSFEELRAACLRKGELFEDPLFPAEPSSLGFKDLGPNSKNVQNISWQRPKDIINNPLFIMDGISPTDICQGILGDCWLLAAIGSLTTCP

SEQ ID NO: 64052 - protein, 171 aa, Homo sapiens
MESRMWPALLLSHLLPLWPLLLLPLPPPAQGSSSSPRTPPAPARPPCARGGPSAPRHVCVWERAPPPSRSPRVPRSRRQVLPGTAPPATPSGFEEGPPSSQYPWAIVWGPTVSREDGGDPNSANPGFLDYGFAAPHGLATPHPNSDSMRGDGDGLILGEAPATLRPFLFGG

SEQ ID NO: 64053 - protein, 103 aa, Homo sapiens
  MOD_RES (1)..(1): Any amino acid
XTCEKVLDLMCYMVLPIQDGGKSQEEPSKVKPKFRKGSDLKLLPCTSKAIMPYCLHLMLACFKAPHCNSRHHQRREGGLSPGHGAPGLPLWRESDGGSAQVLH

SEQ ID NO: 64054 - protein, 737 aa, Homo sapiens
MTMLQESFSFDDLSVDFTQKEWQLLDPSQKNLYKDVMLENYSSLVSLGYEVMKPDVIFKLEQGEEPWVGDGEIPSSDSPVWKVDGNMMWHQDNQDKLKIIKRGHECDAFGKNFNLNMNFVPLRKSNSEGDLDGLILKHHLDLLIPKGDYGKAESDDFNVFDNFFLHSKPEDTDTWLKYYDCDKYKESYKKSQIIIYHRNRLGEKLYECSECRKRFSKKPSLIKHQSRHIRDIAFGCGNCGKTFPQKSQFITHHRTHTGEKPYNCSQCGKAFSQKSQLTSHQRTHTGEKPYECGECGKAFSRKSHLISHWRTHTGEKPYGCNECGRAFSEKSNLINHQRIHTGEKPFECRECGKAFSRKSQLVTHHRTHTGTKPFGCSDCRKAFFEKSELIRHQTIHTGEKPYECSECRKAFRERSSLINHQRTHTGEKPHGCIQCGKAFSQKSHLISHQMTHTGEKPFICSKCGKAFSRKSQLVRHQRTHTGEKPYECSECGKAFSEKLSLTNHQRIHTGEKPYVCSECGKAFCQKSHLISHQRTHTGEKPYECSECGKAFGEKSSLATHQRTHTGEKPYECRDCEKAFSQKSQLNTHQRIHTGEKPYECSLCRKAFFEKSELIRHLRTHTGEKPYECNECRKAFREKSSLINHQRIHTGEKPFECSECGKAFSRKSHLIPHQRTHTGEKPYGCSECRKAFSQKSQLVNHQRIHTGEKPYRCIECGKAFSQKSQLINHQRTHTVKKS

SEQ ID NO: 64055 - protein, 91 aa, Homo sapiens
  MOD_RES (1)..(1): Any amino acid
XADKLYKSMKGAGTDEKTLTRIMVSRSEIDLLNIRREFIEKYDKSLHQAIEGDTSGDFLKALLALCGGRARVLDQEFGCLGSNLHLPCTCF

SEQ ID NO: 64056 - protein, 53 aa, Homo sapiens
MPGPPRSLEMMESRSVGQAGVQRRNLSSLQALSPGFTPFSASRAAGTTGTVDI

SEQ ID NO: 64057 - protein, 351 aa, Homo sapiens
MPSKESWSGRKTNRAAVHKSKQEGRQQDLLIAALGMKLGSPKSSVTIWQPLKLFAYSQLTSLVRRATLKENEQIPKYEKIHNFKVHTFRGPHWCEYCANFMWGLIAQGVKCAVLEARKSKIKLAAGSVSDCGLNVHKQCSKMVPNDCKPDLKHVKKVYSCDLTTLVKAHTTKRPMVVDMCIREIESRGLNSEGLYRVSGFSDLIEDVKMAFDRDGEKADISVNMYEDINIITGALKLYFRDLPIPLITYDAYPKFIESAKIMDPDEQLETLHEALKLLPPAHCETLRYLMAHLKRVTLHEKENLMNAENLGIVFGPTLMRSPELDAMAALNDIRYQRLVVELLIKNEDILF

SEQ ID NO: 64058 - protein, 79 aa, Homo sapiens
  MOD_RES (1)..(1): Any amino acid
XSYAREFTTTVVSCCPAELQTEGSNGKKEVLSGFQVVLEDTVLFPEGGGQAGAQRRDLGLLQSPSARFKQFPCLSLPSS

SEQ ID NO: 64059 - protein, 305 aa, Homo sapiens
MASPGCLWLLAVALLPWTCASRALQHLDPPAPLPLVIWHGMDSCCNPLSMGAIKKMVEKKIPGIYVLSLEIGKTLMEDVENSFFLNVNSQVTTVCQALAKDPKLQQGYNAMGFSQGGQFLRAVAQRCPSPPMINLISVGGQHQGVFGLPRCPGESSHICDFIRKTLNAGAYSKVVQERLVQAEYWHDPIKEDVYRNHSIFLADINQERGINESYKKNLMALKKFVMVKFLNDSIVDPVDSEWFGFYRSGQAKETIPLQETSLYTQDRLGLKEMDNAGQLVFLATEGDHLQLSEEWFYAHIIPFLG

SEQ ID NO: 64060 - protein, 23 aa, Homo sapiens
MPALACLRRLCRHVSPQAVLFLL

SEQ ID NO: 64061 - protein, 47 aa, Homo sapiens
MVGTKVRKSRGNAARQVEWELSGAKRALQKRGCPWKGAGHGQWPGGC

SEQ ID NO: 64062 - protein, 249 aa, Homo sapiens
MGADGMYDKLRMLNGQTGSWGTRPGWYPGTSVPGQPTQDGCQQQEGGGENTNSISSNGEDSDEAQMRLQLKRKLQRNRTSFTQEQIEALEKEFERTHYPDVFARERLAAKIDLPEARIQVWFSNRRAKWRREEKLRNQRRQASNTPSHIPISSSFSTSVYQPIPQPTTPVSSFTSGSMLGRTDTALTNTYSALPPMPSFTMANNLPMQPPVPSQTSSYSCMLPTSPSVNGRSYDTYTPPHMQTHMNSQP

SEQ ID NO: 64063 - protein, 264 aa, Homo sapiens
  MOD_RES (1)..(1): Any amino acid
XNFWGALSPDEYYARSEDYVELVQRKRVGVWNVPYISQAYVIRGDTLRMELPQRDVFSGSDTDPDMAFCKSFRDKGIFLHLSNQHEFGRLLATSRYDTEHLHPDLWQIFDNPVDWKEQYIHENYSRALEGEGIVEQPCPDVYWFPLLSEQMCDELVAEMEHYGQWSGGRHEARAVMNFVVRYRPDEQPSLRPHHDSSTFTLNVALNHKGLDYEGGGCRFLRYDCVISSPRKGWALLHPGRLTHYHEGLPTTWGTRYIMVSFVDP

SEQ ID NO: 64064 - protein, 141 aa, Homo sapiens
MALTVVPSFSVSGVWKRTQFPVSTESQKPRQKKEFPILEKQNWLIHLHYIRKDYEACKAVIKEQLQETQGLCEYAIYVQALIFRLEGNIQESLELFQTCAVLSPQSADNLKQVARSLFLLGKHKAAIEVYNEAAKLNQKDW

SEQ ID NO: 64065 - protein, 91 aa, Homo sapiens
MQKSEGSGGTQLKNRATGNYDQRTSSSTQLKHRNAVQGSKSSLSTSSPESARKLHPRPSDKLNPKTINPFGEQSRVPSAFAAIYSKGGIPC

SEQ ID NO: 64066 - protein, 230 aa, Homo sapiens
NNPIPSNLKSEAKKAAKILREFTEITSRNGPDKIIPAHVIAKAKGLAILSVIKAGFLVTARGGSGIVVARLPDGKWSAPSAIGIAGLGGGFEIGIEVSDLVIILNYDRAVEAFAKGGNLTLGGNLTVAVGPLGRFYCQDIRAYDILFGDTPRPAQAEDLYEILDSFTEKYENEGQRINARKAAREQRKSSAKELPPKPLSRPQQSSAPVQLNSGSQSKYFCCNSNTVVIK

SEQ ID NO: 64067 - protein, 153 aa, Homo sapiens
MGPEALSSLLLLLLVASGDADMKGHFDPAKCRYALGMQDRTIPDSDISASSSWSDSTAARHSRLESSDGDGAWCPAGSVFPKEEEYLQVDLQRLHLVALVGTQGRHAGGLGKEFSRSYRLRYSRDGRRWMGWKDRWGQEVISGNEDPEGVVLK

SEQ ID NO: 64068 - protein, 257 aa, Homo sapiens
  MOD_RES (1)..(1): Any amino acid
XNLADWLGSLDPRFRQYTYGLVSCGLDRSLLHRVSEQQLLEDCGIHLGVHRARILTAARVSDAEGPPSPCCLLPTSEMLHSPLPCTGGKPSGDTPDVFISYRRNSGSQLASLLKVHLQLHGFSVFIDVEKLEAGKFEDKLIQSVMGARNFVLVLSPGALDKCMQDHDCKDWVHKEIVTALSCGKNIVPIIDGFEWPEPQVLPEDMQAVLTFNGIKWSHEYQEATIEKIIRFLQGRSSRDSSAGSDTSLEGAAPMGPT

SEQ ID NO: 64069 - protein, 95 aa, Homo sapiens
MTPQSLLQTTLFLLSLLFLVQAHPASRSFPDPRGLYHFCLYWNRHAGRLHLLYGKRDFLLSDKASSLLCFQHQEESLAQGPPLLATSVTSWWSPQ

SEQ ID NO: 64070 - protein, 1328 aa, Homo sapiens
  MOD_RES (1)..(1): Any amino acid
XREENVATFRGSEYLCYDLSQNPIQSSSDEITLSFKTWQRNGLILHTGKSADYVNLALKDGAVSLVINLGSGAFEAIVEPVNGKFNDNAWHDVKVTRNLRQVTISVDGILTTTGYTQEDYTMLGSDDFFYVGGSPSTADLPGSPVSNNFMGCLKEVVYKNNDIRLELSRLARIADTKMKIYGEVVFKCENVATLDPINFETPEAYISLPKWNTKRMGSISFDFRTTEPNGLILFTHGKPQERKDARSQKNTKVDFFAVELLDGNLYLLLDMGSGTIKVKATQKKANDGEWYHVDIQRDGRSGTISVNSRRTPFTASGESEILDLEGDMYLGGLPENRAGLILPTELWTAMLNYGYVGCIRDLFIDGRSKNIRQLAEMQNAAGVKSSCSRMSAKQCDSYPCKNNAVCKDGWNRFICDCTGTGYWGRTCEREASILSYDGSMYMKIIMPMVMHTEAEDVSFRFMSQRAYGLLVATTSRDSADTLRLELDGGRVKLMVNLDCIRINCNSSKGPETLYAGQKLNDNEWHTVRVVRRGKSLKLTVDDDVAEGTMVGDHTRLEFHNIETGIMTEKRYISVVPSSFIGHLQSLMFNGLLYIDLCKNGDIDYCELKARFGLRNIIADPVTFKTKSSYLSLATLQAYTSMHLFFQFKTTSPDGFILFNSGDGNDFIAVELVKGYIHYVFDLGNGPNVIKGNSDRPLNDNQWHNVVITRDNSNTHSLKVDTKVVTQVINGAKNLDLKGDLYMAGLAQGMYSNLPKLVASRDGFQGCLASVDLNGRLPDLINDALHRSGQIERGCEVALTKADLQGPSTTCQEDSCANQGVCMQQWEGFTCDCSMTSYSGNQCNDPGATYIFGKSGGLILYTWPANDRPSTRSDRLAVGFSTTVKDGILVRIDSAPGLGDFLQLHIEQGKIGVVFNIGTVDISIKEERTPVNDGKYHVVRFTRNGGNATLQVDNWPVNEHYPTGNTDNERFQMVKQKIPFKYNRPVEEWLQEKGRQLTIFNTQAQIAIGGKDKGRLFQGQLSGLYYDGLKVLNMAAENNPNIKINGSVRLVGEVPSILGTTQTTSMPPEMSTTVMETTTTMATTTTRKNRSTASIQPTSDDLVSSAECSSDDEDFVECEPSTDKSLSTSIFEGGYKAHAPKWESKDFRPNKVSETSRTTTTSLSPELIRFTASSSSGMVPKLPAGKMNNRDLKPQPDIVLLPLPTAYELDSTKLKSPLITSPMFRNVPTANPTEPGIRRVPGASEVIRESSSTTGMVVGIVAAAALCILILLYAMYKYRNRDEGSYQVDETRNYISNSAQSNGTLMKEKQQSSKSGHKKQKNKDREYYV

SEQ ID NO: 64071 - protein, 144 aa, Homo sapiens
MPSSLPGSQVPHPTLDAVDLVEKTLRNEGTSSSAPVLEEGDTDPWTLPQLKDTSQPWKELRVAGRLRRVAGSVLKACGLLGSLYFFICSLDVLSSAFQLLGSKVAGDIFKDNVVLSNPVAGLVIGVLVTALVQSSSTSSSIVVS

SEQ ID NO: 64072 - protein, 587 aa, Homo sapiens
MSLAAYCVICCRRIGTSTSPPKSGTHWRDIRNIIKFTGSLILGGSLFLTYEVLALKKAVTLDTQVVEREKMKSYIYVHTVSLDKGENHGIAWQARKELHKAVRKVLATSAKILRNPFADPFSTVDIEDHECAVWLLLRKSKSDDKTTRLEAVREMSETHHWHDYQYRIIAQACDPKTLIGLARSEESDLRFFLLPPPLPSLKEDSSTEEELRQLLASLPQTELDECIQYFTSLALSESSQSLAAQKGGLWCFGGNGLPYAESFGEVPSATVEMFCLEAIVKHSEISTHCDKIEANGGLQLLQRLYRLHKDCPKVQRNIMRVIGNMALNEHLHSSIVRSGWVSIMAEAMKSPHIMESSHAARILANLDRETVQEKYQDGVYVLHPQYRTSQPIKADVLFIHGLMGAAFKTWRQQDSEQAVIEKPMEDEDRYTTCWPKTWLAKDCPALRIISVEYDTSLSDWRARCPMERKSIAFRSNELLRKLRAAGVGDRPVVWISHSMGGLLVKKMLLEASTKPEMSTVINNTRGIIFYSVPHHGSRLAEYSVNIRYLLFPSLEVKELSKGNTFCHKGNWGYINISYTEKKKKFLP

SEQ ID NO: 64073 - protein, 188 aa, Homo sapiens
MKEESAAQLGCCHRPMALGGTGGSLSPSLDFQLFRGDQVFSACRPLPDMVDAHGPSCASWLCPLPLAPGRSALLACLQDLDLNLCTPQPAPLGTDLQGLQEDALSMKHEPPGLQASSTDDKKFTVKYPQNKDKLGKQPERAGEGAPCPAFSSHNSSSPPPLQNRKSPSPLAFCPCPPVNSISKELPFL

SEQ ID NO: 64074 - protein, 347 aa, Homo sapiens
MDRSKENCISGPVKATAPVGGPKRVLVTQQFPCQNPLPVNSGQAQRVLCPSNSSQRIPLQAQKLVSSHKPVQNQKQKQLQATSVPHPVSRPLNNTQKSKQPLPSAPENNPEEELASKQKNEESKKRQWALEDFEIGRPLGKGKFGNVYLAREKQSKFILALKVLFKAQLEKAGVEHQLRREVEIQSHLRHPNILRLYGYFHDATRVYLILEYAPLGTVYRELQKLSKFDEQRTATYITELANALSYCHSKRVIHRDIKPENLLLGSAGELKIADFGWSVHAPSSRRTTLCGTLDYLPPEMIEGRMHDEKVDLWSLGVLCYEFLVGKPPFEANTYQETYKRISRVRRN

SEQ ID NO: 64075 - protein, 146 aa, Homo sapiens
MLVLLAGIFVVHIATVIMLFVSTIANVWLVSNTVDASVGLWKNCTNISCSDSLSYASEDALKTVQAFMILSIIFCVIALLVFVFQLFTMEKGNRFFLSGATTLVCCEYLMGRLQFTLLSPSYHGCFWQLEQISTWFSETSLCNFLL

SEQ ID NO: 64076 - protein, 538 aa, Homo sapiens
MADYLISGGTSYVPDDGLTAQQLFNCGDGLTYNDFLILPGYIDFTADQVDLTSALTKKITLKTPLVSSPMDTVTEAGMAIAMALTGGIGFIHHNCTPEFQANEVRKVKKYEQGFITDPVVLSPKDRVRDVFEAKARHGFCGIPITDTGRMGSRLVGIISSRDIDFLKEEEHDCFLEEIMTKREDLVVAPAGITLKEANEILQRSKKGKLPIVNEDDELVAIIARTDLKKNRDYPLASKDAKKQLLCGAAIGTHEDDKYRLDLLAQAGVDVVVLDSSQGNSIFQINMIKYIKDKYPNLQVIGGNVVTAAQAKNLIDAGVDALRVGMGSGSICITQEVAPKIPPDIKSHSPKCPSTVTGCYMLACGRPQATAVYKVSEYARRFGVPVIADGGIQNVGHIAKALALGASTVMMGSLLAATTEAPGEYFFSDGIRLKKYRGMGSLDAMDKHLSSQNRYFSEADKIKVAQGVSGAVQDKGSIHKFVPYLIAGIQHSCQDIGAKSLTQVRAMMYSGELKFEKRTSSAQVEGGVHSLHSYEKRLF

SEQ ID NO: 64077 - protein, 506 aa, Homo sapiens
MRTAGPTPAVSWRKRSRKRPRCPFVSYKQPAAPPSEGTRRGGAARPEEAAEEGPPAAPGSLRHSGPLGPHACPTALPEPQVTSAMSSQVVGIEPLYIKAEPASPDSPKGSSETETEPPVALAPGPAPTRCLPGHKEEEDGEGAGPGEQGGGKLVLSSLPKRLCLVCGDVASGYHYGVASCEACKAFFKRTIQGSIEYSCPASNECEITKRRRKACQACRFTKCLRVGMLKEGVRLDRVRGGRQKYKRRPEVDPLPFPGPFPAGPLAVAGGPRKTAPVNALVSHLLVVEPEKLYAMPDPAGPDGHLPAVATLCDLFDREIVVTISWAKSIPGFSSLSLSDQMSVLQSVWMEVLVLGVAQRSLPLQDELAFAEDLVLDEEGARAAGLGELGAALLQLVRRLQALRLEREEYVLLKALALANSDSVHIEDAEAVEQLREALHEALLEYEAGRAGPGGGAERRRAGRLLLTLPLLRQTAGKVLAHFYGVKLEGKVPMHKLFLEMLEAMMD

SEQ ID NO: 64078 - protein, 961 aa, Homo sapiens
MATRGGAGVAMAVWSLLSARAVTAFLLLFLPRFLQAQTFSFPFQQPEKCDNNQYFDISALSCVPCGANQRQDARGTSCVCLPGFQMISNNGGPAIICKKCPENMKGVTEDGWNCISCPSDLTAEGKCHCPIGHILVERDINGTLLSQATCELCDGNENSFMVVNALGDRCVRCEPTFVNTSRSCACSEPNILTGGLCFSSTGNFPLRRISAARYGEVGMSLTSEWFAKYLQSSAAACWVYANLTSCQALGNMCVMNMNSYDFATFDACGLFQFIFENTAGLSTVHSISFWRQNLPWLFYGDQLGLAPQVLSSTSLPTNFSFKGENQNTKLKFVAASYDIRGNFLKWQTLEGGVLQLCPDTETRLNAAYSFGTTYQQNCEIPISKILIDFPTPIFYDVYLEYTDENQHQYILAVPVLNLNLQHNKIFVNQDSNSGKWLLTRRIFLVDAVSGRENDLGTQPRVIRVATQISLSVHLVPNTINGNIYPPLITIAYSDIDIKDANSQSVKVSFSVTYEMDHGEAHVQTDIALGVLGGLAVLASLLKTAGWKRRIGSPMIDLQTVVKFLVYYAGDLANVFFIITVGTGLYWLIFFKAQKSVSVLLPMPIQEERFVTYVGCAFALKALQFLHKLISQITIDVFFIDWERPKGKVLKAVEGEGGVRSATVPVSIWRTYFVANEWNEIQTVRKINSLFQVLTVLFFLEVVGFKNLALMDSSSSLSRNPPSYIAPYSCILRYAVSAALWLAIGIIQVVFFAVFYERFIEDKIRQFVDLCSMSNISVFLLSHKCFGYYIHGRSVHGHADTNMEEMNMNLKREAENLCSQRGLVPNTDGQTFEIAISNQMRQHYDRIHETLIRKNGPARLLSSSASTFEQSIKAYHMMNKFLGSFIDHVHKEMDYFIKDKLLLERILGMEFMEPMEKSIFYNEMHDQNDLETTASERRDRTTALQPGGQSKTPSQKKRRNHC

SEQ ID NO: 64079 - protein, 583 aa, Homo sapiens
MLKKHIRTHTDVRPYHCTYCNFSFKTKDEKQRFSYERSGYDLEESDGPDEDDNENEDDDEDSQAESVLSATPSVTASPQHLPSRSSLQDPVSTDEDVRITDCFSGVHTDPMDVLPRALLTRMTVLSTAQSDYNRKTLSPGKARQRAARDENDTIPSVDTSRSPCHQMSVDYPESEEILRSSMAGKAVAITQSPSSVRLPPAAAEHSPQTAAGMPSVASPHPDPQEQKQQITLQPTPGLPSPHTHLFSHLPLHSQQQSRTPYNMVPVGGIHVVPAGLTYSTFVPLQAGPVQLTIPAVSVVHRTLGTHRNTVTEVSGTTNPAGVAELSSVVPCIPIGQIRVPGLQNLSTPGLQSLPSLSMETVNIVGLANTNMAPQVHPPGLALNAVGLQVLTANPSSQSSPAPQAHIPGLQILNIALPTLIPSVSQVAVDAQGAPEMPASQSKACETQPKQTSVASANQVSRTESPQGLPTVQRENAKKVLNPPAPAGDHARLDGLSKMDTEKAASANHVKPKPELTSIQGQPASTSQPLLKAHSEVFTKPSGQQTLSPDRQVPRPTALPRRQPTVHFSDVSSDDDEDRLVIAT

SEQ ID NO: 64080 - protein, 221 aa, Homo sapiens
MSLYDDLGVETSDSKTEGWSKNFKLLQSQLQVKKAALTQAKSQRTKQSTVLAPVIDLKRGGSSDDRQIVDTPPHVAAGLKDPVPSGFSAGEVLIPLADEYDPMFPNDYEKVVKRQREERQRQRELERQKEIEEREKRKDRHEASGFARRPDPDSDEDEDYERERRKRSMGGAAIAPPTSLVEKDKELPRDFPYEEDSRPRSQSSKAAIPPPVYEEQDRPRS

SEQ ID NO: 64081 - protein, 103 aa, Homo sapiens
MRNIMYFGGTCQSPALPALVRPPAPPLQPSLDIKPFLPFPLDTAAAVNLFPNFNAMDPIQKAVINHTFGVPLPHRRKQIISCNICQLRFNSDMAQAKELDWPH

SEQ ID NO: 64082 - protein, 361 aa, Homo sapiens
MGCTDTPGYNHPPCPACPQGDGPSRNLQRDCYTDVALPLYENLNIVEQPVNLSSLAQKYAEKATQFIQRASTSGRPFLLYVALAHMHVPLPVTQLPAAPRGRSLYGAGLWEMDSLVGQIKDKVDHTVKENTFLWFTGDNGPWAQKCELAGSVGPFTGFWQTRQGGSPAKQTTWEGGHRVPALAYWPGRVPVNVTSTALLSVLDIFPTVVALAQASLPQGRRFDGVDVSEVLFGRSQPGHRVLFHPNSGAAGEFGALQTVRLERYKAFYITGGARACDGSTGPELQHKFPLIFNLEDDTAEAVPLERGGAEYQAVLPEVRKVLADVLQDIANDNISSADYTQDPSVTPCCNPYQIACRCQAA

SEQ ID NO: 64083 - protein, 195 aa, Homo sapiens
MDLPDSASRVFCGRILSMVNTDDVNAIILAQKNMLDRFEKTNEMLLNFNNLSSARLQQMSERFLHHTRTLVEMKRDLDSIFRRIRLHCALKCLGQFQPWDKILTTLKGKLARQHPEAFSHIPEASFLEEEDEDPIPPSTTTTIATSEQSTGSCDTSPDTVSPSLSPGFEDLSHVQPGSPAINGRSQTDDEEMTGE

SEQ ID NO: 64084 - protein, 86 aa, Homo sapiens
MAELQEVQITEEKPLLPGQTPEAAKEAELAARILLDQGQTHSVETPYGSVTFTVYGTPKPKRPAILTYHDVGLNYKSCFQPLFQFE

SEQ ID NO: 64085 - protein, 79 aa, Homo sapiens
MGLLAFLKTQFVLHLLVGFVFVVSGLVINFVQLCTLALWPVSKQLYRRLNCRLAYSLWSQLVMLLEWWSCTECTLFTDQ

SEQ ID NO: 64086 - protein, 929 aa, Homo sapiens
MRLLLLVPLLLAPAPGSSAPKVRRQSDTWGPWSQWSPCSRTCGGGVSFRERPCYSQRRDGGSSCVGPARSHRSCRTESCPDGARDFRAEQCAEFDGAEFQGRRYRWLPYYSAPNKCELNCIPKGENFYYKHREAVVDGTPCEPGKRDVCVDGSCRVVGCDHELDSSKQEDKCLRCGGDGTTCYPVAGTFDANDLSRAVKNVRGEYYLNGHWTIEAARALPAASTILHYERGAEGDLAPERLHARGPTSEPLVIELISQEPNPGVHYEYHLPLRRPSPGFSWSHGSWSDCSAECGGGHQSRLVFCTIDHEAYPDHMCQRQPRPADRRSCNLHPCPETKRWKAGPWAPCSASCGGGSQSRSVYCISSDGAGIQEAVEEAECAGLPGKPPAIQACNLQRCAAWSPEPWGECSVSCGVGVRKRSVTCRGERGSLLHTAACSLEDRPPLTEPCVHEDCPLLSDQAWHVGTWGLCSKSCSSGTRRRQVICAIGPPSHCGSLQHSKPVDVEPCNTQPCHLPQEVPSMQDVHTPASNPWMPLGPQESPASDSRGQWWAAQEHPSARGDHRGERGDPRGDQGTHLSALGPAPSLQQPPYQQPLRSGSGPHDCRHSPHGCCPDGHTASLGPQWQGCPGAPCQQSRYGCCPDRVSVAEGPHHAGCTKSYGGDSTGGMPRSRAVASTVHNTHQPQAQQNEPSECRGSQFGCCYDNVATAAGPLGEGCVGQPSHAYPVRCLLPSAHGSCADWAARWYFVASVGQCNRFWYGGCHGNANNFASEQECMSSCQGSLHGPRRPQPGASGRSTHTDGGGSSPAGEQEPSQHRTGAAVQRKPWPSGGLWRQDQQPGPGEAPHTQAFGEWPWGQELGSRAPGLGGDAGSPAPPFHSSSYRISLAGVEPSLVQAALGQLVRLSCSDDTAPESQAAWQKDGQPISSDRFT

SEQ ID NO: 64087 - protein, 288 aa, Homo sapiens
MAALYACTKCHQRFPFEALSQGQQLCKECRIAHPVVKCTYCRTEYQQESKTNTICKKCAQNVQLYGTPKPCQYCNIIAAFIGNKCQRCTNSEKKYGPPYSCEQCKQQCAFDRKDDRKKVDGKLLCWLCTLSYKRVLQKTKEQRKHLSSSSRAGHQEKEQYSRLSGGGHYNSQKTLSTSSIQNEIPKKKSKFESITTNGDSFSPDLALDSPGTDHFVIIAQLKEEVATLKKMLHQKDQMILEKEKKITELKADFQYQESQMRAKMNQMEKTHKEVTEQLQVTDSAYFMC

SEQ ID NO: 64088 - protein, 28 aa, Homo sapiens
MNYVGQLAGQVFVTVKELYKGLNPATLS

SEQ ID NO: 64089 - protein, 2735 aa, Homo sapiens
MPPNINWKEIMKVDPDDLPRQEELADNLLISLSKVEVNELKSEKQENVIHLFRITQSLMKMKAQEVELALEEVEKAGEEQAKFENQLKTKVMKLENELEMAQQSAGGRDTRFLRNEICQLEKQLEQKDRELEDMEKELEKEKKVNEQLALRNEEAENENSKLRRENKRLKKKNEQLCQDIIDYQKQIDSQKETLLSRRGEDSDYRSQLSKKNYELIQYLDEIQTLTEANEKIEVQNQEMRKNLEESVQEMEKMTDEYNRMKAIVHQTDNVIDQLKKENDHYQLQVQELTDLLKSKNEEDDPIMVAVNAKVEEWKLILSSKDDEIIEYQQMLHNLREKLKNAQLDADKSNVMALQQGIQERDSQIKMLTEQVEQYTKEMEKNTCIIEDLKNELQRNKGASTLSQQTHMKIQSTLDILKEKTKEAERTAELAEADAREKDKELVEALKRLKDYESGVYGLEDAVVEIKNCKNQIKIRDREIEILTKEINKLELKISDFLDENEALRERVGLEPKTMIDLTEFRNSKHLKQQQYRAENQILLKEIESLEEERLDLKKKIRQMAQERGKRSATSGLTTEDLNLTENISQGDRISERKLDLLSLKNMSEAQSKIRSSDKAELLHRRSSFNTPQSDQNETEENMTIGSLSRMLSEIHHSVESGMHPFVPLTRLSSSMQVKENSTPETITIREIFKAPCLQSSRNLESLVSTFSRESHEEINDICLFSDDCMKKVSRSHQALEKTSFVQKSNSSFHGLSTASDIMQKLSLRQKSAIFCQQIHENRADMDKSQVATLEEEQVHSQVKYADINLKEDIIKSEVPLQTEILKNKLKVNLPDPVSITAQSKLSQINSLENLIEQLRRELVFLRSQNEFLSRELIEKERDLERSRTVIAKFQNKLKELVEENKQLEEGMKEILQAIKEMQKDPDVKGGETSLIIPSLERLVNAIESKNAEGIFDASLHLKAQVDQLTGRNEELRQELRESRKEAINYSQQLAKANLKIDHLEKETSLLRQSEGSNVVFKGIDLPDGIAPSSASIINSQNEYLIHLLQELENKEKKLKNLEDSLEDYNRKFAVIRHQQSLLYKEYLSEKETWKTESKTIKEEKRKLEDQVQQDAIKVKEYNNLLNALQMDSDEMKKILAENSRKITVLQVNEKSLIRQYTTLVELERQLRKENEKQKNELLSMEAEVCEKIGCLQRFKEMAIFKIAALQKVVDNSVSLSELELANKQYNELTAKYRDILQKDNMLVQRTSNLEHLECENISLKEQVESINKELEITKEKLHTIEQAWEQETKLGNESSMDKAKKSITNSDIVSISKKITMLEMKELNERQRAEHCQKMYEHLRTSLKQMEERNFELETKFAELTKINLDAQKVEQMLRDELADSVSKAVSDADRQRILELEKNEMELKVEVSKLREISDIARRQVEILNAQQQSRDKEVESLRMQLLDYQAQSDEKSLIAKLHQHNVSLQLSEATALGKLESITSKLQKMEAYNLRLEQKLDEKEQALYYARLEGRNRAKHLRQTIQSLRRQFSGALPLAQQEKFSKTMIQLQNDKLKIMQEMKNSQQEHRNMENKTLEMELKLKGLEELISTLKDTKGAQKVINWHMKIEELRLQELKLNRELVKDKEEIKYLNNIISEYERTISSLEEEIVQQNKFHEERQMAWDQREVDLERQLDIFDRQQNEILNAAQKFEEATGSIPDPSLPLPNQLEIALRKIKENIRIILETRATCKSLEEKLKEKESALRLAEQNILSRDKVINELRLRLPATAEREKLIAELGRKEMEPKSHHTLKIAHQTIANMQARLNQKEEVLKKYQRLLEKAREEQREIVKKHEEDLHILHHRLELQADSSLNKFKQTAWDLMKQSPTPVPTNKHFIRLAEMEQTVAEQDDSLSSLLVKLKKVSQDLERQREITELKVKEFENIKLQLQENHEDEVKKVKAEVEDLKYLLDQSQKESQCLKSELQAQKEANSRAPTTTMRNLVERLKSQLALKEKQQKALSRALLELRAEMTAAAEERIISATSQKEAHLNVQQIVDRHTRELKTQVEDLNENLLKLKEALKTSKNRENSLTDNLNDLNNELQKKQKAYNKILREKEEIDQENDELKRQIKRLTSGLQGKPLTDNKQSLIEELQRKVKKLENQLEGKVEEVDLKPMKEKNAKEELIRWEEGKKWQAKIEGIRNKLKEKEGEVFTLTKQLNTLKDLFAKADKEKLTLQRKLKTTGMTVDQVLGIRALESEKELEELKKRNLDLENDILYMRAHQALPRDSVVEDLHLQNRYLQEKLHALEKQFSKDTYSKPSISGIESDDHCQREQELQKENLKLSSENIELKFQLEQANKDLPRLKNQVRDLKEMCEFLKKEKAEVQRKLGHVRGSGRSGKTIPELEKTIGLMKKVVEKVQRENEQLKKASGILTSEKMANIEQENEKLKAELEKLKAHLGHQLSMHYESKTKGTEKIIAENERLRKELKKETDAAEKLRIAKNNLEILNEKMTVQLEETGKRLQFAESRGPQLEGADSKSWKSIVVTRMYETKLKELETDIAKKNQSITDLKQLVKEATEREQKVNKYNEDLEQQIKILKHVPEGAETEQGLKRELQVLRLANHQLDKEKAELIHQIEANKDQSGAESTIPDADQLKEKIKDLETQLKMSDLEKQHLKEEIKKLKKELENFDPSFFEEIEDLKYNYKEEVKKNILLEEKVKKLSEQLGVELTSPVAASEEFEDEEESPVNFPIY

SEQ ID NO: 64090 - protein, 775 aa, Homo sapiens
MNYMLATRLFQDRGNPRRSLLTGRTRMTADGAPELKIESLNSKAKLHAALYERKLLSLEVRKRRRRSSRLRAMRPKYPVITQPAEMNVKTETESEEEEEVALDNEDEEQEASQEESAGFLRENQAKYTPSLTALVENTPKENSMKVREWNNKGGHCCKLETQELEPKFNLMQILQDNGNLSKMQARIAFSAYLQHVQIRLMKDSGGQTFSASWAAKEDEQMELVVRFLKRASNNLQHSLRMVLPSRRLALLERRRILAHQLGDFIIVYNKETEQMAEKKSKKKVEEEEEDGVNMENFQEFIRQASEAELEEVLTFYTQKNKSASVFLGTHSKISKNNNNYSDSGAKGDHPETIMEEVKIKPPKQQQTTEIHSDKLSRFTTSAEKEAKLVYSNSSSGPTATLQKIPNTHLSSVTTSDLSPGPCHHSSLSQIPSAIPSMPHQPTILLNTVSASASPCLHPGAQNIPSPTGLPRCRSGSHTIGPFSSFQSAAHIYSQKLSRPSSAKAGSCYLNKHHSGIAKTQKEGEDASLYSKRYNQSMVTAELQRLAEKQAARQYSPSSHINLLTQQVTNLNLATGIINRSSASAPPTLRPIISPSGPTWSTQSDPQAPENHSSSPGSRSLQTGGFAWEGEVENNVYSQATGVVPQHKYHPTAGSYQLQFALQQLEQQKLQSRQLLDQSRARHQAIFGSQTLPNSNLWTMNNGAGCRISSATASGQKPTTLPQKVVPPPSSCASLVPKPPPNHEQVLRRATSQKASNTRFRSSFQNYLWYFFQAVS

SEQ ID NO: 64091 - protein, 180 aa, Homo sapiens
MVLREGSCAGRQNASACWPHGTTGCPWLTRAVSPAVPVYNGIIFLFVLANFSMATFMDPGVFPRADEDEDKEDDFRAPLYKNVDVRGIQVRMKWCATCHFYRPPRCSHCSVCDNCVEDFDHHCPWVNNCIGRRNYRYFFLFLLSLSAHMVGVVAFGLVYVLNHAEGLGAAHTTITYPWFL

SEQ ID NO: 64092 - protein, 161 aa, Homo sapiens
  MOD_RES (1)..(1): Any amino acid
XCNYFESQNVDFRGKKVIELGAGTGIVGILAALQGWVSSASVAPAKAHILCWAPSVCLGLQQGAPHEAAAENRLLLCKLQESSGDLWRGPQTDGVLLCGPGRRAMSCVVFACTVMRLLIGRYILRNGVVRRFWLMHIIEYLHKPRWYIVLQPGLYGIASCS

SEQ ID NO: 64093 - protein, 346 aa, Homo sapiens
GDGQNLFTKDVTVIEGEVATISCQVNKSDDSVIQLLNPNRQTIYFRDFRPLKDSRFQLLNFSSSELKVSLTNVSISDEGRYFCQLYTDPPQESYTTITVLVPPRNLMIDIQKDTAVEGEEIEVNCTAMASKPATTIRWFKGNTELKGKSEVEEWSDMYTVTSQLMLKVHKEDDGVPVICQVEHPAVTGNLQTQRYLEVQYKPQVHIQMTYPLQGLTREGDALELTCEAIGKPQPVMVTWVRVDDEMPQHAVLSGPNLFINNLNKTDNGTYRCEASNIVGKAHSDYMLYVYDSRAGEEGSIRAVDHAVIGGVVAVVVFAMLCLLIILGRYFARHKGLFSLTSSPRIK

SEQ ID NO: 64094 - protein, 271 aa, Homo sapiens
  MOD_RES (1)..(1): Any amino acid
XGEENGAHTIANNHTDMMEVDGDVEIPPNKAVVLRGHESEVFICAWNPVSDLLASGSGDSTARIWNLSENSTSGSTQLVLRHCIREGGQDVPSNKDVTSLDWNSEGTLLATGSYDGFARIWTKDGNLASTLGQHKGPIFALKWNKKGNFILSAGVDKTTIIWDAHTGEAKQQFPFHSALDVDWQSNNTFASCSTDMCIHVCKLGQDRPIKTFQGHTNEVNAIKWDPTGNLLASCSDDMTLKLGLSRETEPIRRWMDGWMDGWMDERFTVRN

SEQ ID NO: 64095 - protein, 34 aa, Homo sapiens
  MOD_RES (1)..(1): Any amino acid
XSGFFMEMMSMKPAKGLLRLPWSPSMCSHLRTRP

SEQ ID NO: 64096 - protein, 609 aa, Homo sapiens
MDFLLALVLVSSLYLQAAAEFDGRWPRQIVSSIGLCRYGGRIDCCWGWARQSWGQCQPFYVLRQRIARIRCQLKAVCQPRCKHGECIGPNKCKCHPGYAGKTCNQDEHIPAPLDQGSEQPLFQPLDHQATSLPSRDLNECGLKPRPCKHRCMNTYGSYKCYCLNGYMLMPDGSCSSALTCSMANCQYGCDVVKGQIRCQCPSPGLQLAPDGRTCVDVDECATGRASCPRFRQCVNTFGSYICKCHKGFDLMYIGGKYQCHDIDECSLGQYQCSSFARCYNIRGSYKCKCKEGYQGDGLTCVYIPKVMIEPSGPIHVPKGNGTILKGDTGNNNWIPDVGSTWWPPKTPYIPPIITNRPTSKPTTRPTPKPTPIPTPPPPPPLPTELRTPLPPTTPERPTTGLTTIAPAASTPPGGITVDNRVQTDPQKPRGDVFIPRQPSNDLFEIFEIERGVSADDEAKDDPGVLVHSCNFDHGLCGWIREKDNDLHWEPIRDPAGGQYLTVSAAKAPGGKAARLVLPLGRLMHSGDLCLSFRHKVTGLHSGTLQVFVRKHGAHGAALWGRNGGHGWRQTQITLRGADIKSVVFKGEKRRGHTGEIGLDDVSLKKGHCS

SEQ ID NO: 64097 - protein, 1302 aa, Homo sapiens
MPGGACVLVIALMFLAWGEAQECSPGGHQFLRSPYRSVRFDSWHLQQSAVQDLICDHSLSPGWYRFLILDRPAEMPTKCVEMNHCGTQAPIWLSLRDSETLPSPGEIKQLTACATWQFLFSTTKDCCLFQIPVSVRNCGNFSVYLLQPTQGCMGYCAEAISDARLHPCGSDETETGGDCVRQLAASLPPPPAGRPEVLVELIESRLFCRCSFDVPATKNSVGFHIAWSRLSSQEVKEELTQETTVQAFSLLELDGINLRLGDRIFCSASVFFLENPHVQSVAIESQEFFAGFKLQPELSTISEDGKEYYLRIESTVPIICSEFSELDQECKISLKLKTIGQGREHLGLNLALSSCHVDLLQTSSCANGTCSHTFVYYTAVTDFSRDGDRVSNIVVQPIVNEDFLWNNYIPDSIQIKVKDVPTAYCYTFTDPHIITFDGRVYDNFKTGTFVLYKSMSRDFEVHVRQWDCRSLHYPVSCNCGFVAQEGGDIVTFDMCNGQLRESQPYLFIKSQDVTRNIKISESYLGRKVTIWFSSGAFIRADLGEWGMSLTIRAPSVDYRNTLGLCGTFDENPENDFHDKNGMQIDQNFNNYVAFINEWRILPGKSMSDTLPVSMTSPGKPSYCSCSLDTAAYPSSEDLDSVSRSEIALGCKDLNHVSLSSLIPELDVTSEYINSDTLVREINKHTSPEEYNLNLFLQEKKHINLTKLGLNVQKHPGNEKEDSLQYLANKKYTQGRGSHSQEMRYNRQNRWKRQNFHEFPPLFAFPSLSQTDLEELTYFFPEDHAEDVQQEFFPSWPTPSGLTEYSTLTLCQETLANSSIGRLCLAFLGKRLDSVIEMCVKDVLLKDDLSWAEAGVALLENECEKRIVEEGKYNTEEYGTSIEDILSVLKCPNLCSGNGQCMEWGCACSPSFSSYDCSDSYDKAPEITELGNAGFCDVQKYNCMMVRVFGKGFKELPSIKCEVTKLQYNSSEWMPGEPIYTQTVFHNSRAVDCQLPTDVQQFDTMDLVGGKPTGKWQLKVSNDGYKFSNPKITVIYDGACQVCGLYKNDSCTIKENVCIIDGLCYVEGDKNPTSPCLICRPKISRFTWSFLENNQPPVIQALQDKLQTFYGENFEYQFVAFDPEGSDIHFTLDSGPEGASVSSAGLFMWKTDLLTTQQITVRLNDDCDAETRVTIEVTVKSCDCLNGGSCVSDRNFSPGSGVYLCVCLPGFHGSLCEVDISGCQSNPCGLGSYISGFHSYSCDCPPELKGKNCQEDVDECDSKPCFEGVACLNTFGSYHCGSCPEGFYGDGKICHGKSFYFLL

SEQ ID NO: 64098 - protein, 75 aa, Homo sapiens
SFYNWDADIAVSNSSPNYQVIADNPEGLLFRYKRDRKILNVDPKAQPGDNSTRITILTELYVQAVIFDHISRRKT

SEQ ID NO: 64099 - protein, 16 aa, Homo sapiens
MKLVNIWLLLLVVLLC

SEQ ID NO: 64100 - protein, 1769 aa, Homo sapiens
MRPRTKARSPGRALRNPWRGFLPLTLALFVGAGHAQRDPVGRYEPAGGDANRLRRPGGSYPAAAAAKVYSLFREQDAPVAGLQPVERAQPGWGSPRRPTEAEARRPSRAQQSRRVQPPAQTRRSTPLGQQQPAPRTRAAPALPRLGTPQRSGAAPPTPPRGRLTGRNVCGGQCCPGWTTANSTNHCIKPVCEPPCQNRGSCSRPQLCVCRSGFRGARCEEVIPDEEFDPQNSRLAPRRWAERSPNLRRSSAAGEGTLARAQPPAPQSPPAPQSPPAGTLSGLSQTHPSQQHVGLSRTVRLHPTATASSQLSSNALPPGPGLEQRDGTQQAVPLEHPSSPWGLNLTEKIKKIKIVFTPTICKQTCARGHCANSCERGDTTTLYSQGGHGHDPKSGFRIYFCQIPCLNGGRCIGRDECWCPANSTGKFCHLPIPQPDREPPGRGSRPRALLEAPLKQSTFTLPLSNQLASVNPSLVKVHIHHPPEASVQIHQVAQVRGGVEEALVENSVETRPPPWLPASPGHSLWDSNNIPARSGEPPRPLPPAAPRPRGLLGRCYLNTVNGQCANPLLELTTQEDCCGSVGAFWGVTLCAPCPPRPASPVIENGQLECPQGYKRLNLTHCQDINECLTLGLCKDAECVNTRGSYLCTCRPGLMLDPSRSRCVSDKAISMLQGLCYRSLGPGTCTLPLAQRITKQICCCSRVGKAWGSECEKCPLPGTEAFREICPAGHGYTYASSDIRLSMRKAEEEELARPPREQGQRSSGALPGPAERQPLRVVTDTWLEAGTIPDKGDSQAGQVTTSVTHAPAWVTGNATTPPMPEQGIAEIQEEQVTPSTDVLVTLSTPGIDRCAAGATNVCGPGTCVNLPDGYRCVCSPGYQLHPSQAYCTDDNECLRDPCKGKGRCINRVGSYSCFCYPGYTLATSGATQECQDINECEQPGVCSGGQCTNTEGSYHCECDQGYIMVRKGHCQDINECRHPGTCPDGRCVNSPGSYTCLACEEGYRGQSGSCVDVNECLTPGVCAHGKCTNLEGSFRCSCEQGYEVTSDEKGCQDVDECASRASCPTGLCLNTEGSFACSACENGYWVNEDGTACEDLDECAFPGVCPSGVCTNTAGSFSCKDCDGGYRPSPLGDSCEDVDECEDPQSSCLGGECKNTVGSYQCLCPQGFQLANGTVCEDVNECMGEEHCAPHGECLNSHGSFFCLCAPGFVSAEGGTSCQDVDECATTDPCVGGHCVNTEGSFNCLCETGFQPSPESGECVDIDECEDYGDPVCGTWKCENSPGSYRCVLGCQPGFHMAPNGDCIDIDECANDTMCGSHGFCDNTDGSFRCLCDQGFEISPSGWDCVDVNECELMLAVCGAALCENVEGSFLCLCASDLEEYDAQEGHCRPRGAGGQSMSEAPTGDHAPAPTRMDCYSGQKGHAPCSSVLGRNTTQAECCCTQGASWGDACDLCPSEDSAEFSEICPSGKGYIPVEGAWTFGQTMYTDADECVIFGPGLCPNGRCLNTVPGYVCLCNPGFHYDASHKKCEDHDECQDLACENGECVNTEGSFHCFCSPPLTLDLSQQRCMNSTSSTEDLPDHDIHMDICWKKVTNDVCSEPLRGHRTTYTECCCQDGEAWSQQCALCPPRSSEVYAQLCNVARIEAEREAGVHFRPGYEYGPGPDDLHYSIYGPDGAPFYNYLGPEDTVPEPAFPNTAGHSADRTPILESPLQPSELQPHYVASHPGLCCCKTGEEVGTKAVSLPSPPPASHIASRSPQPASKGFRRRSAAS

SEQ ID NO: 64101 - protein, 36 aa, Homo sapiens
MDATALERDAVQFARLAVQRDHEGRYSEAVFYYKVQ

SEQ ID NO: 64102 - protein, 146 aa, Homo sapiens
MLERRCRGPLAMGLAQPRLLSGPSQESPQTLGKESRGLRQQGTSVAQSGAQAPGRAHRCAHCRRHFPGWVALWLHTRRCQARLPLPCPECGRRFRHAPFLALHRQVHAAATPDLGFACHLCGQSFRGWVALVLHLRAHSAAKRPIA

SEQ ID NO: 64103 - protein, 123 aa, Homo sapiens
MSEKENNFPPLPKFIPVKPCFYQNFSDEIPVEHQVLVKRIYRLWMFYCATLGVNLIACLAWWIGGGSGTNFGLAFVWLLLFTPCGYVCWFRPVYKAFRADSSFNFMAFFFIFGAQFVLTVIQA

SEQ ID NO: 64104 - protein, 53 aa, Homo sapiens
QKKILDIANMLGLSNTVMRLIEKRAFQDKYFMIEPPKFLSQQESNKDLKRLDI

SEQ ID NO: 64105 - protein, 477 aa, Homo sapiens
MVRGRISRLSVRDVRFPTSLGGHGADAMVSADAMVSADAMVSADAMVSADAMVSADAMVSADAMVSADAMVSADAMHTDPDYSAAYVVIETDAEDGIKGCGITFTLGKGTEVVVCAVNALAHHVLNKDLKDIVGDFRGFYRQLTSDGQLRWIGPEKGVVHLATAAVLNAVWDLWAKQEGKPVWKLLVDMDPRMLVSCIDFRYITDVLTEEDALEILQKGQIGKKEREKQMLAQGYPAYTTSCAWLGYSDDTLKQLCAQALKDGWTRFKVKVGADLQDDMRRCQIIRDMIGPEKTLMMDANQRWDVPEAVEWMSKLAKFKPLWIEEPTSPDDILGHATISKCHNRVIFKQLLQAKALQFLQIDSCRLGSVNENLSVLLMAKKFEIPVCPHAGGVGLCELVQHLIIFDYISVSASLENRVCEYVDHLHEHFKYPVMIQRASYMPPKDPGYSTEMKEESVKKHQYPDGEVWKKLLPAQEN

SEQ ID NO: 64106 - protein, 76 aa, Homo sapiens
MAAAAPGNGRASAPRLLLLFLVPLLWAPAAVRAGPDEDLSHRNKEPPAPAQQLQPQPVAVQGPEPARVEGHQFFSW

SEQ ID NO: 64107 - protein, 80 aa, Homo sapiens
MAEPLKEEDGEDGSAEPPGPVKAEPAHTAASVAAKNLALLKARSFDVTFDVGDEYEIIETIGNGAYGVVSSARRRLTGEL

SEQ ID NO: 64108 - protein, 948 aa, Homo sapiens
VAQEWLNSPNRENFYQLQVRKFPADYIKYWEFAVYLEECELAKQLYPKENDLVFLAPERINEEKKDTERNDIQDLHEYHSGYVHKFRRTSVMRNGKTECYLSIQTQENFPANLNELVNCIVISSLVTTQRKLKAMSLLGSRNQLARAVLNPNPMDFCTKDLLTTTSERIIAYLRDFNEDQKKAIETAYAMVKHSPSVAKICLIHGPPGTGKSKTIVGLLYRLLTENQRKGHSDENSNAKIKQNRVLVCAPSNAAVDELMKKIILEFKEKCKDKKNPLGNCGDINLVRLGPEKSINSEVLKFSLDSQVNHRMKKELPSHVQAMHKRKEFLDYQLDELSRQRALCRGGREIQRQELDENISKVSKERQELASKIKEVQGRPQKTQSIIILESHIICCTLSTSGGLLLESAFRGQGGVPFSCVIVDEAGQSCEIETLTPLIHRCNKLILVGDPKQLPPTVISMKAQEYGYDQSMMARFCRLLEENVEHNMISRLPILQLTVQYRMHPDICLFPSNYVYNRNLKTNRQTEAIRCSSDWPFQPYLVFDVGDGSERRDNDSYINVQEIKLVMEIIKLIKDKRKDVSFRNIGIITHYKAQKTMIQKDLDKEFDRKGPAEVDTVDAFQGRQKDCVIVTCVRANSIQGSIGFLASLQRLNVTITRAKYSLFILGHLRTLMQLLPRSFCVHVNHSPFFSPEPKYLHWALKENQHWNQLIQDAQKRGAIIKTCDKNYRHDAVKILKLKPVLQRSLTHPPTIAPEGSRPQGGLPSSKLDSGFAKTSVAASLYHTPSDSKEITLTVTSKDPERPPVHDQLQDPRLLKRMGIEVKGGIFLWDPQPSSPQHPGATPPTGEPGFPVVHQDLSHIQQPAAVVAALSSHKPPVRGEPPAASPEASTCQSKCDDPEEELCHRREARAFSEGEQEKCGSETHHTRRNSRWDKRTLEQEDSSSKKRKLL

SEQ ID NO: 64109 - protein, 306 aa, Homo sapiens
MCAQLPNPVLDSISIIDTPGILSGEKQRISRGYDFAAVLEWFAERVDRIILLFDAHKLDISDEFSEVIKALKNHEDKIRVVLNKADQIETQQLMRVYGALMWSLGKIINTPEVVRVYIGSFWSHPLLIPDNRKLFEAEEQDLFKDIQSLPRNAALRKLNDLIKRARLAKVHAYIISSLKKEMPNVFGKESKKKELVNNLGEIYQKIEREHQISPGDFPSLRKMQELLQTQDFSKFQALKPKLLDTVDDMLANDIARLMVMVRQEESLMPSQVVKGGAFDGTMNGPFGHGYGEGAGEGIDDVEWVVG

SEQ ID NO: 64110 - protein, 96 aa, Homo sapiens
MASPGHSDLGEVAPEIKASERRTAVAIADLEWREMEGDDCEFRYGDGTNEAQDNDFPTDQDTGPRASKQPAKGHTLGRSVFFVFFPLPFTTMLLKK

SEQ ID NO: 64111 - protein, 234 aa, Homo sapiens
MSSSHFASRHRKDISTEMIRTKIAHRKSLSQKENRHKEYERNRHFGLKDVNIPTLEGRILVELDETSQGLVPEKTNVKPRAMKTILGDQRKQMLQKYKEEKQLQKLKEQREKAKRGIFKVGRYRPDMPCFLLSNQNAVKAEPKKAIPSSVRITRSKAKDQMEQTKIDNESDVRAIRPGPRQTSEKKVSDKEKKVVQPVMPTSLRMTRSATQAAKQVPRTVSSTTARKPVTRAAN

SEQ ID NO: 64112 - protein, 228 aa, Homo sapiens
APRRGLEKEGVTLVAFEPAGKTNVRVVTFEKSQPARADRLCFAILYSRPKSASNVHYFSIDNELEYENFYADFGPLNLAMVYRYCCKINKKLKSITMLRKKIVHFTGSDQRKQANAAFLVGCYMVIYLGRTPEEAYRILIFGETSYIPFRDAAYGSCNFYITLLDCFHAVKKAMQYGFLNFNSFNLDEYEHYEKAENGDLNWIIPDRFIAFCGPHSRARLESGYHQHS

SEQ ID NO: 64113 - protein, 156 aa, Homo sapiens
  MOD_RES (1)..(1): Any amino acid
XIWDLASGKLKLSLTGHISTVRGVIVSTRSPYLFSCGEDKQVKCWDLEYNKVIRHYHGHLSAVYGLDLHPTIDVLVTCSRDSTARIWDVRTKASVHTLSGHTNAVATVRCQAAEPQIITGSHDTTIRLWDLVAGKTRVTLTNHKKSVRAVVLHPRQ

SEQ ID NO: 64114 - protein, 938 aa, Homo sapiens
MVPWVRTMGQKLKQRLRLDVGREICRQYPLFCFLLLCLSAASLLLNRYIHILMIFWSFVAGVVTFYCSLGPDSLLPNIFFTIKYKPKLGLQELFPQGHSCAVCGKVKCKRHRPSLLLENYQPWLDLKISSKVDASLSEVLELVLENFVYPWYRDVTDDESFVDELRITLRFFASVLIRRIHKVDIPSIITKKLLKAAMKHIEVIVKARQKVKNTEFLQQAALEEYGPELHVALRSRRDELHYLRKLTELLFPYILPPKATDCRSLTLLIREILSGSVFLPSLDFLADPDTVNHLLIIFIDDSPPEKATEPASPLVPFLQKFAEPRNKKPSVLKLELKQIREQQDLLFRFMNFLKQEGAVHVLQFCLTVEEFNDRILRPELSNDEMLSLHEELQKIYKTYCLDESIDKIRFDPFIVEEIQRIAEGPYIDVVKLQTMRCLFEAYEHVLSLLENVFTPMFCHSDEYFRQLLRGAESPTRNSKLNRGSLSLDDFRNTQKRGESFGISRIGSKIKGVFKSTTMEGAMLPNYGVAEGEDDFIEEGIVVMEDDSPVEAVSTPNTPRNLAAWKISIPYVDFFEDPSSERKEKKERIPVFCIDVERNDRRAVGHEPEHWSVYRRYLEFYVLESKLTEFHGAFPDAQLPSKRIIGPKNYEFLKSKREEFQEYLQKLLQHPELSNSQLLADFLSPNGGETQFLDKILPDVNLGKIIKSVPGKLMKEKGQHLEPFIMNFINSCESPKPKPSRPELTILSPTSENNKKLFNDLFKNNANRAENTERKQNQNYFMEVMTVEGVYDYLMYVGRVVFQVPDWLHHLLMGTRILFKNTLEMYTDYYLQCKLEQLFQEHRLVSLITLLRDAIFCENTEPRSLQDKQKGAKQTFEEMMNYIPDLLVKCIGEETKYESIRLLFDGLQQPVLNKQLTYVLLDIVIQELFPELNKVTEKQ

SEQ ID NO: 64115 - protein, 802 aa, Homo sapiens
MKYIKSNSKNSSHHFVETFNIKPQDLHKCIARCHFARSRFLQILQRQDCVTQKYQENAQLSVKQVRNLRSECIGLENQIKKMEPYDDHSNMEEKIQKVRSLWASVNETLMFLEKEREVVSSVLSLVNQYALDGTNVAINIPRLLLDKIEKQMFQLHIGNVYEAGKLNLLTVIQLLNEVLKVMKYERCQADQARLTVDLHYLEKETKFQKERLSDLKHMRYRIKDDLTTIRHSVVEKQGEWHKKWKEFLGLSPFSLIKGWTPSVDLLPPMSPLSFDPASEEVYAKSILCQYPASLPDAHKQHNQENGCRGDSDTLGALHDLANSPASFLSQSVSSSDRNSVTVLEKDTKMGTPKEKNEAISKKIPEFEVENSPLSDVAKNTESSAFGGSLPAKKSDPFQKEQDHLVEEVARAVLSDSPQLSEGKEIKLEELIDSLGSNPFLTRNQIPRTPENLITEIRSSWRKAIEMEENRTKEPIQMDAEHREVLPESLPVLHNQREFSMADFLLETTVSDFGQSHLTEEKVISDCECVPQKHVLTSHIDEPPTQNQSDLLNKKVICKQDLECLAFTKLSETSRMETFSPAVGNRIDVMGGSEEEFMKILDHLEVSCNKPSTNKTMLWNSFQISSGISSKSFKDNDFGILHETLPEEVGHLSFNSSSSSEANFKLEPNSPMHGGTLLEDVVGGRQTTPESDFNLQALRSRYEALKKSLSKKREESYLSNSQTPERHKPELSPTPQNVQTDDTLNFLDTCDLHTEHIKPSLRTSIGERKRSLSPLIKFSPVEQRLRTTIACSLGELPNLKGKV

SEQ ID NO: 64116 - protein, 84 aa, Homo sapiens
MAGVEQPPSPELRQEGVTEYEDGGAPAGDGEAGPQQAEDHPQNPPEDPNQDPPEDDSTCQCQACGPHQAAGPDLGSSNDGCPQL

SEQ ID NO: 64117 - protein, 232 aa, Homo sapiens
  MOD_RES (1)..(1): Any amino acid
XEPQLQQLKTAVEEIHNAVADRLLSLTLLAFEGLNTAASKDRCLACIEEPFFSPLWPLLLALYRSVHRAREAALSRSMELYRNAPPTAIGIPTKLLPQNPEAKGATGYPYCAAAQELGLLVLESCPQKKLECIVRTLRIICVCAEDYCPTPEATPQAGPPPIAAAAIGADDLLPILSFVVLRSGLPQLVSECAALEEFIHEGYLIGEEGYCLTSLQSALSYVELLPRGGLAK

SEQ ID NO: 64118 - protein, 445 aa, Homo sapiens
MAKRKEENFSSPKNAKRPRQEELEDFDKDGDEDECKGTTLTAAEVGIIESIHLKNFMCHSMLGPFKFGSNVNFVVGNNGSGKSAVLTALIVGLGGRAVATNRGSSLKGFVKDGQNSADISITLRNRGDDAFKASVYGNSILIQQHISIDGSRSYKLKSATGSVVSTRKEELIAILDHFNIQVDNPVSVLTQEMSKQFLQSKNEGDKYKFFMKATQLEQMKEDYSYIMETKERTKEQIHQGEERLTELKRQCVEKEERFQSIAGLSTMKTNLESLKHEMAWAVVNEIEKQLNAIRDNIKIGEDRAARLDRKMEEQQVRLNEAEQKYKDIQDKLEKISEETNARAPECMALKADVVAKKRAYNEAEVLYNRSLNEYKALKKDDEQLCKRIEELKKSTDQSLEPERLERQKKISWLKERVKAFQNQENSVNQEIEQFQQAIEKDKEEH

SEQ ID NO: 64119 - protein, 143 aa, Homo sapiens
MTNSKGRSITDKTSGGPSSGGGFVDWTLRLNTIQSDKFLNLLLSMVPVIYQKNQEDRHKKANGIWQDGLSTAVQTFSNRSEQHMEYHSFSEQSFHANNGHASSSCSQKYDDYANYNYCDGRETSETTAMLQDEDISSDGDEDA

SEQ ID NO: 64120 - protein, 79 aa, Homo sapiens
  MOD_RES (1)..(1): Any amino acid
XLRLEYLQIPPVSRAYTTACVLTTAAVQLELITPFQLYFNPELIFKHFQIWRLITNFLFFGPVGFNFLFNMIFLFLVCL

SEQ ID NO: 64121 - protein, 84 aa, Homo sapiens
MAHNPNMTHLKINLPVTALPPLWVRCDSSDPEGTCWLGAELITTNNSITGIVLYVVSCKADKNYSVNLENLKNLHKKRHHLSTV

SEQ ID NO: 64122 - protein, 71 aa, Homo sapiens
MAFVATQGATVVDQTTLMKKYLQFVAALTDVNTPDETKLKMMQEVSENFENVTSSPQYSTFLEHIIPRFLT

SEQ ID NO: 64123 - protein, 295 aa, Homo sapiens
QPSQPQRTLLQHVAQSQTATQTSVVVKSIPASSPGAITHIMQQALSSHTAFTKHSEELGTEEGEVEEMDTLDPQTGLFYRSALTQSQSAKQQKLSQPPLEQTQLQVKTLQCFQTKQKQTIHLQADQLQHKLPQMPQLSIRHQKLTPLQQEQAQPKPDVQHTQHPMVAKDRQLPTLMAQPPQTVVQVLAVKTTQQLPKLQQAPNQPKIYVQPQTPQSQMSLPASSEKQTASQAIPQYAIPCHSSSNVVVEPSGLLELNNFTSQQLDDEETAMEQDIDSSTEDGTEPSPSQSSAERS

SEQ ID NO: 64124 - protein, 37 aa, Homo sapiens
  MOD_RES (1)..(1): Any amino acid
XVDFKVKTISVDGNKAKLAIWFMMSQEEIHLLNWIIG

SEQ ID NO: 64125 - protein, 37 aa, Homo sapiens
MAVCIAVIAKEVRTRGVGRPGSHHPRLSAFFLLLPWA

SEQ ID NO: 64126 - protein, 41 aa, Homo sapiens
  MOD_RES (1)..(1): Any amino acid
XVTKSQPEKWDEEAQDAAGEEEKEQEKEKDAENKVKNSKGT

SEQ ID NO: 64127 - protein, 141 aa, Homo sapiens
MRELLWRKEDCQRFYREHEGRFFYQRLVEFMASGPIRAYILAHKDAIQLWRTLMGPTRVFRARHVAPDSIRGSFGLTDTRNTTHGSDSVVSASREIAAFFPDFSEQRWYEEEEPQLRCGPVCYSPEGGVHYVAGTGGLGPA

SEQ ID NO: 64128 - protein, 667 aa, Homo sapiens
MHRGLIHPQSRAVGGDAMTPILTVLICLGLSLGPRTHVQAGHLPKPTLWAEPGSVITQGSPVTLRCQGGQETQEYRLYREKKTALWITRIPQELVKKGQFPIPSITWEHAGRYRCYYGSDTAGRSESSDPLELVVTGAYIKPTLSAQPSPVVNSGGNVILQCDSQVAFDGFSLCKEGEDEHPQCLNSQPHARGSSRAIFSVGPVSPSRRWWYRCYAYDSNSPYEWSLPSDLLELLVLGVSKKPSLSVQPGPIVAPEETLTLQCGSDAGYNRFVLYKDGERDFLQLAGAQPQAGLSQANFTLGPVSRSYGGQYRCYGAHNLSSEWSAPSDPLDILIAGQFYDRVSLSVQPGPTVASGENVTLLCQSQGWMQTFLLTKEGAADDPWRLRSTYQSQKYQAEFPMGPVTSAHAGTYRCYGSQSSKPYLLTHPSDPLELVVSGPSGGPSSPTTGPTSTSGPEDQPLTPTGSDPQSGLGRHLGVVIGILVAVILLLLLLLLLFLILRHRRQGKHWTSTQRKADFQHPAGAVGPEPTDRGLQWRSSPAADAQEENLYAAVKHTQPEDGVEMDTRSPHDEDPQAVTYAEVKHSRPRREMASPPSPLSGEFLDTKDRQAEEDRQMDTEAAASEAPQDVTYAQLHSLTLRREATEPPPSQEGPSPAVPSIYATLAIH

SEQ ID NO: 64129 - protein, 142 aa, Homo sapiens
MHQPPESTAAAAAAADISARKMAHPAMFPRRGSGSGSASALNAAGTGVGSNATSSEDFPPPSLLQPPPPAASSTSGPQPPPPQSLNLLSQAQLQAQPLAPGGTQMKKKSGFQITSVTPAQISASISSNNSIAEDTESYDDLD

SEQ ID NO: 64130 - protein, 2138 aa, Homo sapiens
MVNENTRMYIPEENHQGSNYGSPRPAHANMNANAAAGLAPEHIPTPGAALSWQAAIDAARQAKLMGSAGNATISTVSSTQRKRQQYGKPKKQGSTTATRPPRALLCLTLKNPIRRACISIVEWKPFEIIILLTIFANCVALAIYIPFPEDDSNATNSNLERVEYLFLIIFTVEAFLKVIAYGLLFHPNAYLRNGWNLLDFIIVVVGLFSAILEQATKADGANALGGKGAGFDVKALRAFRVLRPLRLVSGVPSLQVVLNSIIKAMVPLLHIALLVLFVIIIYAIIGLELFMGKMHKTCYNQEGIADVPAEDDPSPCALETGHGRQCQNGTVCKPGWDGPKHGITNFDNFAFAMLTVFQCITMEGWTDVLYWMQDAMGYELPWVYFVSLVIFGSFFVLNLVLGVLSGEFSKEREKAKARGDFQKLREKQQLEEDLKGYLDWITQAEDIDPENEDEGMDEEKPRNMSMPTSETESVNTENVAGGDIEGENCGARLAHRISKSKFSRYWRRWNRFCRRKCRAAVKSNVFYWLVIFLVFLNTLTIASEHYNQPNWLTEVQDTANKALLALFTAEMLLKMYSLGLQAYFVSLFNRFDCFVVCGGILETILVETKIMSPLGISVLRCVRLLRIFKITRYWNSLSNLVASLLNSVRSIASLLLLLFLFIIIFSLLGMQLFGGKFNFDEMQTRRSTFDNFPQSLLTVFQILTGEDWNSVMYDGIMAYGGPSFPGMLVCIYFIILFICGNYILLNVFLAIAVDNLADAESLTSAQKEEEEEKERKKLARTASPEKKQELVEKPAVGESKEEKIELKSITADGESPPATKINMDDLQPNENEDKSPYPNPETTGEEDEEEPEMPVGPRPRPLSELHLKEKAVPMPEASAFFIFSSNNRFRLQCHRIVNDTIFTNLILFFILLSSISLAAEDPVQHTSFRNHILGNADYVFTSIFTLEIILKMTAYGAFLHKGSFCRNYFNILDLLVVSVSLISFGIQSSAINVVKILRVLRVLRPLRAINRAKGLKHVVQCVFVAIRTIGNIVIVTTLLQFMFACIGVQLFKGKLYTCSDSSKQTEAECKGNYITYKDGEVDHPIIQPRSWENSKFDFDNVLAAMMALFTVSTFEGWPELLYRSIDSHTEDKGPIYNYRVEISIFFIIYIIIIAFFMMNIFVGFVIVTFQEQGEQEYKNCELDKNQRQCVEYALKARPLRRYIPKNQHQYKVWYVVNSTYFEYLMFVLILLNTICLAMQHYGQSCLFKIAMNILNMLFTGLFTVEMILKLIAFKPKGYFSDPWNVFDFLIVIGSIIDVILSETNPAEHTQCSPSMNAEENSRISITFFRLFRVMRLVKLLSRGEGIRTLLWTFIKSFQALPYVALLIVMLFFIYAVIGMQVFGKIALNDTTEINRNNNFQTFPQAVLLLFRCATGEAWQDIMLACMPGKKCAPESEPSNSTEGETPCGSSFAVFYFISFYMLCAFLIINLFVAVIMDNFDYLTRDWSILGPHHLDEFKRIWAEYDPEAKGRIKHLDVVTLLRRIQPPLGFGKLCPHRVACKRLVSMNMPLNSDGTVMFNATLFALVRTALRIKTEGNLEQANEELRAIIKKIWKRTSMKLLDQVVPPAGDDEVTVGKFYATFLIQEYFRKFKKRKEQGLVGKPSQRNALSLQAGLRTLHDIGPEIRRAISGDLTAEEELDKAMKEAVSAASEDDIFRRAGGLFGNHVSYYQSDGRSAFPQTFTTQRPLHINKAGSSQGDTESPSHEKLVDSTFTPSSYSSTGSNANINNANNTALGRLPRPAGYPSTVSTVEGHGPPLSPAIRVQEVAWKLSSNRCHSRESQAAMAGQEETSQDETYEVKMNHDTEACSEPSLLSTEMLSYQDDENRQLTLPEEDKRDIRQSPKRGFLRSASLGRRASFHLECLKRQKDRGGDISQKTVLPLHLVHHQALAVAGLSPLLQRSHSPASFPRPFATPPATPGSRGWPPQPVPTLRLEGVESSEKLNSSFPSIHCGSWAETTPGGGGSSAARRVRPVSLMVPSQAGAPGRQFHGSASSLVEAVLISEGLGQFAQDPKFIEVTTQELADACDMTIEEMESAADNILSGGAPQSPNGALLPFVNCRDAGQDRAGGEEDAGCVRARGRPSEEELQDSRVYVSSL

SEQ ID NO: 64131 - protein, 1887 aa, Homo sapiens
MMNEDAAQKSDSGEKFNGSSQRRKRPKKVTCPQMKPEAANIEKSDSNASFLRAARAGNLDKVVEYLKGGIDINTCNQNGLNALHLAAKEGHVGLVQELLGRGSSVDSATKKGNTALHIASLAGQAEVVKVLVKEGANINAQSQNGFTPLYMAAQENHIDVVKYLLENGANQSTATEDGFTPLAVALQQGHNQAVAILLENDTKGKVRLPALHIAARKDDTKSAALLLQNDHNADVQSKMMVNRTTESGFTPLHIAAHYGNVNVATLLLNRGAAVDFTARNGITPLHVASKRGNTNMVKLLLDRGGQIDAKTRDGLTPLHCAARSGHDQVVELLLERGAPLLARTKNGLSPLHMAAQGDHVECVKHLLQHKAPVDDVTLDYLTALHVAAHCGHYRVTKLLLDKRANPNARALNGFTPLHIACKKNRIKVMELLVKYGASIQAITESGLTPIHVAAFMGHLNIVLLLLQNGASPDVTNIRGETALHMAARAGQVEVVRCLLRNGALVDARAREEQTPLHIASRLGKTEIVQLLLQHMAHPDAATTNGYTPLHISAREGQVDVASVLLEAGAAHSLATKKGFTPLHVAAKYGSLDVAKLLLQRRAAADSAGKNGLTPLHVAAHYDNQKVALLLLEKGASPHATAKNGYTPLHIAAKKNQMQIASTLLNYGAETNIVTKQGVTPLHLASQEGHTDMVTLLLDKGANIHMSTKSGLTSLHLAAQEDKVNVADILTKHGADQDAHTKLGYTPLIVACHYGNVKMVNFLLKQGANVNAKTKNGYTPLHQAAQQGHTHIINVLLQHGAKPNATTANGNTALAIAKRLGYISVVDTLKVVTEEVTTTTTTITEKHKLNVPETMTEVLDVSDEEGDDTMTGDGGEYLRPEDLKELGDDSLPSSQFLDGMNYLRYSLEGGRSDSLRSFSSDRSHTLSHASYLRDSAVMDDSVVIPSHQVSTLAKEAERNSYRLSWGTENLDNVALSSSPIHSGFLVSFMVDARGGAMRGCRHNGLRIIIPPRKCTAPTRVTCRLVKRHRLATMPPMVEGEGLASRLIEVGPSGAQFLGKLHLPTAPPPLNEGESLVSRILQLGPPGTKFLGPVIVEIPHFAALRGKERELVVLRSENGDSWKEHFCDYTEDELNEILNGMDEVLDSPEDLEKKRICRIITRDFPQYFAVVSRIKQDSNLIGPEGGVLSSTVVPQVQAVFPEGALTKRIRVGLQAQPMHSELVKKILGNKATFSPIVTLEPRRRKFHKPITMTIPVPKASSDVMLNGFGGDAPTLRLLCSITGGTTPAQWEDITGTTPLTFVNECVSFTTNVSARFWLIDCRQIQESVTFASQVYREIICVPYMAKFVVFAKSHDPIEARLRCFCMTDDKVDKTLEQQENFAEVARSRDVEVLEGKPIYVDCFGNLVPLTKSGQHHIFSFFAFKENRLPLFVKVRDTTQEPCGRLSFMKEPKSTRGLVHQAICNLNITLPIYTKESESDQEQEEEIDMTSEKNPQDEQERIEERLAYIADHLGFSWTELARELDFTEEQIHQIRIENPNSLQDQSHALLKYWLERDGKHATDTNLVECLTKINRMDIVHLMETNTEPLQERISHSYAEIEQTITLDHSEGFSVLQEELCTAQHKQKEEQAVSKESETCDHPPIVSEEDISVGYSTFQDGVPKTEGDSSATALFPQTHKEQVQQDFSGKMQDLPEESSLEYQQEYFVTTPGTETSETQKAMIVPSSPSKTPEEVSTPAEEEKLYLQTPTSSERGGSPIIQEPEEPSEHREESSPRKTSLVIVESADNQPETCERLDEDAAFEKGDDMPEIPPETVTEEEYIDEHGHTVVKKVTRKIIRRYVSSEGTEKEEIMVQGMPQEPVNIEEGDGYSKVIKRVVLKSDTEQSEDNNE

SEQ ID NO: 64132 - protein, 135 aa, Homo sapiens
MAQQRALPQSKETLLQSYNKRLKDDIKSIMDNFTEIIKTAKIEDETQVSRATQGEQDNYEMHVRAANIVRAGESLMKLVSDLKQFLILNDFPSVNEAIDQRNQQLRTLQEECDRKLITLRDEISIDLYELEEEYY

SEQ ID NO: 64133 - protein, 87 aa, Homo sapiens
  MOD_RES (1)..(1): Any amino acid
XASPTATAEEQPVEPDGPLPGSDNNQEKKVRLSPAKMSTKNSTDLVEYVDKGPMAFEKRNRSPGSYWKATSRPSPASSKNSAKILRF

SEQ ID NO: 64134 - protein, 287 aa, Homo sapiens
MDVAIEFSLEEWQCLDTAQRNVYRHVMLENYRNLVFLALCSRFAQDLWLEQNIKDSFQKVTLSRYGKYGHKNLQLRKGCKSVDECKGHQGGFNGLNQCLKITTSKIFQCNKYVKVMHKFSNSNRHKIRHTENKHFRCKECDKSLCMLSRLTQHKKIHTRENFYKCEECGKTFNWSTNLSKPKKIHTGEKPYKCEVCGKAFHQSSILTKHKIIRTGEKPYKCAHCGKAFKQSSHLTRHKIIHTEEKPYKCEQCGKVFKQSPTLTKHQIIYTGEEPYKCEECGKAFNLS

SEQ ID NO: 64135 - protein, 50 aa, Homo sapiens
MLDHKDLEAEIHPLKNEERKSQENLGNPSKNEDNVKSAPPQSRLSRCRAA

SEQ ID NO: 64136 - protein, 109 aa, Homo sapiens
MGSNSSRIGDLPKNEYLKKLSGTESISENDPFWNQLLSFSFPAPTSSSELKLLEEATISVCRSLVENNPRTGNLGALIKVFLSRTKELKLSAECQNHIFIWQTHNALFI

SEQ ID NO: 64137 - protein, 751 aa, Homo sapiens
MAKPRLLVLYFALIVVPAWVSSIVLTGTSEPPDAQTVAPAEDETLQNEADNQENVLSQLLGDYDKVKAMSEGSDCQCKCVVRPLGRDACQRINAGASRKEDFYTVETITSGSSCKCACVAPPSALNPCEGDFRLQKLREADSQDLKLSTIIDMLEGAFYGLDLLKLHSVTTKLVGRVDKLEEEVSKNLTKENEQIKEDMEEIRTEMNKRGKENCSENILDSMPDIRSALQRDAAAAYAHPEQYEERFLQEETVSQQINSIELLQTRPLALPEVVKSQRPLQRQVHLRGRPASQPTVIRGITYYKAKVSEEENDIEEQQDEFFSGDNGVDLLIEDQLLRHNGLMTSVTRRPAATRQGHSTAVTSDLNARTAPWSSALPQPSTSDPSIANHASVGPTLQTTSVSPDPTRESVLQPSPQVPATTVAHTATQQPAAPAPPAVSPREALMEAMHTVPVPPTTVRTDSLGKDAPAGWGTTPASPTLSPEEEDDIRNVIGRCKDTLSTITGPTTQNTYGRNEGAWMKDPLAKDERIYVTNYYYGNTLVEFRNLENFKQGRWSNSYKLPYSWIGTGHVVYNGAFYYNRAFTRNIIKYDLKQRYVAAWAMLHDVAYEEATPWRWQGHSDVDFAVDENGLWLIYPALDDEGFSQEVIVLSKLNAADLSTQKETTWRTGLRRNFYGNCFVICGVLYAVDSYNQRNANISYAFDTHTNTQIVPRLLFENEYSYTTQIDYNPKDRLLYAWDNGHQVTYHVIFAY

SEQ ID NO: 64138 - protein, 171 aa, Homo sapiens
MLLPLLLLLPMCWAVEVKRPRGVSLTNHHFYDESKPFTCLDGSATIPFDQVNDDYCDCKDGSDEPGTAACPNGSFHCTNTGYKPLYIPSNRVNDGVCDCCDGTDEYNSGVICENTCKEKGRKERESLQQMAEVTREGFRLKKILIEDWKKAREEKQKKLIELQAGKKSLED

SEQ ID NO: 64139 - protein, 72 aa, Homo sapiens
  MOD_RES (1)..(1): Any amino acid
XLGDVEASEAEDHFFNPRLSISTQFLSSLQKASRFTHTFPPRATQCLVKSPEVKLMDRGGSQPRAGPRCREG

SEQ ID NO: 64140 - protein, 148 aa, Homo sapiens
MAELQEVQITEEKPLLPGQTPEAAKEAELAARILLDQGQTHSVETPYGSVTFTVYGTPKPKRPAILTYHDVGLNYKSCFQPLFQFEDMQEIIQNFVRVHVDAPGMEEGAPVFPLGYQYPSLDQLADMIPCVLQYLNFSTIIGVGVGAG

SEQ ID NO: 64141 - protein, 170 aa, Homo sapiens
MLAVGCALLAALLAAPGAALAPRRCPAQEVARGVLTSLPGDSVTLTCPGVEPEDNATVHWVLRKPAAGSHPSRWAGMGRRLLLRSVQLHDSGNYSCYRAGRPAGTVHLLVDVPPEEPQLSCFRKSPLSNVVCEWGPRSTPSLTTKAVLLSEQSGRRLPGAVPVFPGVPEV

SEQ ID NO: 64142 - protein, 140 aa, Homo sapiens
MPERDSEPFSNPLAPDGHDVDDPHSFHQSKLTNEDFRKLLMTPRAAPTSAPPSKSRHHDEFLVSSRMPREYNEDEDPAARRRKKKSYYAKLRQQEIERERELAEKYRDRAKERRDGVNKDYEETELISTTANYRAVGPTA

SEQ ID NO: 64143 - protein, 443 aa, Homo sapiens
MSGGGEQLDILSVGILVKERWKVLRKIGGGGFGEIYDALDMLTRENVALKVESAQQPKQVLKMEVAVLKKLQGKDHVCRFIGCGRNDRFNYVVMQLQGRNLADLRRSQSRGTFTISTTLRLGRQILESIESIHSVGFLHRDIKPPRAVAGFRGTVRYASINAHRNREMGRHDDLWSLFYMLVEFVVGQLPWRKIKDKEQVGSIKERYDHRLMLKHLPPEFSIFLDHISSLDYFTKPDYQLLTSVFDNSIKTFGVIESDPFDWEKTGNDGSLTTTTTSTTPQLHTRLTPAAIGIANATPIPGDLLRENTDEVFPDEQLSDGENGIPVGVSPDKLPGSLGHPRPQEKDVWEEMDANKNKIKLGICKAATEEENSHGQANGLLNAPSLGSPIRVRSEITQPDRDIPLVRKLRSIHSFELEKRLTLEPKPDTDKFLETWYKIVYFSF

SEQ ID NO: 64144 - protein, 117 aa, Homo sapiens
MILSPPQPCGTFPECGFYGMYDKILLFRHDPTSENILQLVKAASDIQEGDLIEVVLSASATFEDFQIRPHALFVHSYRAPAFCDHCGEMLWGLVRQGLKCEGCGLNYHKRCAFKIPN

SEQ ID NO: 64145 - protein, 358 aa, Homo sapiens
  MOD_RES (1)..(1): Any amino acid
XSVTLYSGEDYPDTAPVIHGVDVINSTLVKVTWSTVPKDRVHGRLKGYQINWWKTKSLLDGRTHPKEVNILRFSGQRNSGMVPSLDAFSEFHLTVLAYNSKGAGPESEPYIFQTPEGVPEQPTFLKVIKVDKDTATLSWGLPKKLNGNLTGYLLQYQIINDTYEIGELNDINITTPSKPSWHLSNLNATTKYKFYLRACTSQGCGKPITEESSTLGEGKYAGLYDDISTQGWFIGLMCAIALLTLLLLTVCFVKRNRGGKYSVKEKEDLHPDPEIQSVKDETFGEYSDSDEKPLKGSLRSLNRDMQPTESADSLVEYGEGDHGLFSEDGSFIGAYAGSKEKGSVESNGSSTATFPLRA

SEQ ID NO: 64146 - protein, 168 aa, Homo sapiens
MNGRADFREPNAEVPRPIPPVPLAATSMLITQGLISKGILSSHPKYGSIPKLILACIMGYFAGKLSYVKTCQEKFKKLENSPLGEALRSGQARRSSPPGHYYQKSKYDSSVSGQSSFVTSPAADNIEMLPHYEPIPFSSSMNESAPTGITDHIVQGPDPNLEESPKRK

SEQ ID NO: 64147 - protein, 302 aa, Homo sapiens
MATGADVRDILELGGPEGDAASGTISKKDIINPDKKKSKKSSETLTFKRPEGMHREVYALLYSDKKDAPPLLPSDTGQGYRTVKAKLGSKKVRPWKWMPFTNPARKDGAMFFHWRRAAEEGKDYPFARFNKTVQVPVYSEQEYQLYLHDDAWTKAETDHLFDLSRRFDLRFVVIHDRYDHQQFKKRSVEDLKERYYHICAKLANVRAVPGTDLKIPVFDAGHERRRKEQLERLYNRTPEQVAEEEYLLQELRKIEARKKEREKRSQDLQKLITAADTTAEQRRTERKAPKKKLPQKKEAEKP

SEQ ID NO: 64148 - protein, 562 aa, Homo sapiens
MIQSDKGADPPDKKDMKLSTATNPQNGLSQILRLVLQELSLFYGRDVNGVCLLYDLLHSPWLQALLKIYDCLQEFKEKKLVPATPHAQVLSYEVVELLRETPTSPEIQELRQMLQAPHFKGATIKRHEMTGDILVARIIHGGLAERSGLLYAGDKLVEVNGVSVEGLDPEQVIHILAMSRGTIMFKVVPVSDPPVNSQQMVYVRAMTEYWPQEDPDIPCMDAGLPFQKGDILQIVDQNDALWWQARKISDPATCAGLVPSNHLLKRKQREFWWSQPYQPHTCLKSTLYKEEFVGYGQKFFIAGFRRSMRLCRRKSHLSPLHASVCCTGSCYSAVGAPYEEVVRYQRRPSDKYRLIVLMGPSGVGVNELRRQLIEFNPSHFQSAVPHTTRTKKSYEMNGREYHYVSKETFENLIYSHRMLEYGEYKGHLYGTSVDAVQTVLVEGKICVMDLEPQDIQGVRTHELKPYVIFIKPSNMRCMKQSRKNAKVITDYYVDMKFKDEDLQEMENLAQRMETQFGQFFDHVIVNDSLHDACAQLLSAIQKAQEEPQWVPATWISSDTESQ

SEQ ID NO: 64149 - protein, 1026 aa, Homo sapiens
MRDFGFGVLQTAPLRSSSPGPLFCGEAYGPYAVGSVNPLPSATPFGPLSPPPLPVTGFLEAASPFSVPLGGGAGSPAAAASSSSPFLAHQQTMQDELLLGLTQQPARPLSGAAATEKLPDHHPGGGTIAGVTHLLPSQDFKPSLHHPSSSSASSCCCCRTSSPQDFSKRQQQQLSSQKRKEFSPPHLPHPPDSKPPPPPPPLHCPGRFSPPPPPAGPLLQPAQLAQRQQQQPPQQFSLLHQQHLSPQDFAPRQRPADLPPLPQLPPSPPAAPRRRHGGAGSPRKTPAAGEGSAAESPNAGLASSTPVNPAPGSMESPNHPLLNSPSNLLPGGALGAGAFSSLQSPDLPHPGGGGGGGGGGPPGGGGGGGSASPPPLPGFGTPWSVQTASPPPQPQQPPPTQPQQQPPPPQQPPQPQPQPPGSSATTPGGGSGGSLSAMPPPSPDSENGFYPGLPSSMNPAFFPSFSPVSPHGCTGLSVPTSGGGGGGFGGPFSATAVPPPPPPAMNIPQQQPPPPAAPQQPQSRRSPVSPQLQQQHQAAAAAFLQQRNSYNHHQPLLKQSPWSNHQSSGWGTGSMSWGAMHGRDHRRTGNMGIPGTMNQISPLKKPFSGNVIAPPKFTRSTPSLTPKSWIEDNVFRTDNNSNTLLPLQVRSSLQLPAWGSDSLQDSWCTAAGTSRIDQDRSRMYDSLNMHSLENSLIDIMRAEHDPLKGRLSYPHPGTDNLLMLNGRSSLFPIDDGLLDDGHSDQVGVLNSPTCYSAHQNGERIERFSRKVFVGGLPPDIDEDEITASFRRFGPLVVDWPHKAESKSYFPPKGYAFLLFQEESSVQALIDACIEEDGKLYLCVSSPTIKDKPVQIRPWNLSDSDFVMDGSQPLDPRKTIFVGGVPRPLRAVELAMIMDRLYGGVCYAGIDTDPELKYPKGAGRVAFSNQQSYIAAISARFVQLQHGDIDKRVEVKPYVLDDQMCDECQGARCGGKFAPFFCANVTCLQYYCEFCWANIHSRAGREFHKPLVKEGADRPRQIHFRWN

SEQ ID NO: 64150 - protein, 50 aa, Homo sapiens
MSLHFLYYCSEPTLDVKIAFCQGFDKQVDVSYIAKHYNMSKSKVDNQFYS

SEQ ID NO: 64151 - protein, 162 aa, Homo sapiens
MADPDPRYPRSSIEDDFNYGSSVASATVHIRMAFLRKVYSILSLQVLLTTVTSTVFLYFESVRTFVHESPALILLFALGSLGLIFALILNRHKYPLNLYLLFGFTLLEALTVAVVVTFYDVYIILQAFILTTTVFFGLTVYTLQSKKDFSKFGAGILEVFFL

SEQ ID NO: 64152 - protein, 114 aa, Homo sapiens
MCVTYHNGTGYCKCPEGFLGEYCQHRDPCEKNRCQNGGTCVAQAMLGKATCRCASGFTGEDCQYSTSHPCFVSRPCLNGGTCHMLSRDTYECTCQVGFTGKECQWTDACLSHPC

SEQ ID NO: 64153 - protein, 75 aa, Homo sapiens
MTKKTRDLRRQLRKAVMDHVSDSFLETNVPLLVLIEAAKNGNEKEVKEYAQVFREHANKLIEVANLACSISNNEE

SEQ ID NO: 64154 - protein, 88 aa, Homo sapiens
MTLTERLREKISRAFYNHGLLCASYPIPIILFTGFCILACCYPLLKLPLPGTGPVEFTTPVKDYSPPPVDSDRKQGEPTEQPEWVGTR

SEQ ID NO: 64155 - protein, 152 aa, Homo sapiens
MGVGCFKDDRIVFWTWMFSTYFMEKWAPRQDDMLFYVRRKLAYSGSESGADGRKAAEPEVEVEVYRRDSKKLPGLGDPDIDWEESVCLNLILQKLDYMVTCAVCTRADGGDIHIHKKKSQQVFASPSKHPMDSKGEESKISYPNIFFMIDSF

SEQ ID NO: 64156 - protein, 78 aa, Homo sapiens
MSLGSELFRDVAIVFSQEEWQWLAPAQRDLYRDVMLETYSNLVSLGLAVSKPDVISFLEQGKEPWMVERVVSGGLCPG

SEQ ID NO: 64157 - protein, 54 aa, Homo sapiens
KDCMKKVVAVHLHQTVQVDDELEIKAYYAGHVLGAAMFQIKVGSESVVYTSCLD

SEQ ID NO: 64158 - protein, 139 aa, Homo sapiens
MFTLPQKDFRAPTTCLGPTCMQDLGSSHGEDLEGECSRKLDQKLPELRGVGDPAMISSDTSYLSSRGRMIKWFWDSAEEGYRTYHMDEYDEDKNPSGIINLGTSENKLCFDLLSWRLSQRDMQRVEPSLLQYADWRGHL

SEQ ID NO: 64159 - protein, 165 aa, Homo sapiens
MIISHFPKCVAVFALLALSVGALDTFIAAVYEHAVILPNRTETPVSKEEALLLMNKNIDVLEKAVKLAAKQVLPFYTCKGDLQFGQRVFGIHDKLFCPTCFEQGAHIIVTPEDGIYGWIFTRESIYPYLEDIPDPGVNWIPCRDPWSTIFLHLKFSLISPRIQNL

SEQ ID NO: 64160 - protein, 187 aa, Homo sapiens
MATACKRSGEPQSDDIEASRMKRAAAKHLIERYYHQLTEGCGNEACTNEFCASCPTFLRMDNNAAAIKALELYKINAKLCDPHPSKKGASSAYLENSKGAPNNSCSEIKMNKKGARIDFKDVTYLTEEKVYEILELCREREDYSPLIRVIGRVFSSAEALVQSFRKVKQHTKEELKSLQAKDEDKDE

SEQ ID NO: 64161 - protein, 453 aa, Homo sapiens
MVAPGSVTSRLGSVFPFLLVLVDLQYEGAECGVNADVEKHLELGKKLLAAGQLADALSQFHAAVDGDPDNYIAYYRRATVFLAMGKSKAALPDLTKVIQLKMDFTAARLQRGHLLLKQGKLDEAEDDFKKVVCVWDAELRELRAECFIKEGEPRKAISDLKAASKLKNDNTEAFYKISTLYYQLGDHELSLSEVRECLKLDQDHKRCFAHYKQVKKLNKLIESAEELIRDGRYTDATSKYESVMKTEPSIAEYTVRSKERICHCFSKDEKPVEAIRVCSEVLQMEPDNVNALKDRAEAYLIEEMYDEAIQDYETAQEHNENDQQIREGLEKAQRLLKQSQKRDYYKILGVKRNAKKQEIIKAYRKLALQWHPDNFQNEEEKKKAEKKFIDIAAAKEVLSDPEMRKKFDDGEDPLDAESQQGGGGNPFHRSWNSWQGFNPFSSGGPFRFKFHFN

SEQ ID NO: 64162 - protein, 91 aa, Homo sapiens
  MOD_RES (1)..(1): Any amino acid
XRAMALFFVLCWIQGYSQQKSLNNAAFASGSNEREEHLAKIFDHLSEEKNFKESCLFDRDLREQLTTIDKETLQGAAKPDLLWQTRHIIFL

SEQ ID NO: 64163 - protein, 141 aa, Homo sapiens
MHMMVSKPEQWVKPMAVAGANQYTFHLEATENPGALIKDIRENGMKVGLAIKPGTSVEYLAPWANQIDMALVMTVEPGFGGQKFMEDMMPKVHWLRTQFPSLDIEVDGGVGPDTVHKCAEPFGRSLSFTALEVRNFSKIRN

SEQ ID NO: 64164 - protein, 68 aa, Homo sapiens
MKLKEVDRTAMQAWSPAQNHPIYLATGTSAQQLDATFSTNASLEIFELDLSDPSLDMKSCATFSSSHS

SEQ ID NO: 64165 - protein, 14 aa, Homo sapiens
MQKSEGSGGTQLKN

SEQ ID NO: 64166 - protein, 459 aa, Homo sapiens
MVEADHPGKLFIGGLNRETNEKMLKAVFGKHGPISEVLLIKDRTSKSRGFAFITFENPADAKNAAKDMNGTSLHGKAIKVEQAKKPSFQSGGRRRPPASSRNRSPSGSLRSARGSSGGTRGWLPSHEGHLDDGGYTPDLKMSYSRGLIPVKRGPSSRSGGPPPKKSAPSAVARSNSWMGSQGPMSQRRENYGVPPRRATISSWRNDRMSTRHDGYATNDGNHPSCQETRDYAPPSRGYAYRDNGHSNRDEHSSRGYRNHRSSRETRDYAPPSRGHAYRDYGHSRRDESYSRGYRNHRSSRETREYAPPSRGHGYRDYGHSRRHESYSRGYSYHDGYGEALGRDHSEHLSGSSYRDALQRYGTSHGAPPARGPRMSYGGSTCHAYSNTRDRYGRSWESYSSCGDFHYCDREHVCRKDQRNPPSLGRVLPDPREAYGSSSYVASIVDGGESRSEKGDSSRY

SEQ ID NO: 64167 - protein, 118 aa, Homo sapiens
MTSEEKKERPISMINEASNYNVTSDYAVHPMSPVGRTSRASKKVHNFGKRSNSIKRNPNAPVVRRGWLYKQDSTGMKLWKKRWFVLSDLCLFYYRDEKEEGILGSILLPSFQIALLTS

SEQ ID NO: 64168 - protein, 173 aa, Homo sapiens
MHPMHRSREDGQYFLKVLIPSYAAGSIIGKGGQTIVQLQKETGATIKLSKSKDFYPGTTERVCLIQGTVEALNAVHGFIAEKIREMPQNVAKTEPVSILQPQTTVNPDRIKQTLPSSPTTTKSSPSDPMTTSRANQVKIIVPNSTAGLIIGKGGATVKAVMEQSGAWVQLSQK

SEQ ID NO: 64169 - protein, 151 aa, Homo sapiens
MEAEETMECLQEFPEHHKMILDRLNEQREQDRFTDITLIVDGHHFKAHKAVLAACSKFFYKFFQEFTQEPLVEIEGVSKMAFRHLIEFTYTAKLMIQGEEEANDVWKAAEFLQMLEAIKALEVRNKENSAPLEENTTGKNEAKKRKIAETS

SEQ ID NO: 64170 - protein, 78 aa, Homo sapiens
MSYNYVVTAQKPTAVNGCVTGHFTSAEDLNLLIAKNTRLEIYVVTAEGLRPVKEVGMYGKIAVMELFRPKGEKNLENS

SEQ ID NO: 64171 - protein, 145 aa, Homo sapiens
MSSECDGGSKAVMNGLAPGSNGQDKDMDLTKICTGKGAVTLRASSSYRETPSSSPASPQETRQHESKPDEWRLSSSADANGNAQPSSLAAKGYRSVHPNLPSDKSQDATSSSAAQPEVIVVPLYLVNTDRGQEGTARPPTPLGPL

SEQ ID NO: 64172 - protein, 65 aa, Homo sapiens
MAAGLRKRGRSGSAAQAEGLCKQWLQRAWQERRLLLREPRYTLLVAACLCLAETQRLTGRPTWPR

SEQ ID NO: 64173 - protein, 53 aa, Homo sapiens
FANLFPAACTGAHERTFLAVKPDGVQRRLVGEIVRRFERKGFKLVALKLVQAA

SEQ ID NO: 64174 - protein, 232 aa, Homo sapiens
MAVALDSQIDAPLEVEGCLIMKVEKDPEWASEPILEGSDSSETFRKCFRQFCYEDVTGPHEAFSKLWELCCRWLKPEMRSKEQILELLVIEQFLTILPEKIQAWAQKQCPQSGEEAVALVVHLEKETGRLRQQVSSPVHREKHSPLGAAWEVADFQPEQVETQPRAVSREEPGSLHSGHQEQLNRKRERRPLPKNARPSPWVPALADEWNTLDQEVTTTRLPAGSQCHYRNQ

SEQ ID NO: 64175 - protein, 126 aa, Homo sapiens
MSKKKGLSAEEKRTRMMEIFSETKDVFQLKDLEKIAPKEKGITAMSVKEVLQSLVDDGMVDCERIGTSNYYWAFPSKALHARKHKLEVLESQDPGCCFHEIIKVSYYRKFWLGAVAHACNPSTLGG

SEQ ID NO: 64176 - protein, 123 aa, Homo sapiens
MAADQRPKADTLALRQRLISSSCRLFFPEDPVKIVRAQGQYMYDEQGAEYIDCISNVAHVGHCHPLVVQAAHEQNQVLNTNSRYLHDNIVDYAQRLSETLPEQLCVFYFLNSGWGNSSSKKGT

SEQ ID NO: 64177 - protein, 50 aa, Homo sapiens
MQFFGRLVNTFSGVTNLFSNPFRVKEVAVADYTSSDRVREEGQLILFQNT

SEQ ID NO: 64178 - protein, 143 aa, Homo sapiens
MDSLEEPQKKVFKARKTMRVSDRQQLEAVYKVKEELLKTDVKLLNGNHENGDLDPTSPLENMDYIKDKEEVNGIEEICFDPEGSKAEFQVKITAKGDINQKLQKVIQWLLEEKLCALQCAVFDKTLAELKTRVEKIECNKRHK

SEQ ID NO: 64179 - protein, 112 aa, Homo sapiens
MRLTQDPIQVLLIFAKEDSQSDGFWWACDRAGYRCNIARTPESALECFLDKHHEIIVIDHRQTQNFDAEAVCRSIRATNPSEHTVILAVVSRVSDDHEEASVLPLLHAGFNR

SEQ ID NO: 64180 - protein, 119 aa, Homo sapiens
MPRSPLKCPWIPSSRLGTGSACWLRLNSIKKLSTIALALGVERTRSELLPFLTDTIYDEDEVLLALAEQLGNFTGLVGGPDFAHCLLPPLENLATVEETVVRDKAVESLRQISQEHTPV

SEQ ID NO: 64181 - protein, 153 aa, Homo sapiens
WEKETTDLRIKEKLFLEAFKALGGKGPYTLQGLLGCELGPDNTSVPTAKFALNGEEFMNFDLKQGTWGGDWPEALAISQRWQQQDKAANKELTFLLFSCPHRLREHLERGRGNLEWKAPWISLRGDDTGVLLPTPGEAQDADLKDVNVIPATA

SEQ ID NO: 64182 - protein, 564 aa, Homo sapiens
MDSHSGEPALLPCGTCDMVFRSSALLATHTQRFCIGHPTQEMTFGAQASVATEPQRAAVQWLRLSLQEMRPWITEVPRVFAGPWTRSEARPQSPMSEAVGSPSERLRALFRTRARRVAEMEAQSRALQLRGEELSRRLQVVACTRGGMSRLFGLEQEIRELQAEAGRTRGALEVLGARIQELQAEPGNPLSSRREAELYSPVQKANPGTLAAEIRALREAYIRDGGRDPGVLGQIWQLQVEASALELQRSQTRRGRAGATSGELPVVEAENRRLEAEILALQMQRGRAPLGPQDLRLLGDASLQPKGRRDPPLLPPPVAPPLPPLPGFSEPQLPGTMTRNLGLDSHFLLPTSDMLGPAPYDPGAGLVIFYDFLRGLEASWIWVQLRTGLARDGRDTGRTTALPPALCLPPPPAPGPMGNCAILASRQPVPRLPPSSSVSLVCELQVWQGLAWARAPQPKAWVSLGLFDQDQRVLSGRWRLPLRALPLDPSLSLGQLNGIPQAGQAELFLRLVNARDAAVQTLAEINPASVHEYQYPPPVRAQLQLGTPQLHIPVWLVWLTASLY

SEQ ID NO: 64183 - protein, 2460 aa, Homo sapiens
MARFGDEMPARYGGGGSGAAAGVVVGSGGGRGAGGSRQGGQPGAQRMYKQSMAQRARTMALYNPIPVRQNCLTVNRSLFLFSEDNVDDTEPYFIGIFCFEAGIKIIALGFAFHKGSYLRNGWNVMDFVVVLTGILATVGTEFDLRTLRAVRVLRPLKLVSGIPSLQVVLKSIMKAMIPLLQIGLLLFFAILIFAIIGLEFYMGKFHTTCFEEGTDDIQGESPAPCGTEEPARTCPNGTKCQPYWEGPNNGITQFDNILFAVLTVFQCITMEGWTDLLYNSNDASGNTWNWLYFIPLIIIGSFFMLNLVLGVLSGEFAKERERVENRRAFLKLRRQQQIERELNGYMEWISKAEEVILAEDETDGEQRHPFDGALRRTTIKKSKTDLLNPEEAEDQLADIASVGSPFARASIKSAKLENSTFFHKKERRMRFYIRRMVKTQAFYWTVLSLVALNTLCVAIVHYNQPEWLSDFLYYAEFIFLGLFMSEMFIKMYGLGTRPYFHSSFNCFDCGVIIGSIFEVIWAVIKPGTSFGISVLRALRLLRIFKVTKYWASLRNLVVSLLNSMKSIISLLFLLFLFIVVFALLGMQLFGGQFNFDEGTPPTNFDTFPAAIMTVFQILTGEDWNEVMYDGIKSQGGVQGGMVFSIYFIVLTLFGNYTLLNVFLAIAVDNLANAQELTKDEQEEEEAANQKLALQKAKEVAEVSPLSAANMSIAVKEQQKNQKPAKSVWEQRTSEMRKQNLLASREALYNEMDPDERWKAAYTRHLRPDMKTHLDRPLVVDPQENRNNNTNKSRAAEPTVDQRLGQQRAEDFLRKQARYHDRARDPSGSAGLDARRPWAGSQEAELSREGPYGRESDHHAREGSLEQPGFWEGEAERGKAGDPHRRHVHRQGGSRESRSGSPRTGADGEHRRHRAHRRPGEEGPEDKAERRARHREGSRPARGGEGEGEGPDGGERRRRHRHGAPATYEGDARREDKERRHRRRKENQGSGVPVSGPNLSTTRPIQQDLGRQDPPLAEDIDNMKNNKLATAESAAPHGSLGHAGLPQSPAKMGNSTDPGPMLAIPAMATNPQNAASRRTPNNPGNPSNPGPPKTPENSLIVTNPSGTQTNSAKTARKPDHTTVDIPPACPPPLNHTVVQVNKNANPDPLPKKEEEKKEEEEDDRGEDGPKPMPPYSSMFILSTTNPLRRLCHYILNLRYFEMCILMVIAMSSIALAAEDPVQPNAPRNNVLRYFDYVFTGVFTFEMVIKMIDLGLVLHQGAYFRDLWNILDFIVVSGALVAFAFTGNSKGKDINTIKSLRVLRVLRPLKTIKRLPKLKAVFDCVVNSLKNVFNILIVYMLFMFIFAVVAVQLFKGKFFHCTDESKEFEKDCRGKYLLYEKNEVKARDREWKKYEFHYDNVLWALLTLFTVSTGEGWPQVLKHSVDATFENQGPSPGYRMEMSIFYVVYFVVFPFFFVNIFVALIIITFQEQGDKMMEEYSLEKNERACIDFAISAKPLTRHMPQNKQSFQYRMWQFVVSPPFEYTIMAMIALNTIVLMMKFYGASVAYENALRVFNIVFTSLFSLECVLKVMAFGILNYFRDAWNIFDFVTVLGSITDILVTEFGNNFINLSFLRLFRAARLIKLLRQGYTIRILLWTFVQSFKALPYVCLLIAMLFFIYAIIGMQVFGNIGIDVEDEDSDEDEFQITEHNNFRTFFQALMLLFRSATGEAWHNIMLSCLSGKPCDKNSGILTRECGNEFAYFYFVSFIFLCSFLMLNLFVAVIMDNFEYLTRDSSILGPHHLDEYVRVWAEYDPAACGRIHYKDMYSLLRVISPPLGLGKKCPHRVACKRLLRMDLPVADDNTVHFNSTLMALIRTALDIKIAKGGADKQQMDAELRKEMMAIWPNLSQKTLDLLVTPHKSTDLTVGKIYAAMMIMEYYRQSKAKKLQAMREEQDRTPLMFQRMEPPSPTQEGGPGQNALPSTQLDPGGALMAHESGLKESPSWVTQRAQEMFQKTGTWSPEQGPPTDMPNSQPNSQSVEMREMGRDGYSDSEHYLPMEGQGRAASMPRLPAENQRRRGRPRGNNLSTISDTSPMKRSASVLGPKARRLDDYSLERVPPEENQRHHQRRRDRSHRASERSLGRYTDVDTGLGTDLSMTTQSGDLPSKERDQERGRPKDRKHRQHHHHHHHHHHPPPPDKDRYAQERPDHGRARARDQRWSRSPSEGREHMAHRQGSSSVSGSPAPSTSGTSTPRRGRRQLPQTPSTPRPHVSYSPVIRKAGGSGPPQQQQQQQQQQQQQAVARPGRAATSGPRRYPGPTAEPLAGDRPPTGGHSSGRSPRMERRVPGPARSESPRACRHGGARWPASGPHVSEGPPGPRHHGYYRGSDYDEADGPGSGGGEEAMAGAYDAPPPVRHASSGATGRSPRTPRASGPACASPSRHGRRLPNGYYPAHGLARPRGPGSRKGLHEPYSESDDDWC

SEQ ID NO: 64184 - protein, 252 aa, Homo sapiens
MSASSWPQNGMPPSSLYERLSQRMLDISGDRGVLKDVIREGAGDLVAPDASVLVKYSGYLEHMDRPFDSNYFRKTPRLMKLGEDITLWGMELGLLSMRRGELARFLFKPNYAYGTLGCPPLIPPNTTVLFEIELLDFLDCAESDKFCALSAALLLLRRRSAPPEEQHLVEAAKLPVLLNLSFTYLKLDRPTIALCYGEQALIIDQKNAKALFRCGQACLLLTEYQKARDFLVRAQKEQPFNHDINNELKKLA

SEQ ID NO: 64185 - protein, 180 aa, Homo sapiens
MSQEGAVPASAVPLEELSSWPEELCRRELPSVLPRLLSLSQHSDSWIEHIQILKIIVEMFLPHMNHLTLEQTFFSQVLPKTVKLFDDMMYELTSQARGLSSQNLEIQTTLRNILQTMVQLLGALTGCVQHICATQESIILENIQSLPSSVLHIIKSTFVHCKFQTFSRLFSRRPILFKSS

SEQ ID NO: 64186 - protein, 233 aa, Homo sapiens
MGDLWLFLLLPLSAFHGVKGCLECDPKFIEDVGSLLGNLIPSEVPGRTQLLERQIKEMIHLSFKVSHSDKRLRVLAVQQVVKLRTWLKNEFYKLGNETWKGVFIYQGKLLDVCQNLESKLKELLKNFSEIVVVEGPILDCWTCLRMTNRCFKGEYCGDEDPRKAENREIALFLILLATAVILGSAVLLFHFCIFHRRKMKAIRRSLKEYVEKKLEELMGKIDEKEEKDFRLRK

SEQ ID NO: 64187 - protein, 122 aa, Homo sapiens
MSLNPTSVARQRLREDHSQLQAECERLRGLLRAMERGGTVPADLEAAAASLPSSKEVAELKKQVESAELKNQRLKEVFQTKIQEFRKACYTLTGYQIDITTENQYRLTSLYAEHPGDCLIFK

SEQ ID NO: 64188 - protein, 79 aa, Homo sapiens
VFSSLLLFGFAEQKQLLEVELYADYRENSYVPTTGAIIEIHSKRIQLYGAYLRIHAHFTGLSSEPAGGALRQRPTCSSS

SEQ ID NO: 64189 - protein, 319 aa, Homo sapiens
MGPLTFMDVAIEFSLEEWQCLDTAQRNVYRHVMLENYRNLVFLDLITCLEQGKEPWNMKRHEMVVAKHSALCSRFAQDLWLEQNIKDSFQKVTLSRYGKYGHKNLQLRKGCKSVDECKGHQGGFNGLNQCLKITTSKIFQCNKYVKVMHKFSNSNRHKIRHTENKHFRCKECDKSLCMLSRLTQHKKIHTRENFYKCEECGKTFNWSTNLSKPKKIHTGEKPYKCEVCGKAFHQSSILTKHKIIRTGEKPYKCAHCGKAFKQSSHLTRHKIIHTEEKPYKCEQCGKVFKQSPTLTKHQIIYTGEEPYKCEECGKAFNLS

SEQ ID NO: 64190 - protein, 135 aa, Homo sapiens
  MOD_RES (1)..(1): Any amino acid
XATLQQLEPVTGQVSVLVMCHTRELAFQISKEYERFSKYMPNVKVAVFFGGLSIKKDEEVLKKNCPHIVVGTPGRILALARNKSLNLKHIKHFILDECDKMLEQLDMRRDVQEIFRMTPHEKQVMMFSATLSKEI

SEQ ID NO: 64191 - protein, 117 aa, Homo sapiens
QGNCLTINSDEHSIGRNSGIFWALLQSSLFFGNLYIYFAWQGKTQISESDRRTVFIALTVISLVGTVLFFLIRKPDSENVLGEDESSDDQDMEVNEHWVFYKLKACGNPASSLPRTI

SEQ ID NO: 64192 - protein, 226 aa, Homo sapiens
  MOD_RES (1)..(1): Any amino acid
XGSWEPVQCHAGTGHCWCVDEKGGFIPGSLTARSLQIPQCPTTCEKSRTSGLLSSWKQARSQENPSPKDLFVPACLETGEYARLQASGAGTWCVDPASGEELRPGSSSSAQSCRAEDGGFSPVQCDQAQGSCWCVMDSGEEVPGTRVTGGQPACESPRCPLPFNASEVVGGTILCETISGPTGSAMQQCQLLCRQGSWSVFPPGPLICSLESGRWESQLPQPRACQ

SEQ ID NO: 64193 - protein, 139 aa, Homo sapiens
MDEETRHSLECIQANQIFPRKQLIREDENLQVPFLELHGESTEFVGRAEDAIIALSNYRLHIKFKESLVNVPLQLIESVECRDIFQLHLTCKDCKVIRCQFSTFEQCQEWLKRLNNAIRPPAKIEDLFSFAYHAWCMEV

SEQ ID NO: 64194 - protein, 167 aa, Homo sapiens
MSVACSMFCTEWMWRQYPSSATHSTAEYALPLQLVNNQTMTTWMEIFRTIIDRTVPPETLHIDEDDRPELVWWKCKKWALHIVARLFERYGSPGNVTKEYFEFSEFFLKTYAVGIQQVLLKILDQYRQKEYVAPRVLQQAFNYLNQGVVHSITWKQMKPHIQNISED

SEQ ID NO: 64195 - protein, 124 aa, Homo sapiens
MGSKDHAVFFREMTQLILNEMPKAGYSSILNDFVESNFFVIDGDSLLVTCLGVKSFKWGQNLHFFYLVECYLVDLLSNGGQFTIVFFKDAEYAYFDFPELLSLRTALILHLQHNTNIDVQTEFS

SEQ ID NO: 64196 - protein, 247 aa, Homo sapiens
MAPKSGQEVKETEEEALLSPTEQESVSGHLGPPAGAPAAPETPTCLPDTTPHPTPVVCSADPQLALESLDPRTLRLLWRQRELEIQALRWAIQNGEDARLCHILEEVAGLPPKRSSHSQEKLLQNQVQKLIQELKEQKERAQWEKEHLEERLLQTTRTLQEMEAELQNLQKSCLLQLARSSWVGRMLRSQTGSVEVVTAETLMDPSDLSENIQAPTGEGFRLEDVDWNSVARRYPNLFTNMEPSSKQ

SEQ ID NO: 64197 - protein, 78 aa, Homo sapiens
MAENGKNCDQRRVAMNKEHHNGNFTDPSSVNEKKRREREERQNIVLWRQPLITLQYFSLEILVILKEWTSKLWHRQSI

SEQ ID NO: 64198 - protein, 473 aa, Homo sapiens
MVRHSSSPYVVYPSDKPFLNSDLRRSPSKPTLAYPESNSRAIFSALKNLQDKIRRLELERIQAEESVKTLSRETIEYKKVLDEQIQERENSKNEESKHNQELTSQLLAAENKCNLLEKQLEYMRNMIKHAEMERTSVLEKQVSLERERQHDQTHVQSQLEKLDLLEQEYNKLTTMQALAEKKMQELEAKLHEEEQERKRMQAKAAELQTGLETNRLIFEDKATPCVPNARRIKKKKSKPPEKKSSRNYFGAQPHYRLCLGDMPFVAGKSTSPSHAVVANVQLVLHLMKQHSKALCNDRVINSIPLAKQVSSRGGKSKKLSVTPPSSNGINEELSEVLQTLQDEFGQMSFDHQQLAKLIQESPTVELKDKLECELEALVGRMEAKANQITKVRKYQAQLEKQKLEKQKKELKATKKTLDEERNSSSRSGITGTTNKKDFMKLRPGEKRRKNLQLLKDMQSIQNSLQSSSLCWDY

SEQ ID NO: 64199 - protein, 574 aa, Homo sapiens
MENQLAKSTEERTFQYQDSLPSLPVPSLEESLKKYLESVKPFANQEEYKKTEEIVQKFQSGIGEKLHQKLLERAKGKRNWLEEWWLNVAYLDVRIPSQLNVNFAGPAAHFEHYWPPKEGTQLERGSITLWHNLNYWQLLRKEKVPVHKVGNTPLDMNQFRMLFSTCKVPGITRDSIMNYFRTESEGRSPNHIVVLCRGRAFVFDVIHEGCLVTPPELLRQLTYIHKKCHSEPDGPGIAALTSEERTRWAKAREYLIGLDPENLALLEKIQSSLLVYSMEDSSPHVTPEDYSEIIAAILIGDPTVRWGDKSYNLISFSNGVFGCNCDHAPFDAMIMVNISYYVDEKIFQNEGRWKGSEKVRDIPLPEELIFIVDEKVLNDINQAKAQYLREASDLQIAAYAFTSFGKKLTKNKMLHPDTFIQLALQLAYYRLHGHPGCCYETAMTRHFYHGRTETMRSCTVEAVRWCQSMQDPSVNLRERQQKMLQAFAKHNKMMKDCSAGKGFDRHLLGLLLIAKEEGLPVPELFTDPLFSKSGGGGNFVLSTSLVGYLRVQGVVVPMVHNGYGFFYHIRDDRC

SEQ ID NO: 64200 - protein, 45 aa, Homo sapiens
MNRTKGDEEEYWNSSKFKAFTFDDEDDELSQLKESKRAVNSLRDF

SEQ ID NO: 64201 - protein, 645 aa, Homo sapiens
MTDTVFSNSSNRWMYPSDRPLQSNDKEQRLVDRLENMRKNVAGDGVNRCILCGEQLGMLGSACVVCEDCKKNVCTKCGVETNNRLHSVWLCKICIEQREVWKRSGAWFFKGFPKQVLPQPMPIKKTKPQQPVSEPAAPEQPAPEPKHPARAPARGDSEDRRGPGQKTGPDPASAPGRGNYGPPVRRASEARMSSSSRDSESWDHSGGAGDSSRSPAGLRRANSVQASRPAPGSVQSPAPPQPGQPGTPGGSRPGPGPAGRFPDQKPEVAPSDPGTTAPPREERTGGVGGYPAVGAREDRMSHPSGPYSQASAAAPQPAAARQPPPPEEEEEEANSYDSDEATTLGALEFSLLYDQDNSSLQCTIIKAKGLKPMDSNGLADPYVKLHLLPGASKSNKLRTKTLRNTRNPIWNETLVYHGITDEDMQRKTLRISVCDEDKFGHNEFIGETRFSLKKLKPNQRKNFNICLERVIPMKRAGTTGSARGMALYEEEQVERVGDIEERGKILVSLMYSTQQGGLIVGIIRCVHLAAMDANGYSDPFVKLWLKPDMGKKAKHKTQIKKKTLNPEFNEEFFYDIKHSDLAKKSLDISVWDYDIGKSNDYIGGCQLGISAKGERLKHWYECLKNKDKKIERWHQLQNENHVSSD

SEQ ID NO: 64202 - protein, 252 aa, Homo sapiens
MSFICGLQSAARNHVFFRFNSLSNWRKCNTLASTSRGCHQVQVNHIVNKYQGLGVNQCDRWSFLPGNFHFYSTFNNKRTGGLSSTKSKEIWRITSKCTVWNDAFSRQLLIKEVTAVPSLSVLHPLSPASIRAIRNFHTSPRFQAAPVPLLLMILKPVQKLFAIIVGRGIRKWWQALPPNKKEVVKENIRKNKWKLFLGLSSFGLLFVVFYFTHLEVSPITGRSKLLLLGKEQFRLLSELEYEAWMEEFKNDM

SEQ ID NO: 64203 - protein, 168 aa, Homo sapiens
MWCIVLFSLLAWVYAEPTMYGEILSPNYPQAYPSEVEKSWDIEVPEGYGIHLYFTHLDIELSENCAYDSVQIISGDTEEGRLCGQRSSNNPHSPIVEEFQVPYNKLQVIFKSDFSNEERFTGFAAYYVATDINECTDFVDVPCSHFCNNFIGGYFCSCPPEYFLHDDM

SEQ ID NO: 64204 - protein, 140 aa, Homo sapiens
MSDPITLNVGGKLYTTSLATLTSFPDSMLGAMFSGKMPTKRDSQGNCFIDRDGKVFRYILNFLRTSHLDLPEDFQEMGLLRREADFYQVQPLIEALQEKEVELSKAEKNAMLNITLNQRVQTVHFTVREAPQIYSLSSSS

SEQ ID NO: 64205 - protein, 113 aa, Homo sapiens
MAAGERSWCLCKLLRFFYSLFFPGLIVCGTLCVCLVIVLWGIRLLLQRKKKLVSTSKNGKNQMVIAFFHPYCNAGGGGERVLWCALRALQKKSCGVYGSWHNYPCTQFGGPKA

SEQ ID NO: 64206 - protein, 345 aa, Homo sapiens
MAAHRKHDQDPHDQPKRRRIRKHKSKKKFKNPNNVLIEQAELEKQQSLLQEKSQRQHTDGTTISKNKKRKLKKKQQIKRKKAAGLAAKAAGVSFMYQPEDSSNEGEGVGEACEEDGVDTSEEDPTLAGEEDVKDTREEDGADASEEDLTRARQEEGADASEEDPTPAGEEDVKDAREEDGVDTIEEDLTRAGEEDGKDTREEDGADASEEDPTWAGEEEGADSGEEDGADASEEDDTITNEKAHSILNFLKSTQEMYFYDGVSRDAASAALADAAEELLDRLASHSMLPSDVSILYHMKTLLLLQDTERLKHALEMFPEHCTMPPGVLSRLKAKKIRRGKREGLP

SEQ ID NO: 64207 - protein, 148 aa, Homo sapiens
MAKRSAAAAVPGMPSASLLVNLLSALLILFVFGETEIRFTGQTEFVVNETSTTVIRLIIERIGEPANVTAIVSLYGEDAGDFFDTYAAAFIPAGETNRTVYIAVCDDDLPEPDETFIFHLTLQLPSIAVSEPKGRNESMPLTLIREKG

SEQ ID NO: 64208 - protein, 79 aa, Homo sapiens
MALNSGSPPAIGPYYENHGYQPENPYPAQPTVVPTVYEVHPAQYYPSPVPQYAPRVLTQASNPVVCTQPKSPSGTVCTS

SEQ ID NO: 64209 - protein, 293 aa, Homo sapiens
  MOD_RES (1)..(1): Any amino acid
XVSTQNMKMGGLPRTTPPTQKPPSPPMSGKGTLGRHSPYRTLEPVRPPVVPNDYVPSPTRNMAPSQQSPVRTASVNQRNRTYSSSGSSGGSHPSSRSSSRENSGSGSVGVPIAVPTPSPPSVFPGHPVQFYSMNRPASRHTPPTIGGSLPYRRPPSITSQTSLQNQMNGGPFYSQNPVSDTPPPPPPVEEPVFDESPPPPPPPEDYEEEEAAVVEYSDPYAEEDPPWAPRSYLEKVVAIYDYTKDKEDELSFQEGAIIYVIKKNDDGWYEGVMNGVTGLFPGNYVESIMHYSE

SEQ ID NO: 64210 - protein, 140 aa, Homo sapiens
MAASCVLLHTGQKMPLIGLGTWKSEPGQVKAAVKYALSVGYRHIDCAAIYGNEPEIGEALKEDVGPGKAVPREELFVTSKLWNTKHHPEDVEPALRKTLADLQLEYLDLYLMHWPYAFEWGCLSLRRGDNPFPKNADGTI

SEQ ID NO: 64211 - protein, 81 aa, Homo sapiens
MLHCRLTSGFEGRVLSLAKVKKTGKRKSLPLLRPSLCFRRIKDKSPLQSKKTCRIRERSLGGRLRPPTMARVTPSQLASMP

SEQ ID NO: 64212 - protein, 145 aa, Homo sapiens
MSGIGNKRAAGEPGTSMPPEKKAAVEDSGTTVETIKLGGVSSTEELDIRTLQTKNRKLAEMLDQRQAIEDELREHIEKLERRQATDDASLLIVNRYWSQFDENIRIILKRYDLEQGLGDLLTERKALVVPEPEPDSDSNQERKDD

SEQ ID NO: 64213 - protein, 159 aa, Homo sapiens
MEPNSLRTKVPAFLSDLGKATLRGIRKCPRCGTYNGTRGLSCKNKTCGTIFRYGARKQPSVEAVKIITGSDLQVYSVRQRDRGPDYRCFVELGVSETTIQTVDGTIITQLSSGRCYVPSCLKAATQGVVENQCQHIKLAVNCQAEATPLTLKSSVLNAM

SEQ ID NO: 64214 - protein, 109 aa, Homo sapiens
MFLLMMGVLFCCGAGFFIRRRMYPPPLIEEPAFNVSYTRQPPNPGPGAQQPGPPYYTDPGGPGMNPVGNSMAMAFQVPPNSPQGSVACPPPPAYCNTPPPPYEQVVKAK

SEQ ID NO: 64215 - protein, 293 aa, Homo sapiens
MTQQPLRGVTSLRFNQDQSCFCCAMETGVRIYNVEPLMEKGHLDHEQVGSMGLVEMLHRSNLLALVGGGSSPKFSEISGLCDLCPSLEKQLLVFPGHKCGSLQLVDLASTKPGTSSAPFTINAHQSDIACVSLNQPGTVVASASQKGTLIRLFDTQSKEKLVELRRGTDPATLYCINFSHDSSFLCASSDKGTVHIFALKDTRLNRRSALARVGKVGPMIGQYVDSQWSLASFTVPAESACICAFGRNTSKNVNSVIAICVDGTFHKYVFTPDGNCNREAFDVYLDICDDDDF

SEQ ID NO: 64216 - protein, 124 aa, Homo sapiens
MQRRSRGINTGLILLLSQIFHVGINNIPPVTLATLALNIWFFLNPQKPLYSSCLSVEKCYQQKDWQRLLLSPLHHADDWHLYFNMASMLWKGINLERRLGSRWFAYVITAFSVLTGVVYLLLQF

SEQ ID NO: 64217 - protein, 84 aa, Homo sapiens
MRTLFNLLWLALACSPVHTTLSKSDAKKAASKTLLEKSQFSDKPVQDRGLVVTDLKAESVVLEHRSYCSAKARDRHFAGDVLGY

SEQ ID NO: 64218 - protein, 106 aa, Homo sapiens
MGRCCFYTAGTLSLLLLVTSVTLLVARVFQKAVDQSIEKKIVLRNGTEAFDSWEKPPLPVYTQFYFFNVTNPEEILRGETPRVEEVGPYTYRDKVLLCCSCWNAVA

SEQ ID NO: 64219 - protein, 167 aa, Homo sapiens
MATRVRTASIWVPPLQERNSSWDRIRKLQGQESILGQGTPGLQPLPGTPRQKQKSRRIEKVLEWLFISQEQPKITKSWGTNTPNLISSSSWNKEKSCVWCRPKFQIRPVQTQSGKLMILWIGIRKIKTSWEVRQKALNALHLENYVFLVQSIFQDKNLINVARMERV

SEQ ID NO: 64220 - protein, 93 aa, Homo sapiens
MAPRPPTAAPQESVTFKDVSVDFTQEEWYHVDPAQRSLYRDVMLENYSHLVSLGYQVSKPEVIFKLEQGEEPWISEGEIQRPFYPAVYFNRKE

SEQ ID NO: 64221 - protein, 104 aa, Homo sapiens
MCPKNASYYGNRAATLMMLGRFREALGDAQQSVRLDDSFVRGHLREGKCHLSLGNAMAACRSFQRALELDHKNAQAQQEFKNANAVMEYEKIAETDFEKRDFRK

SEQ ID NO: 64222 - protein, 247 aa, Homo sapiens
MESWTPRPSAVASGMSWEAGGIRTTSRPEAGVCSLALPSDLQLDRRGAEGPEAERLRAARVQEQVRARLLQLGQQPRHNGAAEPEPEAETARGTSRGQYHTLQAGFSSRSQGLSGDKTSGFRPIAKPAYSPASWSSRSAVDLSCSRRLSSAHNGGSAFGAAGYGGAQPTPPMPTRPVSFHERGGVGSRADYDTLSLRSLRLGPGGLDDRYSLVSEQLEPAATSTYRAFAYERQASSSSSRAGGLDWP

SEQ ID NO: 64223 - protein, 122 aa, Homo sapiens
  MOD_RES (1)..(1): Any amino acid
XLRWHSLIAKYNLSHLTISTMIGCDRLIRIFCLHPGLLVGVWKKEEELAFVMANLHFHHLVERSTLGSATIPYELPPHSPFLDDSPEYGLHGYQLHVDLHSGGVFYLCGTFRNLFTKRGEID

SEQ ID NO: 64224 - protein, 265 aa, Homo sapiens
  MOD_RES (1)..(1): Any amino acid
XRKGLQPTALDLALQYVNARLRDLYPDEQDLFDIVLMTNNHAQVGVRLINSVNHYGLLIDRFCLTGGKDPIGYLKAYLTNLYIAADSEKVQEAIQEGIASATMFDGAKDMAYCDTQLRVAFDGDAVLFSDESEHFTKEHGLDKFFQYDTLCESKPLAQGPLKGFLEDLGRLQKKFYAKNERLLCPIRTYLVTARSAASSGARVLKTLRRWGLEIDEALFLAGAPKSPILVKIRPHIFFDDHMFHIEGAQRLGSIAAYGFNKKFSS

SEQ ID NO: 64225 - protein, 67 aa, Homo sapiens
MNVALQELGAGSNVGFQKGTRQLLGSRTQLELVLAGASLLLAALLLGCLVALGVQYHREFASSRQTD

SEQ ID NO: 64226 - protein, 51 aa, Homo sapiens
MNTSPGTVGSDPVILATAGYDHTVRFWQAHSGICTRTVQHQDSQVNALEVT

SEQ ID NO: 64227 - protein, 102 aa, Homo sapiens
MRLLAWLIFLANWGGARAEPGKFWHIADLHLDPDYKVSKDPFQVCPSAGSQPVPDAGPWGDYLCDSPWALINSSIYAMKEIEPEPDFILWTGAVPSFSSAAS

SEQ ID NO: 64228 - protein, 77 aa, Homo sapiens
  MOD_RES (1)..(1): Any amino acid
XILYYVYMGLLAVFCTNAINILAGINGLEAGQSLVISASIIVFNLVELEGDCRDDHVFSLYFMIPFFFTTLGLLYHN

SEQ ID NO: 64229 - protein, 406 aa, Homo sapiens
MGECYSLQQAQAFYTFPFQQLMAEAPNMAVVNEQQMPEEVPAPAPAQEPVQEAPKGRKRKPRTTEPKQPVEPKKPVESKKSGKSAKSKEKQEKITDTFKVKRKVDRFNGVSEAELLTKTLPDILTFNLDIVIIGINPGLMAAYKGHHYPGPGNHFWKCLFMSGLSEVQLNHMDDHTLPGKYGIGFTNMVERTTPGSKDLSSKEFREGGRILVQKLQKYQPRIAVFNGKCIYEIFSKEVFGVKVKNLEFGLQPHKIPDTETLCYVMPSSSARCAQFPRAQDKVHYYIKLKDLRDQLKGIERNMDVQEVQYTFDLQLAQEDAKKMAVKEEKYDPGYEAAYGGAYGENPCSSEPCGFSSNGLIESVELRGESAFSGIPNGQWMTQSFTDQIPSFSNHCGTQEQEEESHA

SEQ ID NO: 64230 - protein, 229 aa, Homo sapiens
MKSRRPKSSLPPVLGTESDATVKKKPAPKTPPKAAMPPQIIQFPEDQKVRAGESVELFGKVTGTQPITCTWMKFRKQIQESEHMKVENSENGSKLTILAARQEHCGCYTLLVENKLGSRQAQVNLTVVDKPDPPAGTPCASDIRSSSLTLSWYGSSYDGGSAVQSYSIEIWDSANKTWKELATCRSTSFNVQDLLPDHEYKFRVRAINVYGTSEPSQESELTTVGEKPE

SEQ ID NO: 64231 - protein, 200 aa, Homo sapiens
  MOD_RES (1)..(1): Any amino acid
XENNKNSLESSLRQLKCHFTWNLMEGENSLDDFEDKVFYRTEFQNREFKATMCNLLAYLKHLKGQNEAALECLRKAEELIQQEHADQAEIRSLVTWGNYAWVYYHMGRLSDVQIYVDKAIHHFIEGVKINQKSREKEKMKDKLQKIAKMRLSKNGADSEALHVLAFLQELNEKMQQADEDSERGLESGSLIPSASSWNGE

SEQ ID NO: 64232 - protein, 118 aa, Homo sapiens
MFLQDRHDGSSNGNPRVPHLSSAGQHLYSPAPPLSHTGVAEYQPPPYFPPPYQQLAYSQSADPYSHLGEAYAAAINPLHQPAPTGSQQQAWPGRQSQEGAGLPSHHGRPAGLLPHLSG

SEQ ID NO: 64233 - protein, 225 aa, Homo sapiens
  MOD_RES (1)..(1): Any amino acid
XRHLAPNPTYPHLYPPYLIRGYPDTAALENRQTIINDYITSQQMHHNAATAMAQRADMLRGLSPRESSLALNYAAGPRGTPATAMDRLAYLPTAPQPFSSRHSSSPLSPGGPTHLTKPTTTSSSERERDRDRERDRDREREKSILTSTTTVEHAPIWRPGTEQSSGSSGGGGGSSSRPASHSHAHQHSPISPRTQDALQQRPSVLHNTGMKGIITAVEPSTPTVL

SEQ ID NO: 64234 - protein, 193 aa, Homo sapiens
MAAEADGPLKRLLVPILLPEKCYDQLFVQWDLLHVPCLKILLSKGLGLGIVAGSLLVKLPQVFKILGAKSAEGLSLQSVMLELVALTGTMVYSITNNFPFSSWGEALFLMLQTITICFLVMHYRGQTVKGVAFLACYGLVLLVLLSPLTPLTVVTLLQASNVPAVVVGRAATNYHNGHTGQLSAITVFLLFGG

SEQ ID NO: 64235 - protein, 244 aa, Homo sapiens
  MOD_RES (1)..(1): Any amino acid
XPTTQKLRNDLLNIIREKNLAHPVIQNFSYETFQQKMLRFLESHLDDAEPYLLTMAKKALKSESAASSTGKEDKQPAPGPVEKPPREPARQLRNPPTTIGMMTLKAAFKTLSGAQDSEAAFAKLDQKDLVLPTQALPASPALKNKRPRKDENESSAPADGEGGSELQPKNKRMTISRLVLEEDSQSTEPSAGLNSSQEAASAPPSKPTVLNQPLPGEKNPKYEDLLCRNFGAGWWSWLGLVLLP

SEQ ID NO: 64236 - protein, 89 aa, Homo sapiens
MAGASVNRVVSPGPLHCLKVILEKEGPRSLFRGLGPNLVGVAPSRAIYFAAYSNCKEKLNDVFDPDSTQVHMISAAMAGIYCTFLPRKE

SEQ ID NO: 64237 - protein, 820 aa, Homo sapiens
MMEGLKKRTRKAFGIRKKEKDTDSTGSPDRDGIQPSPHEPPYNSKAECAREGGKKVSKKSNGAPNGFYAEIDWERYNSPELDEEGYSIRPEEPGSTKGKHFYSSSESEEEEESHKKFNIKIKPLQSKDILKNAATVDELKASIGNIALSPSPVGAIKRNLSSEEVARPRRSTPTPELISKKPPDDTTALAPLFGPPLESAFDEQKTEVLLDQPEIWGSGQPINPSMESPKLTRPFPTGTPPPLPPKNVPATPPRTGSPLTIGPGNDQSATEVKIEKLPSINDLDSIFGPVLSPKSVAVNAEEKWVHFSDTSPEHVTPELTPREKVVSPPATPDNPADSPAPGPLGPPGPTGPPGPPGPPRNVLSPLNLEEVQKKVAEQTFIKDDYLETISSPKDFGLGQRATPPPPPPPTYRTVVSSPGPGSGPGPGTTSGASSPARPATPLVPCRSTTPPPPPPRPPSRPKLPPGKPGVGDVSRPFSPPIHSSSPPPIAPLARAESTSSISSTNSLSAATTPTVENEQPSLVWFDRGKFYLTFEGSSRGPSPLTMGAQDTLPVAAAFTETVNAYFKGADPSKCIVKITGEMVLSFPAGITRHFANNPSPAALTFRVINFSRLEHVLPNPQLLCCDNTQNDANTKEFWVNMPNLMTHLKKVSEQKPQATYYNVDMLKYQVSAQGIQSTPLNLAVNWRCEPSSTDLRIDYKYNTDAMTTAVALNNVQFLVPIDGGVTKLQAVLPPAVWNAEQQRILWKIPDISQKSENGGVGSLLARFQLSEGPSKPSPLVVQFTSEGSTLSGCDIELVGAGYRFSLIKKRFAAGKYLADN

SEQ ID NO: 64238 - protein, 29 aa, Homo sapiens
  MOD_RES (1)..(1): Any amino acid
XKDREVAEGGLPRAESPSPGLTPSRRSQF

SEQ ID NO: 64239 - protein, 791 aa, Homo sapiens
KKGYTPLHAAASNGQINVVKHLLNLGVEIDEINVYGNTALHIACYNGQDAVVNELIDYGANVNQPNNNGFTPLHFAAASTHGALCLELLVNNGADVNIQSKDGKSPLHMTAVHGRFTRSQTLIQNGGEIDCVDKDGNTPLHVAARYGHELLINTLITSGADTAKCGIHSMFPLHLAALNAHSDCCRKLLSSGQKYSIVSLFSNEHVLSAGFEIDTPDKFGRTCLHAAAAGGNVECIKLLQSSGADFHKKDKCGRTPLHYAAANCHFHCIETLVTTGANVNETDDWGRTALHYAAASDMDRNKTILGNAHDNSEELERARELKEKEATLCLEFLLQNDANPSIRDKEGYNSIHYAAAYGHRQCLELLLERTNSGFEESDSGATKSPLHLAAYNGHHQALEVLLQSLVDLDIRDEKGRTALDLAAFKGHTECVEALINQGASIFVKDNVTKRTPLHASVINGHTLCLRLLLEIADNPEAVDVKDAKGQTPLMLAVAYGHIDAVSLLLEKEANVDTVDILGCTALHRGIMTGHEECVQMLLEQEVSILCKDSRGRTPLHYAAARGHATWLSELLQMALSEEDCCFKDNQGYTPLHWACYNGNENCIEVLLEQKCFRKFIGNPFTPLHCAIINDHGNCASLLLGAIDSSIVSCRDDKGRTPLHAAAFADHVECLQLLLRHSAPVNAVDNSGKTALMMAAENGQAGAVDILVNSAQADLTVKDKDLNTPLHLACSKGHEKCALLILDKIQDESLINEKNNALQTPLHVAARNGLKVVVEELLAKGACVLAVDENGC

SEQ ID NO: 64240 - protein, 145 aa, Homo sapiens
  MOD_RES (1)..(1): Any amino acid
XDGSLINQLALLLLGRSDSLYPAPGYAAGVHSVLSSQFLALCTLKPSLVVELARDLLEFLGSVNGLCSRASLVTSVVSPPGGHRADDHADEAGLPEPRSDPQGLFIAVKDEDPGSQSSHQLHAQRGGRGSHPYPGHRAADPAEDA

SEQ ID NO: 64241 - protein, 96 aa, Homo sapiens
MRKVKKLRLDKENTGSWRSFSLNSEGAERMATTGTPTADRGDAAATDDPAARFQVQKHSWDGLRSIIHGSRKYSGLIVNKAPHDFQFVQKTDESGP

SEQ ID NO: 64242 - protein, 146 aa, Homo sapiens
MSSCSNVCGSRQAQAAAEGGYQRYGVRSYLHQFYEDCTASIWEYEDDFQIQRSPNRWSSVFWKQELGFHTSSHSQEWNRKLQHKNCPRCCFGSLSPPGEALLCRHWDWPYHPKAPGCSAEPGGGPFQSIPTLLCGPKRGCFASSEL

SEQ ID NO: 64243 - protein, 205 aa, Homo sapiens
MATARPPWMWVLCALITALLLGVTEHVLANNDVSCDHPSNTVPSGSNQDLGAGAGEDARSDDSSSRIINGSDCDMHTQPWQAALLLRPNQLYCGAVLVHPQWLLTAAHCRKKVFRVRLGHYSLSPVYESGQQMFQGVKSIPHPGYSHPGHSNDLMLIKLNRRIRPTKDVRPINVSSHCPSAGTKCLVSGWGTTKSPQVHFPKVLQ

SEQ ID NO: 64244 - protein, 513 aa, Homo sapiens
MAASEVAGVVANAPSPPESSSLCASKSDEGLPDGLSTKDSAQKQKNSPLLSTDFKTADSEVNTDQDIEKNLDKMMTERTLLKERYQEVLDKQRQVENQLQVQLKQLQQRREEEMKNHQEILKAIQDVTIKREETKKKIEKEKKEFLQKEQDLKAEIEKLCEKGRREVWEMELDRLKNQDGEINRNIMEETERAWKAEILSLESRKELLVLKLEEAEKEAELHLTYLKSTPPTLETVRSKQEWETRLNGVRIMKKNVRDQFNSHIQLVRNGAKLSSLPQIPTPTLPPPPSETDFMLQVFQPSPSLAPRMPFSIGQVTMPMVMPSADPRSLSFPILNPALSQPSQPSSPLPGSHGRNSPGLGSLVSPHGPHMPPAASIPPPPGLGGVKASAETPRPQPVDKLEKILEKLLTRFPQCNKAQMTNILQQIKTARTTMAGLTMEELIQLVAARLAEHERVAASTQAPATCKLCLMCQKLVQPSELHPMACTHVLHKECIKFWAQTNTNDTCPFCPTLK

SEQ ID NO: 64245 - protein, 52 aa, Homo sapiens
METTNGTETWYESLHAVLKALNATLHSNLLCRPGPGLGPDNQTEERRASLPG

SEQ ID NO: 64246 - protein, 54 aa, Homo sapiens
MSDSEDSNFSEEEDSERSSDGEEAEVDEERRSAAGSEKEEEPEDEEEEEEEEEY

SEQ ID NO: 64247 - protein, 111 aa, Homo sapiens
MARGGLIIFDYLLDENEDMHSLLLTDSSTLLVGGLQNHIIEIDLNTVQETQKYAVETPGVTIMRQTNRFFFCGHTSGKVSLRDLRTFKVEHEFDAFSGSLSDFDVHGNLLA

SEQ ID NO: 64248 - protein, 4284 aa, Homo sapiens
MGLLLVFPLIQSQSRTDPSLCNITAEVLLNCLRDCQPLSLTKEPADCLNGIETLLCSWLEETSDTGRHIPHKQKENAAAALVALACARGSLKTFVHTVHLLQKQTDLGSLPVADVLYRLLLLEGGPGSPSCLLGGKHIVSWGYEDMLPAPDSNTGSSSENKDADLGRCLTADGLYLYTTNSVGRGVSKLGSGLHGTLRGFVYCRNEELEPGWVAFGSGSLLHRPVSFDNKPHSLFQVIDQNTLQVCQVVPMPANHLPIGSTMSTVHLSSDGTYFYWIWSPASLNEKTPKGHSVFMDIFELVVENGVFVANPLQERTILMRKEGESAKSINEMLLSRLSRYRASPSATLAALTGSTISNTLKEDQAANTSCGLPLKMLRKTPIYTCGTYLVMLVPPPGGSGSSATRSLFGGTSGLSSLKILASSLVYNISDGQFTSRADLIDAAGSSLGRGALVPGLGACYDTVNNMLWTCSNDYIDQWCNPGNQAFHYVCQRLGVSHIITEPKEEAITTNEVINQLLHHVGAMCIHQLNLLATNPNLPITSVLGKQHPIEAHHLSSICDIMEKAMVNGDTCIIRCILVVFQVVFKFFFSPQTERNRDIIRRSGLLLWQLLMAPKDQICPEIQKEVCLAISSGLNILYPGETEINNLLKLVLTEGERNSGLSQLRDVILTNLAEQLQNNRFGSDEDDHYRLNDELLHYILKIVVRESCILITKCQTVSKDDFQKLLSTVPAASSCLRYLMAVQNHLLSNTILIKPDENDDSDSSLQGETLKVQELKVSILALATQILTGCDEVLEMLQQVTTALINSDIADREQRLKGLEQVTKATMLGHLLPVLLTSLMHPNLQTLIMADALMPQLVQLVLYTSQTALLLKTQCPVFAEVGCSPCGAPDQKCRLFPDERMLEEKEEPGFLTGLKIPAPWAAGKTVETVHPVRDNYKFKETVHIPGARCLYLRFDSRCSSQYDYDKLVIYAGPNTNSRKVAEYGGNTLGYGSRSVLGTGWPKDLVKCISPPSLNFKVEGDTVTFSFEMRSGREHNTPDKAMWGFACTVRAQESSEDVSGGLPFLVDLALGLSVLACSMLRILYNGPEITKEEEACQELLRSKLLQRCQWQVEANGVISPALTPSPSPLPLTIEEDREFTYPSDVLVPPVGNYFDLPRIRLPPGIMIKLREISGRARPQFRPSIKEVIQPDVMEEMVVSCVIKHLNLVDALQSLINFQYQEEHAEEYDLLCKIMGETFKKLNAMERQLQSVAELEQKWQSEVDDAMQGKLENNMPFFYDYHFNENKMKELELLCSMKEVSFDGNDLENMVLSLREKFLQEVNSLIQKPSHPLAKTKTLVKSLMNRAELLLHVTIAAQSGLTRSISGTPAETPACKSASETKVISHAVRQPVFLRSMSAPSDLEMIGNEDLEFTRANQRRRHVTSHRSSSFTLLQSLAIEDSRDKPTYSVLLGQLFAFIGTNPDQAVSSSSFLLAAQTRWRRGNTRKQALVHMRELLTAAVRVGGVTHLVGPVTMVLQGGPRIEELTCGGMVEQVQEAFGETMTSVVSLCARYPIACANSIGLLCTIPYTRSEEKCLVRSGLVQLMDRLCSLSNQTESSSSEKQTKKQKVATMAWAAFQVLANRCVEWEKEEGGSTEAVHSGLARQVSSLLTNHLARATECCGNQAAGNDALQDVLSLLNDLSRSHIGKAILSQPACVSKLLSLLLDQRPSPKLVLIILQLCRAALPLMSVEDCGNVELPPWSYSVPSLNSEQEDPSDPASKIASLLLAKLADYVVPGCQTVLSPTASEPDTTLTKTSPKNSLKGDKDPGEESEAVDGKLSIFIHKREDQSSHEVLQPLLSSSEGRPFRLGTGANMEKVVKMDRDMTKGGCCEVITEEAAAALRKATKWAQSGLIVSIGPPVESINPETVSGLSTGDKKKTAQTSICRERNSELARTDPVRPFISGHVANSMAAEVIALLHSLLMAPESNAAQIWTTTAEKVLSRALMYIPQLGKYAESILENGSSSGRKLAKLQRIARQAVAALCALGGFKETIKIGSEVQVLGRGISGSIGVVASINEQEGIATVRFPPIDCRKTSQASDTLTIPLSRLCVPRSEALPLHKLSITEKVVQAVQSMLLPQEGSLSIHTSLPATGDGSAPVMAVVRLLAEIRTRACLVMAQLLEDSLFCEEFIQQCPAAVEVLNLVAQECSAGERLAVVEVQCERLRMLYRDCARPPPPPLQADRRQPKEITWSPSRVFPPVRACMFSSHLTSVTFLADPSAGGGLPRGTFIYATSPLPVQAPSFYWEIEIVSYGDTDDDTGPIVSFGFTTEAEKRDGAWTNPVGTCLFHNNGRAVHYNGSSLLQWKSVRLDVTLSPGDVAGIGWERTEGTPPPPGQPAKGRVYFTYCGQRLSPYLEDVSGGMWPVVHIQKKNTKTRANFGSRPFAYAEGQAHRNAADLCTDLAEEISANFEALPFAMASDSDNDAGTSIASDPGTHGPPCRIAAVATAQQQYDSDTSCHYKVELSYENFITSGPDPHPPPIADDESDDDDDDDIPQEDHYALLVKAWETKVFPTIRRRFRNEAERKSGLDQIKGALQLGMVDIARQTVEFLYEENGGIPRDLYLPTIEDIKDEANKFTIDKVRKGLTVVTRSPDSNNVASSAVGTALPKFAIRGMLKTFGLHGVVLDVDSVNELVQVETYLRSEGVLVRYWYPIDMLERPPAGYRRTATNGLVTLDNTNLQIHRELLRCEAALARLYCRMALLNIFAPKLPHLFTRLFHIPAIRDITLEHLQLLSNQLLAPPLPDGTISSSSILLAQSLQHCIHSQNCSATDLFYQGNSQTVREWLNVAITRTLHQGEESLLELTKQICSFLQTAPEQFPSEEFPISESKVNMDVNFPGAAFVVVSCKESQSGFRKDSSLYKAPWARVLVYGLGHKVKRNGQLNLIEAACYPRDASPANTGLAPPPTADQYPSVVLSTDRVHIKLGVSPPPGAVLVLHSLPLEFPLAMAFAEQLLSWKSEDSEGKSEDEPDTIPTSVLLQVVELLGNFLWTTDMAACVKELVFHLLAELLRTVHTLEQRRHPAGLSSSIALQLNPCLAMLMALQSELHKLYDEETQNWVSGGACGGSGGAAAGDQGRFSTYFHALMEGCLAVAEVTLPTNMSVTASGVTSATAPNLSDSSSSSSSSPGQTPQSPSLLSKRKKVKMKREKASSSGKRQSSRTVDSDPTVLSIGGSKPEDMLWFHRALTLLIILRHLTRKDPQGLGVTSDAIADACQALVGPTAHSRLLVISGIPTHLDEGVVRGAIRKACNAHGGVFKDEIYIPLQEEDTKKPKDKAEGGDGKVEPEKTLAFPGTDSMEVSTSSSLTPAMSISASASTSQASICSSQGISQTVSDLSVDPLPAGLELPIPPGLLEPHAVSSQESLDISLCSTGSLGSLGSLGEPLDNAETASVSDMGSMYTVTSLDNQPLAARPIKGFAVVEIRSRAKIEKIRASLFNNNDLIGLSSLDGEDELMEMSTEEILTVSVVNQSLFDTQGSPGLEDYFNDKSIKGEKLVPGAREVLTEIFKSCAHSEQTLSLTPAKPIRVSDIYLSKEQINSQTPGNLLHLFFTNVRPPKKVLEDQLTQILRKYGVPKPKFDKSKYSKAGKEQHPVKVVSTKRPITKPPAKDKAVLNSVSRTALSEKKPTVKPKSPEKSKPDEKDPEKSPTKKQEVPEEKYLTLEGFHKFVIDRARQDIRSVWRAILSCGYDLHFERCACIDVRHAQKASRKWTLEMDVALVQYINQLCRHLAITPARLHPHEVYLDPADAADPRVACLLNVPIESLRLRFALLQSLNTTLETFFLPLVELRQTPMYTHSIAALLKEAKGLIFYDTKVTVMNRVLNATVQRTADHAAPEITLDPLEIVGGEIRASENSYFCQAARQLASVPSSQLCVKLASGGDPTYAFNIRFTGEEVHGTSGSFRHFLWQVCKELQSSSLSLLLLCPSSAVNKNKGKYILTPSPITYGEEQLLHFLGQLLGIAIRADVPLPLDLLPSFWKTLVGEPLDPEQDLQEADILTYNYVKKFESINDETELEALCAEIASQHLATESPDSPNKPCCRFTYLTMTGEEVELCSRGRHILVAWENKDIYAAAIRSLRLRELQNVECVTAVRAGLGSIIPLQLLTMLSPLEMELRTCGLPYINLEFLKAHTMYQVGLMETDQHIEFFWGALEMFTQEELCKFIKFACNQERIPFTCPCKDGGPDTAHVPPYPMKIAPPDGTAGSPDSRYIRVETCMFMIKLPQYSSLEIMLEKLRCAIHYREDPLSG

SEQ ID NO: 64249 - protein, 428 aa, Homo sapiens
MPLFFRKRKPSEEARKRLEYQMCLAKEAGADDILDISKCELSEIPFGAFATCKVLQKKVLIVHTNHLTSLLPKSCSLLSLATIKVLDLHDNQLTALPDDLGQLTALQVLNVERNQLMQLPRSIGNLTQLQTLNVKDNKLKELPDTVGELRSLRTLNISGNEIQRLPQMLAHVRTLEMLSLDASAMVYPPREVCGAGTAAILQFLCKESGLEYYPPSQYLLPILEQDGIENSRDSPDGPTDRFSREELEWQNRFSDYEKRKEQKMLEKLEFERRLELGQREHTQLLQQSSSQKDEILQTVKEEQSRLEQGLSEHQRHLNAERQRLQEQLKQTEQNISSRIQKLLQDNQRQKKSSEILKSLENERIRMEQLMSITQEETESLRRRDVASAMQQMLTESCKNRLIQMAYESQRQNLVQQACSRARLPAGTP

SEQ ID NO: 64250 - protein, 455 aa, Homo sapiens
  MOD_RES (1)..(1): Any amino acid
XHMQTQSSPFARGNVFGEPPTELQIKQQELYKNFLRFQIEEKKQREEAERERLRIAEEKEERRLAEQRARIQQEYEEEQEKKREKEEEQRLKNEEHIRLAEERQKEAERKKKEEEEKYNLQLQHYCERDNLIGEETKHMRQPSPIVPALQNKIASKLQRPPSVDSIIRSFIHESSMSRAQSPPVPARKNQLRAEEEKKNVIMELSEMRKQLRSEERRLQERLLHMDSDDEIPIRKKERNPMDIFDMARHRLQAPVRRQSPKGLDAATFQNVHDFNELKDRDSETRVDLKFMYLDPPRDHHTLEIQQQALLREQQKRLNRIKMQEGAKVDLDAIPSAKVREQRMPRDDTSDFLKNSLLESDSAFIGAYGETYPAIEDDVLPPPSQLPSARERRRNKWKGLDIDSSRPNVAPDGLSLKSISSVNVDELRVRNEERMRRLNEFHNKPINTGAFCYYVD

SEQ ID NO: 64251 - protein, 177 aa, Homo sapiens
MAAVKASTSKATRPWYSHPVYARYWQHYHQAMAWMQSHHNAYRKAVESCFNLPWYLPSALLPQSSYDNEAAYPQSFYDHHVAWQDYPCSSSHFRRSGQHPRYSSRIQASTKEDQALSKEEEMETESDAEVECDLSNMEITEELRQYFAETERHREERRRQQQLDAERLDSYVNADHD

SEQ ID NO: 64252 - protein, 209 aa, Homo sapiens
MWRLRRAAVACEVCQSLVKHSSGIKGSLPLQKLHLVSRSIYHSHHPTLKLQRPQLRTSFQQFSSLTNLPLRKLKFSPIKYGYQPRRNFWPARLATRLLKLRYLILGSAVGGGYTAKKTFDQWKDMIPDLSEYKWIVPDIVWEIDEYIDFEKIRKALPSSEDLVKLAPDFDKIVESLSLLKDFFTSGSPEETAFRATDRGSESDKHFRKL

SEQ ID NO: 64253 - protein, 190 aa, Homo sapiens
MVDKNIYIIQGEINIVVGAIKRNARWSTHTPLDEERDPLLHSFGHLKEVLNSITELSEIEPNVFLRPFLEVIRSEDTTGPITGLALTSVNKFLSYALIDPTHEGTAEGMENMADAVTHARFVGTDPASDEVVLMKILQVLRTLLLTPVGAHLTNESVCEIMQSCFRICFEMRLSGYLSLKKNPRTMWGPT

SEQ ID NO: 64254 - protein, 467 aa, Homo sapiens
MAAPAEPCAGQGVWNQTEPEPAATSLLSLCFLRTAGVWVPPMYLWVLGPIYLLFIHHHGRGYLRMSPLFKAKMVLGFALIVLCTSSVAVALWKIQQGTPEAPEFLIHPTVWLTTMSFAVFLIHTERKKGVQSSGVLFGYWLLCFVLPATNAAQQASGAGFQSDPVRHLSTYLCLSLVVAQFVLSCLADQPPFFPEDPQQSNPCPETGAAFPSKATFWWVSGLVWRGYRRPLRPKDLWSLGRENSSEELVSRLEKEWMRNRSAARRHNKAIAFKRKGGSGMKAPETEPFLRQEGSQWRPLLKAIWQVFHSTFLLGTLSLIISDVFRFTVPKLLSLFLEFIGDPKPPAWKGYLLAVLMFLSACLQTLFEQQNMYRLKVLQMRLRSAITGLVYRKVLALSSGSRKASAVGDVVNLVSVDVQRLTESVLYLNGLWLPLVWIVVCFVYLWQLLRRLRQENRLGSRGCSEPRS

SEQ ID NO: 64255 - protein, 138 aa, Homo sapiens
MFCTKLKDLKITGECPFSLLAPGQVPNESSEEAAGSSESCKATVPICQDIPEKNIQESLPQRKTSRSRVYLHTLAESICKLIFPEFERLNVALQRTLAKHKIKESRKSLEREDFEKTIAEQAVAAEQPLPRSRKKGQA

SEQ ID NO: 64256 - protein, 68 aa, Homo sapiens
MTPQSLLQTTLFLLSLLFLVQASSLLCFQHQEESLAQGPPLLATSVTSWWSPQNISLPSAASFTFSFH

SEQ ID NO: 64257 - protein, 359 aa, Homo sapiens
MEPQVSNGPTSNTSNGPSSNNRNCPSPMQTGATTDDSKTNLIVNYLPQNMTQEEFRSLFGSIGEIESCKLVRDKITGQSLGYGFVNYIDPKDAEKAINTLNGLRLQTKTIKVSYARPSSASIRDANLYVSGLPKTMTQKELEQLFSQYGRIITSRILVDQVTGVSRGVGFIRFDKRIEAEEAIKGLNGQKPSGATEPITVKFANNPSQKSSQALLSQLYQSPNRRYPGPLHHQAQRFRLDNLLNMAYGVKRFSPITIDGMTSLVGMNIPGHTGTGWCIFVYNLSPDSDESVLWQLFGPFGAVNNVKVIRDFNTNKCKGFGFVTMTNYDEAAMAIASLNGYRLGDRVLQVSFKTNKAHKS

SEQ ID NO: 64258 - protein, 247 aa, Homo sapiens
  MOD_RES (1)..(1): Any amino acid
XESFQNEEIGRLLSEDFVSVKVDREERPDVDKVYMTFVQATSSGGGWPMNVWLTPNLQPFVGGTYFPPEDGLTRVGFRTVLLRIREQWKQNKNTLLENSQRVTTALLARSEISVGDRQLPPSAATVNNRCFQQLDEGYDEEYGGFAEAPKFPTPVILSFLFSYWLSHRLTQDGSRAQQMALHTLKMMANGGIRDHVGQTASGTSLTLRRCSMTRHSSLWPIRRPSSSLVMNSTLTWPKASCSTWLGA

SEQ ID NO: 64259 - protein, 112 aa, Homo sapiens
MEEEGLECPNSSSEKRYFPESLDSSDGDEEEVLACEDLELNPFDGLPYSSRYYKLLKEREDLPIWKEKYSFMENLLQNQIVIVSGDAKCGKSAQVPQWCAEYCLSIHYQHGG

SEQ ID NO: 64260 - protein, 764 aa, Homo sapiens
MQPPPRKVKVTQELKNIQVEQMTKLQAKHQAECDLLEDMRTFSQKKAAIEREYAQGMQKLASQYLKRDWPGVKADDRNDYRSMYPVWKSFLEGTMQVAQSRMNICENYKNFISEPARTVRSLKEQQLKRCVDQLTKIQTELQETVKDLAKGKKKYFETEQMAHAVREKADIEAKSKLSLFQSRISLQKASVKLKARRSECNSKATHARNDYLLTLAAANAHQDRYYQTDLVNIMKALDGNVYDHLKDYLIAFSRTELETCQAVQNTFQFLLENSSKVVRDYNLQLFLQENAVFHKPQPFQFQPCDSDTSLKAAQLVDIELSPVSALRMTIAESRQLESETGTTEEHSLNKEARKWATRVAREHKNIVHQQRVLNDLECHGAAVSEQSRAELEQKIDEARENIRKAEIIKLKAEARLDLLKQIGVSVDTWLKSAMNQVMEELENERWARPPAVTSNGTLHSLNADTEREEGEEFEDNMDVFDDSSSSPSGTLRNYPLTCKVVYSYKASQPDELTIEEHEVLEVIEDGDMEDWVKARNKVGQVGYVPEKYLQFPTSNSLLSMLQSLAALDSRSHTSSNSTEAELVSGSLNGDASVCFVKALYDYEGQTDDELSFPEGAIIRILNKENQDDDGFWEGEFNGRIGVFPSVLVEELSASENGDTPWMREIQISPSPKPHASLPPLPLYDQPPSSPYPSPDKRSSLYFPRSPSANEKSLHAESPGFSQASRHTPETSYGKLRPVRAAPPPPTQNHRRPAEKIEDVEITLV

SEQ ID NO: 64261 - protein, 1291 aa, Homo sapiens
  MOD_RES (1)..(1): Any amino acid
XSVTLTWDSGNSEPVTYYGIQYRAAGTEGPFQEVDGVATTRYSIGGLSPFSEYAFRVLAVNSIGRGPPSEAVRARTGEQAPSSPPRRVQARMLSASTMLVQWEPPEEPNGLVRGYRVYYTPDSRRPPNAWHKHNTDAGLLTTVGSLLPGITYSLRVLAFTAVGDGPPSPTIQVKTQQGVPAQPADFQAEVESDTRIQLSWLLPPQERIIMYELVYWAAEDEDQQHKVTFDPTSSYTLEDLKPDTLYRFQLAARSDMGVGVFTPTIEARTAQSMPSGPPRKVEVEPLNSTAVHVYWKLPVPSKQHGQIRGYQVTYVRLENGEPRGLPIIQDVMLAEAQWRPEESEDYETTISGLTPETTYSVTVAAYTTKGDGARSKPKIVTTTGAVFAKNFRVAAAMKTSVLLSWEVPDSYKSAVPFKILYNGQSVEVDGHSMRKLIADLQPNTEYSFVLMNRGSSAGGLQHLVSIRTAPDLLPHKPLPASAYIEDGRFDLSMPHVQDPSLVRWFYIVVVPIDRVGGSMLTPRWSTPEELELDELLEAIEQGGEEQRRRRRQAERLKPYVAAQLDVLPETFTLGDKKNYRGFYNRPLSPDLSYQCFVLASLKEPMDQKRYASSPYSDEIVVQVTPAQQQEEPEMLWVTGPVLAVILIILIVIAILLFKRKRTHSPSSKDEQSIGLKDSLLAHSSDPVEMRRLNYQTPGSSVPSCPNTSSMRDHPPIPITDLADNIERLKANDGLKFSQEYESIDPGQQFTWENSNLEVNKPKNRYANVIAYDHSRVILTSIDGVPGSDYINANYIDGYRKQNAYIATQGPLPETMGDFWRMVWEQRTATVVMMTRLEEKSRVKCDQYWPARGTETCGLIQVTLLDTVELATYTVRTFALHKSGSSEKRELRQFQFMAWPDHGVPEYPTPILAFLRRVKACNPLDAGPMVVHCSAGVGRTGCFIVIDAMLERMKHEKTVDIYGHVTCMRSQRNYMVQTEDQYVFIHEALLEAATCGHTEVPARNLYAHIQKLGQVPPGESVTAMELEFKLLASSKAHTSRFISANLPCNKFKNRLVNIMPYELTRVCLQPIRGVEGSDYINASFLDGYRQQKAYIATQGPLAESTEDFWRMLWEHNSTIIVMLTKLREMGREKCHQYWPAERSARYQYFVVDPMAEYNMPQYILREFKVTDARDGQSRTIRQFQFTDWPEQGVPKTGEGFIDFIGQVHKTKEQFGQDGPITVHCSAGVGRTGVFITLSIVLERMRYEGVVDMFQTVKTLRTQRPAMVQTEDQYQLCYRAALEYLGSFDHYAT

SEQ ID NO: 64262 - protein, 320 aa, Homo sapiens
MEEPAAPSEAHEAAGAQAGAEAAREGVSGPDLPVCEPSGESAAPDSALPHAARGWAPFPVAPVPAHLRRGGLRPAPASGGGAWPSPLPSRSSGIWTKQIICRYYIHGQCKEGENCRYSHDLSGRKMATEGGVSPPGASAGGGPSTAAHIEPPTQEVAEAPPAASSLSLPVIGSAAERGFFEAERDNADRGAAGGAGVESWADAIEFVPGQPYRGRWVASAPEAPLQSSETERKQMAVGSGLRFCYYASRGVCFRGESCMYLHGDICDMCGLQTLHPMDAAQREEHMRACIEAHEKDMELSFAVQRGMDKVYPQVEKCQTV

SEQ ID NO: 64263 - protein, 239 aa, Homo sapiens
MRPRGLPPLLVVLLGCWASVSAQTDATPAVTTEGLNSTEAALATFGTFPSTRPPGTPRAPGPSSGPRPTPVTDVAVLCVCDLSPAQCDINCCCDPDCSSVDFSVFSACSVPVVTGDSQFCSQKAVIYSLNFTANPPQRVFELVDQINPSIFCIHITNYKPALSFINPEVPDENNFDTLMKTSDGFTLNAESYVSFTTKLDIPTAAKYEYGVPLQTSDSFLRFPSSLTSSLCTDNNPAGT

SEQ ID NO: 64264 - protein, 106 aa, Homo sapiens
MAASSSEISEMKGVEESPKVPGEGPGHSEAETGPPQVLAGVPDQPEAPQPGPNTTAAPVDSGPKAGLAPETTETPAGASETAQATDLSLSPGGESKANCSPEDPCQ

SEQ ID NO: 64265 - protein, 149 aa, Homo sapiens
MLLTLAGGALFFPGLFALCTWALRRSQPGWSRTDCVMISTRYRRRRDAPRGPGRCPPHPTRPRGPGRKRGAAGSPGAAPSASRRPEFPKPLRVLPWRERGRGGREWPMSLRSPLPTSACGWGESGRRAGPGSLRSSDRTERARCSLRPR

SEQ ID NO: 64266 - protein, 695 aa, Homo sapiens
  MOD_RES (1)..(1): Any amino acid
XEGGQGPRGLGTVPWLRDLPGSENHMPWEEPAGEKPSCSHSQKAFHMEPAQKPCFTTDMVTWALLCISAETVRGEAPSQPRGIPHRSPVSVDDLWLEKTQRKKLQKQAHVERRLHIGAVHKDGVKCWRKTIITSPESLNLPRRSHPLSQSAPTGLNHMGWPEHTPGTAMPDGALDTAVCADEVGSEEDLYDDLHSSSHHYSHPGGGGEQLAINELISDGSVVCAEALWDHVTMDDQELGFKAGDVIEVMDATNREWWWGRVADGEGWFPASFVRLRVNQDEPADDDAPLAGNSGAEDGGAEAQSSKDQMRTNVINEILSTERDYIKHLRDICEGYVRQCRKRADMFSEEQLRTIFGNIEDIYRCQKAFVKALEQRFNRERPHLSELGACFLEHQADFQIYSEYCNNHPNACVELSRLTKLSKYVYFFEACRLLQKMIDISLDGFLLTPVQKICKYPLQLAELLKYTHPQHRDFKDVEAALHAMKNVAQLINERKRRLENIDKIAQWQSSIEDWEGEDLLVRSSELIYSGELTRVTQPQAKSQQRMFFLFDHQLIYCKKDLLRRDVLYYKGRLDMDGLEVVDLEDGKDRDLHVSIKNAFRLHRGATGDSHLLCTRKPEQKQRWLKAFAREREQVQLDQETGFSITELQRKQAMLNASKQQVTGKPKGRRTAAPPPRLPGPYPADIIPFSEPQSQAS

SEQ ID NO: 64267 - protein, 519 aa, Homo sapiens
  MOD_RES (1)..(1): Any amino acid
XLGDARRGAAGYLCTLPPALLSREILMADSEALPSLAGDPVAVEALLRAVFGVVVDEAIQKGTSVSQKVCEWKEPEELKQLLDLELRSQGESQKQILERCRAVIRYSVKTGHPRFFNQLFSGLDPHALAGRIITESLNTSQYTYEIAPVFVLMEEEVLRKLRALVGWSSGDGIFCPGGSISNMYAVNLARYQRYPDCKQRGLRTLPPLALFTSKECHYSIQKGAAFLGLGTDSVRVVKADERGKMVPEDLERQIGMAEAEGAVPFLVSATSGTTVLGAFDPLEAIADVCQRHGLWLHVDAAWGGSVLLSQTHRHLLDGIQRADSVAWNPHKLLAAGLQCSALLLQDTSNLLKRCHGSQASYLFQQDKFYDVALDTGDKVVQCGRRVDCLKLWLMWKAQGDQGLERRIDQAFVLARYLVEEMKKREGFELVMEPEFVNVCFWFVPPSLRGKQESPDYHERLSKVAPVLKERMVKEGSMMIGYQPHGTRGNFFRVVVANSALTCADMDFLLNELERLGQDL

SEQ ID NO: 64268 - protein, 62 aa, Homo sapiens
  MOD_RES (1)..(1): Any amino acid
XGGMNHLRENGIVHRDIKPGNIMRVIGEDGQSVYKLTDFGAARELEDDEQFVSLYGTEEYLV

SEQ ID NO: 64269 - protein, 67 aa, Homo sapiens
MSPSGRLCLLTIVGLILPTRGWNRLWGRRQEQGAQEGGCWDVQAGGYRGRTRMGAVELSSTDHMDRR

SEQ ID NO: 64270 - protein, 150 aa, Homo sapiens
MAGLQELRFPEEKPLLRGQDATELESSDAFLLAADTDWKEHDIETPYGLLHVVIRGSPKGNRPAILTYHDVGLNHKLCFNTFFNFEDMQEITKHFVVCHVDAPGQQVGASQFPQGYQFPSMEQLAAMLPSVVQHFGFKYVIGIGVGAGAY

SEQ ID NO: 64271 - protein, 81 aa, Homo sapiens
MSGNGNAAATAEENSPKMRVIRVGTRKSQLARIQTDSVVATLKASYPGLQFEISEFSGKEWKLMGSPVPREERTQHFWLCL

SEQ ID NO: 64272 - protein, 85 aa, Homo sapiens
  MOD_RES (1)..(1): Any amino acid
XYTETSSPEGQISAPNGRPAPLPAEPRERHRVLRPGGVRLAGASDPPRGARCPPQGRRPASVPGPDPAAQHRGGGHGRESGVRGE

SEQ ID NO: 64273 - protein, 151 aa, Homo sapiens
MQRRSRGINTGLILLLSQIFHVGINNIPPVTLATLALNIWFFLNPQKPLYSSCLSVEKCYQQKDWQRLLLSPLHHADDWHLYFNMASMLWKGINLERRLGSRWFAYVITAFSVLTGVVYLLLQFAVAEFMDEPDFKRSCAVGFSGVLFALK

SEQ ID NO: 64274 - protein, 290 aa, Homo sapiens
MAGLQRLASHLPVGVMLPHNTTEAPGPHSAKQDSYEQGDSSQQSLKGHLRNNFQKQLLSNKELILDKVYTHPKWNTQTKARSYSYPHCTGISQQDPESDSQGQGNGLFYSSGPQSWYPKANNQDFIPFTKKRVGVDRAFPLKPMVHRKSCSTGEAGTDGDHNVYPRPPEPREFSSRNFGVRNQGNFSVVGTVLAATQAEKAVANFDRTEWVQIRRLEAAGESLEEEIRRKQILLRGKLKKTEEELRRIQTQKEQAKENENGELQKIILPRSRVKVLCLWKLSGCTFLSFL

SEQ ID NO: 64275 - protein, 1350 aa, Homo sapiens
MRKRWACWSGSDAPGGCGGGCGRRRRRSRRKRAASEERRMAFSKGFRIYHKLDPPPFSLIVETRHKEECLMFESGAVAVLSSAEKEAIKGTYSKVLDAYGLLGVLRLNLGDTMLHYLVLVTGCMSVGKIQESEVFRVTSTEFISLRIDSSDEDRISEVRKVLNSGNFYFAWSASGISLDLSLNAHRSMQEQTTDNRFFWNQSLHLHLKHYGVNCDDWLLRLMCGGVEIRTIYAAHKQAKACLISRLSCERAGTRFNVRGTNDDGHVANFVETEQVVYLDDSVSSFIQIRGSVPLFWEQPGLQVGSHRVRMSRGFEANAPAFDRHFRTLKNLYGKQIIVNLLGSKEGEHMLSKAFQSHLKASEHAADIQMVNFDYHQMVKGGKAEKLHSVLKPQVQKFLDYGFFYFNGSEVQRCQSGTVRTNCLDCLDRTNSVQAFLGLEMLAKQLEALGLAEKPQLVTRFQEVFRSMWSVNGDSISKIYAGTGALEGKAKLKDGARSVTRTIQNNFFDSSKQEAIDVLLLGNTLNSDLADKARALLTTGSLRVSEQTLQSASSKVLKSMCENFYKYSKPKKIRVCVGTWNVNGGKQFRSIAFKNQTLTDWLLDAPKLAGIQEFQDKRSKPTDIFAIGFEEMVELNAGNIVSASTTNQKLWAVELQKTISRDNKYVLLASEQLVGVCLFVFIRPQHAPFIRDVAVDTVKTGMGGATGNKGAVAIRMLFHTTSLCFVCSHFAAGQSQVKERNEDFIEIARKLSFPMGRMLFSHDYVFWCGDFNYRIDLPNEEVKELIRQQNWDSLIAGDQLINQKNAGQVFRGFLEGKVTFAPTYKYDLFSDDYDTSEKCRTPAWTDRVLWRRRKWPFDRSAEDLDLLNASFQDESKILYTWTPGTLLHYGRAELKTSDHRPVVALIDIDIFEVEAEERQNIYKEVIAVQGPPDGTVLVSIKSSLPENNFFDDALIDELLQQFASFGEVILIRFVEDKMWVTFLEGSSALNVLSLNGKELLNRTITIALKSPDWIKNLEEEMSLEKISIALPSSTSSTLLGEDAEVAADFDMEGDVDDYSAEVEELLPQHLQPSSSSGLGTSPSSSPRTSPCQSPTISEGPVPSLPIRPSRAPSRTPGPPSAQSSPIDAQPATPLPQKDPAQPLEPKRPPPPRPVAPPTRPAPPQRPPPPSGARSPAPTRKEFGGIGAPPSPGVARREMEAPKSPGTTRKDNIGRSQPSPQAGLAGPGPAGYSTARPTIPPRAGVISAPQSHARASAGRLTPESQSKTSETSKGSTFLPEPLKPQAAFPPQSSLPPPAQRLQEPLVPVAAPMPQSGPQPNLETPPQPPPRSRSSHSLPSEASSQPQQEQPSG

SEQ ID NO: 64276 - protein, 98 aa, Homo sapiens
MQSTSNHLWLLSDILGQGATANVFRGRHKKTGDLFAIKVFNNISFLRPVDVQMREFEVLKKLNHKNIVKLFAIEEETTTRHKVLIMEFCPCGSLYTVL

SEQ ID NO: 64277 - protein, 151 aa, Homo sapiens
  MOD_RES (1)..(1): Any amino acid
XNCETPRATCLDQCSGHGTFLPDTGLCSCDPSWTGHDCSIEICAADCGGHGVCVGGTCRCEDGWMGAACDQRACHPRCAEHGTCRDGKCECSPGWNGEHCTIEGCPGLCNGNGRCTLDLNGWHCVCQLGWRGAGCDTSMETACGDSKDNDG

SEQ ID NO: 64278 - protein, 49 aa, Homo sapiens
MPKRGKKGAVAEDGDELRTGKGMKSALLPRSCGGGVCHSLDVRARGQEE

SEQ ID NO: 64279 - protein, 195 aa, Homo sapiens
MSKPHFPPALPAPAAIPGIKGEENGCLLLPTYSVPGSMLCVIYHLDNPVGKMSSSPLSKKRRVSGPDPKPGSNCSPAQSVLSEVPSVPTNGMAKNGSEADIDEGLYSRQLYVLGHEAMKRLQTSSVLVSGLRGLGVEIAKNIILGGVKAVTLHDQGTAQWADLSSQFYLREEDIGKNRAEVSQPRLAELNSYVPV

SEQ ID NO: 64280 - protein, 136 aa, Homo sapiens
MALLNFFFPDEKPYSEEESRRVRRNKRSKSNEGADGPVKNKKKGKKAGPPGPNGPPGPPGPPGPQGPPGIPGIPGIPGTTVMGPPGPPGPPGPQGPPGLQGPSGAADKAGTRENQPAVVHLQGQGSAIQVKNDLSG

SEQ ID NO: 64281 - protein, 167 aa, Homo sapiens
MGGWSGWGPWEPCSVTCSKGTRTRRRACNHPAPKCGGHCPGQAQESEACDTQQVCPTHGAWATWGPWTPCSASCHGGPHEPKETRSRKCSAPEPSQKPPGKPCPGLAYEQRRCTGLPPCPVAGGWGPWGPVSPCPVTCGLGQTMEQRTCNHPVPQHGGPFCAGDATR

SEQ ID NO: 64282 - protein, 61 aa, Homo sapiens
MELFQAKDHYILQQGERALWCSRRDGGLQLRPATDLLLAWNPICLGLVEGVIGKIQLHSAA

SEQ ID NO: 64283 - protein, 259 aa, Homo sapiens
MIRDLSKMYPQTRHPAPHQPAQPFKFTISESCDRIKEEFQFLQAQYHSLKLECEKLASEKTEMQRHYVMYYEMSYGLNIEMHKQAEIVKRLNAICAQVIPFLSQEHQQQVVQAVERAKQVTMAELNAIIGQQLQAQHLSHGHGLPVPLTPHPSGLQPPAIPPIGSSAGLLALSSALGGQSHLPIKDEKKHHDNDHQRDRDSIKQNYLLLIMDEIGDQRGRTFWVPVSLNPDFKRHSPAMLVLCASTELFSIPISQFPRC

SEQ ID NO: 64284 - protein, 63 aa, Homo sapiens
MSGSCAAPGPGSGSSPAACRFAHYFVLCGIDADSGLEPDELAEIRGQPSFFCVKISSFPSTID

SEQ ID NO: 64285 - protein, 446 aa, Homo sapiens
MERIPVSVDFWVVCCAVLKCNPGIPKRMSTLCFGFSDEFHPFIEALLPHVRAIAYTWFNLQARKRKYFKKHEKRMSKDEERAVKDELLSEKPEIKQKWASRLLAKLRKDIRQEYREDFVLTVTGKKHPCCVLSNPDQKGKIRRIDCLRQADKVWRLDLVMVILFKGIPLESTDGERLMKSPHCTNPALCVQPHHITVSVKELDLFLAYYVQEQDSGQSGSPSHNDPAKNPPGYLEDSFVKSGVFNVSELVRVSRTPITQGTGVNFPIGEIPSQPYYHDMNSGVNLQRSLSSPPSSKRPKTISIDENMEPSPTGDFYPSPSSPAAGSRTWHERDQDMSSPTTMKKPEKPLFSSASPQDSSPRLSTFPQHHHPGIPGVAHSVISTRTPPPPSPLPFPTQAILPPAPSSYFSHPTIRYPPHLNPQDTLKNYVPSYDPSSPQTSQSWYLG

SEQ ID NO: 64286 - protein, 2438 aa, Homo sapiens
MPPNINWKEIMKVDPDDLPRQEELADNLLISLSKVEVNELKSEKQENVIHLFRITQSLMKMKAQEVELALEEVEKAGEEQAKFENQLKTKVMKLENELEMAQQSAGGRDTRFLRNEICQLEKQLEQKDRELEDMEKELEKEKKVNEQLALRNEEAENENSKLRRENKRLKKKNEQLCQDIIDYQKQIDSQKETLLSRRGEDSDYRSQLSKKNYELIQYLDEIQTLTEANEKIEVQNQEMRKNLEESVQEMEKMTDEYNRMKAIVHQTDNVIDQLKKENDHYQLQVQELTDLLKSKNEEDDPIMVAVNAKVEEWKLILSSKDDEIIEYQQMLHNLREKLKNAQLDADKSNVMALQQGIQERDSQIKMLTEQVEQYTKEMEKNTCIIEDLKNELQRNKGASTLSQQTHMKIQSTLDILKEKTKEAERTAELAEADAREKDKELVEALKRLKDYESGVYGLEDAVVEIKNCKNQIKIRDREIEILTKEINKLELKISDFLDENEALRERVGLEPKTMIDLTEFRNSKHLKQQQYRAENQILLKEIESLEEERLDLKKKIRQMAQERGKRSATSGLTTEDLNLTENISQGDRISERKLDLLSLKNMSEAQSKNEFLSRELIEKERDLERSRTVIAKFQNKLKELVEENKQLEEGMKEILQAIKEMQKDPDVKGGETSLIIPSLERLVNAIESKNAEGIFDASLHLKAQVDQLTGRNEELRQELRESRKEAINYSQQLAKANLKIDHLEKETSLLRQSEGSNVVFKGIDLPDGIAPSSASIINSQNEYLIHLLQELENKEKKLKNLEDSLEDYNRKFAVIRHQQSLLYKEYLSEKETWKTESKTIKEEKRKLEDQVQQDAIKVKEYNNLLNALQMDSDEMKKILAENSRKITVLQVNEKSLIRQYTTLVELERQLRKENEKQKNELLSMEAEVCEKIGCLQRFKEMAIFKIAALQKVVDNSVSLSELELANKQYNELTAKYRDILQKDNMLVQRTSNLEHLECENISLKEQVESINKELEITKEKLHTIEQAWEQETKLGNESSMDKAKKSITNSDIVSISKKITMLEMKELNERQRAEHCQKMYEHLRTSLKQMEERNFELETKFAELTKINLDAQKVEQMLRDELADSVSKAVSDADRQRILELEKNEMELKVEVSKLREISDIARRQVEILNAQQQSRDKEVESLRMQLLDYQAQSDEKSLIAKLHQHNVSLQLSEATALGKLESITSKLQKMEAYNLRLEQKLDEKEQALYYARLEGRNRAKHLRQTIQSLRRQFSGALPLAQQEKFSKTMIQLQNDKLKIMQEMKNSQQEHRNMENKTLEMELKLKGLEELISTLKDTKGAQKVINWHMKIEELRLQELKLNRELVKDKEEIKYLNNIISEYERTISSLEEEIVQQNKFHEERQMAWDQREVDLERQLDIFDRQQNEILNAAQKFEEATGSIPDPSLPLPNQLEIALRKIKENIRIILETRATCKSLEEKLKEKESALRLAEQNILSRDKVINELRLRLPATAEREKLIAELGRKEMEPKSHHTLKIAHQTIANMQARLNQKEEVLKKYQRLLEKAREEQREIVKKHEEDLHILHHRLELQADSSLNKFKQTAWDLMKQSPTPVPTNKHFIRLAEMEQTVAEQDDSLSSLLVKLKKVSQDLERQREITELKVKEFENIKLQLQENHEDEVKKVKAEVEDLKYLLDQSQKESQCLKSELQAQKEANSRAPTTTMRNLVERLKSQLALKEKQQKALSRALLELRAEMTAAAEERIISATSQKEAHLNVQQIVDRHTRELKTQVEDLNENLLKLKEALKTSKNRENSLTDNLNDLNNELQKKQKAYNKILREKEEIDQENDELKRQIKRLTSGLQGKPLTDNKQSLIEELQRKVKKLENQLEGKVEEVDLKPMKEKNAKEELIRWEEGKKWQAKIEGIRNKLKEKEGEVFTLTKQLNTLKDLFAKADKEKLTLQRKLKTTGMTVDQVLGIRALESEKELEELKKRNLDLENDILYMRAHQALPRDSVVEDLHLQNRYLQEKLHALEKQFSKDTYSKPSISGIESDDHCQREQELQKENLKLSSENIELKFQLEQANKDLPRLKNQVRDLKEMCEFLKKEKAEVQRKLGHVRGSGRSGKTIPELEKTIGLMKKVVEKVQRENEQLKKASGILTSEKMANIEQENEKLKETDAAEKLRIAKNNLEILNEKMTVQLEETGKRLQFAESRGPQLEGADSKSWKSIVVTRMYETKLKELETDIAKKNQSITDLKQLVKEATEREQKVNKYNEDLEQQIKILKHVPEGAETEQGLKRELQVLRLANHQLDKEKAELIHQIEANKDQSGAESTIPDADQLKEKIKDLETQLKMSDLEKQHLKEEIKKLKKELENFDPSFFEEIEDLKYNYKEEVKKNILLEEKVKKLSEQLGVELTSPVAASEEFEDEEESPVNFPIY

SEQ ID NO: 64287 - protein, 83 aa, Homo sapiens
MVWRLVLLALWVWPSTQAGHQDKDTTFDLFSISNINRKTIGAKQFRGPDPGVPAYRFVRFDYIPPVNADDLSKITKIMRQKEG

SEQ ID NO: 64288 - protein, 45 aa, Homo sapiens
MAILPGEAPVPGPGWPEPDAGGASVALGLPVPVCSSSASALQEQH

SEQ ID NO: 64289 - protein, 128 aa, Homo sapiens
MAAHLVKRCTCLLREAARQAPAMAPVGRLRLAWVAHKTLTSSATSPISHLPGSLMEPVEKERASTPYIEKQVDHLIKKATRPEELLELLGGSHDLDSNQAAMVLIRLSHLLSEKPEDKGLLIQDAHFH

SEQ ID NO: 64290 - protein, 110 aa, Homo sapiens
MDAVPTIFDFCTHIKSMKLKSRNLLKKNNSCSPAGPSNLKSNISSQQVLLEHSYAFRNPMEAKKRIIKLEKEIASLRRKMKTCLQKERRATRRWIKATCLVKNLEANSVL

SEQ ID NO: 64291 - protein, 82 aa, Homo sapiens
  MOD_RES (1)..(1): Any amino acid
XTTPKEVPAESVTVWIDPLDATQEYTEDLRKYVTTMVCVAVNGKPMLGVIHKPFSEYTARNKLVMQLVSLLAMVDYILPCSE

SEQ ID NO: 64292 - protein, 304 aa, Homo sapiens
MLRRALLCLAVAALVRADAPEEEDHVLVLRKSNFAEALAAHKYLLVEFYAPWCGHCKALAPEYAKAAGKLKAEGSEIRLAKVDATEESDLAQQYGVRGYPTIKFFRNGDTASPKEYTGVLSLAGREQRREQARQGRRHSLFESRTYICLGLAGREADDIVNWLKKRTGPAATTLPDGAAAESLVESSEVAVIGFFKDVESDSAKQFLQAAEAIDDIPFGITSNSDVFSKYQLDKDGVVLFKKFDEGRNNFEGEVTKENLLDFIKHNQLPLVIEFTEQPRRFLEVKSRLTSCCSCPRVCLTMTAN

SEQ ID NO: 64293 - protein, 4700 aa, Homo sapiens
MMMCAATASPAAASSGLGGDGFYPAATFSSSPAPGALFMPVPDGSVAAAGLGLGLPAADSRGHYQLLLSGRALADRYRRIYTAALNDRDQGGGSAGHPASRNKKILNKKKLKRKQKSKSKVKTRSKSENLENTVIIPDIKLHSNPSAFNIYCNVRHCVLEWQKKEISLAAASKNSVQSGESDSDEEEESKEPPIKLPKIIEVGLCEVFELIKETRFSHPSLCLRSLQALLNVLQGQQPEGLQSEPPEVLESLFQLLLEITVRSTGMNDSTGQSLTALSCACLFSLVASWGETGRTLQAISAILTNNGSHACQTIQVPTILNSLQRSVQAVLVGKIQIQDWFSNGIKKAALMHKWPLKEISVDEDDQCLLQNDGFFLYLLCKDGLYKIGSGYSGTVRGHIYNSTSRIRNRKEKKSWLGYAQGYLLYRDVNNHSMTAIRISPETLEQDGTVMLPDCHTEGQNILFTDGEYINQIAASRDDGFVVRIFATSTEPVLQQELQLKLARKCLHACGISLFDLEKDLHIISTGFDEESAILGAGREFALMKTANGKIYYTGKYQSLGIKQGGPSAGKWVELPITKSPKIVHFSVGHDGSHALLVAEDGSIFFTGSASKGEDGESTKSRRQSKPYKPKKIIKMEGKIVVYTACNNGSSSVISKDGELYMFGKDAIYSDSSSLVTDLKGHFVTQVAMGKAHTCVLMKNGEVWTFGVNNKGQCGRDTGAMNQGGKGFGVENMATAMDEDLEEELDEKDEKSMMCPPGMHKWKLEQCMVCTVCGDCTGYGASCVSSGRPDRVPGGICGCGSGESGCAVCGCCKACARELDGQEARQRGILDAVKEMIPLDLLLAVPVPGVNIEEHLQLRQEEKRQRVIRRHRLEEGRGPLVFAGPIFMNHREQALARLRSHPAQLKHKRDKHKDGSGERGEKDASKITTYPPGSVRFDCELRAVQVSCGFHHSVVLMENGDVYTFGYGQHGQLGHGDVNSRGCPTLVQALPGPSTQVTAGSNHTAVLLMDGQVFTFGSFSKGQLGRPILDVPYWNAKPAPMPNIGSKYGRKATWIGASGDQTFLRIDEALINSHVLATSEIFASKHIIGLVPASISEPPPFKCLLINKVDGSCKTFNDSEQEDLQGFGVCLDPVYDVIWRFRPNTRELWCYNAVVADARLPSAADMQSRCSILSPELALPTGSRALTTRSHAALHILGCLDTLAAMQDLKMGVASTEEETQAVMKVYSKEDYSVVNRFESHGGGWGYSAHSVEAIRFSADTDILLGGLGLFGGRGEYTAKIKLFELGPDGGDHETDGDLLAETDVLAYDCAAREKYAMMFDEPVLLQAGWWYVAWARVSGPSSDCGSHGQASITTDDGVVFQFKSSKKSNNGTDVNAGQIPQLLYRLPTSDGSASKGKQQTSEPVHILKRSFARTVSVECFESLLSILHWSWTTLVLGVEELRGLKGFQFTATLLDLERLRFVGTCCLRLLRVYTCEIYPVSATGKAVVEETSKLAECIGKTRTLLRKILSEGVDHCMVKLDNDPQGYLSQPLSLLEAVLQECHNTFTACFHSFYPTPALQWACLCDLLNCLDQDIQEANFKTSSSRLLAAVMSALCHTSVKLTSIFPIAYDGEVLLRSIVKQVSTENDSTLVHRFPLLVAHMEKLSQSEENISGMTSFREVLEKMLVIVVLPVRNSLRRENELFSSHLVSNTCGLLASIVSELTASALGSEVDGLNSLHSVKASANRFTKTSQGRSWNTGNGSPDAICFSVDKPGIVVVGFSVYGGGGIHEYELEVLVDDSEHAGDSTHSHRWTSLELVKGTYTTDDSPSDIAEIRLDKVVPLKENVKYAVRLRNYGSRTANGDGGMTTVQCPDGVTFTFSTCSLSSNGTNQTRGQIPQILYYRSEFDGDLQSQLLSKANEEDKNCSRALSVVSTVVRASKDLLHRALAVDADDIPELLSSSSLFSMLLPLIIAYIGPVAAAIPKVAVEVFGLVQQLLPSVAILNQKYAPPAFNPNQSTDSTTGNQPEQGLSACTTSSHYAVIESEHPYKPACVMHYKVTFPECVRWMTIEFDPQCGTAQSEDVLRLLIPVRTVQNSGYGPKLTSVHENLNSWIELKKFSGSSGWPTMVLVLPGNEALFSLETASDYVKDDKASFYGFKCFAIGYEFSPGPDEGVIQLEKELANLGGVCAAALMKKDLALPIGNELEEDLEILEEAALQVCKTHSGILGKGLALSHSPTILEALEGNLPLQIQSNEQSFLDDFIACVPGSSGGRLARWLQPDSYADPQKTSLILNKDDIRCGWPTTITVQTKDQYGDVVHVPNMKVEVKAVPVSQKKMSLQQDQAKKPQRIPGSPAVTAASSNTDMTYGGLASPKLDVSYEPMIVKEARYIAITMMKVYENYSFEELRFASPTPKRPSENMLIRVNNDGTYCANWTPGAIGLYTLHVTIDGIEIDAGLEVKVKDPPKGMIPPGTQLVKPKSEPQPNKVRKFVAKDSAGLRIRSHPSLQSEQIGIVKVNGTITFIDEIHNDDGVWLRLNDETIKKYVPNMNGYTEAWCLSFNQHLGKSLLVPVDNIFNASQGVRDLDVFSWTSKAFFPQESKTNTDDFFKDINSCCPQEATMQEQDMPFLRGGPGMYKVVKTGPSGHNIRSCPNLRGIPIGMLVLGNKVKAVGEVTNSEGTWVQLDQNSMVEFCESDEGEAWSLARDRGGNQYLRHEDEQALLDQNSQTPPPSPFSVQAFNKGASCSAQGFDYGLGNSKGDRGNISTSSKPASTSGKSELSSKHSRSLKPDGRMSRTTADQKKPRGTESLSASESLILKSDAAKLRSDSHSRSLSPNHNTLQTLKSDGRMPSSSRAESPGPGSRLSSPKPKTLPANRSSPSGASSPRSSSPHDKNLPQKSTAPVKTKLDPPRERSKSDSYTLDPDTLRKKKMPLTEPLRGRSTSPKPKSVPKDSTDSPGSENRAPSPHVVQENLHSEVVEVCTSSTLKTNSLTDSTCDDSSEFKSVDEGSNKVHFSIGKAPLKDEQEMRASPKISRKCANRHTRPKKEKSSFLFKGDGSKPLEPAKQAMSPSVAECARAVFASFLWHEGIVHDAMACSSFLKFHPELSKEHAPIRSSLNSQQPTEEKETKLKNRHSLEISSALNMFNIAPHGPDISKMGSINKNKVLSMLKEPPLHEKCEDGKTETTFEMSMHNTMKSKSPLPLTLQHLVAFWEDISLATIKAASQNMIFPSPGSCAVLKKKECEKENKKSKKEKKKKEKAEVRPRGNLFGEMAQLAVGGPEKDTICELCGESHPYPVTYHMRQAHPGCGRYAGGQGYNSIGHFCGGWAGNCGDGGIGGSTWYLVCDRCREKYLREKQAAAREKVKQSRRKPMQVKTPRALPTMEAHQVIKANALFLLSLSSAAEPSILCYHPAKPFQSQLPSVKEGISEDLPVKMPCLYLQTLARHHHENFVGYQDDNLFQDEMRYLRSTSVPAPYISVTPDASPNVFEEPESNMKSMPPSLETSPITDTDLAKRTVFQRSYSVVASEYDKQHSILPARVKAIPRRRVNSGDTEVGSSLLRHPSPELSRLISAHSSLSKGERNFQWPVLAFVIQHHDLEGLEIAMKQALRKSACRVFAMEAFNWLLCNVIQTTSLHDILWHFVASLTPAPVEPEEEEDEENKTSKENSEQEKDTRVCEHPLSDIVIAGEAAHPLPHTFHRLLQTISDLMMSLPSGSSLQQMALRCWSLKFKQSDHQFLHQSNVFHHINNILSKSDDGDSEESFSISIQSGFEAMSQELCIVMCLKDLTSIVDIKTSSRPAMIGSLTDGSTETFWESGDEDKNKTKNITINCVKGINARYVSVHVDNSRDLGNKVTSMTFLTGKAVEDLCRIKQVDLDSRHIGWVTSELPGGDNHIIKIELKGPENTLRVRQVKVLGWKDGESTKIAGQISASVAQQRNCEAETLRVFRLITSQVFGKLISGDAEPTPEQEEKALLSSPEGEEKATSDADLKEHMVGIIFSRSKLTNLQKQVCAHIVQAIRMEATRVREEWEHAISSKENANSQPNDEDASSDAYCFELLSMVLALSGSNVGRQYLAQQLTLLQDLFSLLHTASPRVQRQVTSLLRRVLPEVTPSRLASIIGVKSLPPADISDIIHSTEKGDWNKLGILDMFLGCIAKALTVQLKAKGTTITGTAGTTVGKGVTTVTLPMIFNSSYLRRGESHWWMKGSTPTQISEIIIKLIKDMAAGHLSEAWSRVTKNAIAETIIALTKMEEEFRSPVRCIATTRLWLALASLCVLDQDHVDRLSSGRWMGKDGQQKQMPMCDNHDDGETAAIILCNVCGNLCTDCDRFLHLHRRTKTHQRQVFKEEEEAIKVDLHEGCGRTKLFWLMALADSKTMKAMVEFREHTGKPTTSSSEACRFCGSRSGTELSAVGSVCSDADCQEYAKIACSKTHPCGHPCGGVKNEEHCLPCLHGCDKSATSLKQDADDMCMICFTEALSAAPAIQLDCSHIFHLQCCRRVLENRWLGPRITFGFISCPICKNKINHIVLKDLLDPIKELYEDVRRKALMRLEYEGLHKSEAITTPGVRFYNDPAGYAMNRYAYYVCYKCRKAYFGGEARCDAEAGRGDDYDPRELICGACSDVSRAQMCPKHGTDFLEYKCRYCCSVAVFFCFGTTHFCNACHDDFQRMTSIPKEELPHCPAGPKGKQLEGTECPLHVVHPPTGEEFALGCGVCRNAHTF

SEQ ID NO: 64294 - protein, 277 aa, Homo sapiens
  MOD_RES (1)..(1): Any amino acid
XALYGLEDFPLDVARKKLFSSSQGRSTGEAFVQFASQEIAEKALKKHKERIGHRYIEIFKSSRAEVRTHYDPPRKLMAMQRPGPYDRPGAGRGYNSIGRGAGFERMRRGAYGGGYGGYDDYNGYNDGYGFGSDRFGRDLNYCFSGMSDHRYGDGGSTFQSTTGHCVHMRGLPYRATENDIYNFFSPLNPVRVHIEIGPDGRVTGEADVEFATHEDAVAAMSKDKANMQHRYVELFLNSTAGASGGAYEHRYVELFLNSTAGASGGAYGSQMMGGMGL

SEQ ID NO: 64295 - protein, 250 aa, Homo sapiens
ADSRGSLISTDSGNSLPERNSEKSNSLDKHQQSSTLGNSVVRCDKLDQSEIKSLLMCFLYILKSMSDDALFTYWNKASTSELMDFFTISEVCLHQFQYMGKRYIASVRKISSVLGISVDNGYGHSDADVLHQSLLEANIATEVCLTALDTLSLFTLAFKNQLLADHGHNPLMKKVFDVYLCFLQKHQSETALKNVFTALRSLIYKFPSTFYEGRADMCAALCYEILKCCNSKLSSIRTEASQLLYFLMRN

SEQ ID NO: 64296 - protein, 2101 aa, Homo sapiens [sequence omitted]

SEQ ID NO: 64297 - protein, 21 aa, Homo sapiens
  MOD_RES (1)..(1): Any amino acid
XRKSKSSRDAKSKAKRKLHSA

SEQ ID NO: 64298 - protein, 171 aa, Homo sapiens
MSSPQAPEDGQGCGDRGDPPGDLRSVLVTTVLNLEPLDEDLFRDPNLQKRYPLALNRIAAQEVPIEIKPVNPSPLSQLQRMEPKQMFWVRARGYIGEGDMKMHCCVAAYISDYAFLGTALLPHQWQHKVHFMVSLDHSMWFHAPFRADHWMLYECESPWAGFGIFIFKMRG

SEQ ID NO: 64299 - protein, 201 aa, Homo sapiens
  MOD_RES (1)..(1): Any amino acid
XDALMDEINFMKMFFDAELSQMQTHVSDTSVVLSMDNNRNLDLDSIIAEVKAQYEEIANRSRTEAESWYQTKYEELQQTAGRHGDDLRNTKHEISEMNRMIQRLRAEIDNVKKQCANLQNAIADAEQRGELALKDARNKLAELEEALQKAKQDMARLLREYQELMNTKLALDVEIATYRKLLEGEECRLSGEGVGPVNICK

SEQ ID NO: 64300 - protein, 1072 aa, Homo sapiens
MSGTSSPEAVKKLLENMQSDLRALSLECKKKFPPVKEAAESGIIKVKTIAARNTEILAALKENSSEVVQPFLMGCGTKEPKITQLCLAAIQRLMSHEVVSETAAGNIINMLWQLMENSLEELKLLQTVLVLLTTNTVVHDEALSKAIVLCFRLHFTKDNITNNTAAATVRQVVTVVFERMVAEDERHRDIIEQPVLVQGNSNRRSVSTLKPCAKDAYMLFQDLCQLVNADAPYWLVGMTEMTRTFGLELLESVLNDFPQVFLQHQEFSFLLKERVCPLVIKLFSPNIKFRQGSSTSSSPAPVEKPYFPICMRLLRVVSVLIKQFYSLLVTECEIFLSLLVKFLDADKPQWLRAVAVESIHRFCVQPQLLRSFCQSYDMKQHSTKVFRDIVNALGSFIQSLFLVPPTGNPATSNQAGNNNLGGSVSAPANSGMVGIGGGVTLLPAFEYRGTWIPILTITVQGSAKATYLEMLDKVEPPTIPEGYAMSVAFHCLLDLVRGITSMIEGELGELETECQTTTEEGSSPTQSTEQQDLQSTSDQMDKEIVSRAVWEEMVNACWCGLLAALSLLLDASTDEAATENILKAELTMAALCGRLGLVTSRDAFITAICKGSLPPHYALTVLNTTTAATLSNKSYSVQGQSVMMISPSSESHQQVVAVGQPLAVQPQGTVMLTSKNIQCMRTLLNLAHCHGAVLGTSWQLVLATLQHLVWILGLKPSSGGALKPGRAVEGPSTVLTTAVMTDLPVISNILSRLFESSQYLDDVSLHHLINALCSLSLEAMDMAYGNNKEPSLFAVAKLLETGLVNMHRIEILWRPLTGHLLEVCQHPNSRMREWGAEALTSLIKAGLTFNHDPPLSQNQRLQLLLLNPLKEMSNINHPDIRLKQLECVLQILQSQGDSLGPGWPLVLGVMGAIRNDQGESLIRTAFQCLQLVVTDFLPTMPCTCLQIVVDVAGSFGLHNQELNISLTSIGLLWNISDYFFQRGETIEKELNKEEAAQQKQAEEKGVVLNRPFHPAPPFDCLWLCLYAKLGELCVDPRPAVRKSAGQTLFSTIGAHGTLLQHSTWHTVIWKVL

SEQ ID NO: 64301 - protein, 125 aa, Homo sapiens
MDNLSSEEIQQRAHQITDESLESTRRILGLAIESQDAGIKTITMLDEQKEQLNRIEEGLDQINKDMRETEKTLTELNKCCGLCVCPCNRTKNFESGKAYKTTWGDGGENSPCNVVSKQPGPVTNG

SEQ ID NO: 64302 - protein, 101 aa, Homo sapiens
MADLSLLQEDLQEDADGFGVDDYSSESDVIIIPSALDFVSQDEMLTPLGRLDKYAASENIFNRTNCESGADGTGASHRTVLSRKPAFNTICFFKILTTYCG

SEQ ID NO: 64303 - protein, 180 aa, Homo sapiens
MLSSGVETQPVPLDSSMSAVVQELYSELPVSVSRELHADPEPSVIPDVKPGASSSLLSQNRALPLELQRTHVESCCEETYETLDHGSEPGRCGLVDSTAGGSVASGILDRAKRSESMEPKVFRDPGGQAGIIREPSEGAKEDPHQHSTAAEEKTSPSQEDLLMQSSKELSHVDLPEDFLR

SEQ ID NO: 64304 - protein, 316 aa, Homo sapiens
  MOD_RES (1)..(1): Any amino acid
XRPPPDWQPPFACDVDKLHFTPRIQRLNELEAQTRVKLNFLDQIAKYWELQGSTLKIPHVERKILDLFQLNKLVAEEGGFAVVCKDRKWTKIATKMGFAPGKAVGSHIRGHYERILNPYNLFLSGDSLRKPNLTTDTKDKEYKPHDIPQRQSVQPSETCPPARRAKRMRAEAMNIKIEPEETTEARTHNLRRRMGCPTPKCENEKEMKSSIKQEPIERKDYIVENEKEKPKSRSKKATNAVDLYVCLLCGSGNDEDRLLLCDGCDDSYHTFCLIPPLHDVPKGDWRCPKCLAQECSKPQEAFGFEQAARDYTLRTF

SEQ ID NO: 64305 - protein, 121 aa, Homo sapiens
  MOD_RES (1)..(1): Any amino acid
XTGHNHYVMCAQFHPTEDLVVSASLDQTVRVWDISGLRKKNLSPGAVESDVRGITGVDLFGTTDAVVKHVLEGHDRGVNWAAFHPTMPLIVSGADDRQVKIWRMNGLGFRLSAETMIVSGS

SEQ ID NO: 64306 - protein, 101 aa, Homo sapiens
MAPGSFAEYTVVPASIATPVPSVKPEYLTLLVSGTTAYISLKELGGLSEGKKVLVTAAAGGTGQFAMQLSKKAKCHVIGTCSSDEKSAFLKSLGCDRPINY

SEQ ID NO: 64307 - protein, 153 aa, Homo sapiens
MSSSGAKDKPELQFPFLQDEDTVATLLECKTLFILRGLPGSGKSTLARVIVDKYRDGTKMVSADAYKITPGARGAFSEEYKRLDEDLAAYCRRRDIRILVLDDTNHERERLEQLFEMADQYQYQVVLVEPKTAWRLDCAQLKEKNQWQLSADD

SEQ ID NO: 64308 - protein, 726 aa, Homo sapiens
  MOD_RES (1)..(1): Any amino acid
XAHKKPIDLRAIGKLPIAMRALTNYQRLCEAFDAQRKDIQGTQGARAIWQALSHAFGRRLVLSSTFRILADLLGFAGPLCIFGIVDHLGKENDVFQPKTQFLGVYFVSSQEFLANAYVLAVLLFLALLLQRTFLQASYYVAIETGINLRGAIQTKIYNKIMHLSTSNLSMGEMTAGQICNLVAIDTNQLMWFFFLCPNLWAMPVQIIVGVILLYYILGVSALIGAAVIILLAPVQYFVATKLSQAQRSTLEYSNERLKQTNEMLRGIKLLKLYAWENIFRTRVETTRRKEMTSLRAFAIYTSISIFMNTAIPIAAVLITFVGHVSFFKEADFSPSVAFASLSLFHILVTPLFLLSSVVRSTVKALVSAEIREEQCAPHEPTPQGPASKYQAVPLRVVNRKRPAREDCRGLTGPLQSLVPSADGDADNCCVQIMGGYFTWTPDGIPTLSNITIRIPRGQLTMIVGQVGCGKSSLLLAALGEMQKVSGAVFWSSLPDSEIGEDPSPERETATDLDIRKRGPVAYASQKPWLLNATVEENIIFESPFNKQRYKMVIEACSLQPDIDILPHGDQTQIGERGINLSGGQRQRISVARALYQHANVVFLDDPFSALDIHLSDHLMQAGILELLRDDKRTVVLVTHKLQYLPHADWIIAMKDGTIQREGTLKDFQRSECQLFEHWKTLMNRQDQELEKETVTERKATEPPQGLSRAMSSRDGLLQDEEEEEAC

SEQ ID NO: 64309 - protein, 461 aa, Homo sapiens
  MOD_RES (1)..(1): Any amino acid
XREWDILETEEHYKSRWRSIRILYLTMFLSSVGFSVVMMSIWPYLQKIDPTADTSFLGWVIASYSLGQMVASPIFGLWSNYRPRKEPLIVSILISVAANCLYAYLHIPASHNKYYMLVARGLLGIGAVFQTCFTFLGEKGVTWDVIKLQINMYTTPVLLSAFLGILNIILILAILREHRVDDSGRQCKSINFEEASTDEAQVPQGNIDQVAVVAINVLFFVTLFIFALFETIITPLTMDMYAWTQEQAVLYNGIILAALGVEAVVIFLGVKLLSKKIGERAILLGGLIVVWVGFFILLPWGNQFPKIQWEDLHNNSIPNTTFGEIIIGLWKSPMEDDNERPTGCSIEQAWCLYTPVIHLAQFLTSAVLIGLGYPVCNLMSYTLYSKILGPKPQGVYMGWLTASGSGARILGPMFISQVYAHWGPRWAFSLVCGIIVLTITLLGVVYKRLIALSVRYGRIQE

SEQ ID NO: 64310 - protein, 289 aa, Homo sapiens
MGARGAPSRRRQAGRRLRYLPTGSFPFLLLLLLLCIQLGGGQKKKENLLAEKVEQLMEWSSRRSIFRMNGDKFRKFIKAPPRNYSMIVMFTALQPQRQCSVCRQANEEYQILANSWRYSSAFCNKLFFSMVDYDEGTDVFQQLNMNSAPTFMHFPPKGRPKRADTFDLQRIGFAAEQLAKWIADRTDVHIRVFRPPNYSGTIALALLVSLVGGLLYLRRNNLEFIYNKTGWAMVSLCIVFAMTSGQMWNHIRGPPYAHKNPHNGQVSYIHGSSQAQFVAESHIILVLTS

SEQ ID NO: 64311 - protein, 166 aa, Homo sapiens
MSNVSGILETAGVPLVSANWPQPSPPPAVPAGPQMDHMGNSSQGAPWLFLTSALARGVSGIFVWTALVLTCHQIYLHLRSYTVPQEQRYIIRLLLIVPIYAFDSWLSLLLLGDHQYYVYFDSVRDCYEAFVIYSFLSLCFQYLGGEGAIMAEIRGKPIKPLCSSAW

SEQ ID NO: 64312 - protein, 38 aa, Homo sapiens
MFQTAWRQADLKLGSSNPPRSASQVPGTTGMHHYAQLK

SEQ ID NO: 64313 - protein, 286 aa, Homo sapiens
MRHHQLHPVIKAFLCGSISGTCSTLLFQPLDLLKTRLQTLQPSDHGSRRVGMLAVLLKVVRTESLLGLWKGMSPSIVRCVPGVGIYFGTLYSLKQYFLRGHPPTALESVMLGVGSRSVAGVCMSPITVIKTRYESGKYGYESIYAALRSIYHSEGHRGLFSGLTATLLRDAPFSGIYLMFYNQTKNIVPHDQVDATLIPITNFSCGIFAGILASLVTQPADVIKTHMQLYPLKFQWIGQAVTLIFKDYGLRGFFQGGIPRALRRTLMAAMAWTVYEEMMAKMGLKS

SEQ ID NO: 64314 - protein, 258 aa, Homo sapiens
MAAKSQPNIPKAKSLDGVTNDRTASQGQWGRACCALTGPVVDIVTGHARLSDIWAKTPPITRKAAQLYTLWVTFQVLLYTSLPDFCHKFLPGYVGGIQEGAVTPAGVVNKYQINGLQAWLLTHLLWFANAHLLSWFSPTIIFDNWIPLLWCANILGYAVSTFAMVKGYFFPTSARDCKFTGNFFYNYMMGIEFNPRIGKWFDFKLFFNGRPGIVAWTLINLSFAAKQRELHSHVTNAMVLVNVLQAIYVIDFFWNETW

SEQ ID NO: 64315 - protein, 58 aa, Homo sapiens
MDDYMVLRMIGEGSFGRALLVQHESSNQMFAMKEIRLPKSFSNTQNSRKEAVLLAKMK

SEQ ID NO: 64316 - protein, 227 aa, Homo sapiens
  MOD_RES (1)..(1): Any amino acid
XLKLHLQSTDYGNFLANEASPLTVSVIDDRLKEKMVVEFRHMRNHAYEPLASFLDFITYSYMIDNVILLITGTLHQRSIAELVPKCHPLGSFEQMEAVNIAQTPAELYNAILVDTPLAAFFQDCISEQDLDEMNIEIIRNTLYKAYLESFYKFCTLLGGTTADAMCPILESCPKRTVPSSFHTVGGSTLRAWRSWLGLTTMNRSRTWPITTRSTSCSSRVQVATLET

SEQ ID NO: 64317 - protein, 58 aa, Homo sapiens
MTELPAPLSYFQNAQMSEDNHLSNTNDNRERQEHNDRRSLGHPEPLSNGRPQGNSRQV

SEQ ID NO: 64318 - protein, 120 aa, Homo sapiens
MVPSAGQLALFALGIVLAACQALENSTSPLSDPPVAAAVVSHFNDCPDSHTQFCFHGTCRFLVQEDKPACVCHSGYVGARCEHADLLAVVAASQKKQAITALVVVSIVALAVLIITCVLI

SEQ ID NO: 64319 - protein, 307 aa, Homo sapiens
MADGNEDLRADDLPGPAFESYESMELACPAERSGHVAVSDGRHMFVWGGYKSNQVRGLYDFYLPREELWIYNMETGRWKKINTEGDVPPSMSGSCAVCVDRVLYLFGGHHSRGNTNKFYMLDSRSTDRVLQWERIDCQGIPPSSKDKLGVWVYKNKLIFFGGYGYLPEDKVLGTFEFDETSFWNSSHPRGWNDHVHILDTETFTWSQPITTGKAPSPRAAHACATVGNRGFVFGGRYRDARMNDLHYLNLDTWEWNELIPQGICPVGRSWHSLTPVSSDHLFLFGGFTTDKQPLSYGTQLVPAMKEK

SEQ ID NO: 64320 - protein, 159 aa, Homo sapiens
MALTPPLLLLSAGTMTLGSPRKGLLMLLMALVTQGDPVKPSRGPLVTCTCESPHCKGPTCRGAWCTVVLVREEGRHPQEHRGCGNLHRELCRGRPTEFVNHYCCDSHLCNHNVSLVLEGKGRYGEVWRGLWHGESVAVKIFSSRDEQSWFRETEIYNTV

SEQ ID NO: 64321 - protein, 116 aa, Homo sapiens
MAEPLQPDPGAAEDAAAQAVETPGWKAPEDAGPQPGSYEIRHYGPAKWVSTSVESMDWDSAIQTGFTKLNSYIQGKNEKEMKIKMTAPVTSYVEPGSGPFSLSMDFLVPKRIKNNF

SEQ ID NO: 64322 - protein, 152 aa, Homo sapiens
MDHYDSQQTNDYMQPEEDWDRDLLLDPAWEKQQRKTFTAWCNSHLRKAGTQIENIEEDFRDGLKLMLLLEVISGERLAKPERGKMRVHKISNVNKALDFIASKGVKLVSIGAEEIVDGNVKMTLGMIWTIILRFAIQDISVEAGRMASASVL

SEQ ID NO: 64323 - protein, 188 aa, Homo sapiens
  MOD_RES (1)..(1): Any amino acid
XAPHSTFFDGIACVVAGLPSMVSRNENAQVPLIGRLLRAVQPVLVSRVDPDSRKNTINEIIKRTTSGGEWPQILVFPEGTCTNRSCLITFKPGAFIPGVPVQPVLLRYPNKLDTVTWTWQGYTFIQLCMLTFCQLFTKVEVEMFLFFWEGSSKHCLKISSFFCIFSLRRFKRRITQRTRTAHLLRLSF

SEQ ID NO: 64324 - protein, 258 aa, Homo sapiens
MTLLPGDNSDYDYSALSCTSDASFHPAFLPQRQAIKGAFYRRAQRLRPQDEPRQGCQPEDRRRRIIINVGGIKYSLPWTTLDEFPLTRLGQLKACTNFDDILNVCDDYDVTCNEFFFDRNPGAFGTILTFLRAGKLRLLREMCALSFQEELLYWGIAEDHLDGCCKRRYLQKIEEFAEMVEREEEDDALDSEGRDSEGPAEGEGRLGRCMRRLRDMVERPHSGLPGKVFACLSVLFVTVTAVNLSVSTLPSLREEEEQ

SEQ ID NO: 64325 - protein, 706 aa, Homo sapiens
  MOD_RES (1)..(1): Any amino acid
XTVLPVATIQNASTAMLMAASVARKAVVLPGGTATSPKMIAKNVLGLVPQALPKADGRAGLGTGGQKVNGASVVMVQPSKTATGPSTGGGTVISRTQSSLVEAFNKILNSKNLLPAYRPNLSPPAEAGLALPPTGYRCLECGDAFSLEKSLARHYDRRSMRIEVTCNHCARRLVFFNKCSLLLHAREHKDKGLVMQCSHLVMRPVALDQMVGQPDITPLLPVAVPPVSGPLALPALGKGEGAITSSAITTVAAEAPVLPLSTEPPAAPATSAYTCFRCLECKEQCRDKAGMAAHFQQLGPPAPGATSNVCPTCPMMLPNRCSFSAHQRMHKNRPPHVCPECGGNFLQANFQTHLREACLHVSRRVGYRCPSCSVVFGGVNSIKSHIQTSHCEVFHKCPICPMAFKSGPSAHAHLYSQHPSFQTQQAKLIYKCAMCDTVFTHKPLLSSHFDQHLLPQRVSVFKCPSCPLLFAQKRTMLEHLKNTHQSGRLEETAGKGAGGALLTPKTEPEELAVSQGGAAPATEESSSSSEEEEVPSSPEPPRPAKRPRRELGSKGLKGGGGGPGGWTCGLCHSWFPERDEYVAHMKKEHGKSVKKFPCRLCERSFCSAPSLRRHVRVNHEGIKRVYPCRSKGPGLRAVPLLPSCPLPFQVLHRGKTHLQQPPDPRETCPGPARLAAWGPVPWPGDHLGSGFQCQSPGARSETPPVF

SEQ ID NO: 64326 - protein, 1213 aa, Homo sapiens
MGKNREMRLTHICCCCLLYQLGFLSNGIVSELQFAPDREEWEVVFPALWRREPVDPAGGSGGSADPGWVRGVGGGGSARAQAAGSSREVRSVAPVPLEEPVEGRSESRLRPPPPSEGEEDEELESQELPRGSSGAAALSPGAPASWQPPPPPQPPPSPPPAQHAEPDGDEVLLRIPAFSRDLYLLLRRDGRFLAPRFAVEQRPNPGPGPTGAASAPQPPAPPDAGCFYTGAVLRHPGSLASFSTCGGGLMGFIQLNEDFIFIEPLNDTMAITGHPHRVYRQKRSMEEKVTEKSALHSHYCGIISDKGRPRSRKIAESGRGKRYSYKLPQEYNIETVVVADPAMVSYHGADAARRFILTILNMVFNLFQHKSLSVQVNLRVIKLILLHETPPELYIGHHGEKMLESFCKWQHEEFGKKNDIHLEMSTNWGEDMTSVDAAILITRKDFCVHKDEPCDTVGIAYLSGMCSEKRKCIIAEDNGLNLAFTIAHEMGHNMGINHDNDHPSCADGLHIMSGEWIKGQNLGDVSWSRCSKEDLERFLRSKASNCLLQTNPQSVNSVMVPSKLPGMTYTADEQCQILFGPLASFCQEMQHVICTGLWCKVEGEKECRTKLDPPMDGTDCDLGKWCKAGECTSRTSAPEHLAGEWSLWSPCSRTCSAGISSRERKCPGLDSEARDCNGPRKQYRICENPPCPAGLPGFRDWQCQAYSVRTSSPKHILQWQAVLDEEKPCALFCSPVGKEQPILLSEKVMDGTSCGYQGLDICANGRCQKVGCDGLLGSLAREDHCGVCNGNGKSCKIIKGDFNHTRGAGYVEVLVIPAGARRIKVVEEKPAHSYLALRDAGKQSINSDWKIEHSGAFNLAGTTVHYVRRGLWEKISAKGPTTAPLHLLVLLFQDQNYGLHYEYTIPSDPLPENQSSKAPEPLFMWTHTSWEDCDATCGGGERKTTVSCTKIMSKNISIVDNEKCKYLTKPEPQIRKCNEQPCQTRWMMTEWTPCSRTCGKGMQSRQVACTQQLSNGTLIRARERDCIGPKPASAQRCEGQDCMTVWEAGVWSECSVKCGKGIRHRTVRCTNPRKKCVLSTRPREAEDCEDYSKCYVWRMGDWSKCSITCGKGMQSRVIQCMHKITGRHGNECFSSEKPAAYRPCHLQPCNEKINVNTITSPRLAALTFKCLGDQWPVYCRVIREKNLCQDMRWYQRCCETCRDFYAQKLQQKS

SEQ ID NO: 64327 - protein, 348 aa, Homo sapiens
EEDEVPDDETVNQMIARHEEEFDLFMRMDLDRRREEARNPKRKPRLMEEDELPSWIIKDDAEVERLTCEEEEEKMFGRGSRHRKEVDYSDSLTEKQWLKAIEEGTLEEIEEEVRQKKSSRKRKRDSDAGSSTPTTSTRSRDKDDESKKQKKRGRPPAEKLSPNPPNLTKKMKKIVDAVIKYKDSSSGRQLSEVFIQLPSRKELPEYYELIRKPVDFKKIKERIRNHKYRSLNDLEKDVMLLCQNAQTFNLEGSLIYEDSIVLQSVFTSVRQKIEKEDDSEGEESEEEEEGEEEGSESESRSVKVKIKLGRKEKAQDRLKGGRRRPSRGSRAKPVVSDDDSEEEQEEAS

SEQ ID NO: 64328 - protein, 728 aa, Homo sapiens
IKEYEKSSEGALYILEIVTIVVFGVEYFVRIWAAGCCCRYRGWRGRLKFARKPFCVIDIMVLIASIAVLAAGSQGNVFATSALRSLRFLQILRMIRMDRRGGTWKLLGSVVYAHSKELVTAWYIGFLCLILASFLVYLAEKGENDHFDTYADALWWGLITLTTIGYGDKYPQTWNGRLLAATFTLIGVSFFALPAGILGSGFALKVQEQHRQKHFEKRRNPAAGLIQSAWRFYATNLSRTDLHSTWQYYERTVTVPMYSSQTQTYGASRLIPPLNQLELLRNLKSKSGLAFRKDPPPEPSPSPRGVAAKGKGSPQAQTVRRSPSADQSLEDSPSKVPKSWSFGDRSRARQAFRIKGAASRQNSEEASLPGEDIVDDKSCPCEFVTEDLTPGLKVSIRAVCVMRFLVSKRKFKESLRPYDVMDVIEQYSAGHLDMLSRIKSLQSRVDQIVGRGPAITDKDRTKGPAEAELPEDPSMMGRLGKVEKQVLSMEKKLDFLVNIYMQRMGIPPTETEAYFGAKEPEPAPPYHSPEDSREHVDRHGCIVKIVRSSSSTGQKNFSAPPAAPPVQCPPSTSWQPQSHPRQGHGTSPVGDHGSLVRIPPPPAHERSLSAYGGGNRASMEFLRQEDTPGCRPPEGNLRDSDTSISIPSVDHEELERSFSGFSISQSKENLDALNSCYAAVAPCAKVRPYIAEGESDTDSDLCTPCGPPPRSATGEGPFGDVGWAGPRK

SEQ ID NO: 64329 - protein, 82 aa, Homo sapiens
MAPKKAKKRAGGANSNVFSMFEQTQIQEFKEVGAAIESSAWMEIPPTRENLLFVPYSQQGPFIRCLYPPNNPKFGLNGCVNF

SEQ ID NO: 64330 - protein, 142 aa, Homo sapiens
  MOD_RES (1)..(1): Any amino acid
XLQDNTKSSAQPENLIPMWSSDIVTGEKNEPVKPLQPLIKEQKPKDQSLALSPKLECSGTILAHSNLRLLGSSDSPASASRVAGITGVCHHAQMESHSVAQAGVQWCDLSLLQPPPPGFKQFFYLSLLSSWDYRIKLLVNVL

SEQ ID NO: 64331 - protein, 124 aa, Homo sapiens
  MOD_RES (1)..(1): Any amino acid
XADAAGWVDVDKETLQHRRYPNVFGIGDCTNLPTSKTAAAVAAQSGILDRTISVIMKNQTPTKKYDGYTSCPLVTGYNRVILAEFDYKAEPLETFPFDQSKERLSMYLMKADLMPFLYWNMMLR

SEQ ID NO: 64332 - protein, 2498 aa, Homo sapiens
MDPSGVKVLETAEDIQERRQQVLDRYHRFKELSTLRRQKLEDSYRFQFFQRDAEELEKWIQEKLQIASDENYKDPTNLQGKLQKHQAFEAEVQANSGAIVKLDETGNLMISEGHFASETIRTRLMELHRQWELLLEKMREKGIKLLQAQKLVQYLRECEDVMDWINDKEAIVTSEELGQDLEHVEVLQKKFEEFQTDMAAHEERVNEVNQFAAKLIQEQHPEEELIKTKQDEVNAAWQRLKGLALQRQGKLFGAAEVQRFNRDVDETISWIKEKEQLMASDDFGRDLASVQALLRKHEGLERDLAALEDKVKALCAEADRLQQSHPLSATQIQVKREELITNWEQIRTLAAERHARLNDSYRLQRFLADFRDLTSWVTEMKALINADELASDVAGAEALLDRHQEHKGEIDAHEDSFKSADESGQALLAAGHYASDEVREKLTVLSEERAALLELWELRRQQYEQCMDLQLFYRDTEQVDNWMSKQEAFLLNEDLGDSLDSVEALLKKHEDFEKSLSAQEEKITALDEFATKLIQNNHYAMEDVATRRDALLSRRNALHERAMRRRAQLADSFHLQQFFRDSDELKSWVNEKMKTATDEAYKDPSNLQGKVQKHQAFEAELSANQSRIDALEKAGQKLIDVNHYAKDEVAARMNEVISLWKKLLEATELKGIKLREANQQQQFNRNVEDIELWLYEVEGHLASDDYGKDLTNVQNLQKKHALLEADVAAHQDRIDGITIQARQFQDAGHFDAENIKKKQEALVARYEALKEPMVARKQKLADSLRLQQLFRDVEDEETWIREKEPIAASTNRGKDLIGVQNLLKKHQALQAEIAGHEPRIKAVTQKGNAMVEEGHFAAEDVKAKLHELNQKWEALKAKASQRRQDLEDSLQAQQYFADANEAESWMREKEPIVGSTDYGKDEDSAEALLKKHEALMSDLSAYGSSIQALREQAQSCRQQVAPTDDETGKELVLALYDYQEKSPREVTMKKGDILTLLNSTNKDWWKVEVNDRQGFVPAAYVKKLDPAQSASRENLLEEQGSIALRQEQIDNQTRITKEAGSVSLRMKQVEELYHSLLELGEKRKGMLEKSCKKFMLFREANELQQWINEKEAALTSEEVGADLEQVEVLQKKFDDFQKDLKANESRLKDINKVAEDLESEGLMAEEVQAVQQQEVYGMMPRDETDSKTASPWKSARLMVHTVATFNSIKELNERWRSLQQLAEERSQLLGSAHEVQRFHRDADETKEWIEEKNQALNTDNYGHDLASVQALQRKHEGFERDLAALGDKVNSLGETAERLIQSHPESAEDLQEKCTELNQAWSSLGKRADQRKAKLGDSHDLQRFLSDFRDLMSWINGIRGLVSSDELAKDVTGAEALLERHQEHRTEIDARAGTFQAFEQFGQQLLAHGHYASPEIKQKLDILDQERADLEKAWVQRRMMLDQCLELQLFHRDCEQAENWMAAREAFLNTEDKGDSLDSVEALIKKHEDFDKAINVQEEKIAALQAFADQLIAAGHYAKGDISSRRNEVLDRWRRLKAQMIEKRSKLGESQTLQQFSRDVDEIEAWISEKLQTASDESYKDPTNIQLSKLLSKHQKHQAFEAELHANADRIRGVIDMGNSLIERGACAGSEDAVKARLAALADQWQFLVQKSAEKSQKLKEANKQQNFNTGIKDFDFWLSEVEALLASEDYGKDLASVNNLLKKHQLLEADISAHEDRLKDLNSQADSLMTSSAFDTSQVKDKRDTINGRFQKIKSMAASRRAKLNESHRLHQFFRDMDDEESWIKEKKLLVGSEDYGRDLTGVQNLRKKHKRLEAELAAHEPAIQGVLDTGKKLSDDNTIGKEEIQQRLAQFVEHWKELKQLAAARGQRLEESLEYQQFVANVEEEEAWINEKMTLVASEDYGDTLAAIQGLLKKHEAFETDFTVHKDRVNDVCTNGQDLIKKNNHHEENISSKMKGLNGKVSDLEKAAAQRKAKLDENSAFLQFNWKADVVESWIGEKENSLKTDDYGRDLSSVQTLLTKQETFDAGLQAFQQEGIANITALKDQLLAAKHVQSKAIEARHASLMKRWSQLLANSAARKKKLLEAQSHFRKVEDLFLTFAKKASAFNSWFENAEEDLTDPVRCNSLEEIKALREAHDAFRSSLSSAQADFNQLAELDRQIKSFRVASNPYTWFTMEALEETWRNLQKIIKERELELQKEQRRQEENDKLRQEFAQHANAFHQWIQETRTYLLDGIAYRRVIRVYQYEVGDDLSGRSCMVEESGTLESQLEATKRKHQEIRAMRSQLKKIEDLGAAMEEALILDNKYTEHSTVGLAQQWDQLDQLGMRMQHNLEQQIQARNTTGVTEEALKEFSMMFKHFDKDKSGRLNHQEFKSCLRSLGYDLPMVEEGEPDPEFEAILDTVDPNRDGHVSLQEYMAFMISRETENVKSSEEIESAFRALSSEGKPYVTKEELYQNLTREQADYCVSHMKPYVDGKGRELPTAFDYVEFTRSLFVN

SEQ ID NO: 64333 - protein, 75 aa, Homo sapiens
MIKTVEINGEKVKLQIWDTAGQERFRSITQSYYRSANALILTYDITCEESFRCLPEWLREIEQYASNKVITVLVG

SEQ ID NO: 64334 - protein, 154 aa, Homo sapiens
MPTVVVMDVSLSMTRPVSIEGSEEYQRKHLAAHGLTMLFEHMATNYKLEFTALVVFSSLWELMVPFTRDYNTLQEALSNMDDYDKTCLESALVGVCNIVQQEWGGAIPCQVVLVTDGCLGIGRGSLRHSLATQNQRSESNSSRAPIPWNALNVS

SEQ ID NO: 64335 - protein, 28 aa, Homo sapiens
  MOD_RES (1)..(1): Any amino acid
XDALDQAQQVEKLMEAMRSCPDKAQDKH

SEQ ID NO: 64336 - protein, 864 aa, Homo sapiens
QLLSFSKLPEPTSGVIARAAEIMETSIQAMKRKVNLKTQQSQHPTDALSEDLLSIIANMSGCLPYMLPPKCPNTCLANKYRPITGACNNRDHPRWGASNTALARWLPPVYEDGFSQPRGWNPGFLYNGFPLPPVREVTRHVIQVSNEVVTDDDRYSDLLMAWGQYIDHDIAFTPQSTSKAAFGGGADCQMTCENQNPCFPIQLPEEARPAAGTACLPFYRSSAACGTGDQGALFGNLSTANPRQQMNGLTSFLDASTVYGSSPALERQLRNWTSAEGLLRVHARLRDSGRAYLPFVPPRAPAACAPEPGIPGETRGPCFLAGDGRASEVPSLTALHTLWLREHNRLAAALKALNAHWSADAVYQEARKVVGALHQIITLRDYIPRILGPEAFQQYVGPYEGYDSTANPTVSNVFSTAAFRFGHATIHPLVRRLDASFQEHPDLPGLWLHQAFFSPWTLLRGGGLDPLIRGLLARPAKLQVQDQLMNEELTERLFVLSNSSTLDLASINLQRGRDHGLPGYNEWREFCGLPRLETPADLSTAIASRSVADKILDLYKHPDNIDVWLGGLAENFLPRARTGPLFACLIGKQMKALRDGDWFWWENSHVFTDAQRRELEKHSLSRVICDNTGLTRVPMDAFQVGKFPEDFESCDSITGMNLEAWRETFPQDDKCGFPESVENGDFVHCEESGRRVLVYSCRHGYELQGREQLTCTQEGWDFQPPLCKDSGRLPRVTWISMSLAALLIGGFAGLTSTVICRWTRTGTKSTLPISETGGGTPELRCGKHQAVGTSPQRAAAQDSEQVGHTMPHVSSCHRSGWTGSGCRSSSAGAPCIFLFTPCFLVRSAPSSGRFYLQANDSEPECEPA

SEQ ID NO: 64337 - protein, 100 aa, Homo sapiens
RYDSLLGRSGSYSYLEERKPYSSRLEKDDSTDFKKLYEQILAENEKLKAQLHDTNMELTDLKLQLEKATQRQERFADRSLLEMEKRVTGKRTKSSRKKNI

SEQ ID NO: 64338 - protein, 201 aa, Homo sapiens
MAPHWAVWLLAARLWGLGIGAEVWWNLVPRKTVSSGELATVVRRFSQTGIQDFLTLTLTEPTGLLYVGAREALFAFSMEALELQGAISWEAPVEKKTECIQKGKNNQTECFNFIRFLQPYNASHLYVCGTYAFQPKCTYVNMLTFTLEHGEFEDGKGKCPYDPAKGHAGLLVDGELYSATLNNFLGTEPIILRNMGPHHSM

SEQ ID NO: 64339 - protein, 438 aa, Homo sapiens
  MOD_RES (1)..(1): Any amino acid
XLITSLQNARDIQDMRIKKKQRQRVFPQPGSLYLAKTSTLPRISLKAAVGGQVPSACSHKQLYTYGVSKHCIKINSKNAESFQFHTEDYFGKESLWTGKGIQLADGGWLIPSNDGKAGKEEFYRALCDTPGVDPKLISRIWVYNHYRWIIWKLAAMECAFPKEFANRCLSPERVLLQLKYRYDTEIDRSRRSAIKKIMERDDTAAKTLVLCVSDIISLSANISETSSNKTSSADTQKVAIIELTDGWYAVKAQLDPPLLAVLKNGRLTVGQKIILHGAELVGSPDACTPLEAPESLMLKISANSTRPARWYTKLGFFPDPRPFPLPLSSLFSDGGNVGCVDVIIQRAYPIQWMEKTSSGLYIFRNEREEEKEAAKYVEAQQKRLEALFTKIQEEFEEHEVPHGWGGLRKLTIIVEDEGEASTFFTRWQEREYRENSHF

SEQ ID NO: 64340 - protein, 69 aa, Homo sapiens
RQPDNAKALYRAGVAFFHLQDYDQARHYLLAAVNRQPKDANVRRYLQLTQSELSSYHRKEKQLYLGMFG

SEQ ID NO: 64341 - protein, 479 aa, Homo sapiens
MLISAASMAPEVCGPSLQGTPGPPPPLLPKPGKDNLRLQKLLRKAARKKMMGGTHLAPPRAFRTSLSPVSEASHDQEVTAPHAAEGPHPAEAPRLPEAPRPAEAPRMVAALPRSPHTPIIHHVASPLQKSTFSIGLTQRRILAAQFRAMGPQVVASAPEPTRPPSGFVPVSGGGGTHVTQVHIQLAPSPHNGTPEPPRTAPEVGSNSQDGDATPSPPRAQPLVPVAHIRPLPTTVQAASPLPEEPPVPRPPPGFQASVPREASARVVVPIAPTCRSLESSPHSLVPMGPGREHLEEPPMAGPAAEAERVSSPAWASSPTPPSGPHPCPVPKVAPKPRLSGWTWLKKQLLEEAPEPPCPEPRQSLEPEVPTPTEQEVPAPTEQEVPALTAPRAPASRTSRMWDAVLYRMSVAEAQGRLAGPSGGEHTPASLTRLPFLYRPRFNARKLQEATRPPPTVRSILELSPQPKNFNRTATGWRLQ

SEQ ID NO: 64342 - protein, 185 aa, Homo sapiens
MGNWESEGQVGEKGAPAGITGQMNPFEEVPEAHRASPREGTSGGERLQDLVKSKMSETSRTAFGGRRAVPPNNSNAAEDDLPTVELQGVVPRGVNLQEFLNVTSVHLFKERWDTNKVDHHTDKYENNKLIVRRGQSFYVQIDFSRPYDPRRDLFRVEYVIGRYPQENKGTYIPVPIVSELQSGKW

SEQ ID NO: 64343 - protein, 354 aa, Homo sapiens
MSSKYPRSVRRCLPLCALTLEAALILLFYFFTHYDASLEDQKGLVASYQVGQDLTVMAALGLGFLTSNFRRHSWSSVAFNLFMLALGVQWAILLDGFLSQFPPGKVVITLFSIRLATMSAMSVLISAGAVLGKVNLAQLVVMVLVEVTALGTLRMVISNIFNTDYHMNLRHFYVFAAYFGLTVAWCLPKPLPKGTEDNDQRATIPSLSAMLGALFLWMFWPSVNSALLRSPIQRKNAMFNTYYALAVSVVTAISGSSLAHPQRKISMTYVHSAVLAGGVAVGTSCHLIPSPWLAMVLGLVAGLISIGGAKCLPDWLPGPPQHWGTQLGHRDSSHVWSPDRFAPKSQNMESTSCG

SEQ ID NO: 64344 - protein, 49 aa, Homo sapiens
MLLPVFTLKLRHKISPRMVAIGRYDGTHPCLAAATQTGKGQTCLPVDSL

SEQ ID NO: 64345 - protein, 169 aa, Homo sapiens
  MOD_RES (1)..(1): Any amino acid
XRTSNTQVDSVKSSRSDSNFQVPNGGIPRMQPQASATSQRLKNLPRTSLKAKQLLQTSSTKRVPSPGKFRSPAAPSPLALRQPVKAFSNHGSGSPGSQEITQLTQTTSSPGPPMVQSTVSANPPSNINSATLTRPAGTTAMRSGLPRPSAPSAGGIPVPRSKLAQPVRR

SEQ ID NO: 64346 - protein, 60 aa, Homo sapiens
MRKVLETVFDEVIMVDVLDSGDSAHLTLMKRPELGVTLTKLHCWSLTQYSKCVFMDADTL

SEQ ID NO: 64347 - protein, 124 aa, Homo sapiens
MGSSRLRVFDPHLERKDSAAALSDRELPLPTFDVPYFKYIDEEDEDDEWSSRSQSSTEDDSVDSLLSDRYVVVSGTPEKILEHLLNDLHLEEVQDKETVIPTPGITCVTSAMCSQSQADQDFMA

SEQ ID NO: 64348 - protein, 92 aa, Homo sapiens
  MOD_RES (1)..(1): Any amino acid
XVEEIKKMKIGDPLDRSTDHGPQNHKAHLEKLLQYCETGVKEGATLVYGGRQVQRPGFFMEPTVFTDVEDYMYLAKEESFGPIMVISKFQNG

SEQ ID NO: 64349 - protein, 248 aa, Homo sapiens
MKGCLLKADFLLQTFIFTDGEDEALARHTGNVVITNCSAAHSRQALSCKMAVEYDRFIESGRKWFCHVDDDNYVNLRALLRLLASYPHTRDVYVGKPSLDRPIQAMERVSENKVRPVHFWFATGGAGFCISRGLALKMSPWASGGHFMNTAERIRLPDDCTIGYIVEALLGVPLIRSGLFHSHLENLQQVPTSELHEQVTLSYGMFENKRNAVHVKGPFSVEADPSRFRSIHCHLYPDTPWCPRTAIF

SEQ ID NO: 64350 - protein, 194 aa, Homo sapiens
MPKFKAARGVGGQEKHAPLADQILAGNAVRAGVREKRRGRGTGEAEEEYVGPRLSRRILQQARQQQEELEAEHGTGDKPAAPRERTTRLGPRMPQDGSDDEDEEWPTLEKAATMTAAGHHAEVVVDPEDERAIEMFMNKNPPARYYLSTAVENCPRHLRSSLHSPTGSKSSTSQSRRPGLQLPCTRPPGFLPLT

SEQ ID NO: 64351 - protein, 732 aa, Homo sapiens
MSSTRSQNPHGLKQIGLDQIWDDLRAGIQQVYTRQSMAKSRYMELYTHVYNYCTSVHQSNQARGAGVPPSKSKKGQTPGGAQFVGLELYKRLKEFLKNYLTNLLKDGEDLMDESVLKFYTQQWEDYRFSSKVLNGICAYLNRHWVRRECDEGRKGIYEIYSLALVTWRDCLFRPLNKQVTNAVLKLIEKERNGETINTRLISGVVQSYVELGLNEDDAFAKGPTLTVYKESFESQFLADTERFYTRESTEFLQQNPVTEYMKKAEARLLEEQRRVQVYLHESTQDELARKCEQVLIEKHLEIFHTEFQNLLDADKNEDLGRMYNLVSRIQDGLGELKKLLETHIHNQGLAAIEKCGEAALNDPKMYVQTVLDVHKKYNALVMSAFNNDAGFVAALDKACGRFINNNAVTKMAQSSSKSPELLARYCDSLLKKSSKNPEEAELEDTLNQVMVVFKYIEDKDVFQKFYAKMLAKRLVHQNSASDDAEASMISKLKQACGFEYTSKLQRMFQDIGVSKDLNEQFKKHLTNSEPLDLDFSIQVLSSGSWPFQQSCTFALPSEASTFQMAILLQYNTEDAYTVQQLTDSTQIKMDILAQVLQILLKSKLLVLEDENANVDEVELKPDTLIKLYLGYKNKKLRVNINVPMKTEQKQEQETTHKNIEEDRKLLIQAAIVRIMKMRKVLKHQQLLGEVLTQLSSRFKPRVPVIKKCIDILIEKEYLERVDGEKDTYSYLA

SEQ ID NO: 64352 - protein, 492 aa, Homo sapiens
MAAKSQPNIPKAKSLDGVTNDRTASQGQWGRAWEVDWFSLASVIFLLLFAPFIVYYFIMACDQYSCALTGPVVDIVTGHARLSDIWAKTPPITRKAAQLYTLWVTFQVLLYTSLPDFCHKFLPGYVGGIQEGAVTPAGVVNKYQINGLQAWLLTHLLWFANAHLLSWFSPTIIFDNWIPLLWCANILGYAVSTFAMVKGYFFPTSARDCFPGEPCWLVPIPMAGQCKFTGNFFYNYMMGIEFNPRIGKWFDFKLFFNGRPGIVAWTLINLSFAAKQRELHSHVTNAMVLVNVLQAIYVIDFFWNETWYLKTIDICHDHFGWYLGWGDCVWLPYLYTLQGLYLVYHPVQLSTPHAVGVLLLGLVGYYIFRVANHQKDLFRRTDGRCLIWGRKPKVIECSYTSADGQRHHSKLLVSGFWGVARHFNYVGDLMGSLAYCLACGGGHLLPYFYIIYMAILLTHRCLRDEHRCASKYGRDWERYTAAVPYRLLPGIF

SEQ ID NO: 64353 - protein, 380 aa, Homo sapiens
EGLLVGLKNGQILKIFVDNLFAIVLLKQATAVRCLDMSASRKKLAVVDENDTCLVYDIDTKELLFQEPNANSVAWNTQCEDMLCFSGGGYLNIKASTFPVHRQKLQGFVVGYNGSKIFCLHVFSISAVEVPQSAPMYQYLDRKLFKEAYQIACLGVTDTDWRELAMEALEGLDFETAKKERKKRGETNNDLFLADVFSYQGKFHEAAKLYKRSGHENLALEMYTDLCMFEYAKDFLGSGDPKETKMLITKQADWARNIKEPKAAVEMYISAGEHVKAIEICGDHGWVDMLIDIARKLDKAEREPLLLCATYLKKLDSPGYAAETYLKMGDLKSLVQLHVETQRWDEAFALGEKHPEFKDDIYMPYAQWLAENDRFEEAQK

SEQ ID NO: 64354 - protein, 53 aa, Homo sapiens
MSDFVESEAEESEEEYNDEGEVVPRVTKKFVEEEDDGEEAPASSFSPLLLSFG

SEQ ID NO: 64355 - protein, 101 aa, Homo sapiens
MAAARDPPEVSLREATQRKLRRFSELRGKLVARGEFWDIVAITAADEKQELAYNQQLSEKLKRKELPLGVQYHVFVDPAGAKIVETGFHHVSQDGLYLLTS

SEQ ID NO: 64356 - protein, 243 aa, Homo sapiens
MLLPVFTLKLRHKISPRMVAIGRYDGTHPCLAAATQTGKVFIHNPHTRNQHVSASRVFQSPLESDVSLLSINQAVSCLTAGVLNPELGYDALLVGTQTNLLAYDVYNNSDLFYREVADGANAIVLGTLGDISSPLAIIGGNCALQGFNHEGSDLFWTVTGDNVNSLALCDFDGDGKKELLVGSEDFDIRVFKEDEIVAEMTETESPLFVPCMAVDLVMPFPMAQLEFMTKHPDTGELNRKIMP

SEQ ID NO: 64357 - protein, 147 aa, Homo sapiens
  MOD_RES (1)..(1): Any amino acid
XTHTSGSLSSRDSQAGDSASRAGGRVKTWKRRWFILTDNCLYYFEFTTDKEPRGIIPLENLSVQKVDDPKKPFCLELYNPSCRGQKIKACKTDGDGRVVEGKHESYRISATSAEERDQWIESIRASITRVPFYDLVSTRKKKIASKQ

SEQ ID NO: 64358 - protein, 565 aa, Homo sapiens
MHCKVSLLDDTVYECVVEKHAKGQDLLKRVCEHLNLLEEDYFGLAIWDNATSKTWLDSAKEIKKQVRGVPWNFTFNVKFYPPDPAQLTEDITRYYLCLQLRQDIVAGRLPCSFATLALLGSYTIQSELGDYDPELHGVDYVSDFKLAPNQTKELEEKVMELHKSYRSMTPAQADLEFLENAKKLSMYGVDLHKAKDLEGVDIILGVCSSGLLVYKDKLRINRFPWPKVLKISYKRSSFFIKIRPGEQEQYESTIGFKLPSYRAAKKLWKVCVEHHTFFRLTSTDTIPKSKFLALGSKFRYSGRTQAQTRQASALIDRPAPHFERTASKRASRSLDGAAAVDSADRSPRPTSAPAITQGQVAEGGVLDASAKKTVVPKAQKETVKAEVKKEDEPPEQAEPEPTEAWKDLDKSQEEIKKHHASISELKKNFMESVPEPRPSEWDKRLSTHSPFRTLNINGQIPTGEGVKKTSVLPSERKVGGPETQERALLVQDEEKIKRQERSTERALPQQENEEILPKVSIPIPEDHKSLKKCHLYFSTFPSPRIPFMMSFLVILVLAVWWLVFL

SEQ ID NO: 64359 - protein, 101 aa, Homo sapiens
MAGILRLVVQWPPGRLQTVTKGVESLICTDWIRHKFTRSRIPEKVFQASPEDHEKYGGDPQNPHKLHIVTRIKSTRRRPYWEKDIIKMLGLEKVCNYFNHL

SEQ ID NO: 64360 - protein, 198 aa, Homo sapiens
MVLLAGTGPEGGGARCMTPPPPSPPRGAQVEEDPADYEEFEDFSSLPDTRSIASDDSFYPFEDEEEHGVESAESVPEGVPESVPETATLLRAACANNVGLLRTLVRRGVSVEEAQETDRNGRTGLIVACYHGFVDTVVALAECPHVDVNWQDSEGNTALITAAQAGAAPVPMGIVSLDTGSQSCASGVSITWAGSCEH

SEQ ID NO: 64361 - protein, 193 aa, Homo sapiens
MLRECIRHEPLAKIILFSNQFRDFFKYVELSTFDIASDAFATFKDLLTRHKVLVADFLEQNYDTIFEDYEKLLQSENYVTKRQSLKLLGELILDRHNFAIMTKYISKPENLKLMMNLLRDKSPNIQFEAFHVFKVFVASPHKTQPIVEILLKNQPKLIEFLSSFQKERTDDEQFADEKNYLIKQIRDLKKTAP

SEQ ID NO: 64362 - protein, 24 aa, Homo sapiens
  MOD_RES (1)..(1): Any amino acid
XPTGSGKTTFIICRGAAGRSTGQI

SEQ ID NO: 64363 - protein, 139 aa, Homo sapiens
MAAAALRSGWCRCPRRCLGSGIQFLSSHNLPHGSTYQMRRPGGELPLSKSYSSGNRKGFLSGLLDNVKQELAKNKEMKESIKKFRDEARRLEESDVLQEARRKYEEVAVSRERATVLQPRQRRHCLKKKKKKKDTALFT

SEQ ID NO: 64364 - protein, 115 aa, Homo sapiens
MQTIKCVVVGDGAVGKTCLLISYTTNKFPSEYVPTVFDNYAVTVMIGGEPYTLGLFDTAGQEDYDRLRPLSYPQTDVFLVCFSVVSPSSFENVKEKWVPEITHHCPKTPFLLVGT

SEQ ID NO: 64365 - protein, 109 aa, Homo sapiens
MTLHNNSTTSPLFPNISSSWIHSPSDAGLPPGTVTHFGSYNVSRAAGNFSSPDGTTDDPLGGHTVWQVVFIAFLTGILALVTIIGNILVIVSFKVNKQLKTVNNYFLLS

SEQ ID NO: 64366 - protein, 300 aa, Homo sapiens
MAVAQQLRAESDFEQLPDDVAISANIADIEEKRGFTSHFVFVIEVKTKGGSKYLIYRRYRQFHALQSKLEERFGPDSKSSALACTLPTLPAKVYVGVKQEIAEMRIPALNAYMKSLLSLPVWVLMDEDVRIFFYQSPYDSEQVPQALRRLRPRTRKVKSVSPQGNSVDRMAAPRAEALFDFTGNSKLELNFKAGDVIFLLSRINKDWLEGTVRGATGIFPLSFVKILKDFPEEDDPTNWLRCYYYEDTISTIKDIAVEEDLSSTPLLKDLLELTRREFQREDIALNYRDAEGDLVRLLSD

SEQ ID NO: 64367 - protein, 100 aa, Homo sapiens
MALLALLLVVALPRVWTDANLTARQRDPEDSQRTDEGDNRVWCHVCERENTFECQNPRRCKWTEPYCVIAAVRRSSGLVNSDSAQQSLSSPSVSTKLVGC

SEQ ID NO: 64368 - protein, 49 aa, Homo sapiens
MAGPRVEVDGSIMEGGGQILRVSTALSCLLGLPLRVQKIRAGRSTPGLR

SEQ ID NO: 64369 - protein, 153 aa, Homo sapiens
MLPPGEWMCHRCTVRRKKREQKKELGHVNGLVDKSGKRTTSPSSDTDLLDRSASKTELKAIAHARILERRASRPGTPTSSASTETPTSEQNDVDEDIIDVDEEPVAAEPDYVQPQLRRPFELLIAAAMERNPTQFQLPNELTCTTALPGSSKR

SEQ ID NO: 64370 - protein, 1192 aa, Homo sapiens
MSRGAGALQRRTTTYLISLTLVKLESVPPPPPSPSAAAAGAAGARGSETGDPGSPRGAEEPGKKRHERLFHRQDALWISTSSAGTGGAEPPALSPAPASPARPVSPAPGRRLSLWAVPPGPPLSGGLSPDPKPGGAPTSSRRPLLSSPSWGGPEPEGRAGGGIPGSSSPHPGTGSRRLKVAPPPPAPKPCKTVTTSGAKAGGGKGAGSRLSWPESEGKPRVKGSKSSAGTGASVSAAATAAAAGGGGSTASTSGGVGAGAGARGKLSPRKGKSKTLDNSDLHPGPPAGSPPPLTLPPTPSPATAVTAASAQPPGPAPPITLEPPAPGLKRGREGGRASTRDRKMLKFISGIFTKSTGGPPGSGPLPGPPSLSSGSGSRELLGAELRASPKAVINSQEWTLSRSIPELRLGVLGDARSGKSSLIHRFLTGSYQVLEKTESEQYKKEMLVDGQTHLVLIREEAGAPDAKFSGWADAVIFVFSLEDENSFQAVSRLHGQLSSLRGEGRGGLALALVGTQDRISASSPRVVGDARARALCADMKRCSYYETCATYGLNVDRVFQEVAQKVVTLRKQQQLLAACKSLPSSPSHSAASTPVAGQASNGGHTSDYSSSLPSSPNVGHRELRAEAAAVAGLSTPGSLHRAAKRRTSLFANRRGSDSEKRSLDSRGETTGSGRAIPIKQSFLLKRSGNSLNKEWKKKYVTLSSNGFLLYHPSINDYIHSTHGKEMDLLRTTVKVPGKRPPRAISAFGPSASINGLVKDMSTVQMGEGLEATTPMPSPSPSPSSLQPPPDQTSKHLLKPDRNLARALSTDCTPSGDLSPLSREPPPSPMVKKQRRKKLTTPSKTEGSAGQAEAKRKMWKLKSFGSLRNIYKAEENFEFLIVSSTGQTWHFEAASFEERDAWVQAIESQILASLQCCESSKVKLRTDSQSEAVAIQAIRNAKGNSICVDCGAPNPTWASLNLGALICIECSGIHRNLGTHLSRVRSLDLDDWPRELTLVLTAIGNDTANRVWESDTRGRAKPSRDSSREERESWIRAKYEQLLFLAPLSTSEEPLGRQLWAAVQAQDVATVLLLLAHARHGPLDTSVEDPQLRSPLHLAAELAHVVITQLLLWYGADVAARDAQGRTALFYARQAGSQLCADILLQHGCPGEGGSAATTPSAATTPSITATPSPRRRSSAASVGRADAPVALV

SEQ ID NO: 64371 - protein, 99 aa, Homo sapiens
MLALLVLVTVALASAHHGGEHFEGEKVFRVNVEDENHINIIRELASTTQIDFWKPDSVTQIKPHSTVDFRVKAEDTVTVENVLKQNELQYKVLISNLRN

SEQ ID NO: 64372 - protein, 177 aa, Homo sapiens
MATDWLGSIVSINCGDSLGVYQGRVSAVDQVSQTISLTRPFHNGVKCLVPEVTFRAGDITELKILEIPGPGDNQHFGDLHQTELGPSGAGCQVGINQNGTGKFVKKPASSSSAPQNIPKRTDVKSQDVAVSPQQQQCSKSYVDRHMESLSQSKSFRRRHNSWSSSSRHPNQATPKKS

SEQ ID NO: 64373 - protein, 68 aa, Homo sapiens
MADTTPNGPQGAGAVQFMMTNKLDTAMWLSRLFTVYCSALFVLPLLGVQMSCFKKERSSALSILTPVN

SEQ ID NO: 64374 - protein, 389 aa, Homo sapiens
MAEDVSSAAPSPRGCADGRDADPTEEQMAETERNDEEQFECQELLECQVQVGAPEEEEEEEEDAGLVAEAEAVAAGWMLDFLCLSLCRAFRDGRSEDFRRTRNSAEAIIHGLSSLTACQLRTIYICQFLTRIAAGKTLDAQFENDERITPLESALMIWGSIEKEHDKLHEEIQNLIKIQAIAVCMENGNFKEAEEVFERIFGDPNSHMAAAKVVESKRTRTITSQDKPSGNDVEMETEANLDTRKSVSDKQSAVTESSEGTVSLLRSHKNLFLSKLQHGTQQQDLNKKERRVGTPQSTKKKKESRRATESRIPVSKSQPVTPEKHRARKRQAWLWEEDKNLRSGVRKYGEGNWSKILLHYKFNNRTSVMLKDRWRTMKKLKLISSDSED

SEQ ID NO: 64375 - protein, 1827 aa, Homo sapiens
KTFKKVKPCGICRQVITQEGCTCKVCSFSCHRKCQAKVAAPCVPPSNHELVPITTENAPKNVVDKGEGASRGGNTRKSLEDNGSTRVTPSVQPHLQPIRNMSVSRTMEDSCELDLVYVTERIIAVSFPSTANEENFRSNLREVAQMLKSKHGGNYLLFNLSERRPDITKLHAKVLEFGWPDLHTPALEKICSICKAMDTWLNADPHNVVVLHNKGNRGRIGVVIAAYMHYSNISASADQALDRFAMKRFYEDKIVPIGQPSQRRYVHYFSGLLSGSIKMNNKPLFLHHVIMHGIPNFESKGGCRPFLRIYQAMQPVYTSGIYNIPGDSQTSVCITIEPGLLLKGDILLKCYHKKFRSPARDVIFRVQFHTCAIHDLGVVFGKEDLDDAFKDDRFPEYGKVEFVFSYGPEKIQGMEHLENGPSVSVDYNTSDPLIRWDSYDNFSGHRDDGMEEVVGHTQGPLDGSLYAKVKKKDSLHGSTGAVNATRPTLSATPNHVEHTLSVSSDSGNSTASTKTDKTDEPVPGASSATAALSPQEKRELDRLLSGFGLEREKQGAMYHTQHLRSRPAGGSAVPSSGRHVVPAQVHVNGGALASERETDILDDELPNQDGHSAGSMGTLSSLDGVTNTSEGGYPEALSPLTNGLDKSYPMEPMVNGGGYPYESASRAGPAHAGHTAPMRPSYSAQEGLAGYQREGPHPAWPQPVTTSHYAHDPSGMFRSQSFSEAEPQLPPAPVRGGSSREAVQRGLNSWQQQQQQQQQPRPPPRQQERAHLESLVASRPSPQPLAETPIPSLPEFPRAASQQEIEQSIETLNMLMLDLEPASAAAPLHKSQSVPGAWPGASPLSSQPLSGSSRQSHPLTQSRSGYIPSGHSLGTPEPAPRASLESVPPGRSYSPYDYQPCLAGPNQDFHSKSPASSSLPAFLPTTHSPPGPQQPPASLPGLTAQPLLSPKEATSDPSRTPEEEPLNLEGLVAHRVAGVQAREKQPAEPPAPLRRRAASDGQYENQSPEATSPRSPGVRSPVQCVSPELALTIALNPGGRPKEPHLHSYKEAFEEMEGTSPSSPPPSGVRSPPGLAKTPLSALGLKPHNPADILLHPTGEEDEGKVVVRLSEEPRSYVESVARTAVAGPRAQDSEPKSFSAPATQAYGHEIPLRNGTLGGSFVSPSPLSTSSPILSADSTSVGSFPSGESSDQGPRTPTQPLLESGFRSGSLGQPSPSAQRNYQSSSPLPTVGSSYSSPDYSLQHFSSSPESQARAQFSVAGVHTVPGSPQARHRTVGTNTPPSPGFGWRAINPSMAAPSSPSLSHHQMMGPPGTGFHGSTVSSPQSSAATTPGSPSLCRHPAGVYQVSGLHNKVATTPGSPSLGRHPGAHQGNLASGLHSNAIASPGSPSLGRHLGGSGSVVPGSPCLDRHVAYGGYSTPEDRRPTLSRQSSASGYQAPSTPSFPVSPAYYPGLSSPATSPSPDSAAFRQGSPTPALPEKRRMSVGDRAGSLPNYATINGKVSSPVASGMSSPSGGSTVSFSHTLPDFSKYSMPDNSPETRAKVKFVQDTSKYWYKPEISREQAIALLKDQEPGAFIIRDSHSFRGAYGLAMKVSSPPPTIMQQNKKGDMTHELVRHFLIETGPRGVKLKGCPNEPNFGSLSALVYQHSIIPLALPCKLVIPNRDPTDESKDSSGPANSTADLLKQGAACNVLFVNSVDMESLTGPQAISKATSETLAADPTPAATIVHFKVSAQGITLTDNQRKLFFRRHYPLNTVTFCDLDPQERKWMKTEGGAPAKLFGFVARKQGSTTDNACHLFAELDPNQPASAIVNFVSKVMLNAGQKR

SEQ ID NO: 64376 - protein, 62 aa, Homo sapiens
  MOD_RES (1)..(1): Any amino acid
XELIAYELTRREAEANRRPLPELVRAKIPFSACLQAFSEPENVDDFWSSALQAKSAGVKCFY

SEQ ID NO: 64377 - protein, 66 aa, Homo sapiens
GVRKETAVPATKSNIKRTSSSERVSPGGRRESNGDSRGNRNRTGSTSSSSSGKKNSERLRRLSWWR

SEQ ID NO: 64378 - protein, 49 aa, Homo sapiens
MTPRHHCEAYSSAGEEEEEEEEEKNVSPSQRDEVIQWLAKLKYQFNLYP

SEQ ID NO: 64379 - protein, 45 aa, Homo sapiens
MTGSLVSDRSHDDIVTRMKNIECIELGRHRLKPWYFSPYPQELTT

SEQ ID NO: 64380 - protein, 55 aa, Homo sapiens
MEAGGFLDSLIYGACVVFTLGMFSAGLSDLRHMRMTRSVDNVQFLPFLTTEVKLR

SEQ ID NO: 64381 - protein, 116 aa, Homo sapiens
MSVQSSSGSLEGPPSWSQLSTSPTPGSAAAARSLLNHTPPSGRPREGAMDELHSLDPRRQELLEARFTGVASGSTGSTGSCSVGAKASTNNESSNHSFGSLGSLSDKESEKQLAGS

SEQ ID NO: 64382 - protein, 178 aa, Homo sapiens
MSLLGREMVDYICQYLSTVRERRVTPDVQPGYLRAQLPESAPEDPDSWDSIFGDIERIIMPGVVHWQSPHMHAYYPALTSWPSLLGDMLADAINCLGFTWASSPACTELEMNVMDWLAKMLGLPEHFLHHHPSSQGGGVLQSTVSESTLIALLAARKNKILEMKTSEPDADESCLNAR

SEQ ID NO: 64383 - protein, 77 aa, Homo sapiens
  MOD_RES (1)..(1): Any amino acid
XDSKEVYRILNGEMQEVLQSFTSIHLHESPLNFFRSFQVRGSRSHYPGKGMQTTLGIVNFLVVTLKRKKRNRFSPDL

SEQ ID NO: 64384 - protein, 170 aa, Homo sapiens
  MOD_RES (1)..(1): Any amino acid
XAPLSGAAEADEGGGDWSFIDCEMEEVDLQDLPSATIACHLDPRVFVDGLCRAKFESLFRTYDKDITFQYFKSFKRVRINFSNPFSAADARLQLHKTEFLGKEMKLYFAQTLHIGSSHLAPPNPDKQFLISPPASPPVGWKQVEDATPVINYDLLYAISKLGPGNNAFDT

SEQ ID NO: 64385 - protein, 286 aa, Homo sapiens
  MOD_RES (1)..(1): Any amino acid
XLDAKENQSIRAFNSEHKIPYVRLERLKICAASSGEMPVFKLKPQKNDQDGSFLLIIECGTESSSMSIKRPPEVEGTSPEEHRLIPRTPGAKKGPPAPIENEDFCAVCLNGGELLCCDRCPKVFHLSCHVPALLSFPGGEWVCTLCRSLTQPEMEYDCENACYNQPGMRASPGLSMYDQKKCEKLVLSLCCNNLSLPFHEPVSPLARHYYQIIKRPMDLSIIRRKLQKKDPAHYTTPEEVVSDVRLMFWNCAKFNYPDSEVAEAGRCLEVFFEGWLKEIYPEKRFA

SEQ ID NO: 64386 - protein, 52 aa, Homo sapiens
  MOD_RES (1)..(1): Any amino acid
XDATNLTPRLWPRASAVGERLWSSKDVRDMDDAYDRLTRHRCRMVEGLASFL

SEQ ID NO: 64387 - protein, 41 aa, Homo sapiens
  MOD_RES (1)..(1): Any amino acid
XLRIEAKERVKSVFHAREFGKIINFKTPEDARVNIINLLFK

SEQ ID NO: 64388 - protein, 139 aa, Homo sapiens
  MOD_RES (1)..(1): Any amino acid
XGVQLEGAFPDTMTKCAELLSRTVEVDFVDINVGCPIDLVYKKGGGCALMNRSTKFQQIVRGMNQVLDVPLTVKIRTGVQERVNLAHRLLPELRDWGVALVTPGSLGLFLSASHSLPPTLRGGFSPSSTAALGSSATPS

SEQ ID NO: 64389 - protein, 215 aa, Homo sapiens
MEATRRRQHLGATGGPGAQLGASFLQARHGSVSADEAARTAPFHLDLWFYFTLQNWVLDFGRPIAMIDSFELLYYYDEYLGHCMWYIPFFLILFMYFSGCFTASKAESLIPGPALLLVAPSGLYYWYLVTEGQIFILFIFTFFAMLALVLHQKRKRLFLDSNGLFLFSSFALTLLLVALWVAWLWNDPVLRKKYPGVIYVPEPWAFYTLHVSSRH

SEQ ID NO: 64390 - protein, 355 aa, Homo sapiens
MERLWGLFQRAQQLSPRSSQTVYQRVEGPRKGHLEEEEEDGEEGAETLAHFCPMELRGPEPLGSRPRQPNLIPWAAAGRRAAPYLVLTALLIFTGAFLLGYVAFRGSCQACGDSVLVVSEDVNYEPDLDFHQGRLYWSDLQAMFLQFLGEGRLEDTIRQTSLRERVAGSAGMAALTQDIRAALSRQKLDHVWTDTHYVGLQFPDPAHPNTLHWVDEAGKVGEQLPLEDPDVYCPYSAIGNVTGELVYAHYGRPEDLQDLRARGVDPVGRLLLVRVGVISFAQKEAQRPCGPPRMAGEPPRLPLSPGPRATTAASGQQSQDLHPHQQHLRLHRRPLRARSLRCHRGPEGCMGPRSS

SEQ ID NO: 64391 - protein, 196 aa, Homo sapiens
MIIVAHVLLILLGATEILQADLLPDEKISLLPPVNFTIKVTGLAQVLLQWKPNPDQEQRNVNLEYQVKINAPKEDDYETRITESKCVTILHKGFSASVRTILQNDHSLLASSWASAELHAPPGSPGTSIVNLTCTTNTTEDNYSRLRSYQVSLHCTWLVGTDAPEDTQYFLYYRYGSWTEECQEYSKDTLGRNIAC

SEQ ID NO: 64392 - protein, 133 aa, Homo sapiens
MEGDFSVCRNCKRHVVSANFTLHEAYCLRFLVLCPECEEPVPKETMEEHCKLEHQQVGCTMCQQSMQKSSLEFHKANECQERPVECKFCKLDMQLSKLELHESYCGSRTELCQGCGQFIMHRMLAQHRDVCRS

SEQ ID NO: 64393 - protein, 121 aa, Homo sapiens
MRRHEMVAKPPVMCSHFTQDFWPEQHIKDPFQKATLRRYKNCEHKNVHLKKDHKSVDECKVHRGGYNGFNQCLPATQSKIFLFDKCVKAFHKFSNSNRHKISHTEKKLFKCKECGKSFCML

SEQ ID NO: 64394 - protein, 303 aa, Homo sapiens
  MOD_RES (1)..(1): Any amino acid
XCLNGTRPSWNGETPSCMASCGGTIHNATLGRIVSPEPGGAVGPNLTCRWVIEAAEGRRLHLHFERVSLDEDNDRLMVRSGGSPLSPVIYDSDMDDVPERGLISDAQSLYVELLSETPANPLLLSLRFEAMCGGELSEPAGVVLSPDWPQSYSPGQDCVWGVHVQEEKRILLQVEILNVREGDMLTLFDGDGPSARVLAQLRGPQPRRRLLSSGPDLTLQFQAPPGPPNPGLGQGFVLHFKEVPRNDTCPELPPPEWGWRTASHGDLIRGTVLTYQCEPGYELLGSDILTCQWDLSWSAAPPA

SEQ ID NO: 64395 - protein, 170 aa, Homo sapiens
MASSVAPYEQLVRQVEALKAENSHLRQELRDNSSHLSKLETETSGMKEVLKHLQGKLEQEARVLVSSGQTEVLEQLKALQMDITSLYNLKFQPPTLGPEPAARTPEGSPVHGSGPSKDSFGELSRATIRLLEELDRERCFLLNEIEKEEKEKLWYYSQLQGLSKRLDELP

SEQ ID NO: 64396 - protein, 333 aa, Homo sapiens
MGPLPAPSCTQRITWKGLLLTASLLNFWNPPTTAEVTIEAQPPKVSEGKDVLLLVHNLPQNLPGYFWYKGEMTDLYHYIISYIVDGKIIIYGPAYSGRETVYSNASLLIQNVTRKDAGTYTLHIIKRGDETREEIRHFTFTLYSKLPIPYITINNLNPRENKDVLAFTCEPKSENYTYIWWLNGQSLPVSPGVKRPIENRILILPSVTRNETGPYQCEIRDRYGGLRSNPVILNVLYGPDLPRIYPSFTYYRSGENLDLSCFTESNPPAEYFWTINGKFQQSGQKLFIPQITRNHSGLYACSVHNSATGKEISKSMTVKVSGPCHGDLTESQS

SEQ ID NO: 64397 - protein, 714 aa, Homo sapiens
HAADLEKKQNETENRKLLGTVIQYGNVIQLLHLKSNKYLTVNKRLPALLEKNAMRVTLDEAGNEGSWFYIQPFYKLRSIGDSVVIGDKVVLNPVNAGQPLHASSHQLVDNPGCNEVNSVNCNTSWKIVLFMKWSDNKDDILKGGDVVRLFHAEQEKFLTCDEHRKKQHVFLRTTGRQSATSATSSKALWEVEVVQHDPCRGGAGYWNSLFRFKHLATGHYLAAEVDPDQDASRSRLRNAQEKMVYSLVSVPEGNDISSIFELDPTTLRGGDSLVPRNSYVRLRHLCTNTWVHSTNIPIDKEEEKPVMLKIGTSPVKEDKEAFAIVPVSPAEVRDLDFANDASKVLGSIAGKLEKGTITQNERRSVTKLLEDLVYFVTGGTNSGQDVLEVVFSKPNRERQKLMREQNILKQIFKLLQAPFTDCGDGPMLRLEELGDQRHAPFRHICRLCYRVLRHSQQDYRKNQEYIAKQFGFMQKQIGYDVLAEDTITALLHNNRKLLEKHITAAEIDTFVSLVRKNREPRFLDYLSDLCVSMNKSIPVTQELICKAVLNPTNADILIETKLVLSRFEFEGVSSTGENALEAGEDEEEVWLFWRDSNKEIRSKSVRELAQDAKEGQKEDRDVLSYYSCHDSLYVYPSARFPVCTCLTSATHLHGPQCLLGSSCKTCQSCHLKGREGEERKEVNQLILLKEKEREDKARLLLFFNKINKTADKMP

SEQ ID NO: 64398 - protein, 145 aa, Homo sapiens
MTGSNEFKLNQPPEDGISSVKFSPNTSQFLLVSSWDTSVRLYDVPANSMRLKYQHTGAVLDCAFYDPTHAWSGGLDHQLKMHDLNTDQENLVGTHDAPIRCVEYCPEVNVMVTGSWDQTVKLWDPRTPCNAGTFSQPEKVHLIIL

SEQ ID NO: 64399 - protein, 137 aa, Homo sapiens
MESALTARDRVGVQDFVLLENFTSEAAFIENLRRRFRENLIYTYIGPVLVSVNPYRDLQIYSRQHMERYRGVSFYEVPPHLFAVADTVYRALRTERRDQAVMISGESGAGKTEATKRLLQFYAETCPAPERGGAVRD

SEQ ID NO: 64400 - protein, 160 aa, Homo sapiens
MPSEGRCWETLKALRSSDKGRLCYYRDWLLRREDVLEECMSLPKLSSYSGWVVEHVLPHMQENQPLSETSPSSTSASALDQPSFVPKSPDASSAFSPASPATPNGTKGKDESQHTESMVLQSSRGIKVEGCVRMYELVHRMKGTVSEPMKEGSLDPASHI

SEQ ID NO: 64401 - protein, 79 aa, Homo sapiens
MYYKFSGFTQKLAGAWASEAYSPQGLKPVVSTEAPPIIFATPTKLTSDSTVYDYAGKNKVPELQKFFQVREDTLQQKSL

SEQ ID NO: 64402 - protein, 341 aa, Homo sapiens
MAALRALCGFRGVAAQVLRPGAGVRLPIQPSRGVRQWQPDVEWAQQFGGAVMYPSKETAHWKPPPWNETESCYVDQAGFKLLASDVDPPKDTIVKNITLNFGPQHPAAHGVLRLVMELSGEMVRKCDPHIGLLHRGTEKLIEYKTYLQALPYFDRLDYVSMMCNEQAYSLAVEKLLNIRPPPRAQWIRVLFGEITRLLNHIMAVTTHALDLGAMTPFFWLFEEREKMFEFYERVSGARMHAAYIRPGGVHQDLPLGLMDDIYQFSKNFSLRLDELEELLTNNRIWRNRTIDIGVVTAEEALNYGFSGVMLRGSGIQWDLRKTQPYDVYDQVEFDVPVGSRG

SEQ ID NO: 64403 - protein, 129 aa, Homo sapiens
MASHPQTRIQAYLEKNKIGPLFEELMTKLITETPDQPIPFLIDHLQSKQGNRGQLQRTLSGSAALWAESEKSESKGTRRDFRSYDKPWQLNAKKPKKSKSDLAVSNISPPSPDSKSCKEVSYSNAIQSM

SEQ ID NO: 64404 - protein, 191 aa, Homo sapiens
ASVRSGASDAGGEMREGFGRGPQRETPSPPPREFSNLSQPRKNLWGIKSTAVRNIDGSINNINEDDEEDVVDLAANSLLNKLIHQSLVESSHRVEVLQKDPSSPLYSVKTFEELRLKEELLKGIYAMGFNRPSKIQEMALPMMLAHPPQNLIAQSQSGTGKTAAFVLAMLSRVNALELFPQCLCLAPTYEL

SEQ ID NO: 64405 - protein, 176 aa, Homo sapiens
MTRHGKNCTAGAVYTYHEKKKDTAASGYGTQNIRLSRDAVKDFDCCCLSLQPCHDPVVTPDGYLYEREAILEYILHQKKEIARQMKAYEKQRGTRREEQKELQRAASQDHVRGFLEKESAIVSRPLNPFTAKALSGTSPDDVQPGPSVGPPNSSVDRVGLITRSERYVCAVTRDSL

SEQ ID NO: 64406 - protein, 92 aa, Homo sapiens
VDISTAMSERALAQKRLSENAFDLEAMSMLNRAQERIDAWAQLNSIPGQFTGSTGVQVLTQEQLANTGAQAWIKKCLCLLVRSLGPRSSLLL

SEQ ID NO: 64407 - protein, 347 aa, Homo sapiens
VPPVLDVRTLLQRGLQARRAVLTVPWLVEFLSFADHVVPLLEYYRDIFTLLLRLHRSLVLSQESEGKMCFLNKLLLLAVLGWLFQIPTVPEDLFFLEEGPSYAFEVDTVAPEHGLDNAPVVDQQLLYTCCPYIGELRKLLASWVSGSSGRSGGFMRKITPTTTTSLGAQPSQTSQGLQAQLAQAFFHNQPPSLRRTVEFVAERIGSNCVKHIKATLVADLVRQAESLLQEQLVTQGEEGGDPAQLLEILCSQLCPHGAQALALGREFCQRKSPGAVRALLPEETPAAVLSSAENIAVGLATEKACAWLSANITALIRREVKAAVSRTLRAQGPEPAARGERRGCSRA

SEQ ID NO: 64408 - protein, 1839 aa, Homo sapiens
MYHIDCRDQLERVFLRLGHAETDEQLQNIISKFLPPVLLKLSSTQEGVRKKVMELLVHLNKRIKSRPKIQLPVETLLVQYQDPAAVSFVTNFTIIYVKMGYPRLPVEKQCELAPTLLTAMEGKPQPQQDSLMHLLIPTLFHMKYPVESSKSASPFNLAEKPKTVQLLLDFMLDVLLMPYGYVLNESQSRQNSSSAQGSSSNSGGGSGIPQPPPGMSFYAAKRVIGDNPWTPEQLEQCKLGIVKFIEAEQVPELEAVLHLVIASSDTRHSVATAADLELKSKQSLIDWNNPAIINKMYKVYLGDIPLKTKEGAVLKPELKRDPVSTRVKLKIVPHLLRSRQAAETFPANIQVVYDGLFGTNTNSKLRTLSLQFVHHICITCPEIKIKPLGPMLLNGLTKLINEYKEDPKLLSMAYSAVGKLSSRMPHLFTKDIALVQQLFEALCKEEPETRLAIQEALSMMVGAYSTLEGAQRTLMEALVASYLIKPEVQVRQVAVKFASTVFPSDHIPSRYLLLLAAGDPREEVHGEAQRVLRCLPGRNRKESTSEQMPSFPEMVYYIQEKASHRMKTPVKYMTGTTVLPFNPAAFGEIVLYLRMCLAHSAGVVPTSQSLADMQDHAPAIGRYIRTLMSSGQMAPSSSNKSGETNPVQIYIGLLQQLLAGVGGLPVMYCLLEAVSVYPEKLATKFVDKTEWIKSLMNNSKEEMRELAALFYSVVVSTVSGNELKSMIEQLIKTTKDNHSPEIQHGSLLALGFTVGRYLAKKKMRMSEQQDLERNADTLPDQEELIQSATETIGSFLDSTSPLLAIAACTALGEIGRNGPLPIPSEGSGFTKLHLVESLLSRIPSSKETNKMKERAIQTLGYFPVGDGDFPHQKLLLQGLMDSVEAKQIELQFTIGEAITSAAIGTSSVAARDAWQMTEEEYTPPAGAKVNDVVPWVLDVILNKHIISPNPHVRQAACIWLLSLVRKLSTHKEVKSHLKEIQSAFVSVLSENDELSQDVASKGLGLVYELGNEQDQQELVSTLVETLMTGKRVKHEVSGETVVFQGGALGKTPDGQGLSTYKELCSLASDLSQPDLVYKFMNLANHHAMWNSRKGAAFGFNVIATRAGEQLAPFLPQLVPRLYRYQFDPNLGIRQAMTSIWNALVTDKSMVDKYLKEILQDLVKNLTSNMWRVRESSCLALNDLLRGRPLDDIIDKLPEIWETLFRVQDDIKESVRKAAELALKTLSKVCVKMCDPAKGAAGQRTIAALLPCLLDKGMMSTVTEVRALSINTLVKISKSAGAMLKPHAPKLIPALLESLSVLEPQVLNYLSLRATEQEKAAMDSARLSAAKSSPMMETINMCLQYLDVSVLGELVPRLCELIRSGVGLGTKGGCASVIVSLTTQCPQDLTPYSGKLMSALLSGLTDRNSVIQKSCAFAMGHLVRTSRDSSTEKLLQKLNGWYMEKEEPIYKTSCALTIHAIGRYSPDVLKNHAKEVLPLAFLGMHEIADEEKSEKEECNLWTEVWQENVPGSFGGIRLYLQELITITQKALQSQSWKMKAQGAIAMASIAKQTSSLVPPYLGMILTALLQGLAGRTWAGKEELLKAIACVVTACSAELEKSVPNQPSTNEILQAVLKECSKENVKYKIVAISCAADILKATKEDRFQEFSNIVIPLIKKNSLESSGVRTTKNEEENEKEKELQLEYLLGAFESLGKAWPRNAETQRCYRQELCKLMCERLKLSTWKVQLGVLQSMNAFFQGLMLLEEEHADPEALAEILLETCKSITYSLENKTYSSVRTEALSVIELLLKKLEESKQWECLTSECRVLLIESLATMEPDSRPELQEKAALLKKTLENLE

SEQ ID NO: 64409 - protein, 349 aa, Homo sapiens
MLLMVVSMACVGFFLVQRAGPHVGNHRKPSLLAHPGPLVKSGERVILQCWSDIMFEHFFLHKEGISKDPSRLVGQIHDGVSKANFSIGPMMLALAGTYRCYGSVTHTPYQLSAPSDPLDIVVTGPYEKPSLSAQPGPKVQAGESVTLSCSSRSSYDMYHLSREGGAHERRLPAVRKVNRTFQADFPLGPATHGGTYRCFGSFRHSPYEWSDPSDPLLVSVTGNPSSSWPSPTEPSSKSGNPRHLHILIGTSVVIILFILLLFFLLHLWCSNKKNAAVMDQEPAGNRTANSEDSDEQDPQEVTYAQLDHCVFTQRKITRPSQRPKTPPTDTILYTELPNAKPRSKVVSCP

SEQ ID NO: 64410 - protein, 187 aa, Homo sapiens
MAALTPRKRKQDSLKCDSLLHFTENLFPSPNKKHCFYQNSDKNEENLHCSQQEHFVLSALKTTEINRLPSANQGSPFKSALSTVSFYNQNKWYLNPLERKLIKESRSTCLKTNDEDKSFPIVTEKMQGKPVCSKKNNKKPQKSLTAKYQPKYRHIKPVSRNSRNSKQNRVIYKPIVEKENNCHSAEN

SEQ ID NO: 64411 - protein, 312 aa, Homo sapiens
MQKHYTVAWFLYSAPGVDPSPPCRSLGWKRKKEWSDESEEEPEKELAPEPEETWVVEMLCGLKMKLKQQRVSPILPEHHKDFNSQLAPGVDPSPPHRSFCWKRKREWWDESEESLEEEPRKVLAPEPEEIWVAEMLCGLKMKLKRRRVSLVLPEHHEAFNRLLEDPVIKRFLAWDKDLRVSDKYLLAMVIAYFSRAGLPSWQYQRIHFFLALYLANDMEEDDEDPKQNIFYFLYGKTRSRIPLVRNRRFQLCRCLNPRARKNRSQIALFQKLRFQFFCSMSGRAWVSREELEEIQAYDPEHWVWARDRARLS

SEQ ID NO: 64412 - protein, 524 aa, Homo sapiens
  MOD_RES (1)..(1): Any amino acid
XGKLGRYPPWPGKIVNPPKDLKKPRGKKCFFVKFFGTEDHAWIKVEQLKPYHAHKEEMIKINKGKRFQQAVDAVEEFLRRAKGKDQTSSHNSSDDKNRRNSSEERSRPNSGDEKRKLSLSEGKVKKNMGEGKKRVSSGSSERGSKSPLKRAQEQSPRKRGRPPKDEKDLTIPESSTVKGMMAGPMAAFKWQPTASEPVKDADPHFHHFLLSQTEKETGSTSIQAADSTAVNGSITPTDKKIGFLGLGLMGSGIVSNLLKMGHTVTVWNRTAEKCDLFIQEGARLGRTPAEVVSTCDITFACVSDPKAAKDLVLGPSGVLQGIRPGKCYVDMSTVDADTVTELAQVIVSRGGRFLEAPVSGNQQLSNDGMLVILAAGDRGLYEDCSSCFQAMGKTSFFLGEVGNAAKMMLIVNMVQGSFMATIAEGLTLAQVTGQSQQTLLDILNQGQLASIFLDQKCQNILQGNFKPDFYLKYIQKDLRLAIALGDAVNHPTPMAAAANEVYKRAKALDQSDNDMSAVYRAYIH

SEQ ID NO: 64413 - protein, 37 aa, Homo sapiens
  MOD_RES (1)..(1): Any amino acid
XATTYTHCRLNCPGGPAQLQALAHRCAAWDRGACGVQ

SEQ ID NO: 64414 - protein, 14 aa, Homo sapiens
MDLMVEASPRRIFA

SEQ ID NO: 64415 - protein, 96 aa, Homo sapiens
MAAVKKEGGALSEAMSLEGDEWELSKENVQPLRQGRIMSTLQGALAQESACNNTLQQQKRDGVSLFRPGWSAVARSWLTGSSASWVHANLLPQPPE

SEQ ID NO: 64416 - protein, 163 aa, Homo sapiens
MLSLDFLDDVRRMNKRQLYYQVLNFGMIVSSALMIWKGLMVITGSESPIVVVLSGSMEPAFHRGDLLFLTNRVEDPIRVGEIVVFRIEGREIPIVHRVLKIHEKQNGHIKFLTKGDNNAVDDRGLYKQGQHWLEKKDVVGRARGSSVLLRNTSPHLPQFPRCC

SEQ ID NO: 64417 - protein, 252 aa, Homo sapiens
MGLPVSWAPPALWVLGCCALLLSLWALCTACRRKRARRQRARLQGSATAAEASLLRRTHLCSLSKSDTRLHELHRGPRSSRALRPASMDLLRPHWLEVSRDITGPQAAPSAFPHQELPRALPAAAATAGCAGLEATYSNVGLAALPGVSLAASPVVAEYARVQKRKGTHRSPQEPQQGKTEVTPAAQVDVLYSRVCKPKRRDPGPTTDPLDPKGQGAILALAGDLAYQTLPLRALDVDSGPLENVYESIREL

SEQ ID NO: 64418 - protein, 166 aa, Homo sapiens
MLKLDNKDVISHPLGYPSESLLSIASMLDSSDSSSQPHWSNELIAEQLQQQVSQLQDQLDAELEDKRKVLLELSREKGGVSLLLLRLECNGTISAHCNLHLPAQNEDLKLEVTNILQKHKQEVELLQNAATISQPPDRQSEPATHPAVLQENTQIEPSEPKNQEEK

SEQ ID NO: 64419 - protein, 321 aa, Homo sapiens
MAIRVLLGFSIPEEDLGHLFEVYQQFVDNVFSLPVDLPFSGYRRGIQARQILQKGLEKAIREKLQCTQGKDYLDALDLLIESSKEHGKEMTMQELKDGTLELIFAAYATTASASTSLIMQLLKHPTVLEKLRDELRAHGILHSGGCPCEGTLRLDTLSGLRYLDCVIKEVMRLFTPISGGYRTVLQTFELDGFQIPKGWSVMYSIRDTHDTAPVFKDVNVFDPDRFSQARSEDKDGRFHYLPFGGGVRTCLGKHLAKLFLKVLAVELASTSRFELATRTFPRITLVPVLHPVDGLSVKFFGLDSNQNEILPETEAMLSATV

SEQ ID NO: 64420 - protein, 386 aa, Homo sapiens [sequence omitted]

SEQ ID NO: 64421 - protein, 981 aa, Homo sapiens
MDATALHDDTLANSVPPSEACNHAVLACSLGIPEEHYISEAVEDAPSYRGYRDACTITDVCNSTDLPEVEIISLLEEQLPHYKLRADTIYGYDHDDWLHTPLISPDANIDLTTEQIEETLKYFLLCAERVGQMTKTYNDIDAVTRLLEEKERDLELAARIGQSLLKKNKTLTERNELLEEQVEHIREEVSQLRHELSMKDELLQFYTSAAEESEPESVCSTPLKRNESSSSVQNYFHLDSLQKKLKDLEEENVVLRSEASQLKTETITYEEKEQQLVNDCVKELRDANVQIASISEELAKKTEDAARQQEEITHLLSQIVDLQKKAKACAVENEELVQHLGAAKDAQRQLTAELRELEDKYAECMEMLHEAQEELKNLRNKTMPNTTSRRYHSLGLFPMDSLAAEIEGTMRKELQLEEAESPDITHQKRVFETVRNINQVVKQRSLTPSPMNIPGSNQSSAMNSLLSSCVSTPRSSFYGSDIGNVVLDNKTNSIILETEAADLGNDERSKKPGTPGTPGSHDLETALRRLSLRRENYLSERRFFEEEQERKLQELAEKGELRSGSLTPTESIMSLGTHSRFSEFTGFSGMSFSSRSYLPEKLQIVKPLEGSATLHHWQQLAQPHLGGILDPRPGVVTKGFRTLDVDLDEVYCLNDFEEDDTGDHISLPRLATSTPVQHPETSAHHPGKCMSQTNSTFTFTTCRILHPSDELTRVTPSLNSAPTPACGSTSHLKSTPVATPCTPRRLSLAESFTNTRESTTTMSTSLGLVWLLKERGISAAVYDPQSWDRAGRGSLLHSYTPKMAVIPSTPPNSPMQTPTSSPPSFEFKCTSPPYDNFLASKPASSILREVREKNVRSSESQTDVSVSNLNLVDKVRRFGVAKVVNSGRAHVPTLTEEQGPLLCGPPGPAPALVPRGLVPEGLPLRCPTVTSAIGGLQLNSGIRRNRSFPTMVGSSMQMKAPVTLTSGILMGAKLSKQTSLR

SEQ ID NO: 64422 - protein, 291 aa, Homo sapiens
  MOD_RES (1)..(1): Any amino acid
XKQEQGVESEPLFPILKQEPQSPSRSLEPEDAAPTPPGPSSEGGPAEAEVDGATPTEGDGDGDGEGEGEGEAVLMEEDLIQQSLDDYDAGRYSPRLLTAHELPLDAHVLEPDEDLQRLQLSRQQLQVTGDASESAEDIFFRRAKEGMGQDEAQFSVEMPLTGKAYLWADKYRPRKPRFFNRVHTGFEWNKYNQTHYDFDNPPPKIVQGYKFNIFYPDLIDKRSTPEYFLEACADNKDFAILRFHAGPPYEDIAFKIVNREWEYSHRHGFRCQFANGIFQLWFHFKRYRYRR

SEQ ID NO: 64423 - protein, 75 aa, Homo sapiens
MKDDSIEGIYDTLKQCALISKSAGGIGVAVSCIRATGSYIAGTNGNSNGLVPMLRVYNNTARYVDQGGNKVCSMN

SEQ ID NO: 64424 - protein, 239 aa, Homo sapiens
MDNRFATAFVIACVLSLISTIYMAASIGTDFWYEYRSPVQENSSDLNKSIWDEFISDEADEKTYNDALFRYNGTVGLWRRCITIPKNMHWYSPPERTESFDVVTKCVSFTLTEQFMEKFVDPGNHNSGIDLLRTYLWRCQFLLPFVSLGLMCFGALIGLCACICRSLYPTIATGILHLLAGLCTLGSVSCYVAGIELLHQKLELPDNVSGEFGWSFCLACVSAPLQFMASALFIWAAHT

SEQ ID NO: 64425 - protein, 91 aa, Homo sapiens
  MOD_RES (1)..(1): Any amino acid
XCAGPTEDELSLPEGPSVPSSSLPQTPEQEKFLRHHFETLTESPCRGRALPHPHLPRPSVQPGHSIGVPGVGSPAGPGGALPRSSGRRGGL

SEQ ID NO: 64426 - protein, 442 aa, Homo sapiens
MAIHKALVMCLGLPLFLFPGAWAQGHVPPGCSQGLNPLYYNLCDRSGAWGIVLEAVAGAGIVTTFVLTIILVASLPFVQDTKKRSLLGTQVFFLLGTLGLFCLVFACVVKPDFSTCASRRFLFGVLFAICFSCLAAHVFALNFLARKNHGPRGWVIFTVALLLTLVEVIINTEWLIITLVRGSGEGGPQGNSSAGWAVASPCAIANMDFVMALIYVMLLLLGAFLGAWPALCGRYKRWRKHGVFVLLTTATSVAIWVVWIVMYTYGNKQHNSPTWDDPTLAIALAANAWAFVLFYVIPEVSQVTKSSPEQSYQGDMYPTRGVGYETILKEQKGQSMFVENKAFSMDEPVAAKRPVSPYSGYNGQLLTSVYQPTEMALMHKVPSEGAYDIILPRATANSQVMGSANSTLRAEDMYSAQSHQAATPPKDGKNSQAQSPQSKTRW

SEQ ID NO: 64427 - protein, 2858 aa, Homo sapiens
  MOD_RES (1)..(1): Any amino acid
XSLKMSAIPGLTDQKTVPTPTVPSGSFSHREKPSIFYQQEWPDSYATEKALKVSTGPGPADQKTEIPAVQSSSYPQREKPSVLYPQVLSDSHLPEESLKVSAFPGPADQMTDTPAVPSTFYSQREKPGIFYQQTLPESHLPKEALKISVAPGLADQKTGTPTVTSTSYSQHREKPSIFHQQALPGTHIPEEAQKVSAVTGPGNQKTWIPRVLSTFYSQREKPGIFYQQTLPGSHIPEEAQKVSPVLGPADQKTGTPTPTSASYSHTEKPGIFYQQVLPDNHPTEEALKISVASEPVDQTTGTPAVTSTSYSQYREKPSIFYQQSLPSSHLTEEAKNVSAVPGPADQKTVIPILPSTFYSHTEKPGVFYQQVLPHSHPTEEALKISVASEPVDQTTGTPTVTSTSYSQHTEKPSIFYQQSLPGSHLTEEAKNVSAVPGPGDRKTGIPTLPSTFYSHTEKPGSFYQQVLPHSHLPEEALEVSVAPGPVDQTIGTPTVTSPSSSFGEKPIVIYKQAFPEGHLPEESLKVSVAPGPVGQTTGAPTITSPSYSQHRAKSGSFYQLALLGSQIPEEALRVSSAPGPADQTTGIPTITSTSYSFGEKPIVNYKQAFPDGHLPEEALKVSIVSGPTEKKTDIPAGPLGSSALGEKPITFYRQALLDSPLNKEVVKVSAAPGPADQKTETLPVHSTSYSNRGKPVIFYQQTLSDSHLPEEALKVPPVPGPDAQKTETPSVSSSLYSYREKPIVFYQQALPDSELTQEALKVSAVPQPADQKTGLSTVTSSFYSHTEKPNISYQQELPDSHLTEEALKVSNVPGPADQKTGVSTVTSTSYSHREKPIVSYQRELPHFTEAGLKILRVPGPADQKTGINILPSNSYPQREHSVISYEQELPDLTEVTLKAIGVPGPADQKTGIQIASSSSYSNREKASIFHQQELPDVTEEALNVFVVPGQGDRKTEIPTVPLSYYSRREKPSVISQQELPDSHLTEEALKVSPVSIPAEQKTGIPIGLSSSYSHSHKEKLKISTVHIPDDQKTEFPAATLSSYSQIEKPKISTVIGPNDQKTPSQTAFHSSYSQTVKPNILFQQQLPDRDQSKGILKISAVPELTDVNTGKPVSLSSSYFHREKSNIFSPQELPGSHVTEDVLKVSTIPGPAGQKTVLPTALPSSFSHREKPDIFYQKDLPDRHLTEDALKISSALGQADQITGLQTVPSGTYSHGENHKLVSEHVQRLIDNLNSSDSSVSSNNVLLNSQADDRVVINKPESAGFRDVGSEEIQDAENSAKTLKEIRTLLMEAENMALKRCNFPAPLARFRDISDISFIQSKKVVCFKEPSSTGVSNGDLLHRQPFTEESPSSRCIQKDIGTQTNLKCRRGIENWEFISSTTVRSPLQEAESKVSMALEETLRQYQAAKSVMRSEPEGCSGTIGNKIIIPMMTVIKSDSSSDASDGNGSCSWDSNLPESLESVSDVLLNFFPYVSPKTSITDSREEEGVSESEDGGGSSVDSLAAHVKNLLQCESSLNHAKEILRNAEEEESRVRAHAWNMKFNLAHDCGYSISELNEDDRRKVEEIKAELFGHGRTTDLSKGLQSPRGMGCKPEAVCSHIIIESHEKGCFRTLTSEHPQLDRHPCAFRSAGPSEMTRGRQNPSSCRAKHVNLSASLDQNNSHFKVWNSLQLKSHSPFQNFIPDEFKISKGLRMPFDEKMDPWLSELVEPAFVPPKEVDFHSSSQMPSPEPMKKFTTSITFSSHRHSKCISNSSVVKVGVTEGSQCTGASVGVFNSHFTEEQNPPRDLKQKTSSPSSFKMHSNSQDKEVTILAEGRRQSQKLPVDFERSFQEEKPLERSDFTGSHSEPSTRANCSNFKEIQISDNHTLISMGRPSSTLGVNRSSSRLGVKEKNVTITPDLPSCIFLEQRELFEQSKAPRADDHVRKHHSPSPQHQDYVAPDLPSCIFLEQRELFEQCKAPYVDHQMRENHSPLPQGQDSIASDLPSPISLEQCQSKAPGVDDQMNKHHFPLPQGQDCVVEKNNQHKPKSHISNINVEAKFNTVVSQSAPNHCTLAASASTPPSNRKALSCVHITLCPKTSSKLDSGTLDERFHSLDAASKARMNSEFNFDLHTVSSRSLEPTSKLLTSKPVAQDQESLGFLGPKSSLDFQVVQPSLPDSNTITQDLKTIPSQNSQIVTSRQIQVNISDFEGHSNPEGTPVFADRLPEKMKTPLSAFSEKLSSDAVTQITTESPEKTLFSSEIFINAEDRGHEIIEPGNQKLRKAPVKFASSSSVQQVTFSRGTDGSNDAIAPDFPAQVLGTRDDDLSATVNIKHKEGIYSKRVVTKASLPVGEKPLQNENADASVQVLITGDENLSDKKQQEIHSTRAVTEAAQAKEKESLQKDTADSSAAAAAEHSAQVGDPEMKNLPDTKAITQKEEIHRKKTVPEEAWPNNKESLQINIEESECHSEFENTTRSVFRSAKFYIHHPVHLPSDQDICHESLGKSVFMRHSWKDFFQHHPDKHREHMCLPLPYQNMDKTKTDYTRIKSLSINVNLGNKEVMDTTKSQVRDYPKHNGQISDPQRDQKVTPEQTTQHTVSLNELWNKYRERQRQQRQPELGDRKELSLVDRLDRLAKILQNPITHSLQVSESTHDDSRGERSVKEWSGRQQQRNKLQKKKRFKSLEKSHKNTGELKKSKVLSHHRAGRSNQIKIEQIKFDKYILSKQPGFNYISNTSSDCRPSEESELLTDTTTNILSGTTSTVESDILTQTDREVALHERSSSVSTIDTARLIQAFGHERVCLSPRRIKLYSSITNQQRRYLEKRSKHSKKVLNTGHPLVTSEHTRRRHIQPPTSATACRQPLMTFCFYGFAYSGPFI

SEQ ID NO: 64428 - protein, 319 aa, Homo sapiens
  MOD_RES (1)..(1): Any amino acid
XKEPPVLRVTEGPFFSEVVAYYEHIHQAVRLYNLPGVEGLSLDISSLVDIRDYVNKELALHIHTDIDSQGIFFTDLNGFQVQPRRYLKKLPLQANFYPMPVMAYIQDAQKRLTLHTAQALGVSSLKDGQLEVILDRRLMQDDNRGLGQGLKDNKRTCNRFRLLLERRTVGSEPDFFSKLAAMFRGLIFHSSRSGNREVQDSHSTSYPSLLSHLTSMYLNAPALALPVARMQLPGPGLRSFHPLASSLPCDFHLLNLRTLQAEEDTLPSAETALILHRKGFDCGLEAKNLGFNCTTSQGKVALGSLFHGLDVVFLQPTSL

SEQ ID NO: 64429 - protein, 138 aa, Homo sapiens
MASRERLFELWMLYCTKKDPDYLKLWLDTFVSSYEQFLDVDFEKLPTRVDDMPPGISLLPDNILQVLRIQLLQCVQKMADGLEEQQQALSILLVKFFIILCRNLSNVEEIGTCSYINYVITMTTLYIQQLKSKKKEKE

SEQ ID NO: 64430 - protein, 31 aa, Homo sapiens
  MOD_RES (1)..(1): Any amino acid
XTLAPERWPSGHIRLVSNSWVQAILPPQPPE

SEQ ID NO: 64431 - protein, 49 aa, Homo sapiens
MSTMFADTLLIVFISVCTALLAEGITWVLVYRTDKYKRLKAEVEKQSKK

SEQ ID NO: 64432 - protein, 168 aa, Homo sapiens
  MOD_RES (1)..(1): Any amino acid
XFRRRLQALTSGWSVAASLQRQRELLMYKRILLRLPSSVLCGSSFQAEQPITARCEQFFHLVNSEMRNFCSHGGALTQDITAHFFRGLLNACLRSRDPSLMVDFILAKCQTKCPLILTSALVWWPSLEPVLLCRWRRHCQSPLPRELQKLQEGRQFASDYWFSFSSSP

SEQ ID NO: 64433 - protein, 117 aa, Homo sapiens
MQAMDPAAADLYEEDGKDLDFYDFEPLPTLPEDEENVSLADILSLRDRGLSEQEAWAVCLECSLSMRSVAHAAIFQSLCITPDTLAFNTSGNVCFMEQLSGVTRSLLSFSLSSPRRP

SEQ ID NO: 64434 - protein, 623 aa, Homo sapiens
MKLSLVAAMLLLLSAARAEEEDKKEDVGTVVGIDLGTTYSCVGVFKNGRVEIIANDQGNRITPSYVAFTPEGERLIGDAAKNQLTSNPENTVFDAKRLIGRTWNDPSVQQDIKFLPFKVVEKKTKPYIQVDIGGGQTKTFAPEEISAMVLTKMKETAEAYLGKKVTHAVVTVPAYFNDAQRQATKDAGTIAGLNVMRIINEPTAAAIAYGLDKREGEKNILVFDLGGGTFDVSLLTIDNGVFEVVATNGDTHLGGEDFDQRVMEHFIKLYKKKTGKDVRKDNRAVQKLRREVEKAKRALSSQHQARIEIESFYEGEDFSETLTRAKFEELNMDLFRSTMKPVQKVLEDSDLKKSDIDEIVLVGGSTRIPKIQQLVKEFFNGKEPSRGINPDEAVAYGAAVQAGVLSGDQDTGDLVLLDVCPLTLGIETVGGVMTKLIPRNTVVPTKKSQIFSTASDNQPTVTIKVYEVTFEIDVNGILRVTAEDKGTGNKNKITITNDQNRLTPEEIERMVNDAEKFAEEDKKLKERIDTRNELESYAYSLKNQIGDKEKLGGKLSSEDKETMEKAVEEKIEWLESHQDADIEDFKAKKKELEEIVQPIISKLYGSAGPPPTGEEDTAEKDEL

SEQ ID NO: 64435 - protein, 440 aa, Homo sapiens
MSASGVLSFTQQGWEQVLAKVKRAVVYLDAACAESLHWGCGSTRLLEAVGGPDCHLREFEPDAIGGGAKQPKAVFVLSCLLKGRTVEILRDIICRSHFQYCVVVTTVSHAVHLTANHVPAAAAAEMEGQQPVFEQLEEKLCEWMGNMNYTAEVFHVPLLLAPVAPHFALTPAFASLFPLLPQDVHLLNSARPDKRKLGSLGDVDSTTLTPELLLQIRCLVSGLSSLCEHLGVREECFAVGSLSQVIAADLANYAPAKNRKKTAAGRASVVFVDRTLDLTGAVGHHGDNLVEKIISALPQLPGHTNDVMVNMIALTALHTEEENYNVVAPGCLSQSSDTTAKALWEALLNTKHKEAVMEVRRHLVEAASRENLPIKMSMGRVTPGQLMSYIQLFKNNLKALMNHCGLLQLGLATAQTLKHPQTAKWDNFLAFERLLLQSIG

SEQ ID NO: 64436 - protein, 64 aa, Homo sapiens
MVEEGNPHHYFVATQGTMAKAFDEAFSSETTAAIPEDHEASAESFCSIFFLPDLDRPLMHLHPE

SEQ ID NO: 64437 - protein, 886 aa, Homo sapiens
PVKFASSSSVQQVTFSRGTDGSNDAIAPDFPAQVLGTRDDDLSATVNIKHKEGIYSKRVVTKASLPVGEKPLQNENADASVQVLITGDENLSDKKQQEIHSTRAVTEAAQAKEKESLQKDTADSSAAAAAEHSAQVGDPEMKNLPDTKAITQKEEIHRKKTVPEEAWPNNKESLQINIEESECHSEFENTTRSVFRSAKFYIHHPVHLPSDQDICHESLGKSVFMRHSWKDFFQHHPDKHREHMCLPLPYQNMDKTKTDYTRIKSLSINVNLGNKEVMDTTKSQVRDYPKHNGQISDPQRDQKVTPEQTTQHTVSLNELWNKYRERQRQQRQPELGDRKELSLVDRLDRLAKILQNPITHSLQVSESTHDDSRGERSVKEWSGRQQQRNKLQKKKRFKSLEKSHKNTGELKKSKVLSHHRAGRSNQIKIEQIKFDKYILSKQPGFNYISNTSSDCRPSEESELLTDTTTNILSGTTSTVESDILTQTDREVALHERSSSVSTIDTARLIQAFGHERVCLSPRRIKLYSSITNQQRRYLEKRSKHSKKVLNTGHPLVTSEHTRRRHIQVANHVISSDSISSSASSFLSSNSTFCNKQNVHMLNKGIQAGNLEIVNGAKKHTRDVGITFPTPSSSEAKLEENSDVTSWSEEKREEKMLFTGYPEDRKLKKNKKNSHEGVSWFVPVENVESRSKKENVPNTCGPGISWFEPITKTRPWREPLREQNCQGQHLDGRGYLAGPGREAGRDLLRPFVRATLQESLQFHRPDFISRSGERIKRLKLIVQERKLQSMLQTERDALFNIDRERQGHQNRMCPLPKRVFLAIQKNKPISKKEMIQRSKRIYEQLPEVQKKREEEKRKSEYKSYRLRAQLYKKRVTNQLLGRKVPWD

SEQ ID NO: 64438 - protein, 119 aa, Homo sapiens
MTHQSCMFLVKSASLSKRRTYAGLAFHAYGKAGKMLVETSMIGLMLGTCIAFYVVIGDLGSNFFARLFGFQVGGTFRMFLLFAVSLCIVLPLSLQRNMMASIQSFSAMALLFYTVFMFV

SEQ ID NO: 64439 - protein, 54 aa, Homo sapiens
MAFSQGLLTFRDVAIEFSQEEWKCLDPAQRTLYRDVMLENYRNLVSLDRVLLCC

SEQ ID NO: 64440 - protein, 60 aa, Homo sapiens
MDKVCAVFGGSRGIGRAVAQLMARKGYRLAVIARNLEGAKAAAGDLGGLPIMLPVLDPNS

SEQ ID NO: 64441 - protein, 149 aa, Homo sapiens
  MOD_RES (1)..(1): Any amino acid
XLLKGAALRNMGRVQEAIIHFREAIRLAPCRLDCYEGREQKYEDGIALLRNALANQSDCVLHRILGDFLVAVNEYQEAMDQYSIALSLDPNDQKSLEGMQKMEKEESPTDATQEEDVDDMEGSGEEGDLEGSDSEAAQWADQEQWFGMQ

SEQ ID NO: 64442 - protein, 83 aa, Homo sapiens
NLLDIFIEMEKRVILGEGKLDILKRVCAQINKSLLKIINDYEEFSKDFGQSLPNEKQTSGILSDHQQSQFCKSTGESAQTSQH

SEQ ID NO: 64443 - protein, 460 aa, Homo sapiens
LVEKKIEDLTEILDRYVQEQIPGAKVVVESIGARRHGDAFSLEDYTKCDLTVYAIDPQTNRAIDRNELFKFLDGKLLDINKDFQPYYGEGGRILEIRTPEAVTSIKKRGESLGYTEGALLALAFIIILCCIPAILVVLVSYRQFKVRQAECTKTARIQAALPAAKPAVPAPAPVAAPPPPPPPPPGAHLYEELGDSSMRGYGSEQQQLLRPSLLKPEELSMESGIDPGQEYGQDYYSYEHGYEMPQYGSRRRLLPPAGQEEYGEVVGEAEEEYEEEEWARKRMIKLVVDREYETSSTGEDSAPECQRNRLHHPSIHSNINGNIYIAQNGSVVRTRRACLTDNLKVASPVRLGGPFKKLDKLAVTHEENVPLNTLSKGPFSTEKMNARPTLVTFAPCPVGTDNTAVKPLRNRLKSTVEQESMIDSKNIKEALEFHSDHTQSDDEELWMGPWNNLHIPMTKL

SEQ ID NO: 64444 - protein, 527 aa, Homo sapiens
  MOD_RES (1)..(1): Any amino acid
XVEETLPSEPENGALLRSERYQGPRRRACSETLAESRTAVLQQRRAAQLPGGPAAAGEQRASPSKARLKEFLQQCDREDLVELALPQLAQVVTVYEFLLMKVEKDHLAKPFFPAIYKEFEELHKMVKKMCQDYLSSSGLCSQETLEINNDKVAESLGITEFLRKKEIHPDNLGPKHLSRDMDGEQLEGASSEKREREAAEEGLASVKRPRREALSNDTTESLAANSRGREKPRPLHALAAGEGFSPPVNVTVSPRSEESHTTTVSGGNGSVFQAGPQLQALANLEARRGSIGAALSSRDVSGLPVYAQSGEPRRLTQAQVAAFPGENALEHSSDQDTWDSLRSPGFCSPLSSGGGAESLPPGGPGHAEAGHLGKVCDFHLNHQQPSPTSVLPTEVAAPPLEKILSVDSVAVDCAYRTVPKPGPQPGPHGSLLTEGCLRSLSGDLNRFPCGMEVHSGQRELESVVAVGEAMAFEISNGSHELLSQGQKQIFIQTSDGLILSPPGTIVSQEEDIVTVTDAEGRACGWAR

SEQ ID NO: 64445 - protein, 38 aa, Homo sapiens
  MOD_RES (1)..(1): Any amino acid
XKAGTRGKVAATKQAQRGSSNVFSMFEQAQIQEFKEGR

SEQ ID NO: 64446 - protein, 260 aa, Homo sapiens
MRKGLRATAARCGLGLGYLLQMLVLPALALLSASGTGSAAQDDDFFHELPETFPSDPPEPLPHFLIEPEEAYIVKNKPVNLYCKASPATQIYFKCNSEWVHQKDHIVDERVDETSGLIVREVSIEISRQQVEELFGPEDYWCQCVAWSSAGTTKSRKAYVRIAYLRKTFEQEPLGKEVSLEQEVLLQCRPPEGIPVAEVEWLKNEDIIDPVEDRNFYITIDHNLIIKQARLSDTANYTCVAKNIVAKRKSTTATVIVYGP

SEQ ID NO: 64447 - protein, 1203 aa, Homo sapiens
  MOD_RES (1)..(1): Any amino acid
XPRDSLRSLEQVAYKKGVKHLSALLDPEVLSIFVPPFISKEDSQMAGANCGTLGKTRMRSLRKKREKPRPEQWKGLPGPPRAPEPEDVAVPGGVDLLTLPQLCFPGGVCVATEPKEDCVHFLVLTDVCGNRTYGVVAQYYRPLHDEYCFYNGKTHRECPGCFVPFAVCVVSRFPYYNSLKDCLSCLLALLKPCKDFEVDSHIKDFAAKLSLIPSPPPGPLHLVFNMKSLQIVLPARADPESPILDLDLHLPLLCFRPEKVLQILTCILTEQRIVFFSSDWALLTLVTECFMAYLYPLQWQHPFVPILSDQMLDFVMAPTSFLMGCHLDHFEEVSKEADGLVLINIDHGSITYSKSTDDNVDIPDVPLLAAQTFIQRDVKNHLNYEHRVFNSEEFLKTRAPGDHQFYKQVLDTYMFHSFLKARLNRRMDAFAQMDLDTQSEEDRINGMLLSPRRPTVEKRASRKSSHLHVTHRRMVVSMPNLQDIAMPELAPRNSSLRLTDTAGCRGSSAVLNVTPKSPYTFKIPEIHFPLESKCVQAYHAHFVSMLSEAMCFLAPDNSLLLARYLYLRGLVYLMQGQLLNALLDFQNLYKTDIRIFPTDLVKRTVESMSAPEWEGAEQAPELMRLISEILDKPHEASKLDDHVKKFKLPKKHMQLGDFMKRVQESGIVKDASIIHRLFEALTVGQEKQIDPETFKDFYNCWKETEAEAQEVSLPWLVMEHLDKNECVCKLSSSVKTNLGVGKIAMTQKRLFLLTEGRPGYLEISTFRNIEEVRRTTTTFLLRRIPTLKIRVASKKEVFEANLKTECDLWHLMVKEMWAGKKLADDHKDPHYVQQALTNVLLMDAVVGTLQSPGAIYAASKLSYFDKMSNEMPMTLPETTLETLKHKINPSAGEAFPQAVDVLLYTPGHLDPAEKVEDAHPKLWCALSEGKVTVFNASSWTIHQHSFKVGTAKVNCMVMADQNQVWVGSEDSVIYIINVHSMSCNKQLTAHCSSVTDLIVQDGQEAPSNVYSCSMDGMVLVWNVSTLQVTSRFQLPRGGLTSIRLHGGRLWCCTGNSIMVMKMNGSLHQELKIEENFKDTSTSFLAFQLLPEEEQLWAACAGRSEVYIWSLKDLAQPPQRVPLEDCSEINCMIRVKKQVWVGSRGLGQGTPKGKIYVIDAERKTVEKELVAHMDTVRTLCSAEDRYVLSGSGREEGKVAIWKGE

SEQ ID NO: 64448 - protein, 20 aa, Homo sapiens
MLIKELRGTESTQDACAKMR

SEQ ID NO: 64449 - protein, 316 aa, Homo sapiens
MPNRKASRNAYYFFVQEKIPELRRRGLPVARVADAIPYCSSDWAKPVFTPLRRPGMLVPKQNVSPPDMSALSLKGDQALLGGIFYFLNIFSHGELPPHCEQRFLPCEIGCVKYSLQEGIMADFHSFINPGEIPRGFRFHCQAASDSSHKIPISNFERGHNQATVLQNLYRFIHPNPGNWPPIYCKSDDRTRVNWCLKHMAKASEIRQDLQLLTVEDLVVGIYQQKFLKEPSKTWIRSLLDVAMWDYSSNTRCKWHEENDILFCALAVCKKIAYCISNSLATLFGIQLTEAHVPLQDYEASNSVTPKMVVLDAGRYQ

SEQ ID NO: 64450 - protein, 84 aa, Homo sapiens
MNLWLLACLVAGFLGAWAPAVHTQGVFEDCCLAYHYPIGWAVLRRAWTYRIQEVSGSCNLPAAIRPSCCKEVEFWKLQVIIVQV

SEQ ID NO: 64451 - protein, 56 aa, Homo sapiens
  MOD_RES (1)..(1): Any amino acid
XRKGLGDMAVSSSVGSNIFDITVGVWLLLPRLVCNGVISAHHNLHLPGSSNSPASA

SEQ ID NO: 64452 - protein, 443 aa, Homo sapiens
MAAAVPDEAVARDVQRLLVQFQDEGGQLLGSPFDVPVDITPDRLQLVCNALLAQEDPLPLAFFVHDAEIVSSLGKTLESQAVETEKVLDIIYQPQAIFRVRAVTRCTSSLEGHSEAVISVAFSPTGKYLASGSGDTTILLWDPSTGKQVGRTLAGHSKWITGLSWEPLHANPECRYVASSSKDGSVRIWDTTAGRCERILTGHTQSVTCLRWGGDGLLYSASQDRTIKVWRAHDGVLCRTLQGHGHWVNTMALSTDYALRTGAFEPAEASVNPQDLQGSLQELKERALSRYNLVRGQGPERLVSGSDDFTLFLWSPAEDKKPLTRMTGHQALINQVLFSPDSRIVASASFDKSIKLWDGRTGKYLASLRGHVAAVYQIAWSADSRLLVSGSSDSTLKVWDVKAQKLAMDLPGHADEVYAVDWSPDGQRVASGGKDKCLRIWRR

SEQ ID NO: 64453 - protein, 1594 aa, Homo sapiens
MPTLPPSYNTSEFLRIKWSKIEVDKNGKDLKETTVLVAQNGNIKIGQDYKGRVSVPTHPEAVGDASLTVVKLLASDAGLYRCDVMYGIEDTQDTVSLTVDGVVFHYRAATSRYTLNFEAAQKACLDVGAVIATPEQLFAAYEDGFEQCDAGWLADQTVRYPIRAPRVGCYGDKMGKAGVRTYGFRSPQETYDVYCYVDHLDGDVFHLTVPSKFTFEEAAKECENQDARLATVGELQAAWRNGFDQCDYGWLSDASVRHPVTVARAQCGGGLLGVRTLYRFENQTGFPPPDSRFDAYCFKPKEATTIDLSILAETASPSLSKEPQMVSDRTTPIIPLVDELPVIPTEFPPVGNIVSFEQKATVQPQAITDSLATKLPTPTGSTKKPWDMDDYSPSASGPLGKLDISEIKEEVLQSTTGVSHYATDSWDGVVEDKQTQESVTQIEQIEVGPLVTSMEILKHIPSKEFPVTETPLVTARMILESKTEKKMVSTVSELVTTGHYGFTLGEEDDEDRTLTVGSDESTLIFDQIPEVITVSKTSEDTIHTHLEDLESVSASTTVSPLIMPDNNGSSMDDWEERQTSGRITEEFLGKYLSTTPFPSQHRTEIELFPYSGDKILVEGISTVIYPSLQTEMTHRRERTETLIPEMRTDTYTDEIQEEITKSPFMGKTEEEVFSGMKLSTSLSEPIHVTESSVEMTKSFDFPTLITKLSAEPTEVRDMEEDFTATPGTTKYDENITTVLLAHGTLSVEAATVSKWSWDEDNTTSKPLESTEPSASSKLPPALLTTVGMNGKDKDIPSFTEDGADEFTLIPDSTQKQLEEVTDEDIAAHGKFTIRFQPTTSTGIAEKSTLRDSTTEEKVPPITSTEGQVYATMEGSALGEVEDVDLSKPVSTVPQFAHTSEVEGLAFVSYSSTQEPTTYVDSSHTIPLSVIPKTDWGVLVPSVPSEDEVLGEPSQDILVIDQTRLEATISPETMRTTKITEGTTQEEFPWKEQTAEKPVPALSSTAWTPKEAVTPLDEQEGDGSAYTVSEDELLTGSERVPVLETTPVGKIDHSVSYPPGAVTEHKVKTDEVVTLTPRIGPKVSLSPGPEQKYETEGSSTTGFTSSLSPFSTHITQLMEETTTEKTSLEDIDLGSGLFEKPKATELIEFSTIKVTVPSDITTAFSSVDRLHTTSAFKPSSAITKKPPLIDREPGEETTSDMVIIGESTSHVPPTTLEDIVAKETETDIDREYFTTSSPPATQPTRPPTVEDKEAFGPQALSTPQPPASTKFHPDINVYIIEVRENKTGPDRCKMNPCLNGGTCYPTETSYVCTCVPGYSGDQCELDFDECHSNPCRNGATCVDGFNTFRCLCLPSYVGALCEQDTETCDYGWHKFQGQCYKYFAHRRTWDAAERECRLQGAHLTSILSHEEQMFVNRVGHDYQWIGLNDKMFEHDFRWTDGSTLQYENWRPNQPDSFFSAGEDCVVIIWHENGQWNDVPCNYHLTYTCKKGTVACGQPPVVENAKTFGKMKPRYEINSLIRYHCKDGFIQRHLPTIRCLGNGRWAIPKITCMNPSAYQRTYSMKYFKNSSSAKDNSINTSKHDHRWSRRWQESRR

SEQ ID NO: 64454 - protein, 81 aa, Homo sapiens
  MOD_RES (1)..(1): Any amino acid
XPDGDAKQRSPKMRQRPPPRRDMTIPRGLNLPKPPIPPQVEEEYYTIAEFQTTIPDGISFQAGLKVEEQWALPTTSCLLIG

SEQ ID NO: 64455 - protein, 101 aa, Homo sapiens
MPYRVGQRLRILYTKILDVLEEIPKNAAYRKYTEQITNEKLAMVKAEPDVKKLEDQLQGGQLEEVILQAEHELNLARKMREWKLWEPLVEEPPADQWKWPI

SEQ ID NO: 64456 - protein, 54 aa, Homo sapiens
MELSQMSELMGLSVLLGLLALMATAAVARGWLRAGEERSGRPAWSCSVTQDGMQ

SEQ ID NO: 64457 - protein, 483 aa, Homo sapiens
MKALDEPPYLTVGTDVSAKYRGAFCEAKIKTAKRLVKVKVTFRHDSSTVEVQDDHIKGPLKVGAIVEVKNLDGAYQEAVINKLTDASWYTVVFDDGDEKTLRRSSLCLKGERHFAESETLDQLPLTNPEHFGTPVIGKKTNRGRRSNHIPEEESSSSSSDEDEDDRKQIDELLGKVVCVDYISLDKKKALWFPALVVCPDCSDEIAVKKDNILVRSFKDGKFTSVPRKDVHEITSDTAPKPDAVLKQAFEQALEFHKSRTIPANWKTELKEDSSSSEAEEEEEEEDDEKEKEDNSSEEEEEIEPFPEERENFLQQLYKFMEDRGTPINKRPVLGYRNLNLFKLFRLVHKLGGFDNIESGAVWKQVYQDLGIPVLNSAAGYNVKCAYKKYLYGFEEYCRSANIEFQMALPEKVVNKQCKECENVKEIKVKEENETEIKEIKMEEERNIIPREEKPIEDEIERKENIKPSLGSKKNLLESIPTHS

SEQ ID NO: 64458 - protein, 107 aa, Homo sapiens
MKLAPQQQGVLPPGVWSSRPFHFGVARHKGHEPESVDVLAFVVHAAAGGHARGGGRGMAAVWQQVLAVDARYNAYRTPTFPQFRTQYIRRRSQLLRENAKAGHPPAL

SEQ ID NO: 64459 - protein, 1630 aa, Homo sapiens
MLKCIPLWRCNRHVESVDKRHCSLQAVPEEIYRYSRSLEELLLDANQLRELPKPFFRLLNLRKLGLSDNEIQRLPPEVANFMQLVELDVSRNDIPEIPESIKFCKALEIADFSGNPLSRLPDGFTQLRSLAHLALNDVSLQALPGDVGNLANLVTLELRENLLKSLPASLSFLVKLEQLDLGGNDLEVLPDTLGALPNLRELWLDRNQLSALPPELGNLRRLVCLDVSENRLEELPAELGGLVLLTDLLLSQNLLRRLPDGIGQLKQLSILKVDQNRLCEVTEAIGDCENLSELILTENLLMALPRSLGKLTKLTNLNVDRNHLEALPPEIGGCVALSVLSLRDNRLAVLPPELAHTTELHVLDVAGNRLQSLPFALTHLNLKALWLAENQAQPMLRFQTEDDARTGEKVLTCYLLPQQPPPSLEDAGQQGSLSETWSDAPPSRVSVIQFLEAPIGDEDAEEAAAEKRGLQRRATPHPSELKVMKRSIEGRRSEACPCQPDSGSPLPAEEEKRLSAESGLSEDSRPSASTVSEAEPEGPSAEAQGGSQQEATTAGGEEDAEEDYQEPTVHFAEDALLPGDDREIEEGQPEAPWTLPGGRQRLIRKDTPHYKKHFKISKLPQPEAVVALLQGMQPDGEGPVAPGGWHNGPHAPWAPRAQKEEEEEEEGSPQEEEEEEEEENRAEEEEASTEEEDKEGAVVSAPSVKGVSFDQANNLLIEPARIEEEELTLTILRQTGGLGISIAGGKGSTPYKGDDEGIFISRVSEEGPAARAGVRVGDKLLEVNGVALQGAEHHEAVEALRGAGTAVQMRVWRERMVEPENAVTITPLRPEDDYSPRERRGGGLRLPLLPPESPGPLRQRHVACLARSERGLGFSIAGGKGSTPYRAGDAGIFVSRIAEGGAAHRAGTLQVGDRVLSINGVDVTEARHDHAVSLLTAASPTIALLLEREAGGPLPPSPLPHSSPPTAAVATTSITTATPGVPGLPSLAPSLLAAALEGPYPVEEIRLPRAGGPLGLSIVGGSDHSSHPFGVQEPGVFISKVLPRGLAARSGLRVGDRILAVNGQDVRDATHQEAVSALLRPCLELSLLVRRDPAPPGLRELCIQKAPGERLGISIRGGARGHAGNPRDPTDEGIFISKVSPTGAAGRDGRLRVGLRLLEVNQQSLLGLTHGEAVQLLRSVGDTLTVLVCDGFEASTDAALEVSPGVIANPFAAGIGHRNSLESISSIDRELSPEGPGKEKELPGQTLHWGPEATEAAGRGLQPLKLDYRALAAVPSAGSVQRVPSGAAGGKMAESPCSPSGQQPPSPPSPDELPANVKQAYRAFAAVPTSHPPEDAPAQPPTPGPAASPEQLSFRERQKYFELEVRVPQAEGPPKRVSLVGADDLRKMQEEEARKLQQKRAQMLREAAEAGAEARLALDGETLGEEEQEDEQPPWASPSPTSRQSPASPPPLGGGAPVRTAKAERRHQERLRVQSPEPPAPERALSPAELRALEAEKRALWRAARMKSLEQDALRAQMVLSRSQEGRGTRGPLERLAEAPSPAPTPSPTPVEDLGPQTSTSPGRLSPDFAEELRSLEPSPSPGPQEEDGEVALVLLGRPSPGAVGPEDVALCSSRRPVRPGRRGLGPVPS

SEQ ID NO: 64460 - protein, 747 aa, Homo sapiens
MAELFMECEEEELEPWQKKVKEVEDDDDDEPIFVGEISSSKPAISNILNRVNPSSYSRGLKNGALSRGITAAFKPTSQHYTNPTSNPVPASPINFHPESRSSDSSVIVQPFSKPGYITNSSRVVSNKSSELLFDLTQDTGLSHYQGGPTLSMAGMSESSFLSKRPSTSEVNNVNPKKPKPSESVSGANSSAVLPSVKSPSVTSSQAMLAKGTNTSSNQSKNGTPFPRACPKCNIHFNLLDPLKNHMKYCCPDMINNFLGLAKTEFSSTVNKNTTIDSEKGKLIMLVNDFYYGKHEGDVQEEQKTHTTFKCFSCLKILKNNIRFMNHMKHHLELEKQSSESWENHTTCQHCYRQFPTPFQLQCHIESTHTPHEFSTICKICELSFETEHVLLQHMKDNHKPGEMPYVCQVCNYRSSSFSDVETHFRTSHENTKNLLCPFCLKVIKIATPYMHHYMKHQKKGIHRCTKCRLQFLTCKEKMDHKTQHHRTFIKPKQLEGLPPGTKVTIRASVGPLQSGASPTPSISASASTLQLSPPRTKNITAKNPAKSNTSKPNTVKSNASKPNTSKPNGSKSKYKPKISNMQKKQSTLASSNKKSKVNTALRNLRYRRGIHKCIECCSEIKDFANHFPTYVHCSFCRYNTSCSKAYVNHMMSFHSNRPSKRFCIFKKHSENLRGITLVCLNCDFLSDVSGLDNMATHLSQHKTHTCQVVMQKDAEAAQRFQKISRVYLDSVPLRWTQLMPVLSFQGM

SEQ ID NO: 64461 - protein, 230 aa, Homo sapiens
MPDHDSTALLSRQTKRRRVDIGVKRTVGTASAFFAKARATFFSAMNPQGSEQDVEYSVVQHADGEKSNVLRKLLKRANSYEDAMMPFPGATIISQLLKNNMNKNGGTEPSFQASGLSSTGSEVHQEDICSNSSRDSPPECLSPFGRPTMSQFDMDRLCDEHLRAKRARVENIIRGMSHSPSVALRGNENEREMAPQSVSPRESYRENKRKQKLPQQQQQSFQQLVSARKE

SEQ ID NO: 64462 - protein, 229 aa, Homo sapiens
MTSVRENILFGMGNPLLDISAVVDKDFLDKYSLKPNDQILAEDKHKELFDELVKKFKVEYHAGGSTQNSIKVAQWMIQQPHKAATFFGCIGIDKFGEILKRKAAEAHVDAHYYEQNEQPTGTCAACITGDNRSLIANLAAANCYKKEKHLDLEKNWMLVEKARVCYIAGFFLTVSPESVLKVAHHASENNRIFTLNLSAPFISQFYKESLMKVMPYVDILFGNETTYHI

SEQ ID NO: 64463 - protein, 40 aa, Homo sapiens
MSRSKRDNNFYSVEIGDSTFTVLKRYQNLKPIGSGAQGIV

SEQ ID NO: 64464 - protein, 894 aa, Homo sapiens
MPEQERQITAREGASRKILSKLSLPTRAWEPAMKKSFAFDNVGYEGGLDGLGPSSQVATSTVRILGMTCQSCVKSIEDRISNLKGIISMKVSLEQGSATVKYVPSVVCLQQVCHQIGDMGFEASIAEGKAASWPSRSLPAQEAVVKLRVEGMTCQSCVSSIEGKVRKLQGVVRVKVSLSNQEAVITYQPYLIQPEDLRDHVNDMGFEAAIKSKVAPLSLGPIDIERLQSTNPKRPLSSANQNFNNSETLGHQGSHVVTLQLRIDGMHCKSCVLNIEENIGQLLGVQSIQVSLENKTAQVKYDPSCTSPVALQRAIEALPPGNFKVSLPDGAEGSGTDHRSSSSHSPGSPPRNQVQGTCSTTLIAIAGMTCASCVHSIEGMISQLEGVQQISVSLAEGTATVLYNPSVISPEELRAAIEDMGFEASVVSESCSTNPLGNHSAGNSMVQTTDGTPTSVQEVAPHTGRLPANHAPDILAKSPQSTRAVAPQKCFLQIKGMTCASCVSNIERNLQKEAGVLSVLVALMAGKAEIKYDPEVIQPLEIAQFIQDLGFEAAVMEDYAGSDGNIELTITGMTCASCVHNIESKLTRTNGITYASVALATSKALVKFDPEIIGPRDIIKIIEEIGFHASLAQRNPNAHHLDHKMEIKQWKKSFLCSLVFGIPVMALMIYMLIPSNEPHQSMVLDHNIIPGLSILNLIFFILCTFVQSKTSEALAKLMSLQATEATVVTLGEDNLIIREEQVPMELVQRGDIVKVVPGGKFPVDGKVLEGNTMADESLITGEAMPVTKKPGSTVIAGSINAHGSVLIKATHVGNDTTLAQIVKLVEEAQMSKAPIQQLADRFSGYFVPFIIIMSTLTLVVWIVIGFIDFGVVQRYFPGGCWQMRTPTSTSPRQR

SEQ ID NO: 64465 - protein, 813 aa, Homo sapiens
MFYVIGGITVSVVAFFFTIKFLFELAARVVSFLQNEDRERRGDRTIYDYVRGNYLDPRSCKVSWDWKDPYELFYKNGQPFPAHRPVGLRVHISHVELAVEIPVTQEVLQEPNSNVVKVAFTVRKAGRYEITVKLGGLNVAYSPYYKIFQPGMVVPSKTKIVCHFSTLVLTCGQPHTLQIVPRDEYDNPTNNSMSLRDEHNYTLSIHELGPQEEESTGVSFEKSVTSNRQTFQVFLRLTLHSRGCFHACISYQNQPINNGEFDIIVLSEDEKNIVERNVSTSGVSIYFEAYLYNATNCSSTPWHLPPMHMTSSQRRPSTAVDEEDEDSPSECHTPEKVKKPKKVYCYVSPKQFSVKEFYLKIIPWRLYTFRVCPGTKFSYLGPDPVHKLLTLVVDDGIQPPVELSCKERNILAATFIRSLHKNIGGSETFQDKVNFFQRELRQVHMKRPHSKVTLKVSRHALLESSLKATRNFSISDWSKNFEVVFQDEEALDWGGPRREWFELICKALFDTTNQLFTRFSDNNQALVHPNPNRPAHLRLKMYEFAGRLVGKCLYESSLGGAYKQLVRARFTRSFLAQIIGLRMHYKYFETDDPEFYKSKVCFILNNDMSEMELVFAEEKYNKSGQLDKVVELMTGGAQTPVTNANKIFYLNLLAQYRLASQVKEEVEHFLKGLNELVPENLLAIFDENELELLMCGTGDISVSDFKAHAVVVGGSWHFREKVMRWFWTVVSSLTQEELARLLQFTTGSSQLPPGGFAALCPSFQIIAAPTHSTLPTAHTCFNQLCLPTYDSYEEVHRMLQLAISEGCEGFGML

SEQ ID NO: 64466 - protein, 233 aa, Homo sapiens
  MOD_RES (1)..(1): Any amino acid
XRQNCPFLAGETESLADIVLWGALYPLLQDPAYLPEELSALHSWFQTLSTQEPCQRAAETVLKQQGVLALRPYLQKQPQPSPAEGRAVTNEPEEEELATLSEEEIAMAVTAWEKGLESLPPLRPQQNPVYSRLRQWNTLYLCGTDEYGTATETKALEEGLTPQEICDKYHIIHADIYRWFNISFDIFGRTTTPQQTKITQDIFQQLLKRGFVLQDTVEQLRCEHCARFLADRF

SEQ ID NO: 64467 - protein, 132 aa, Homo sapiens
LNVTENECQNYKRCLEILEQMNEDDSEQLQMELKELALEEERLIQELEDVEKNRKIVAENLEKVQAEAERLDQEEAQMDVEKGKIEDTGGSGGSYSIKTQFNSEEQWTKALKFMLTNLKWGLAWVSSQFYNK

SEQ ID NO: 64468 - protein, 78 aa, Homo sapiens
MAQFPTPFGGSLDIWAITVEERAKHDQQFHSLKPISGFITGDQARNFFFQSGLPQPVLAQIWALADMNNDGRMDQVEF

SEQ ID NO: 64469 - protein, 521 aa, Homo sapiens
MAAGETQLYAKVSNKLKSRSSPSLLEPLLAMGFPVHTALKALAATGRKTAEEALAWLHDHCNDPSLDDPIPQEYALFLCPTGPLLEKLQEFWRESKRQCAKNRAHEVFPHVTLCDFFTCEDQKVECLYEALKRAGDRLLGSFPTAVPLALHSSISYLGFFVSGSPADVIREFAMTFATEASLLADCSVKPCTKQLHLTLAHKFYPHHQRTLEQLARAIPLGHSCQWTAALYSRDMRFVHYQTLRALFQYKPQNVDELTLSPGDYIFVDPTQQDEASEGWVIGISQRTGCRGFLPENYTDRASESDTWVKHRMYTFSLATDLNSRKDGEASSRCSGEFLPQTARSLSSLQALQATVARKSVLVVRHGERVDQIFGKAWLQQCSTPDGKYYRPDLNFPCSLPRRSRGIKDFENDPPLSSCGIFQSRIAGDALLDSGIRISSVFASPALRCVQTAKLILEELKLEKKIKIRVEPGIFEWTKWEAGKTTPTLMSLEELKEANFNIDTDYSFQHKTGACLLTMSLP

SEQ ID NO: 64470 - protein, 118 aa, Homo sapiens
SVRALLCTLRAVPSPAAPCPPRPWQLGVGAVRTLRTGPALLSDEFGALESVKAASELYSPLSGEVTEINEALAENPGLVNKSCYEDGWLIKMTLSNPSELDELMSEEAYEKYIKSIEE

SEQ ID NO: 64471 - protein, 749 aa, Homo sapiens
MAEQVLPQALYLSNMRKAVKIRERTPEDIFKPTNGIIHHFKTMHRYTLEMFRTCQFCPQFREIIHKALIDRNIQATLESQKKLNWCREVRKLVALKTNGDGNCLMHATSQYMWGVQDTDLVLRKALFSTLKETDTRNFKFRWQLESLKSQEFVETGLCYDTRNWNDEWDNLIKMASTDTPMARSGLQYNSLEEIHIFVLCNILRRPIIVISDKMLRSLESGSNFAPLKVGGIYLPLHWPAQECYRYPIVLGYDSHHFVPLVTLKDSGPEIRAVPLVNRDRGRFEDLKVHFLTDPENEMKEKLLKEYLMVIEIPVQGWDHGTTHLINAAKLDEANLPKEINLVDDYFELVQHEYKKWQENSEQGRREGHAQNPMEPSVPQLSLMDVKCETPNCPFFMSVNTQPLCHECSERRQKNQNKLPKLNSKPGPEGLPGMALGASRGEAYEPLAWNPEESTGGPHSAPPTAPSPFLFSETTAMKCRSPGCPFTLNVQHNGFCERCHNARQLHASHAPDHTRHLDPGKCQACLQDVTRTFNGICSTCFKRTTAEASSSLSTSLPPSCHQRSKSDPSRLVRSPSPHSCHRAGNDAPAGCLSQAARTPGDRTGTSKCRKAGCVYFGTPENKGFCTLCFIEYRENKHFAAASGKVSPTASRFQNTIPCLGRECGTLGSTMFEGYCQKCFIEAQNQRFHEAKRTEEQLRSSQRRDVPRTTQSTSRPKCARASCKNILACRSEELCMECQHQPEDGPWGPPG

SEQ ID NO: 64472 - protein, 26 aa, Homo sapiens
MLNDQLMLLERTFLNPRAFPEERYYR

SEQ ID NO: 64473 - protein, 347 aa, Homo sapiens
  MOD_RES (1)..(1): Any amino acid
XYEGYDSTANPTVSNVFSTAAFRFGHATIHPLVRRLDASFQEHPDLPGLWLHQAFFSPWTLLRGGYNEWREFCGLPRLETPADLSTAIASRSVADKILDLYKHPDNIDVWLGGLAENFLPRARTGPLFACLIGKQMKALRDGDWFWWENSHVFTDAQRRELEKHSLSRVICDNTGLTRVPMDAFQVGKFPEDFESCDSITGMNLEAWRETFPQDDKCGFPESVENGDFVHCEESGRRVLVYSCRHGYELQGREQLTCTQEGWDFQPPLCKDVNECADGAHPPCHASARCRNTKGGFQCLCADPYELGDDGRTCVDSGRLPRVTWISMSLAALLIGGFAGLTSTVICR

SEQ ID NO: 64474 - protein, 170 aa, Homo sapiens
MMFSGFNADYEASSSRCSSASPAGDSLSYYHSPADSFSSMGSPVNAQDFCTDLAVSSANFIPTVTAISTSPDLQWLVQPALVSSVAPSQTRAPHPFGVPAPSAGAYSRAGVVKTMTGGRAQSIGRRGKVEQVRNSSVLFLGMWGLGGKQPRRCRSPVQRMKPLMGLAAHP

SEQ ID NO: 64475 - protein, 251 aa, Homo sapiens
  MOD_RES (1)..(1): Any amino acid
XVMIAILALGKLLEPLQKSVLAAVVIANLKGMFMQLCDIPRLWRQNKIDAVIWVFTCIVSIILGLDLGLLAGLIFGLLTVVLRVQFPSWNGLGSIPSTDIYKSTKNYKNIEEPQGVKILRFSSPIFYGNVDGFKKCIKSTVGFDAIRVYNKRLKALRKIQKLIKSGQLRATKNGIISDAVSTNNAFEPDEDIEDLEELDIPTKEIEIQVDWNSELPVKVNVPKVPIHSLVLDCGAISFLDVVGVRSLRVIM

SEQ ID NO: 64476 - protein, 60 aa, Homo sapiens
  MOD_RES (1)..(1): Any amino acid
XAAGVGLVDCHCHLSAPDFDRDLDDVLEKAKKANVVALVAVAEHSGEFEKIMQLSERIWM

SEQ ID NO: 64477 - protein, 184 aa, Homo sapiens
QPSEGESRNVLTESARIARGKITDLANLSAANHDAAIFPGGFGAAKNLSTFAVDGKDCKVNKEVERVLKEFHQAGKPIGLCCIAPVLAAKVLRGVEVTVGHEQEEGGKWPYAGTAEAIKALGAKHCVKEVVEAHVDQKNKVVTTPAFMCETALHYIHDGIGAMASWACWLMPVIPALWEAKARG

SEQ ID NO: 64478 - protein, 26 aa, Homo sapiens
MADPRVRQIKIKTGVVKRQRSYKNPG

SEQ ID NO: 64479 - protein, 198 aa, Homo sapiens
TVQMMQNPQILAALQERLDGLVETPTGYIESLPRVVKRRVNALKNLQVKCAQIEAKFYEEVHDLERKYAVLYQPLFDKRFEIINAIYEPTEEECEWKPDEEDEISELKEKAKIEDEKKDEEKEDPKGIPEFWLTVFKNVDLLSDMVQEHDEPILKHLKDIKVKFSDAGQPMSFVLEFHFEPNEYFTNEVLTKTYRMSS

SEQ ID NO: 64480 - protein, 143 aa, Homo sapiens
VFSGKRLEAEFPPHHSQSTFRKTSPAPGGPAGEGPLQSLTCLIGEKDLRLLEKLGDGSFGVVRRGEWDAPSGKTVSVAVKCLKPDVLSQPEAMDDFIREVNAMHSLDHRNLIRLYGVVLTPPMKMASVSQIASRERPEKLQDS

SEQ ID NO: 64481 - protein, 628 aa, Homo sapiens
MTIRHQGQQYRPRMAFLQKIEALVKDMQNPETGVRMQNQRVLVTSVPHAMTGSDVLQWIVQRLWISSLEAQNLGNFIVRYGYIYPLQDPKNLILKPDGSLYRFQTPYFWPTQQWPAEDTDYAIYLAKRNIKKKGILEEYEKENYNFLNQKMNYKWDFVIMQAKEQYRAGKERNKADRYALDCQEKAYWLVHRCPPGMDNVLDYGLDRVTNPNEVKKQTVVAVKKEIMYYQQALMRSTVKSSVSLGGIVKYSEQFSSNDAIMSGCLPSNPWITDDTQFWDLNAKLVEIPTKMRVERWAFNFSELIRDPKGRQSFQYFLKKEFSGENLGFWEACEDLKYGDQSKVKEKAEEIYKLFLAPGARRWINIDGKTMDITVKGLKHPHRYVLDAAQTHIYMLMKKDSYARYLKSPIYKDMLAKAIEPQETTKKSSTLPFMRRHLRSSPSPVILRQLEEEAKAREAANTVDITQPGQHMAPSPHLTVYTGTCMPPSPSSPFSSSCRSPRKPFASPSRFIRRPSTTICPSPIRVALESSSGLEQKGECSGSMAPRGPSVTESSEASLDTSWPRSRPRAPPKARMALSFSRFLRRGCLASPVFARLSPKCPAVSHGRVQPLGDVGQQLPRLKSKRVAK

SEQ ID NO: 64482 - protein, 255 aa, Homo sapiens
MTCQSCVDAVRKSLQGVAGVQDVEVHLEDQMVLVHTTLPSQEVQALLEGTGRQAVLKGMGSGQLQNLGAAVAILGGPGTVQGVVRFLQLTPERCLIEGTIDGLEPGLHGLHVHQYGDLTNNCNSCGNHFNPDGASHGGPQDSDRHRGDLGNVRADADGRAIFRMEDEQLKVWDVIGRSLIIDEGEDDLGRGGHPLSKITGNSGERLACGIIARSAGLFQNPKQICSCDGLTIWEERGRPIAGKGRKESAQPPAHL

SEQ ID NO: 64483 - protein, 130 aa, Homo sapiens
MDPLAPLNPLIRGPRTPGLRRTEPRLTRSCRGAFRSPRPLPKSGQADGTSEESLHLDIQKLKEKRDMLDKEISQFVSEGYSVDELEDHITQLHEYNDIKDVGQMLMGKLAVIRGVTTKELYPEFGLDMND

SEQ ID NO: 64484 - protein, 94 aa, Homo sapiens
ENTRCVWIGSSVGLFVFNLANLEVEAALYYKGAVLAGLPLWREDCRVGDQPGRASQGSAVPQHGAEPLGASQLLCPTDLSTVSGNCQGEEYQGC

SEQ ID NO: 64485 - protein, 187 aa, Homo sapiens
MRLQKLEQQRRLFEKKQRQKRQELLMVQANPDASPWLWRSCLREERLLGDRGLGNPFLRKKVSEAHLPSGIHSALGTVSCGGDGRGERGLPTPRTEAVFRNLGLQSPFLSWLPDNSDAELEEVSVENGSVSPPPFKQSPRIRRKGWQAHQRPGTRAEGESDSQDMGDAHKSPNMGPNPGMDGDCVYE

SEQ ID NO: 64486 - protein, 19 aa, Homo sapiens
MASVGECPAPGYYRYYNKY

SEQ ID NO: 64487 - protein, 103 aa, Homo sapiens
  MOD_RES (1)..(1): Any amino acid
XLLLGALLWAVLWLLRDRQSLPASNAFVFITGCDSGFGRLLALQLDQRGFRVLASCLTPSGAEDLQRVASSRLHTTLLDITDPQSVQQAAKWVEMHVKEAGGM

SEQ ID NO: 64488 - protein, 879 aa, Homo sapiens
MLRRRAQEEDSTVLIDVSPPEAEKRGSYGSTAHASEPGGQQAAACRAGSPAKPRIADFVLVWEEDLKLDRQQDSAARDRTDMHRTWRETFLDNLRAAGLCVDQQDVQDGNTTVHYALLSASWAVLCYYAEDLRLKLPLQELPNQASNWSAGLLAWLGIPNVLLEVVPDVPPEYYSCRFRVNKLPRFLGSDNQDTFFTSTKRHQILFEILAKTPYGHEKKNLLGIHQLLAEGVLSAAFPLHDGPFKTPPEGPQAPRLNQRQVLFQHWARWGKWNKYQPLDHVRRYFGEKVALYFAWLGFYTGWLLPAAVVGTLVFLVGCFLVFSDIPTQELCGSKDSFEMCPLCLDCPFWLLSSACALAQAGRLFDHGGTVFFSLFMALWAVLLLEYWKRKSATLAYRWDCSDYEDTEERPRPQFAASAPMTAPNPITGEDEPYFPERSRARRMLAGSVVIVVMVAVVVMCLVSIILYRAIMAIVVSRSGNTLLAAWASRIASLTGSVVNLVFILILSKIYVSLAHVLTRWEMHRTQTKFEDAFTLKVFIFQFVNFYSSPVYIAFFKGRFVGYPGNYHTLFGVRNEECAAGGCLIELAQELLVIMVGKQVINNMQEVLIPKLKGWWQKFRLRSKKRKAGASAGASQGPWEDDYELVPCEGLFDEYLEMVLQFGFVTIFVAACPLAPLFALLNNWVEIRLDARKFVCEYRRPVAERAQDIGIWFHILAGLTHLAVISNAFLLAFSSDFLPRAYYRWTRAHDLRGFLNFTLARAPSSFAAAHNRTCRYRAFRDDDGHYSQTYWNLLAIRLAFVIVFEHVVFSVGRLLDLLVPDIPESVEIKVKREYYLAKQALAENEVLFGTNGTKDEQPEGSELSSHWTPFTVPKASQLQQ

SEQ ID NO: 64489 - protein, 403 aa, Homo sapiens
MAAGGDHGSPDSYRSPLASRYASPEMCFVFSDRYKFRTWRQLWLWLAEAEQTLGLPITDEQIQEMKSNLENIDFKMAAEEEKRLRHDVMAHVHTFGHCCPKAAGIIHLGATSCYVGDNTDLIILRNALDLLLPKLARVISRLADFAKERASLPTLGFTHFQPAQLTTVGKRCCLWIQDLCMDLQNLKRVRDDLRFRGVKGTTGTQASFLQLFEGDDHKVEQLDKMVTEKAGFKRAFIITGQTYTRKVDIEVLSVLASLGASVHKICTDIRLLANLKEMEEPFEKQQIGSSAMPYKRNPMRSERCCSLARHLMTLVMDPLQTASVQWFERTLDDSANRRICLAEAFLTADTILNTLQNISEGLVVYPKVRSLNSKVIERRIRQELPFMATENIIMAMVKAGGSR

SEQ ID NO: 64490 - protein, 131 aa, Homo sapiens
MSGPVPSRARVYTDVNTHRPREYWDYESHVVEWGNQDDYQLVRKLGRGKYSEVFEAINITNNEKVVVKILKSRTPALVFEHVNNTDFKQLYQTLTDYDIRFYMYEILKALDYCHSMGIMHRDVKPHNVMID

SEQ ID NO: 64491 - protein, 132 aa, Homo sapiens
MEFCVEDSTDVHVLIEDHRIVFSCKNADGVELYNEIEFYAKVNSKDSQDKRSSRSITCFVRKWKEKVAWPRLTKEDIKPVWLSVDFDNWRDWEGDEEMELAHVEHYAELLKKVSTKRPPPAMDDLDFTTTVV

SEQ ID NO: 64492 - protein, 512 aa, Homo sapiens
MTPTLAALLCLGLSLGPRTHVQAGPFPKPTLWAEPGSVISWGSPVTIWCQGSLEAQEYRLDKEGSPEPWDRNNPLEPKNKARFSIPSITEHHAGRYRCHYYSSAGWSEPSDPLELVMTGAYSKPTLSALPSPVVASGGNMTLQCGSQKGYHHFVLMKEGEHQLPRTLDSQQLHSGGFQALFPVGPVNPSHRWRFTCYYYYMNTPRVWSHPSDPLEILPSGVSRKPSLLTLQGPVLAPGQSLTLQCGSDVGYDRFVLYKEGERDFLQRPGQQPQAGLSQANFTLGPVSPSHGGQYRCYGAHNLSSEWSAPSDPLNILMAGQIYDTVSLSAQPGPTVASGENVTLLCQSWWQFDTFLLTKEGAAHPPLRLRSMYGAHKYQAEFPMSPVTSAHAGTYRCYGSYSSNPHLLSFPSEPLELMVSGHSGGSSLPPTGPPSTPGESLRPRGERRLPQGSLSLPKDPTPLPSRTGLCPRGSEAGLVKSGGRGRGRCWGPARRRSRADVGGKTAPAFTSLS

SEQ ID NO: 64493 - protein, 615 aa, Homo sapiens
MAHEGSRQERQVRDRGVTRSKAEKVRPPTVPVPQVDIVPGRLSEAEWMALTALEEGEDVVGDILADLLARVMDSAFKVYLTQQCIPFTISQAREAMLQITEWRFLARDEGESAVAEDPTWGEDEEPSACTTDSWAQGSVPVLHASTSEGLENFQGEVHSSGASPDSSAIAPALPFPTSHCPSAFPQDPGGVDRIPLGRSWMGRGSQEQMESWEPSPQLRVTSAPPPTSELFQEAGPGGPVEEADGQSRGLSSAGSLSASFQLSVEEAPADDADPSLDPYLVASPQASTGRGHPLGFHLSLEDLYCCMPQLDAAGDRLELRSEGVPCIASGVLVSYPSVGGATRPSASCQQQRAGHSDVRLSAHHHRMRRKAAVKRLDPARLPCHWVRPLAEVLVPDSQTRPLEAYRGRQRGEKTKARAEPQALGPGTRVSPAAFFPLRPGIPFRDLDSGPALLFPTLNLGLSSPSLESKLPLPNSRIRFLTTHPVLPDVARSRSPKLWPSVRWPSGWEGKAELLGELWAGRTRVPPQGLELADREGQDPGRWPRTTPPVLEATSQVMWKPVLLPEALKLAPGVSMWNRSTQVLLSSGVPEQEDKEGSTFPPVEQHPIQTGAPKPR

SEQ ID NO: 64494 - protein, 775 aa, Homo sapiens
MGDHLDLLLGVVLMAGPVFGIPSCSFDGRIAFYRFCNLTQVPQVLNTTERLLLSFNYIRTVTASSFPFLEQLQLLELGSQYTPLTIDKEAFRNLPNLRILDLGSSKIYFLHPDAFQGLFHLFELRLYFCGLSDAVLKDGYFRNLKALTRLDLSKNQIRSLYLHPSFGKLNSLKSIDFSSNQIFLVCEHELEPLQGKTLSFFSLAANSLYSRVSVDWGKCMNPFRNMVLEILDVSGNGWTVDITGNFSNAISKSQAFSLILAHHIMGAGFGFHNIKDPDQNTFAGLARSSVRHLDLSHGFVFSLNSRVFETLKDLKVLNLAYNKINKIADEAFYGLDNLQVLNLSYNLLGELYSSNFYGLPKVAYIDLQKNHIAIIQDQTFKFLEKLQTLDLRDNALTTIHFIPSIPDIFLSGNKLVTLPKINLTANLIHLSENRLENLDILYFLLRVPHLQILILNQNRFSSCSGDQTPSENPSLEQLFLGENMLQLAWETELCWDVFEGLSHLQVLYLNHNYLNSLPPGVFSHLTALRGLSLNSNRLTVLSHNDLPANLEILDISRNQLLAPNPDVFVSLSVLDITHNKFICECELSTFINWLNHTNVTIAGPPADIYCVYPDSFSGVSLFSLSTEGCDEEEVLKSLKFSLFIVCTVTLTLFLMTILTVTKFRGFCFICYKTAQRLVFKDHPQGTEPDMYKYDAYLCFSSKDFTWVQNALLKHLDTQYSDQNRFNLCFEERDFVPGENRIANIQDAIWNSRKIVCLVSRHFLRDGWCLEAFSYA

SEQ ID NO: 64495 - protein, 120 aa, Homo sapiens
MIKFNRLNRLTTDFNVIVEALSKSKAELMEISEDKTKIRRSPSKPLPEVTDEYKNDVKNRSVYIKGFPTDATLDDIKEWLEDKGQVLNIQMRRTLHKAFKGSIFVVFDSIESAKKFVETP

SEQ ID NO: 64496 - protein, 65 aa, Homo sapiens
MNLQPIFWIGLISSVCCVFAQTDENRCLKANAKSCGECIQAGPNCGWCTNSVNIFTGRNAYFCTM

SEQ ID NO: 64497 - protein, 176 aa, Homo sapiens; identical to SEQ ID NO: 56739

SEQ ID NO: 64498 - protein, 337 aa, Homo sapiens
MVPWVRTMGQKLKQRLRLDVGREICRQYPLFCFLLLCLSAASLLLNRYIHILMIFWSFVAGVVTFYCSLGPDSLLPNIFFTIKYKPKQLGLQELFPQGHSCAVCGKVKCKRHRPSLLLENYQPWLDLKISSKVDASLSEVDIPSIITKKLLKAAMKHIEVIVKARQKVKNTEFLQQAALEEYGPELHVALRSRRDELHYLRKLTELLFPYILPPKATDCRSLTLLIREILSGSVFLPSLDFLADPDTVNHLLIIFIDDSPPEKATEPASPLVPFLQKFAEPRNKKPSVLKLELKQIREQQDLLFRFMNFLKQEGAVHVLQFCLTVGEAYLCILRKGI

SEQ ID NO: 64499 - protein, 119 aa, Homo sapiens
MLFVFGYRAQKIRSKKLSVLIHNSDEHKDIQSCTVEVHFQKIIDKEGDDYEVIPNSNFYVSRTACRDNTSVYHISGKKKTFKDVGNLLRSHGIDLDHNRFLILQGEVEQIAMMKPKGQT

SEQ ID NO: 64500 - protein, 318 aa, Homo sapiens
MQEAPAALPTEPGPSPVPAFLGKLWALVGDPGTDHLIRWSPSGTSFLVSDQSRFAKEVLPQYFKHSNMASFVRQLNMYGFRKVVSIEQGGLLRPERDHVEFQHPSFVRGREQLLERVRRKVPALRGDDGRWRPEDLGRLLGEVQALRGVQESTEARLRELRQQNEILWREVVTLRQSHGQQHRVIGKLIQCLFGPLQAGPSNAGGKRKLSLMLDEGSSCPTPAKFNTCPLPGALLQDPYFIQSPPRHCLWLWCRPSWKGKGASAPRGPGMPNSLNQGIPGRYLTGGLWAWKAGTGAQRVCCLRCCFSPLKKVWNLQGL

SEQ ID NO: 64501 - protein, 48 aa, Homo sapiens
FPECGFYGMYDKILLFRHDPTSENILQLVKAASDIQEGDLIEVVLSVV

SEQ ID NO: 64502 - protein, 1439 aa, Homo sapiens
MENKISTIERGAFQDLKELERLRLNRNHLQLFPELLFLGTAKLYRLDLSENQIQAIPRKAFRGAVDIKNLQLDYNQISCIEDGAFRALRDLEVLTLNNNNITRLSVASFNHMPKLRTFRLHSNNLYCDCHLAWLSDWLRQRPRVGLYTQCMGPSHLRGHNVAEVQKREFVCSARHGGHQSFMAPSCSVLHCPAACTCSNNIVDCRGKGLTEIPTNLPETITEIRLEQNTIKVIPPGAFSPYKKLRRIDLSNNQISELAPDAFQGLRSLNSLVLYGNKITELPKSLFEGLFSLQLLLLNANKINCLRVDAFQDLHNLNLLSLYDNKLQTIAKGTFSPLRAIQTMHLAQNPFICDCHLKWLADYLHTNPIETSGARCTSPRRLANKRIGQIKSKKFRCSGTEDYRSKLSGDCFADLACPEKCRCEGTTVDCSNQKLNKIPEHIPQYTAELRLNNNEFTVLEATGIFKKLPQLRKINFSNNKITDIEEGAFEGASGVNEILLTSNRLENVQHKMFKGLESLKTLMLRSNRITCVGNDSFIGLSSVRLLSLYDNQITTVAPGAFDTLHSLSTLNLLANPFNCNCYLAWLGEWLRKKRIVTGNPRCQKPYFLKEIPIQDVAIQDFTCDDGNDDNSCSPLSRCPTECTCLDTVVRCSNKGLKVLPKGIPRDVTELYLDGNQFTLVPKELSNYKHLTLIDLSNNRISTLSNQSFSNMTQLLTLILSYNRLRCIPPRTFDGLKSLRLLSLHGNDISVVPEGAFNDLSALSHLAIGANPLYCDCNMQWLSDWVKSEYKEPGIARCAGPGEMADKLLLTTPSKKFTCQGPVDVNILAKCNPCLSNPCKNDGTCNSDPVDFYRCTCPYGFKGQDCDVPIHACISNPCKHGGTCHLKEGEEDGFWCICADGFEGENCEVNVDDCEDNDCENNSTCVDGINNYTCLCPPEYTGELCEEKLDFCAQDLNPCQHDSKCILTPKGFKCDCTPGYVGEHCDIDFDDCQDNKCKNGAHCTDAVNGYTCICPEGYSGLFCEFSPPMVLPRTSPCDNFDCQNGAQCIVRINEPICQCLPGYQGEKCEKLVSVNFINKESYLQIPSAKVRPQTNITLQIATDEDSGILLYKGDKDHIAVELYRGRVRASYDTGSHPASAIYSVETINDGNFHIVELLALDQSLSLSVDGGNPKIITNLSKQSTLNFDSPLYVGGMPGKSNVASLRQAPGQNGTSFHGCIRNLYINSELQDFQKVPMQTGILPGCEPCHKKVCAHGTCQPSSQAGFTCECQEGWMGPLCDQRTNDPCLGNKCVHGTCLPINAFSYSCKCLEGHGGVLCDEEEDLFNPCQAIKCKHGKCRLSGLGQPYCECSSGYTGDSCDREISCRGERIRDYYQKQQGYAACQTTKKVSRLECRGGCAGGQCCGPLRSKRRKYSFECTDGSSFVDEVEKVVKCGCTRCVS

SEQ ID NO: 64503 - protein, 44 aa, Homo sapiens
MTTTTTFKGVDPNSRNSSRDTGSCHVAQAGLELLGSSDDPALAS

SEQ ID NO: 64504 - protein, 99 aa, Homo sapiens
  MOD_RES (1)..(1): Any amino acid
XGAFGILAAHVPTLQVLRPGLVVVHAEDGTTSKYFVSSGSIAVNADSSVQLLAEEAVTLDMLDLGPRQTWRRPRRSWWGQLTRPRGQRSRSESRPTRPW

SEQ ID NO: 64505 - protein, 17 aa, Homo sapiens
MSVHQIRKHAVLPPIIC

SEQ ID NO: 64506 - protein, 113 aa, Homo sapiens
FLCALPRREGYEFFVGQWTGTELHFTALINIQTRGEAAASQLILYHYPELKEEKGIVLMTAEMDSTFLNVAEAQCIANQVQLFYATDRKETYGWAQLLAIHSTLIHLHQRVRK

SEQ ID NO: 64507 - protein, 96 aa, Homo sapiens
KQPSDVSSECDREGRQLQPAERPPQLRPGAPTSLQTEPQDRSPAPMSCDKSTQTPSPPCQAFNHYLSAMDDSAGSSLRIALHREVQWPLKWLAKSS

SEQ ID NO: 64508 - protein, 146 aa, Homo sapiens
MADLEEQLSDEEKVRIAAKFIIHAPPGEFNEVFNDVRLLLNNDNLLREGAAHAFAQYNLDQFTPVKIEGYEDQVLITEHGDLGNGKFLDPKNRICFKFDHLRKEATDPRPCEVENAVESWRTSVETALRAYVKEHYPNGVCTVSHQ

SEQ ID NO: 64509 - protein, 43 aa, Homo sapiens
  MOD_RES (1)..(1): Any amino acid
XRTCCLRASRRASTSSPTRTGPTSPALPKTSSPSCWSVTPSRG

SEQ ID NO: 64510 - protein, 83 aa, Homo sapiens
MAEAEGVPTTPGPASGSTFRGRRDVSGSWERDQQVEAAQRALVEVLGPYEPLLSRVQAALVWERPARSALWCLGLNAAFCSAC

SEQ ID NO: 64511 - protein, 1823 aa, Homo sapiens
MALSSAWRSVLPLWLLWSAACSRAASGDDNAFPFDIEGSSAVGRQDPPETSEPRVALGRLPPAAEKCNAGFFHTLSGECVPCDCNGNSNECLDGSGYCVHCQRNTTGEHCEKCLDGYIGDSIRGAPQFCQPCPCPLPHLANFAESCYRKNGAVRCICNENYAGPNCERCAPGYYGNPLLIGSTCKKCDCSGNSDPNLIFEDCDEVTGQCRNCLRNTTGFKCERCAPGYYGDARIAKNCAVCNCGGGPCDSVTGECLEEGFEPPTGMDCPTISCDKCVWDLTDDLRLAALSIEEGKSGVLSVSSGAAAHRHVNEINATIYLLKTKLSERENQYALRKIQINNAENTMKSLLSDVEELVEKENQASRKGQLVQKESMDTINHASQLVEQAHDMRDKIQEINNKMLYYGEEHELSPKEISEKLVLAQKMLEEIRSRQPFFTQRELVDEEADEAYELLSQAESWQRLHNETRTLFPVVLEQLDDYNAKLSDLQEALDQALNYVRDAEDMNRATAARQRDHEKQQERVREQMEVVNMSLSTSADSLTTPRLTLSELDDIIKNASGIYAEIDGAKSELQVKLSNLSNLSHDLVQEAIDHAQDLQQEANELSRKLHSSDMNGLVQKALDASNVYENIVNYVSEANETAEFALNTTDRIYDAVSGIDTQIIYHKDESENLLNQARELQAKAESSSDEAVADTSRRVGGALARKSALKTRLSDAVKQLQAAERGDAQQRLGQSRLITEEANRTTMEVQQATAPMANNLTNWSQNLQHFDSSAYNTAVNSARDAVRNLTEVVPQLLDQLRTVEQKRPASNVSASIQRIRELIAQTRSVASKIQVSMMFDGQSAVEVHSRTSMDDLKAFTSLSLYMKPPVKRPELTETADQFILYLGSKNAKKEYMGLAIKNDNLVYVYNLGTKDVEIPLDSKPVSSWPAYFSIVKIERVGKHGKVFLTVPSLSSTAEEKFIKKGEFSGDDSLLDLDPEDTVFYVGGVPSNFKLPTSLNLPGFVGCLELATLNNDVISLYNFKHIYNMDPSTSVPCARDKLAFTQSRAASYFFDGSGYAVVRDITRRGKFGQVTRFDIEVRTPADNGLILLMVNGSMFFRLEMRNGYLHVFYDFGFSGGPVHLEDTLKKAQINDAKYHEISIIYHNDKKMILVVDRRHVKSMDNEKMKIPFTDIYIGGAPPEILQSRALRAHLPLDINFRGCMKGFQFQKKDFNLLEQTETLGVGYGCPEDSLISRRAYFNGQSFIASIQKISFFDGFEGGFNFRTLQPNGLLFYYASGSDVFSISLDNGTVIMDVKGIKVQSVDKQYNDGLSHFVISSVSPTRYELIVDKSRVGSKNPTKGKIEQTQASEKKFYFGGSPISAQYANFTGCISNAYFTRVDRDVEVEDFQRYTEKVHTSLYECPIESSPLFLLHKKGKNLSKPKASQNKKGGKSKDAPSWDPVALKLPERNTPRNSHCHLSNSPRAIEHAYQYGGTANSRQEFEHLKGDFGAKSQFSIRLRTRSSHGMIFYVSDQEENDFMTLFLAHGRLVYMFNVGHKKLKIRSQEKYNDGLWHDVIFIRERSSGRLVIDGLRVLEESLPPTEATWKIKGPIYLGGVAPGKAVKNVQINSIYSFSGCLSNLQLNGASITSASQTFSVTPCFEGPMETGTYFSTEGGYVVLDESFNIGLKFEIAFEVRPRSSSGTLVHGHSVNGEYLNVHMKNGQVIVKVNNGIRDFSTSVTPKQSLCDGRWHRITVIRDSNVVQLDVDSEVNHVVGPLNPKPIDHREPVFVGGVPESLLTPRLAPSKPFTGCIRHFVIDGHPVSFSKAALVSGAVSINSCPAA

SEQ ID NO: 64512 - protein, 145 aa, Homo sapiens
  MOD_RES (1)..(1): Any amino acid
XDFGMCKEGICNGVTTATFCGTPDYIAPEILQEMLYGPAVDWWAMGVLLYEMLCGHAPFEAENEDDLFEAILNDEVVYPTWLHEDATGILKSFMTKNPTMRLGSLTQGGEHAILRHPFFKEIDWAQLNHRQIEPPFRPRIWLLEE

SEQ ID NO: 64513 - protein, 62 aa, Homo sapiens
MDSDASLVSSRPSSPEPDDLFLPARSKGSSGSAFTGGTVSSSTPSDCPPELSAELRGAMGSA

SEQ ID NO: 64514 - protein, 99 aa, Homo sapiens
MGYKLQDLTDVQIMARLQEESLRQDYASTSASVSRHSSSVSLSSGKKGTCSDQEYDQYSLEDEEEFDHLPPPQPRLPRCSPFQRGIPHSQTFSSIRECR

SEQ ID NO: 64515 - protein, 432 aa, Homo sapiens
MALCSLISSWASGFRSDDDQERRGDSYIVRVKAVVMTRDDSSGGWFPQEGGGISRVGVCKVMHPEGNGRSGFLIHGERQKDKLVVLECYVRKDLVYTKANPTFHHWKVDNRKFGLTFQSPADARAFDRGVRKAIEDLIEGSTTSSSTIHNEAELGDDDVFTTATDSSSNSSQKREQPTRTISSPTSCEHRRIYTLGHLHDSYPTDHYHLDQPMPRPYRQVSFPDDDEEIVRINPREKIWMTGYEDYRHAPVRGKYPDPSEDADSSYVRFAKGEVPKHDYNYPYVDSSDFGLGEDPKGRGGSVIKTQPSRGKSRRRKEDGERSRCVYCRDMFNHEENRRGHCQDAPDSVRTCIRRVSCMWCADSMLYHCMSDPEGDYTDPCSCDTSDEKFCLRWMALIALSFLAPCMCCYLPLRACYHCGVMCRCCGGKHKAA

SEQ ID NO: 64516 - protein, 94 aa, Homo sapiens
MSGPVPSRARVYTDVNTHRPREYWDYESHVVEWGNQDDYQLVRKLGRGKYSEVFEAINITNNEKVVVKILKSQVLEGLKWEDRLSLEVEGCTDL

SEQ ID NO: 64517 - protein, 689 aa, Homo sapiens
MGEPAGVAGTMESPFSPGLFHRLDEDWDSALFAELGYFTDTDELQLEAANETYENNFDNLDFDLDLMPWESDIWDINNQICTVKDIKAEPQPLSPASSSYSVSSPRSVDSYSSTQHVPEELDLSSSSQMSPLSLYGENSNSLSSAEPLKEDKPVTGPRNKTENGLTPKKKIQVNSKPSIQPKPLLLPAAPKTQTNSSVPAKTIIIQTVPTLMPLAKQQPIISLQPAPTKGQTVLLSQPTVVQLQAPGVLPSAQPVLAVAGGVTQLPNHVVNVVPAPSANSPVNGKLSVTKPVLQSTMRNVGSDIAVLRRQQRMIKNRESACQSRKKKKEYMLGLEARLKAALSENEQLKKENGTLKRQLDEVVSENQRLKVPSPKRRVVCVMIVLAFIILNYGPMSMLEQDSRRMNPSVSPANQRRHLLGFSAKEAQDTSDGIIQKNSYSKLLRNLRYKETNFVHPCFRYDHSVSNDKALMVLTEEPLLYIPPPPCQPLINTTESLRLNHELRGWVHRHEVERTKSRRMTNNQQKTRILQGALEQGSNSQLMAVQYTETTSSISRNSGSELQVYYASPRSYQDFFEAIRRRGDTFYVVSFRRDHLLLPATTHNKTTRPKMSIVLPAININENVINGQDYEVMMQIDCQVMDTRILHIKSSSVPPYLRDQQRNQTNTFFGSPPAATEATHVVSTIPESLQ

SEQ ID NO: 64518 - protein, 303 aa, Homo sapiens
  MOD_RES (1)..(1): Any amino acid
XYNYTLSINGKARKHGENYSVDYLTDVLANVSLDFLDYKSNFEPFFMMIATPAPHSPWTAAPQYQKAFQNVFAPRNKNFNIHGTNKHWLIRQAKTPMTNSSIQFLDNAFRKRWQTLLSVDDLVEKLVKRLEFTGELNNTYIFYTSDNGYHTGQFSLPIDKRQLYEFDIKVPLLVRGPGIKPNQTSKRGASNLTWRSDVLVEYQGEGRNVTDPTCPSLSPGVSQCFPDCVCEDAYNNTYACVRTMSALWNLQYCEFDDQEVFVEVYNLTADPDQITNIAKTIDPELLGKMNYRLMMLQSCSGPT

SEQ ID NO: 64519 - protein, 24 aa, Homo sapiens
MAVTAVTATAASDRMESDSDSDKS

SEQ ID NO: 64520 - protein, 108 aa, Homo sapiens
MKKKLVVLGLLAVVLVLVIVGLCLWLPSASKEPDNHVYTRAAVAADAKQCSKIGRDALRDGGSAVDAAIAALLCVGLMNAHSMGIGGGLFLTIYNSTTRKAEVINARE

SEQ ID NO: 64521 - protein, 143 aa, Homo sapiens
MSPNSPLHCFYLPAVSVLDSADIEVTDSRLPHATIVDHRPQVGDLVLHINGESTQGLTHAQAVERIRAGGPQLHLVIRRPLETHPGKPRGVGEPRKGVDRSPDPGGPEVTGSRSSSTSLVQHPPSRTTLKKTRGSPEPSPEAA

SEQ ID NO: 64522 - protein, 1316 aa, Homo sapiens
MSMLKPSGLKAPTKILKPGSTALKTPTAVVAPVEKTISSEKASSTPSSETQEEFVDDFRVGERVWVNGNKPGFIQFLGETQFAPGQWAGIVLDEPIGKNDGSVAGVRYFQCEPLKGIFTRPSKLTRKVQAEDEANGLQTTPASRATSPLCTSTASMVSSSPSTPSNIPQKPSQPAAKEPSATPPISNLTKTASESISNLSEAGSIKKGERELKIGDRVLVGGTKAGVVRFLGETDFAKGEWCGVELDEPLGKNDGAVAGTRYFQCQPKYGLFAPVHKVTKIGFPSTTPAKAKANAVRRVMATTSASLKRSPSASSLSSMSSVASSVSSRPSRTGLLTETSSRYARKISGTTALQEALKEKQQHIEQLLAERDLERAEVAKATSHVGEIEQELALARDGHDQHVLELEAKMDQLRTMVEAADREKVELLNQLEEEKRKVEDLQFRVEEESITKGDLEVATVSEKSRIMELEKDLALRVQEVAELRRRLESNKPAGDVDMSLSLLQEISSLQEKLEVTRTDHQREITSLKEHFGAREETHQKEIKALYTATEKLSKENESLKSKLEHANKENSDVIALWKSKLETAIASHQQAMEELKVSFSKGLGTETAEFAELKTQIEKMRLDYQHEIENLQNQQDSERAAHAKEMEALRAKLMKVIKEKENSLEAIRSKLDKAEDQHLVEMEDTLNKLQEAEIKASSITRELQGRELKLTNLQENLSEVSQVKETLEKELQILKEKFAEASEEAVSVQRSMQETVNKLHQKEEQFNMLSSDLEKLRENLADMEAKFREKDEREEQLIKAKEKLENDIAEIMKMSGDNSSQLTKMNDELRLKERDVEELQLKLTKANENASFLQKSIEDMTVKAEQSQQEAAKKHEEEKKELERKLSDLEKKMETSHNQCQELKARYERATSETKTKHEEILQNLQKTLLDTEDKLKGAREENSGLLQELEELRKQADKAKAAQTAEDAMQIMEQMTKEKTETLASLEDTKQTNAKLQNELDTLKENNLKNVEELNKSKELLTVENQKMEEFRKEIETLKQAAAQKSQQLSALQEENVKLAEELGRSRDEVTSHQKLEEERSVLNNQLLEMKKRESKFIKDADEEKASLQKSISITSALLTEKDAELEKLRNEVTVLRGENASAKSLHSVVQTLESDKVKLELKVKNLELQLKENKRQLSSSSGNTDTQADEDERAQESQIDFLNSVIVDLQRKNQDLKMKVEMMSEAALNGNGDDLNNYDSDDQEKQSKKKPRLFCDICDCFDLHDTEDCPTQAQMSEDPPHSTHHGSRGEERPYCEICEMFGHWATNCNDDETF

SEQ ID NO: 64523 - protein, 123 aa, Homo sapiens
MLCFTKTPLQESLIELSDSSLSKMATDMFLAVMRFMGDAPLKGQSDLDVLCNLLKLCGDHEVMRDECYCQVVKQITDNTSSKQDSCQRGWRLLYIVTAYHSCSEVLHPHLTRFLQDVSRTPGL

SEQ ID NO: 64524 - protein, 712 aa, Homo sapiens
  MOD_RES (1)..(1): Any amino acid
XYGEDVRQDQQQLLEGISELDIRTGGVPSQLLVHGALAFPLGLDASLNCFLAAAHYGRGRVVLAAHECLLCAPKMGPFLLNAVRWLARGQTGKVGVNTNLKDLCPLLSEHGLQCSLEPHLNSDLCVYCCKAYSDKEAKQLQEFVAEGGGLLIGGQAWWWASQNPGHCPLAGFPGNIILNCFGLSILPQTLKAGCFPVPTPEMRSYHFRKALSQFQAILNHENGNLEKSCLAKLRVDGAAFLQIPAEGVPAYISLHRLLRKMLRGSGLPAVSRENPVASDSYEAAVLSLATGLAHSGTDCSQLAQGLGTWTCSSSLYPSKHPITVEINGINPGNNDCWVSTGLYLLEGQNAEVSLSEAAASAGLRVQIGCHTDDLTKARKLSRAPVVTHQCWMDRTERSVSCLWGGLLYVIVPKGSQLGPVPVTIRGAVPAPYYKLGKTSLEEWKRQMQENLAPWGELATDNIILTVPTTNLQALKDPEPVLRLWDEMMQAVARLAAEPFPFRRPERIVADVQISAGWMHSGYPIMCHLESVKEIINEMDMRSRGVWGPIHELGHNQQWHGWEFPPHTTEATCNLWSVYVHETVLGIPRAQAHEALSPPERERRIKAHLGKGAPLCDWNVWTALETYLQLQQAFGWEPFTQLFAEYQTLSHLPKDNTGRMNLWVKKFSEKVKKNLVPFFEAWGWPIQKEVADSLASLPEWQENPMQVYLRARK

SEQ ID NO: 64525 - protein, 72 aa, Homo sapiens
MVYISNGQVLDSRSQSPWRLSLITDFFWGIAEFVVLFFKTLLQQDVKKRRSYGNSSDSRYDDGRGKPSPKNG

SEQ ID NO: 64526 - protein, 85 aa, Homo sapiens
MAAAAAATAAAAASIRERQTVALKRMLNFNVPHIKNSTGEPVWKVLIYDRFGQDIISPLLSVKELRDMGITLHLIFEINYMNHII

SEQ ID NO: 64527 - protein, 39 aa, Homo sapiens
  MOD_RES (1)..(1): Any amino acid
XPGIDVPAPDMSTGEREMSWIADTYASTIGHYDQGSPLC

SEQ ID NO: 64528 - protein, 44 aa, Homo sapiens
MAENGKNCDQRRVAMNKEHHNGNFTDYGIVKALWCLFYCCLLCL

SEQ ID NO: 64529 - protein, 208 aa, Homo sapiens
MEIKKEMKKDPLTNKAPEKPLHEVPSGNSLLSSETILRTNKRGERRRRRCQVAFSYLPQNDDELELKVGDIIEVVGEVEEGWWEGVLNGKTGMFPSNFIKELSGESDELGISQDEQLSKSSLRETTGSESDGGDSSSTKSEGANGTVATAAIQPKKVKGVGFGDIFKDKPIKLRPRSIEVENDFLPVEKTIGKKLPATTATPDSSKTE

SEQ ID NO: 64530 - protein, 261 aa, Homo sapiens
MSLRCGDAARTLGPRVFGRYFCSPVRPLSSLPDKKKELLQNGPDLQDFVSGDLADRSTWDEYKGNLKRQKGERLRLPPWLKTEIPMGKNYNKLKNTLRNLNLHTVCEEARCPNIGECWGGGEYATATATIMLMGDTCTRGCRFCSVKTARNPPPLDASEPYNTAKAIAEWGLDYVVLTSVDRDDMPDGGAEHIAKTVSYLKERNPKILVECLTPDFRGDLKAIEKVALSGLDVYAHNVETVPELQSFQRREKITLEQLLWL

SEQ ID NO: 64531 - protein, 198 aa, Homo sapiens
MEPGLWLLFGLTVTSAAGFVPCSQSGDAGRRGVSQAPTAARSEGDCEETVAGPGEETVAGPGEGTVAPTALQGPSPGSPGQEQAAEGAPEHHRSRRCTCFTYKDKECVYYCHLDIIWINTPEQTVPYGLSNYRGSFRGKRSAGPLPGNLQLSHRPHLRCACVGRYDKACLHFCTQTLDVSSNSRTAEKTDKEEEGKVT

SEQ ID NO: 64532 - protein, 1184 aa, Homo sapiens
MYVRVSFDTKPDLLLHLMTKEWQLELPKLLISVHGGLQNFELQPKLKQVFGKGLIKAAMTTGAWIFTGGVNTGVIRHVGDALKDHASKSRGKICTIGIAPWGIVENQEDLIGRDVVRPYQTMSNPMSKLTVLNSMHSHFILADNGTTGKYGAEVKLRRQLEKHISLQKINTRIGQGVPVVALIVEGGPNVISIVLEYLRDTPPVPVVVCDGSGRASDILAFGHKYSEEGGLINESLRDQLLVTIQKTFTYTRTQAQHLFIILMECMKKKELITVFRMGSEGHQDIDLAILTALLKGANASAPDQLSLALAWNRVDIARSQIFIYGQQWPVGSLEQAMLDALVLDRVDFVKLLIENGVSMHRFLTISRLEELYNTRHGPSNTLYHLVRDVKKREYPGFGWIYFKGNLPPDYRISLIDIGLVIEYLMGGAYRCNYTRKRFRTLYHNLFGPKRPKALKLLGMEDDIPLRRGRKTTKKREEEVDIDLDDPEINHFPFPFHELMVWAVLMKRQKMALFFWQHGEEAMAKALVACKLCKAMAHEASENDMVDDISQELNHNSRDFGQLAVELLDQSYKQDEQLAMKLLTYELKNWSNATCLQLAVAAKHRDFIAHTCSQMLLTDMWMGRLRMRKNSGLKVILGILLPPSILSLEFKNKDDMPYMSQAQEIHLQEKEAEEPEKPTKEKEEEDMELTAMLGRNNGESSRKKDEEEVQSKHRLIPLGRKIYEFYNAPIVKFWFYTLAYIGYLMLFNYIVLVKMERWPSTQEWIVISYIFTLGIEKMREILMSEPGKLLQKVKVWLQEYWNVTDLIAILLFSVGMILRLQDQPFRSDGRVIYCVNIIYWYIRLLDIFGVNKYLGPYVMMIGKMMIDMMYFVIIMLVVLMSFGVARQAILFPNEEPSWKLAKNIFYMPYWMIYGEVFADQIDPPCGQNETREDGKIIQLPPCKTGAWIVPAIMACYLLVANILLVNLLIAVFNNTFFEVKSISNQVWKFQRYQLIMTFHERPVLPPPLIIFSHMTMIFQHLCCRWRKHESDPDERDYGLKLFITDDELKKVHDFEEQCIEEYFREKDDRFNSSNDERIRVTSERVENMSMRLEEVNEREHSMKASLQTVDIRLAQLEDLIGRMATALERLTGLERAESNKIRSRTSSDCTDAAYIVRQSSFNSQEGNTFKLQESIDPAEHPLYSV

SEQ ID NO: 64533 - protein, 85 aa, Homo sapiens
MLGGSLGSRLLRGVGGSHGRFGARGVREGGAAMAAGESMAQRMVWVDLEMTGLDIEKDQIIEMACLITDSDLNILAEVKEVRTYF

SEQ ID NO: 64534 - protein, 124 aa, Homo sapiens
MDKDLKAGCLVRVFWPKAKCALLRDDLVLVDSPGTDVTTELDSWIDKFCLDADVFVLVANSESTLMNTEKHFFHKVNERLSKPNIFILNNRWDASASEPEYMEDVRRQHMERCLHFLVEELKVV

SEQ ID NO: 64535 - protein, 98 aa, Homo sapiens
ESATYGEHIWFETNVSGDFCYVGEQYCVARMLINFRCKPSFRESGSRNVREPTFVRHHWVHRRRQDGKCRHCGKGFQQKFTFHSKEIVAISCSWCKQA

SEQ ID NO: 64536 - protein, 122 aa, Homo sapiens
  MOD_RES (1)..(1): Any amino acid
XNLQTAITVARKSGMVSESQKVILIEANETTGSSSASISWTLVEEKKHIMYGNQDNYINIRDEVSDKGREGSYHFALTGKSFHVISQHFSSLLPKILINGTIFARMSPGQKSSLVEEFQKLE

SEQ ID NO: 64537 - protein, 166 aa, Homo sapiens
  MOD_RES (1)..(1): Any amino acid
XCRLGAESPSIASTSSTEKSFPWRSTDVPNTGVSKPRVSDAVQPNNYLIRTEPEQGTLYSPEQTSLHESEGSLGNSRSSTQMNSYSDSGYQEAGSFHNSQNVSKADNRQQHSFIGSTNNHVVRNSRAEGQTLVQLYGGLGQSPPGRPPIPTDQPLNTKPPPEWGPH

SEQ ID NO: 64538 - protein, 116 aa, Homo sapiens
MTHEEHHAAKTLGIGKAIAVLTSGGDAQGMNAAVRAVVRVGIFTGARVFFVHEGYQGLVDGGDHIKEATWESVSMMLQLGGTVIGSARCKDFREREGRLRAAYNLVKRGITNLCVI

SEQ ID NO: 64539 - protein, 114 aa, Homo sapiens
MGCRLLCCAVLCLLGAVPIDTEVTQTPKHLVMGMTNKKSLKCEQHMGHRAMYWYKQKAKKPPELMFVYSYEKLSINESVRSRFSPECPNSSLLNLHLHALQPEDSALYLCASSQ

SEQ ID NO: 64540 - protein, 76 aa, Homo sapiens
  MOD_RES (1)..(1): Any amino acid
XFDEQTADDWDVDMSVYYDRDGGDKDARDSVQMRLEQRLRDGQEDGSVIERQVGTFERHTKGIFTKSPLPSPPLGY

SEQ ID NO: 64541 - protein, 120 aa, Homo sapiens
AVQFTGWSSSCILHFPEVLHDFHSLQTLPSLLQRIGNPNETQNNSTSWPVFKSTEQKYLTLNTESTRIMTKLRAQQCRFWTSFFPKVLEMTEPICCYCEPGTALAARAAQMKMTGSAYSQ

SEQ ID NO: 64542 - protein, 103 aa, Homo sapiens
MRPLDIVELAEPEEVEVLEPEEDFEQFLLPVINEMREDIASLTREHGRAYLRNRSKLWEMDNMLIQIKTQVEASEESALNHLQNPGDAAEGRAAKRCEKSESS

SEQ ID NO: 64543 - protein, 183 aa, Homo sapiens
MPSKSVHSLKPSDIKFVAAIGNLEIPPDPGTGDLEKQDWTERPQQVCMGVMTVLSDIIRYFSPSVPMPVCHTGKRVIPHDGAEDLWIQAQELVRNMKENLQLDFQFDWKLINVFFSNASQCYLCPSAQQAPSLSTVLLSQNGLAAGGVDELMGVLDYLQQEVPRAFVNLVDLSEVAEVSRQYH

SEQ ID NO: 64544 - protein, 153 aa, Homo sapiens
  MOD_RES (1)..(1): Any amino acid
XNSPRTRSCVYSPTGPCICSLGNSAAVPTMEGPLRRKTLLKEGRKPALSSWTRYWVILSGSTLLYYGAKSLRGTDRKHYKSTPGKKVSIVGWMVQLPDDPEHPDIFQLNNPDKGNVYKFQTGSRFHAILWHKHLDDACKSNRPQVPANLMSFE

SEQ ID NO: 64545 - protein, 808 aa, Homo sapiens
MQVQDATRRPSAVRFLSSFLQGRRHSTSDPVLRLQQARRGSGLGSGSATKLLSSSSLQVMVAVSSVSHAEGNPTFPERKSKGNLERPTPKYTKVGERLRHVIPGHMACSMACGGRACKYENPARWSEQEQAIKGVYSSWVTDNILAMARPSSELLEKYHIIDQFLSHGIKTIINLQRPGEHASCGNPLEQESGFTYLPEAFMEAGIYFYNFGWKDYGVASLTTILDMVKVMTFALQEGKVAIHCHAGLGRTGVLIACYLVFATRMTADQAIIFVRAKRPNSIQTRGQLLCVREFTQFLTPLRNIFSCCDPKAHAVTLPQYLIRQRHLLHGYEARLLKHVPKIIHLVCKLLLDLAENRPVMMKDVSEGPGLSAEIEKTMSEMVTMQLDKELLRHDSDVSNPPNPTAVAADFDNRGMIFSNEQQFDPLWKRRNVECLQPLTHLKRRLSYSDSDLKRAENLLEQGETPQTVPAQILVGHKPRQQKLISHCYIPQSPEPDLHKEALVRSTLSFWSQSKFGGLEGLKDNGSPIFHGRIIPKEAQQSGAFSADVSGSHSPGEPVSPSFANVHKDPNPAHQQVSHCQCKTHGVGSPGSVRQNSRTPRSPLDCGSSPKAQFLVEHETQDSKDLSEAASHSALQSELSAEARRILAAKALANLNESVEKEELKRKVEMWQKELNSRDGAWERICGERDPFILCSLMWSWVEQLKEPVITKEDVDMLVDRRADAAEALFLLEKGQHQTILCVLHCIVNLQTIPVDVEEAFLAHAIKAFTKVNFDSENGPTVYNTLKKIFKHTLEEKRKMTKDGPKPGL

SEQ ID NO: 64546 - protein, 339 aa, Homo sapiens
MAAPRVFPLSCAVQQYAWGKMGSNSEVARLLASSDPLAQIAEDKPYAELWMGTHPRGDAKILDNRISQKTLSQWIAENQDSLGSKVKDTFNGNLPFLFKVLSVETPLSIQAHPNKELAEKLHLQAPQHYPDANHKPEMAIALTPFQGLCGFRPVEEIVTFLKKVPEFQFLIGDEAATHLKQTMSHDSQAVASSLQSCFSHLMKSEKKVVVEQLNLLVKRISQQAAAGNNMEDIFGELLLQLHQQYPGDIGCFAIYFLNLLTLKPGEAMFLEANVPHAYLKGGEPHFSSEPHCHPCWALFPYLDKGRRRVVKETPKDLAALTSEGSWAQQATAGRDDECI

SEQ ID NO: 64547 - protein, 385 aa, Homo sapiens
MADVLSVLRQYNIQKKEIVVKGDEVIFGEFSWPKNVKTNYVVWGTGKEGQPREYYTLDSILFLLNNVHLSHPVYVRRAATENIPVVRRPDRKDLLGYLNGEASTSASIDRSAPLEIGLQRSTQVKRAADEVLAEAKKPRIEDEECVRLDKERLAARLEGHKEGIVQTEQIRSLSEAMSVEKIAAIKAKIMAKKRSTIKTDLDDDITALKQRSFVDAEVDVTRDIVSRERVWRTRTTILQSTGKNFSKNIFAILQSVKAREEGRAPEQRPAPNAAPVDPTLRTKQPIPAAYNRYDQERFKGKEETEGFKIDTMGTYHGMTLKSVTVFFLMDVSFSVVLLVFPASHVPLRVHLPGRLRLLQPSQYQDQFLKQDLPQIRRKDLEHPLS

SEQ ID NO: 64548 - protein, 570 aa, Homo sapiens
MNYIFGNNTLLYSRGSRGGNTSSSHGSAGPKQKHWAKKGSSDELQAEPEPSRWQQIVAFFTRRHSFIDCISVATSSTQVNGTDADYEYEEITLERGNSGLGFSIAGGTDNPHIGDDSSIFITKIITGGAAAQDGRLRVNDCILRVNEVDVRDVTHSKAVEALKEAGSIVRLYVKRRKPVSEKIMEIKLIKGPKGLGFSIAGGVGNQHIPGDNSIYVTKIIEGGAAHKDGKLQIGDKLLAVNNVCLEEVTHEEAVTALKNTSDFVYLKVAKPTSMYMNDGYAPPDITNSSSQPVDNHVSPSSFLGQTPASPARYSPVSKAVLGDDEITREPRKVVLHRGSTGLGFNIVGGEDGEGIFISFILAGGPADLSGELRKGDRIISVNSVDLRAASHEQAAAALKNAGQAVTIVAQYRPEEYSRFEAKIHDLREQMMNSSISSGSGSLRTSQKRSLYVRALFDYDKTKDSGLPSQGLNFKFGDILHVINASDDEWWQARQVTPDGESDEVGVIPSKRRVEKKERARLKTVKFNSKTRDKGQSFNDKRKKNLFSRKFPFYKNKDQSEQETSDADRDP

SEQ ID NO: 64549 - protein, 198 aa, Homo sapiens
MQMGQPVPETGPAILLDGYSGPAYSDTYSSAGDSVYTYFSAVAGQDGEVDAEELQRCLTQSGINGTYSPFSLETCRIMIAMLDRDHTGKMGFNAFKELWAALNAWKENFMTVDQDGSGTVEHHELRQAIGLMGYRLSPQTLTTIVKRYSKNGRIFFDDYVACCVKLRALTDFFRKRDHLQQGSANFIYDDFLQGTMAI

SEQ ID NO: 64550 - protein, 126 aa, Homo sapiens
MVAMAAGPSGCLVPAFGLRLLLATVLQAVSAFGAEFSSEACRELGFSSNLLCSSCDLLGQFNLLQLDPDCRGCCQEEAQFETKKLYAGAILEVCGCKLGRFPQVQAFVRSDKPKLFRGLQIKAGRQ

SEQ ID NO: 64551 - protein, 153 aa, Homo sapiens
  MOD_RES (1)..(1): Any amino acid
XTETRADRSKKLFRHYTVGSYDSFDTSSDCIIEEKTVVLQKKDNEGFGFVLRGAKADTPIEEFTPTPAFPALQYLESVDEGGVAWQAGLRTGDFLIEVNNENVVKVGHRQVVNMIRQGGNHLVLKVVTVTRNLDPDDTARKKDKPEEIVPASK

SEQ ID NO: 64552 - protein, 34 aa, Homo sapiens
HYPVAWVNTMVFDFKGQLRTGDIILHSWSSFPDY

SEQ ID NO: 64553 - protein, 188 aa, Homo sapiens
  MOD_RES (1)..(1): Any amino acid
XSGDLPSYSPLPHSPRSQRSIPSVQGDGQNLFTKDVTVIEGEVATISCQVNKSDDSVIQLLNPNRQTIYFRDFRPLKDSRFQLLNFSSSELKVSLTNVSISDEGRYFCQLYTDPPQESYTTITVLVPPRNLMIDIQKDTAVEGEEIEVNCTAMASKPATTIRWFKGNTELKGKSEVEEWSDMYTVTSQ

SEQ ID NO: 64554 - protein, 237 aa, Homo sapiens
MNKRRLLYPSGWLHGPSDMQGLLFSTLLLAGLAQFCCRVQGTGPLDTTPEGRPGEVSDAPQRKQFCHWPCKCPQQKPRCPPGVSLVRDGCGCCKICAKQPGEICNEADLCDPHKGLYCDYSVDRPRYETGVCAYLVAVGCEFNQVHYHNGQVFQPNPLFSCLCVSGAIGCTPLFIPKLAGSHCSGAKGGKKSDQSNCSLEPLLQQLSTSYKTMPDVCQASNLLPALRSLNCCLPSSL

SEQ ID NO: 64555 - protein, 54 aa, Homo sapiens
MPVRNVYKKEKARVITEEEKNFKAFASLRMARANARLFGIRAKRAKEAAEQDVE

SEQ ID NO: 64556 - protein, 52 aa, Homo sapiens
MIEPFGNQYIVARPVYSTNAFEENHKKTGRHHKTFLDHLKVCCSILVASIPA

SEQ ID NO: 64557 - protein, 105 aa, Homo sapiens
MYSEIQRERADIGGLMARPEYREWNPELIKPKKLLNPVKASRSHQELHRELLMNHRRGLGVDSKPELQRVLEHRRRNQLIKKKKEELEAKRLQCPFEQELLRRQQ

SEQ ID NO: 64558 - protein, 224 aa, Homo sapiens
MQQQYREASLPTAGQGLSEEEGLALHLDGALALLHACCHACCCCAGEGPVVQNHDDEGPQNTLPRVAVPEEQQGSLQEVSRTLRTCLGTVVQTSMSRSQVALLGLSLLLMLLLYVGLPGPPEQTSCLWGDPNVTVLAGLTPGNSPIFYREVLPLNQAHRVEVVLLHGKAFNSHTWEQLGTLQLLSQRGYRAVALDLPGFGNSAPSKEASTEAGRAALLERALRD

SEQ ID NO: 64559 - protein, 129 aa, Homo sapiens
MLRLQMTDGHISCTAVEFSYMSKISLNTPPGTKVKLSGIVDIKNGFLLLNDSNTTVLGGEVEHLIEKWELQRSLSKHNRSNIGTEGGPPPFVPFGQKCVSHVQVDSRELDRRKTLQVTMPVKPTNDNDE

SEQ ID NO: 64560 - protein, 61 aa, Homo sapiens
MTINPIYEHVGYTTLNREPAYKKHMPVLKETHDERDSTGQDGVSEKRVSSNRTGLMTCSTA

SEQ ID NO: 64561 - protein, 129 aa, Homo sapiens
MLTAVPSHLFSAKNGRVDSEDRRSRHCPYLDTINRSVLDFDFEKLCSISLSHINAYACLVCGKYFQGRGLKSHAYIHSVQFSHHVFLNLHTLKFYCLPDNYEIIDSSLEDITYVLKPTFTKQQIANLDK

SEQ ID NO: 64562 - protein, 237 aa, Homo sapiens
MPYNIWCDGCKNHIGMGVRYNAEKKKVGNYYTTPIYRFRMKCHLCVNYIEMQTDPANCDYVIVSGAQRKEERWDMADNEQVLTTEHEKKQKLETDAMFRLEHGEADRSTLKKALPTLSHIQEAQSAWKDDFALNSMLRRRFREKKKAIQEEEERDQALQAKASLTIPLVPETEDDRKLAALLKFHTLDSYEDKQKLKRTEIISRSWFPSAPGSASSSKVSGVLKKLAQSRRTALATS

SEQ ID NO: 64563 - protein, 308 aa, Homo sapiens
  MOD_RES (1)..(1): Any amino acid
XKIDLPAENSNSETIIITGKRANCEAARSRILSIQKDLANIAEVEVSIPAKLHNSLIGTKGRLIRSIMEECGGVHIHFPVEGSGSDTVVIRGPSSDVEKAKKQLLHLAEEKARGVRLTQWDWFLQQTKSFTVDIRAKPEYHKFLIGKGGGKIRKVRDSTGARVIFPAAEDKDQDLITIIGKEDAVREAQKELEALIQNLDNVVEDSMLVDPKHHRHFVIRRGQVLREIAEEYGGVMVSFPRSGTQSDKVTLKGAKDCVEAAKKRIQEIIEDLEAQVTLECAIPQKFHRSVMGPKGSRIQQITRDFSVQ

SEQ ID NO: 64564 - protein, 240 aa, Homo sapiens
MQWLNTMKELALGVRTSKTCTFSAAMTTMQGMEQAMPGAGPGVPQLGNMAVIHSHLWKGLQEKFLKGEPKVLGVVQILTALMSLSMGITMMCMASNTYGSNPISVYIGYTIWGSVMFIISGSLSIAAGIRTTKGLGLDGMVLLLSVLEFCIAVSLSAFGCKVLCCTPGGGKIKHYASIQVFISRERKKERRKERKEKERKRKKEKRREGKKEGRKERNFQCRALHDRFQNSTLHSFFFTL

SEQ ID NO: 64565 - protein, 81 aa, Homo sapiens
  MOD_RES (1)..(1): Any amino acid
XLKDVIKKNKRERDEDSLHQTDLFDSHMLWFLMHHLRQRRHHRRWREPGVGATDADSDESPSSSDTSDEEEGPDRVQCMPS

SEQ ID NO: 64566 - protein, 80 aa, Homo sapiens
MGRKDAATIKLPVDQYRKQIGKQDYKKTKPILRATKLKAEAKKTAIGIKSTFFFFPGSWPCTCSYIGTTTGFLCFLLSQT

SEQ ID NO: 64567 - protein, 125 aa, Homo sapiens
MSPGLLTTRKEALMAFRDVAVAFTQKEWKLLSSAQRTLYREVMLENYSHLVSLGIAFSKPKLIEQLEQGDEPWREENEHLLDLCPAQTPSSWLLHKQQAEQMFLRQGLIGLSWSKSKGAAPKKGR

SEQ ID NO: 64568 - protein, 108 aa, Homo sapiens
MPISELLRRISLKLFPKVDLQQVTIIPHDEWKRIQDSLDRLTREAACLRAERKAKKEMHLRSQEVVKHWTNTYAGMKEQKLEAKKKRDEEIEAERQILDLEEEIYKQG

SEQ ID NO: 64569 - protein, 1192 aa, Homo sapiens
MDALIIPVTMEVPCDSRGQRMWWAFLASSMVTFFGGLFIILLWRTLKYLWTVCCHCGGKTKEAQKINNGSSQADGTLKPVDEKEEAVAAEVGWMTSVKDWAGVMISAQTLTGRVLVVLVFALSIGALVIYFIDSSNPIESCQNFYKDFTLQIDMAFNVFFLLYFGLRFIAANDKLWFWLEVNSVVDFFTVPPVFVSVYLNRSWLGLRFLRALRLIQFSEILQFLNILKTSNSIKLVNLLSIFISTWLTAAGFIHLVENSGDPWENFQNNQALTYWECVYLLMVTMSTVGYGDVYAKTTLGRLFMVFFILGGLAMFASYVPEIIELIGNRKKYGGSYSAVSGRKHIVVCGHITLESVSNFLKDFLHKDRDDVNVEIVFLHNISPNLELEALFKRHFTQVEFYQGSVLNPHDLARVKIESADACLILANKYCADPDAEDASNIMRVISIKNYHPKIRIITQMLQYHNKAHLLNIPSWNWKEGDDAICLAELKLGFIAQSCLAQGLSTMLANLFSMRSFIKIEEDTWQKYYLEGVSNEMYTEYLSSAFVGLSFPTVCELCFVKLKLLMIAIEYKSANRESRILINPGNHLKIQEGTLGFFIASDAKEVKRAFFYCKACHDDITDPKRIKKCGCKRLEDEQPSTLSPKKKQRNGGMRNSPNTSPKLMRHDPLLIPGNDQIDNMDSNVKKYDSTGMFHWCAPKEIEKVILTRSEAAMTVLSGHVVVCIFGDVSSALIGLRNLVMPLRASNFHYHELKHIVFVGSIEYLKREWETLHNFPKVSILPGTPLSRADLRAVNINLCDMCVILSANQNNIDDTSLQDKECILASLNIKSMQFDDSIGVLQANSQGFTPPGMDRSSPDNSPVHGMLRQPSITTGVNIPIITELAKPGKLPLVSVNQEKNSGTHILMITELVNDTNVQFLDQDDDDDPDTELYLTQPFACGTAFAVSVLDSLMSATYFNDNILTLIRTLVTGGATPELEALIAEENALRGGYSTPQTLANRDRCRVAQLALLDGPFADLGDGGCYGDLFCKALKTYNMLCFGIYRLRDAHLSTPSQCTKRYVITNPPYEFELVPTDLIFCLMQFDHNAGQSRASLSHSSHSSQSSSKKSSSVHSIPSTANRQNRPKSRESRDKQNATRMNRMGQEKKWFTDEPDNAYPRNIQIKPMSTHMANQINQYKSTSSLIPPIREVEDEC

SEQ ID NO: 64570 - protein, 19 aa, Homo sapiens
MSDWFNFHGHMCIAFELLG

SEQ ID NO: 64571 - protein, 132 aa, Homo sapiens
MGIGCSGDFCDIPDPNCGALERTALHFVGRVFPPRPLLFLFTSPDLSSETLPFSRKSTQETRKMATGLLRAKKEKFHLLNQNSLLSWSEGKRPGERRENVHWTSVQGEWFQLSPIQYEVGCRSVTDNSSYFE

SEQ ID NO: 64572 - protein, 237 aa, Homo sapiens
GCGQRRSSSSTGKVRVLRHRKSTKSFNMMSPTGDNSELLAEIKAGKSLKPTPQSKGLTTVFSGIGQPAFQPDSPLPSVSPALSPVRSPTPPAAGFQPLLNGSLVPVPPTTPAPGVQLDVEALIPTHDEQGRPIPEWKRQVMVRKMQLKMQEEEEQRRKEEEEEARLASMPAWRRDLLRKKLEEEREQKRKEEERQKQEELRREKEQSEKLRTLGYDESKLAPWQRQVILKKGDIAKY

SEQ ID NO: 64573 - protein, 412 aa, Homo sapiens [sequence omitted]

SEQ ID NO: 64574 - protein, 160 aa, Homo sapiens
MIRKLVAEKLNIPWNHIRLQRTAKGKPVLAKDSSNPYPNFNFNISHQGDYAVLAAEPELQVGIDIMKTSFPGRGSIPEFFHIMKRKFTNKEWETIRSFKDEWTQLDMFYRNWALKESFIKAIGVGLGFELQRLEFDLSPLNLDIGQVYKETRLFLDGEEE

SEQ ID NO: 64575 - protein, 111 aa, Homo sapiens
MDPLQKRNPASPSKSSPMTAAETSQEGPAPSQPSYSEQPMMGLSNLSPGPGPSQAVPLPEGLLRQRYREEKTLEERRWERLEFLQRKKAFLRHVRRRHRDHMAPYAVGREA

SEQ ID NO: 64576 - protein, 81 aa, Homo sapiens
MDDLQSQNLSMDMTDSPPALANNRLENGMAQLITTEAWNINSTDLPLCLGESPVVMPIHMQVEGSSAPELNPNGNATYVMT

SEQ ID NO: 64577 - protein, 453 aa, Homo sapiens
MGSSEPLPIADGDRRRKKKRRGRATDSLPGKFEDMYKLTSELLGEGAYAKVQGAVSLQNGKEYAVKIIEKQAGHSRSRVFREVETLYQCQGNKNILELIEFFEDDTRFYLVFEKLQGGSILAHIQKQKHFNEREASRVVRDVAAALDFLHTKDKVSLCHLGWSAMAPSGLTAAPTSLGSSDPPTSASQVAGTTGIAHRDLKPENILCESPEKVSPVKICDFDLGSGMKLNNSCTPITTPELTTPCGSAEYMAPEVVEVFTDQATFYDKRCDLWSLGVVLYIMLSGYPPFVGHCGADCGWDRGEVCRVCQNKLFESIQEGKYEFPDKDWAHISSEAKDLISKLLVRDAKQRLSAAQVLQHPWVQGQAPEKGLPTPQVLQRNSSTMDLTLFAAEAIALNRQLSQHEENELAEEPEALADGLCSMKLSPPCKSRLARRRALAQAGRGEDRSPPTAL

SEQ ID NO: 64578 - protein, 92 aa, Homo sapiens
MMVFVTTPSAVNKIKQLLKDKPEHVGVKVGVRTRGCNGLSYTLEYTKTKGDSDEEVIQDGVRVFIEKKAQLTLLGTEMDYVEDKLSSEFVFN

SEQ ID NO: 64579 - protein, 298 aa, Homo sapiens
  MOD_RES (1)..(1): Any amino acid
XGAPPPRPKSPDLPNAASAPPAAAPEAPRSPPAKAGSGSATPAKAVEARASFSRPTFLQLSPGGLRRADDHAGRAVQSPPDTGRRLPWSTGYAEVINAGKSRHNEDQACCEVVYVEGRRSVTGVPREPSRGQGLCFYYWGLFDGHAGGGAAEMASRLLHRHIREQLKDLVEILQDPSPPPLCLPTTPGTPDSSDPSHLLGPQSCWSSQKEVSHESLVVGAVENAFQLMQDEQMARERRGHQVEGGCCALVVIYLLGKVYVANAGDSRAIIVRNGEIIPMSREFTPETERQRLQLLGLL

SEQ ID NO: 64580 - protein, 44 aa, Homo sapiens
MDKSGAAVCEFFLKAACGKEETGFHRDSQDGLRASQDGLDLLTL

SEQ ID NO: 64581 - protein, 121 aa, Homo sapiens
SKNHAMSIHAFDLNSDGVNELITGWSNGKVDARSDRTGEVIFKDNFSSAIAGVVEGDYRMDGHIQLICCSVDGEIRGYLPGTAEMRGNLMDTSAEQDLIRELSQKKQNLLLELRNYEENAK

SEQ ID NO: 64582 - protein, 314 aa, Homo sapiens
MGFWILAILTILMYSTAAKFSKQSWGLENEALIVRCPRQGKPSYTVDWYYSQTNKSIPTQERNRVFASGQLLKFLPAAVADSGIYTCIVRSPTFNRTGYANVTIYKKQSDCNVPDYLMYSTVSGSEKNSKIYCPTIDLYNWTAPLEWFKNCQALQGSRYRAHKSFLVIDNVMTEDAGDYTCKFIHNENGANYSVTATRSFTVKDEQGFSLFPVIGAPAQNEIKEVEIGTQFLAAVLWQLNGTKITDFGEPRIQQEEGQNQSFSNGLACLDMVLRIADVKEEDLLLQYDCLALNLHGLRRHTVRLSRKNPSKECF

SEQ ID NO: 64583 - protein, 260 aa, Homo sapiens
MGTLRDLQYALQEKIEELRQRDALIDELELELDQKDELIQKLQNELDKYRSVIRPATQQAQKQSASTLQGEPRTKRQAISAEPTAFDIQDLSHVTLPFYPKSPQSKDLIKEAILDNDFMKNLELSQIQEIVDCMYPVEYGKDSCIIKEGDVGSLVYVMEDGKVEVTKEGVKLCTMGPGKVFGELAILYNCTRTATVKTLVNVKLWAIDRQCFQTIMMRTGLIKHTEYMEFLKSVPTFQSLPEEILSKLADVLEEVIVFSL

SEQ ID NO: 64584 - protein, 106 aa, Homo sapiens
MTSENQEKVKALLRDLQEQDADAGSERGLSGEEEDDEPDCCNDERYWPAGQEPSLVPDLDPLEYAGLASVEPYVPEFTVSPFAVQKLSRYGFNTERCQAVLRMCDG

SEQ ID NO: 64585 - protein, 383 aa, Homo sapiens
  MOD_RES (1)..(1): Any amino acid
XVESEANLHSSSSTFSTTSSTVSAPPPVVSVSSSLNSGSSLGLSLGSNSTVTASTRSSVATTSGKAPPNLPPGVPPLLPNPYIMAPGLLHAYPPQVYGYDDLQMLQTRFPLDYYSIPFPTPTTPLTGRDGSLASNPYSGDLTKFGRGDASSPAPATTLAQPQQNQTQTHHTTQQTFLNPALPPGYSYTSLPYYTGVPGLPSTFQYGPAVFPVAPTSSKQHGVNVSVNASATPFQQPSGYGSHGYNTGVSVTSSNTGVPDISGSVYSKTQQSFEKQGFHSGTPAASFNLPSALGSGGPINPATAAAYPPAPFMHILTPHQQPHSQILHHHLQQDGQLPYLQMILCCQRQQEEQTGSGQRSQTSSIPQKPQTNKSAYNSYSWGAN

SEQ ID NO: 64586 - protein, 562 aa, Homo sapiens
MGCWGQLLVWFGAAGGDASETDNLWADGEDGVSFIHPSSELFLQPLAVTENHGEVEIRRHLNCSHCPLRDCQWQAELQLAECLCPEGMELAVDNVTCMDLHKPPGPLVLMVAVVATSTLSLLMVCGVLILGTKRLAGTVDSRLLLSMKQKKWQGLQEMRLPSPELELSKLRTSAIRTAPNPYYCQVGLGPAQSWPLPPGVTEVSPANVTLLRALGHGAFGEVYEGLVIGLPGDSSPLQVAIKTLPELCSPQDELDFLMEALIISKFRHQNIVRCVGLSLRATPRLILLELMSGGDMKSFLRHSRPHLGQPSPLVMRDLLQLAQDIAQGCHYLEENHFIHRDIAARNCLLSCAGPSRVAKIGDFGMARDIYRASYYRRGDRALLPVKWMPPEAFLEGIFTSKTDSWSFGVLLWEIFSLGYMPYPGRTNQEVLDFVVGGGRMDPPRGCPGPVYRIMTQCWQHEPELRPSFASILERLQYCTQDPDVLNSLLPMELGPTPEEEGTSGLGNRSLECLRPPQPQELSPEKLKSWGGSPLGPWLSSGLKPLKSRGLQPQNLWNPTYRS

SEQ ID NO: 64587 - protein, 178 aa, Homo sapiens
MHQDADGKKTPWGKRGWKMFHTLLRGMVLYFLKGEDHCLEGESLVGQMVDEPVGVHHSLATPATHYTKKPHVFQLRTADWRLYLFQAPRSSIDPTRTAWTLPRTTCWIYRGTCRSGGAVAASWRSTACGRSTWSTRKPATRPTCSCWWPACTAPLMLWTCGRSSWGGKLEALGSPSSA

SEQ ID NO: 64588 - protein, 295 aa, Homo sapiens
MESMAVATDGGERPGVPAGSGLSASQRRAELRRRKLLMNSEQRINRIMGFHRPGSGAEESQTKSKQQDSDKLNSLSVPSVSKRVVLGDSVSTGTTDQQGGVAEVKGTQLGDKLDSFIKPPECSSDVNLELRQRNRGDLTADSVQRGSRHGLEQYLSRFEEAMKLRKQLISEKPSQEDGNTTEEFDSFRIFRLVGCALLALGVRAFVCKYLSIFAPFLTLQLAYMGLYKYFPKSEKKIKTTVLTAALLLSGIPAEVINRSMDTYSKMGEVFTDLCVYFFTFIFCHELLDYWGSEVP

SEQ ID NO: 64589 - protein, 192 aa, Homo sapiens
MAKQKRKVPEVTEKKNKKLKKASAEGPLLGPEAAPSGEGAGSKGEAVLRPGLDAEPELSPEEQRVLERKLKKERKKEERQRLREAGLVAQHPPARRSGAELALDYLCRWAQKHKNWRFQKTRQTWLLLHMYDSDKVPDEHFSTLLAYLEGLQGRARELTVQKAEALMRELDEEGSDPPLPGRAQRIRQVLQL

SEQ ID NO: 64590 - protein, 966 aa, Homo sapiens
MESGHLLWALLFMQSLWPQLTDGATRVYYLGIRDVQWNYAPKGRNVITNQPLDSDIVASSFLKSDKNRIGGTYKKTIYKEYKDDSYTDEVAQPAWLGFLGPVLQAEVGDVILIHLKNFATRPYTIHPHGVFYEKDSEGSLYPDGSSGPLKADDSVPPGGSHIYNWTIPEGHAPTDADPACLTWIYHSHVDAPRDIATGLIGPLITCKRGALDGNSPPQRQDVDHDFFLLFSVVDENLSWHLNENIATYCSDPASVDKEDETFQESNRMHAINGFVFGNLPELNMCAQKRVAWHLFGMGNEIDVHTAFFHGQMLTTRGHHTDVANIFPATFVTAEMVPWEPGTWLISCQVNSHFRDGMQALYKVKSCSMAPPVDLLTGKVRQYFIEAHEIQWDYGPMGHDGSTGKNLREPGSISDKFFQKSSSRIGGTYWKVRYEAFQDETFQEKMHLEEDRHLGILGPVIRAEVGDTIQVVFYNRASQPFSMQPHGVFYEKDYEGTVYNDGTFEIYCQAGSHREAGMRAIYNVSQCPGHQATPRQRYQAARIYYIMAEEVEWDYCPDRSWEREWHNQSEKDSYGYIFLSNKDGLLGSRYKKAVFREYTDGTFRIPRPRTGPEEHLGILGPLIKGEVGDILTVVFKNNASRPYSVHAHGVLESTTVWPLAAEPGEVVTYQWNIPERSGPGPNDSACVSWIYYSAVDPIKDMYSGLVGPLAICQKGILEPHGGRSDMDREFALLFLIFDENKSWYLEENVATHGSQDPGSINLQDETFLESNKMHAINGKLYANLRGLTMYQGERVAWYMLAMGQDVDLHTIHFHAESFLYRNGENYRADVVDLFPGTFEVVEMVASNPGTWLMHCHVTDHVHAGMETLFTVFSRTEHLSPLTVITKETEKAVPPRDIEEGNVKMLGMQIPIKNVEMLASVLVAISVTLLLVVLALGGVVWYQHRQRKLRRNRRSILDDSFKLLSFKQ

SEQ ID NO: 64591 - protein, 287 aa, Homo sapiens
MPSDLAKKKAAKKKEAAKARQRPRKGHEENGDVVTEPQVAEKNEANGRETTEVDLLTKELEDFEMKKAAARAVTGVLASHPNSTDVHIINLSLTFHGQELLSDTKLELNSGRRYGLIGLNGIGKSMLLSAIGKREVPIPEHIDIYHLTREMPPSDKTPLHCVMEVDTERAMLEKEAERLAHEDAECEKLMELYERLEELDADKAEMRASRILHGLGFTPAMQRKKLKDFSGGWRMRVALARALFIRPFMLLLDEPTNHLDLDACVWLEEELKTFKRILVLVSHSQDF

SEQ ID NO: 64592 - protein, 279 aa, Homo sapiens
MLPPQKKPWESMAKGLVLGALFTSFLLLVYSYAVPPLHAGLASTTPEAAASCSPPALEPEAVIRANGSAGECQPRRNIVFLKTHKTASSTLLNILFRFGQKHRLKFAFPNGRNDFDYPTFFARSLVQDYRPGACFNIICNHMRFHYDEVRGLVPTNAIFITVLRDPARLFESSFHYFGPVVPLTWKLSAGDKLTEFLQDPDRYYDPNGFNAHYLRNLLFFDLGYDNSLDPSSPQVQEHILEVERRFHLVLLQEYFDESLVLLKDLLCWELEDVLYFKLN

SEQ ID NO: 64593 - protein, 1097 aa, Homo sapiens
MADNLDEFIEEQKARLAEDKAELESDPPYMEMKGKLSAKLSENSKILISMAKENIPPNSQQTRGSLGIDYGLSLPLGEDYERKKHKLKEELRQDYRRYLTQERLKLERNKEYNQFLRGKEESSEKFRQVEKSTEPKSQRNKKPIGQVKPDLTSQIQTSCENSEGPRKDVLTPSEAYEELLNQRRLEEDRYRQLDDEIELRNRRIIKKANEEVGISNLKHQRFASKAGIPDRRFHRFNEDRVFDRRYHRPDQDPEVSEEMDERFRYESDFDRRLSRVYTNDRMHRNKRGNMPPMEHDGDVIEQSNIRISSAENKSAPDNETSKSANQDTCSPFAGMLFGGEDRELIQRRKEKYRLELLEQMAEQQRNKRREKDLELRVAASGAQDPEKSPDRLKQFSVAPRHFEEMIPPERPRIAFQTPLPPLSAPSVPPIPSVHPVPSQNEDLRSGLSSALGEMVSPRIAPLPPPPLLPPLATNYRTPYDDAYYFYGSRNTFDPSLAYYGSGMMGVQPAAYVSAPVTHQLAQPVVNTVGQNELKITSDQVINSGLIFEDKPKPSKQSLQSYQEALQQQIREREERRKKEREEKEEYEAKLEAEMRTYNPWGKGGGGAPLRDAKGNLISHMQTQSSPFARGNVFGEPPTELQIKQQELYKNFLRFQIEEKKQREEAERERLRIAEEKEERRLAEQRARIQQEYEEEQEKKREKEEEQRLKNEEHIRLAEERQKEAERKKKEEEEKYNLQLQHYCERDNLIGEETKHMRQPSPIVPALQNKIASKLQRPPSVDSIIRSFIHESSMSRAQSPPVPARKNQLRAEEEKKNVIMELSEMRKQLRSEERRLQERLLHMDSDDEIPIRKKERNPMDIFDMARHRLQAPVRRQSPKGLDAATFQNVHDFNELKDRDSETRVDLKFMYLDPPRDHHTLEIQQQALLREQQKRLNRIKMQEGAKGAYGETYPAIEDDVLPPPSQLPSARERRRNKWKGLDIDSSRPNVAPDGLSLKSISSVNVDELRVRNEERMRRLNEFHNKPINTDDESSLVDPDDIMKHIGDDGSNSVATEPWLRPGTSETLKRFMAEQLNQEQQQIPGKPGTFTWQGLSTAHG

SEQ ID NO: 64594 - protein, 393 aa, Homo sapiens
MAGSADSYTSRPSDSDVSLEEDREAIRQEREQQAAIQLERAKSKPVAFAVKTNVSYCGALDEDVPVPSTAISFDAKDFLHIKEKYNNDWWIGRLVKEGCEIGFIPSPLRLENIRIQQEQKRGRFHGGKSSGNSSSSLGEMVSGTFRATPTSTAKQKQKVTEHIPPYDVVPSMRPVVLVGPSLKGYEVTDMMQKALFDFLKHRFDGRISITRVTADISLAKRSVLNNPSKRAIIERSNTRSSLAEVQSEIERIFELARSLQLVVLDADTINHPAQLIKTSLAPIIVHVKVSSPKVLQRLIKSRGKSQSKHLNVQLVAADKLAQCPPEMFDVILDENQLEDACEHLGEYLEAYWRATHTTSSTPMTPLLGRNLGSTALSPYPTAISGLQRKLPRD

SEQ ID NO: 64595 - protein, 728 aa, Homo sapiens
GLEQEAAAGGDEEEEEEEEEEEGISALDGDQMELGEENGAAGAADSGPMEEEEAASEDENGDDQGFQEGEDELGDEEEGAGDENGHGEQQPQPPATQQQQPQQQRGAAKEAAGKSSGPTSLFAVTVAPPGARQGQQQAGGDGKTEQKGGDKKRGVKRPREDHGRGYFEYIEENKYSRAKSPQPPVEEEDEHFDDTVVCLDTYNCDLHFKISRDRLSASSLTMESFAFLWAGGRASYGVSKGKVTEKIPVRHLYTKDIDIHEVRIGWSLTTSGMLLGEEEFSYGYSLKGIKTCNCETEDYGEKFDENDVITCFANFESDEVELSYAKNGQDLGVAFKISKEVLAGRPLFPHVLCHNCAVEFNFGQKEKPYFPIPEEYTFIQNVPLEDRVRGPKGPEEKKDCEVVMMIGLPGAGKTTWVTKHAAENPGKYNILGTNTIMDKMMVAGFKKQMADTGKLNTLLQRAPQCLGKFIEIAARKKRNFILDQTNVSAAAQRRKMCLFAGFQRKAVVVCPKDEDYKQRTQKKAEVEGKDLPEHAVLKMKGNFTLPEVAECFDEITYVELQKEEAQKLLEQYKEESKKALPPEKKQNTGSKKSNKNKSGKNQFNRGGGHRGRGGFNMRGGNFRGGAPGNRGGYNRRGNMPQRGGGGGGSGGIGYPYPRAPVFPGRGSYSNRGNYNRGGMPNRGNYNQNFRGRGNNRGYKNQSQGYNQWQQGQFWGQKPWSQHYHQGYY

SEQ ID NO: 64596 - protein, 115 aa, Homo sapiens
MNRLRNAKIYVERAVKQKKIFTIQGCYPVIRCLLRRRGWVEKKMVHRSGPTLLPPQKDLDSSAMGDSDTTEDEDEDEDEEFQPSQLFDFDDLLKFDDLDGTHALMSRMVQNEIPY

SEQ ID NO: 64597 - protein, 863 aa, Homo sapiens
MESTLATSNSATGPVTFSHVFGQQCQLMQAAVQSLHTLNDQISHFIVTKSKALEEDKDPFLPTEKETLKSSMILMRHLLMDAQAKILSMMEDNKQLALRIDGAVQSASQEVTNLRAELTATNRRLAELSGGGGPGPGPGAAASASAAGDSAATNMENPQLGAQVLLREEVSRLQEEVHLLRQMKEMLAKDLEESQGGKSSEVLSATELRVQLAQKEQELARAKEALQAMKADRKRLKGEKTDLVSQMQQLYATLESREEQLRDFIRNYEQHRKESEDAVKALAKEKDLLEREKWELRRQAKEATDHATALRSQLDLKDNRMKELEAELAMAKQSLATLTKDVPKRHSLAMPGETVLNGNQEWVVQADLPLTAAIRQSQQTLYHSHPPHPADRQAVRVSPCHSRQPSVISDASAAEGDRSSTPSDINSPRHRTHSLCNGDSPGPVQKNLHNPIVQSLEDLEDQKRKKKKEKMGFGSISRVFARGKQRKSLDPGLFDDSDSQCSPTRQSLSLSEGEEQMDRLQQVELVRTTPMSHWKAGTVQAWLEVVMAMPMYVKACTENVKSGKVLLSLSDEDLQLGLGVCSSLHRRKLRLAIEDYRDAEAGRSLSKAAELDHHWVAKAWLNDIGLSQYSQAFQNHLVDGRMLNSLMKRDLEKHLNVSKKFHQVSILLGIELLYQVNFSREALQERRARCETQNIDPVVWTNQRVLKWVRDIDLKEYADNLTNSGVHGAVLVLEPTFNAEAMATALGIPSGKHILRRHLAEEMSAVFHPANSTGIREAERFGTPPGRASSVTRAGKEENSSGLKYKAGRLPLGKIGRGFSSKDPDFHDDYGSLQNEDCGDDDPQSRLEQCRLEGYNSLEVTNV

SEQ ID NO: 64598 - protein, 200 aa, Homo sapiens
  MOD_RES (1)..(1): Any amino acid
XHMLSKVGMWDFDIFLFDRLTNGNSLVTLLCHLFNTHGLIHHFKLDMVTLHRFLVMVQEDYHSQNPYHNAVHAADVTQAMHCYLKEPKLASFLTPLDIMLGLLAAAAHDVDHPGVNQPFLIKTNHHLANLYQVREPNLEPATVWSIALGPVLKPESCPWRKPCFRVLEVQRRMKHNLCPQKFVQTQMLKMSKIQANLIPV

SEQ ID NO: 64599 - protein, 98 aa, Homo sapiens
MWTLVGRGWGCARALAPRATGAALLVAPGPRSAPTLGAAPESWATDRLYSSAEFKGQLIKQRIISRFLINCKWNEKEESLLKHRQHLSFTIVKESSTF

SEQ ID NO: 64600 - protein, 65 aa, Homo sapiens
MADPEELQVSSPPPPPPSSPSSSDASAASSPGGPVSLGWPVPSRSSGPTVDQLEEVELQIGDPFH

SEQ ID NO: 64601 - protein, 80 aa, Homo sapiens
MRLTRCQAALAAAITLNLLVLFYVSWLQHQPRNSRARGPRRASAAGPRVTVLVREFEAFDNAVPELVDSFLQQDPAQPVV

SEQ ID NO: 64602 - protein, 171 aa, Homo sapiens
AERVETFLGWETCNRYELRSGAGQPLGQAAEESNCCARLCCGARRPLRVRLADPGDREVLRLLRPLHCGCSCCPCGLQEMEVQAPPGTTIGHVLQTWHPFLPKFSIQDADRQTVLRVVGPCWTCGCGTDTNFEFPLDLDVRVKAVLLGATFLIDYMFFEKRGGAGPSAVTS

SEQ ID NO: 64603 - protein, 192 aa, Homo sapiens
  MOD_RES (1)..(1): Any amino acid
XRLLLMKKSAKLNLQQLELIQTIDNIVFFPATSKKEDAENLAAAQRDAVDFDVRVDTQDQGMYRFLTSQQLFKLLDCLLESHRFAKAFNSNNEQRTALWKAGFKGKSKPNLLKQETSSLACGLRILFRMYMDESRVSAWEEVQQRLLNVCSEALSYFLTLTSESHREAWTNLLLLFLTKVLKISDNRTKRTL

SEQ ID NO: 64604 - protein, 241 aa, Homo sapiens
MAVCIAVIAKENYPLYIRSTPTENELKFHYMVHTSLDVVDEKISAMGKALVDQRELYLGLLYPTEDYKVYGYVTNSKVKFVMVVDSSNTALRDNEIRSMFRKLHNSYTDVMCNPFYNPGDRIQSRWALLSVSCHLLSVGHALPFWLPKCNHLENKGGKIFLSYEHHPPRAEVLKPQSPVSPHQLLHRSPAHKVDRVCVVWGVELAHLASQVCPVGTWGTCRTQGQAHGQWLSGITRPFVAT

SEQ ID NO: 64605 - protein, 184 aa, Homo sapiens
LGRGAFEAMAHVVSLVHRSLEAAQDARGHCPQLAAYVHYAFRLPGTEPSLPDGAPPVTVQAATLARGSGRPASLYLARSKSISSSNPDLAVAPGSVDDEVSRILASKGIDRSHSWVNSAYAPGGSKAVLRRAPPYCGADPRQAIDCNSSRASSYLEGSSSAPPATQLRPTVQKLLHEELALQWV

SEQ ID NO: 64606 - protein, 102 aa, Homo sapiens
MARELYHEEFARAGKQAGLQVWRIEKLELVPVPQSAHGDFYVGDAYLVLHTAKTSRGFTYHLHFWLGIGKSRNKNRPGMVAHTCNPQQFRRPKPEDCLRPGV

SEQ ID NO: 64607 - protein, 183 aa, Homo sapiens
  MOD_RES (1)..(1): Any amino acid
XLLGDNEKMNLSDVELIPLPLEPQVKIRGIIPETATLFKSALMPAQLFFKTEDGGKYPVIFKHGDDLRQDQLILQIISLMDKLLRKENLDLKLTPYKVLATSTKHGFMQFIQSVPVAEVLDTEGSIQNFFRKYAPSENGPNGISAEVMDTYVKSCAGYCVITYILGVGDRHLDNLLLTKTGNN

SEQ ID NO: 64608 - protein, 224 aa, Homo sapiens
MHHCKRYRSPEPDPYLSYRWKRRRSYSREHEGRLRYPSRREPPPRRSRSRSHDRLPYQRRYRERRDSDTYRCEERSPSFGEDYYGPSRSRHRRRSRERGPYRTRKHAHHCHKRRTRSCSSASSRSQQSSKRSSRSVEDDKEGHLVCRIGDWLQERYEIVGNLGEGTFGKVVECLDHARGKSQVALKIIRNVGKYREAARLEINVLKKIKEKDKENKFLCVLMSD

SEQ ID NO: 64609 - protein, 163 aa, Homo sapiens
RGEMPRNLREYMVEKIYPQIPDHLKEPFLEATDNSHLRSMPASFLPPSSVKKRGVLLLGDAYNMRHPLTGGGMTVAFKDIKLWRKLLKGIPDLYDDAAIFEAKKSFYWARKTSHSFVVNILAQALYELFSATDDSLHQLRKACFLYFKLGGECVAGPVGLLSV

SEQ ID NO: 64610 - protein, 150 aa, Homo sapiens
MISFCPDCGKSIQAAFKFCPYCGNSLPVEEHVGSQTFVNPHVSSFQDGDSSESEDTLSSSERSKGSGSRPPTPKSSPQKTRKSPQVTRGSPQKTSCSPQKTRQSPQTLKRSRVTTSLEALPTGTVLTDKSGRQWKLKSFQTRDNQGILYE

SEQ ID NO: 64611 - protein, 19 aa, Homo sapiens
NAHTVKSRLEELDERWLME

SEQ ID NO: 64612 - protein, 194 aa, Homo sapiens
  MOD_RES (1)..(1): Any amino acid
XLLRRRSGREPVKPEIAQVGAKYQEAQGPGLLVVLFALVRANPPANVTWIDQDGPVTVNTSDFLVLDAQNYPWLTNHTVQLQLRSLAHNLSVVATNDVGVTSASLPAPGPSRHPSLISSDSNNLKLNNVRLPRENMSLPSNLQLNDLTPDSRAVKPADRQMAQNNSRPELLDPEPGGLLTSQGFIRLPVLGYIY

SEQ ID NO: 64613 - protein, 140 aa, Homo sapiens
MLLPLLLLLPMCWAVEVKRPRGVSLTNHHFYDESKPFTCLDGSATIPFDQVNDDYCDCKDGSDEPGTAACPNGSFHCTNTGYKPLYIPSNRVNDGVCDCCDGTDEYNSGVICENTCKEKGRKERESLQQMAEVTREGFRL

SEQ ID NO: 64614 - protein, 250 aa, Homo sapiens
MATELEYESVLCVKPDVSVYRIPPRASNRGYRASDWKLDQPDWTGRLRITSKGKTAYIKLEDKVSGELFAQAPVEQYPGIAVETVTDSSRYFVIRIQDGTGRSAFIGIGFTDRGDAFDFNVSLQDHFKWVKQESEISKESQEMDARPKLDLGFKEGQTIKLCIGNITNKKGGASKPRTARGGGLSLLPPPPGGKVTIPPPSSSVAISNHVTPPPIPKSNHGGSDAATESHYVAQAGLELLDFSDPPALAP

SEQ ID NO: 64615 - protein, 138 aa, Homo sapiens
MALPPGPAALRHTLLLLPALLSSGWGELEPQIDGQTWAERALRENERHAFTCRVAGGPGTPRLAWYLDGQLQEASTSRLLSVGGEAFSGGTSTFTVTAHRAQHELNCSLQDPRSGRSANASVILNVQFKPEIAQVGAK

SEQ ID NO: 64616 - protein, 305 aa, Homo sapiens
MERMLPLLALGLLAAGFCPAVLCHPNSPLDEENLTQENQDRGTHVDLGLASANVDFAFSLYKQLVLKAPDKNVIFSPLSISTALAFLSLGAHNTTLTEILKGLKFNLTETSEAEIHQSFQHLLRTLNQSSDELQLSMGNAMFVKEQLSLLDRFTEDAKRLYGSEAFATDFQDSAAAKKLINDYVKNGTRGKITDLIKDLDSQTMMVLVNYIFFKAKWEMPFDPQDTHQSRFYLSKKKWVMVPMMSLHHLTIPYFRDEELSCTVVELKYTGNASALFILPDQDKMEEVEAMLLPETLKRWRDSLEF

SEQ ID NO: 64617 - protein, 378 aa, Homo sapiens
MSTVEEDSDTVTVETVNSVTLTQDTEGNLILHCPQNEADEIDSEDSIEPPHKRLCLSSEDDQSIDDSTPCISVVALPLSENDQSFEVTMTATTEVADDEVTEGTVTQIQILQNEQLDEISPLGNEEVSAVSQAWFTTKEDKDSLTNKGHKWKQGMWSKEEIDILMNNIERYLKARGIKDATEIIFEMSKDERKDFYRTIAWGLNRPLFAVYRRVLRMYDDRNHVGKYTPEEIEKLKELRIKHGNDWATIGAALGRSASSVKDRCRLMKDTCNTGKWTEEEEKRLAEVVHELTSTEPGDIVTQGVSWAAVAERVGTRSEKQCRSKWLNYLNWKQSGGTEWTKEDEINLILSGFSAHAKYQIEGVETEVLSISTEQDSRT

SEQ ID NO: 64618 - protein, 164 aa, Homo sapiens
MFCSGRKWVAEATICTKLMKREKRRMGKRRAKKAKREEKKKGGERRRNEKRGNQMKRMCERKKYETDLEDQDIMGAFLDKPKMEKHNAQGQGNGLRYGLSSMQGKSRQHECDFDLFSKCTQSIARSSEEGGRVGQVPGMQSRRNHKEAGGRRPRLSPCDAHISE

SEQ ID NO: 64619 - protein, 47 aa, Homo sapiens
MASKRKSTTPCMIPVKTVVLQDASMEAQPAETLPEGPQQDLPPEASA

SEQ ID NO: 64620 - protein, 82 aa, Homo sapiens
MERVGCTLTTTYAHPRPTPTNFLPAISTMASSYRDRFPHSNLTHSLSLPWRPSTYYKVASNSPSVAPYCTRSQRVSENTMLP

SEQ ID NO: 64621 - protein, 23 aa, Homo sapiens
ELLQLLPPDSPTRWLPGTWLEPC

SEQ ID NO: 64622 - protein, 239 aa, Homo sapiens
MQKGLKDNFADVQVSVVDCPDLTKEPFTFPVKGICGKTRIAEVGGVPYLLPLVNQKKVYDLNKIAKEIKLPGAFILGAGAGPFQTLGFNSEFMPVIQTESEHKPPVNGSYFAHVNPADGGCLLEKYSEKCHDFQCALLANLFASEGQPGKVIEVKAKRRTGPLNFVTCMRETLEKHYGNKPIGMGGTFIIQKGKVKSHIMPAEFSSCPLNSDEEVNKWLHFYEMKAPLVCLPVFVSRDP

SEQ ID NO: 64623 - protein, 136 aa, Homo sapiens
  MOD_RES (1)..(1): Any amino acid
XPFPVLHLIEDLRLALEMLELPQERAALLSQIPGPTAAYIKEWFEESLSQVNHHSAASNETYQERLARLEGDKESLILQVSVLTDQVEAQGEKIRDLEVCLEGHQVKLNAAEEMLQQICNLVLRFCMLNIIFFPFK

SEQ ID NO: 64624 - protein, 561 aa, Homo sapiens
MTVLEITLAVILTLLGLAILAILLTRWARCKQSEMYISRYSSEQSARLLDYEDGRGSRHAYSTQSGNLCFQRSKRDYTPSTNSLVSMASKFSLGQTELILLLMCFILALSRSSIGSIKCLQTTEEPPSRTAGAMMQFTAPIPGATGPIKLSQKTIVQTPGPIVQYPGSNAGPPSAPRGPPMAPIIISQRTARIPQVHTMDSSGKITLTPVVILTGYMDEELAKKSCSKIQILKCGGTARSQNSREENKEALKNDIIFTNSVESLKSAHIKEPEREGKGTDLEKDKIGMEVKVDSDAGIPKRQETQLKISEMSIPQGQGAQIKKSVSDVPRGQESQVKKSESGVPKGQEAQVTKSGLVVLKGQEAQVEKSEMGVPRRQESQVKKSQSGVSKGQEAQVKKRESVVLKGQEAQVEKSELKVPKGQEGQVEKTEADVPKEQEVQEKKSEAGVLKGPESQVKNTEVSVPETLESQVKKSESGVLKGQEAQEKKESFEDKGNNDKEKERDAEKDPNKKEKGDKNTKGDKGKDKVKGKRESEINGEKSKGSKRAKANTGRKYNKKVEE
